(19) United States
(12) Patent Application Publication
(10) Pub. No.: US 2014/0057251 A1
(43) Pub. Date: Feb. 27, 2014

(54) Cannabis Genomes and Uses Thereof

(71) Applicant: Kevin McKernan, Marblehead, MA (US)

(72) Inventor: Kevin McKernan, Marblehead, MA (US)

(73) Assignee: Medicinal Genomics Corporation, Woburn, MA (US)

(21) Appl. No.: 13/588,935

(22) Filed: Aug. 17, 2012

Related U.S. Application Data
(60) Provisional application No. 61/600,436, filed on Feb. 17, 2012.
(60) Provisional application No. 61/575,329, filed on Aug. 18, 2011.

(51) Int. Cl. C07K 16/40; C12Q 1/68; G01N 33/573; C12N 9/88

(52) U.S. Cl. CPC C07K 16/40; C12N 9/88; C12Q 1/68; G01N 33/573
USPC 435/6.11; 536/23.2; 530/387.1; 435/232; 435/320.1; 435/419; 435/7.4

(57) ABSTRACT

Using the efficiency of next generation sequencing, a draft de novo reference sequence for the Cannabis (C.) Sativa and C. Indica genomes has been generated as well as four full length contiguous sequences with homology to THCA and CBDA synthases and 10 partially homologous contigs with truncated ORFs. In particular aspects the invention is directed to an (one or more) isolated sequence (e.g., nucleic acid sequence, DNA, RNA, genomic sequence, polypeptide) of a Cannabis genome and uses thereof.

### RELATED APPLICATIONS

[0001] This application claims the benefit of U.S. Provisional Application No.61/600,436, filed on Feb. 17, 2012, and U.S. Provisional Application No. 61/575,329 filed on Aug. 18, 2011. The entire teachings of the above applications are incorporated herein by reference.

### INCORPORATION BY REFERENCE OF MATERIAL IN ASCII TEXT FILE

[0002] This application contains sequences (SEQ ID NO: 1 and SEQ ID NO: 2) and information concerning the sequences (annotated genome and single nucleotide polymorphisms) that are contained on two duplicate copies (Copy 1 and Copy 2) of four (4) compact disks all of which are herein incorporated by reference. The contents of Copy 1 and Copy 2 for each of the three compact disks are identical.

[0003] Each disk, which was filed in U.S. Provisional Application No. 61/575,329 on Aug. 18, 2011 and to which a benefit of priority is claimed herein, is identified as follows:

### Disk 1 of 4

[0004] Copy 1 and Copy 2 of Disk 1 of 4 each contain the following:
[0005] File name:
[0006] App-Indica_SEQ_ID_No2.txt; created Aug. 18, 2011; 332,049 KB in size

### Disk 2 of 4

[0007] Copy 1 and Copy 2 of Disk 2 of 4 each contain the following:
[0008] File name:
[0009] App-Sativa_SEQ_ID_No1.txt, created Aug. 18, 2011; 298,667 KB in size
[0010] GenomeAnnotationForSativaGenome.txt created Aug. 18, 2011; 16,367 KB in size.

### Disk 3 of 4

[0011] Copy 1 and Copy 2 of Disk 3 of 4 each contain the following:
[0012] File name:
[0013] Mapped_{—}Sativa_to_{—}Indica_for_SNP.txt; created Aug. 18, 2011; 418,535 KB in size.

### Disk 4 of 4

[0014] Copy 1 and Copy 2 of Disk 4 of 4 each contain the following:
[0015] File name: App-Sativa_SEQ_ID_No1 PDF 1 of 2.pdf; created Aug. 18, 2011; 95,742 KB in size.
[0016] File name: App-Sativa_SEQ_ID_No1 PDF 2 of 2.pdf; created Aug. 18, 2011; 88,621 KB in size.
[0017] File name: App-Indica_SEQ_ID_No2 PDF 1 of 2.pdf; created Aug. 18, 2011; 82,952 KB in size.
[0018] File name: App-Indica_SEQ_ID_No2 PDF 2 of 2.pdf; created Aug. 18, 2011; 102,174 KB in size.

### BACKGROUND OF THE INVENTION

[0019] The non-psychoactive cannabinoid, cannabidiol has recently been shown to promote apoptosis in tumor cells. Eighty four (84) other cannabinoids have been measured in Cannabis sativa but the genetics governing the synthesis of all of these compounds are only partially known.

### SUMMARY OF THE INVENTION

[0020] Described herein is a de novo assembly of the medicinal plants Cannabis Sativa and Cannabis Indica. These diploid assemblies range in size from 280 Mb to 303 Mb, are 67% AT, and have mitochondrial genomes up to 366 Kb. Of particular interest is a mPIF transposon mediated copy number variation in the synthase genes responsible for cannabigerol acid (CBGA) conversion to tetrahydrocannabinol (THC). Also evident is high diversity in the limonene and alpha pinene synthases. In total, the data provided herein increases the available knowledge on the sequence on this plant over 70,000 fold and over 98.6% of the Cannabis sequence in Genbank has been covered with the 300 Mb assemblies described herein. These data provide selective breeding strategies to maximize medicinal expression and attenuate psychoactive content while also providing a tool for genetic prediction of cannabinoid expression and chemotypes at seedling stages.

[0021] Accordingly, in one aspect, the invention is directed to a nucleic acid comprising a nucleotide sequence that has about 82% to SEQ ID NO: 3, SEQ ID NO: 5, SEQ ID NO: 7 or SEQ ID NO: 9 or a portion thereof that encodes a biologically active cannabinoid synthase, or a complement thereof. In aparticular aspect, the invention is directed to nucleic acid comprising SEQ ID NO: 3, SEQ ID NO: 5, SEQ ID NO: 7 or SEQ ID NO: 9 or a portion thereof that encodes a biologically active cannabinoid synthase, or a complement thereof.

[0022] In another aspect, the invention is directed to a polypeptide comprising an amino acid sequence that has about 67% identity to SEQ ID NO: 4, SEQ ID NO: 6, SEQ ID NO: 8 or SEQ ID NO: 10 or a biologically active portion thereof, such as a biologically active portion that functions as a cannabinoid synthase. In a particular aspect, the invention is directed to a polypeptide comprising SEQ ID NO: 4, SEQ ID NO: 6, SEQ ID NO: 8 or SEQ ID NO: 10 or a biologically active portion thereof, such as a biologically active portion that functions as a cannabinoid synthase.

[0023] Other aspects of the invention include an antibody that specifically binds one or more polypeptides described herein. Also encompasses by the inventions are vectors comprising the nucleic acid sequences provided herein and cells comprising the vectors.

[0024] In another aspect, the invention is directed to a method of producing a Cannabinoid synthase comprising maintaining a cell comprising a vector comprising the nucleic acid sequences provided herein under conditions in which the Cannabinoid synthase gene is produced. The method can further comprise isolating the Cannabinoid synthase produced by the cell. In another aspect, the invention is directed to a Cannabinoid synthase gene produced by the method.

[0025] In yet another aspect, the invention is directed to a method of detecting a Cannabinoid in a sample comprising detecting the nucleic acid sequences described herein in the sample, wherein if the nucleic acid is detected, then a Cannabinoid is detected in the sample. The invention also encompasses a method of detecting Cannabis in a sample comprising detecting the polypeptides provided herein, wherein if the polypeptide is detected, then a Cannabinoid is detected in the sample.

[0026] In still other aspects, the invention is directed to a method of detecting one or more cannabinoid genes in a Cannabis plant. The method comprises contacting all or a portion of a genomic sequence of the Cannabis plant with one or more primers that are complementary to SEQ ID NO: 3, SEQ ID NO: 5, SEQ ID NO: 7, SEQ ID NO: 9 or a combination thereof, thereby producing a reaction mixture. The reaction mixture is maintained under conditions in which one or more sequences in the genomic sequence of the Cannabis plant that are complementary to one or more of the primers hybridize to the one or more primers. The one or more sequences that hybridize to the one or more primers are amplified, thereby producing one or more amplicons; and all or a portion of the sequence of the one or more amplicons is determined, thereby detecting one or more cannabinoid genes in the Cannabis plant. The method can further comprise quantifying the one or more Cannbinoid genes; measuring the Cannabinoid messenger ribonucleic acid (mRNA) of the plant, detecting whether fungal nucleic acid, bacterial nucleic acid, or a combination thereof is present in the plant; quantifying the fungal nucleic acid, bacterial nucleic acid, or a combination thereof if fungal nucleic acid, bacterial nucleic acid, or a combination thereof is present; and/or comparing the quantified fungal nucleic acid, bacterial nucleic acid, or a combination thereof to the quantified cannabinoid nucleic acid.

### BRIEF DESCRIPTION OF THE DRAWINGS

[0027] FIG. 1 shows the preliminary 2× assembly of 750 bp 454 GS FLX+ reads in the THC synthase gene.

[0028] FIGS. 2A-2B show a hairpin sequence (SEQ ID NO: 11) of a putative miniature P element inverted repeat family (mPIF) transposon sequence 5′ to the gene in the Sativa assembly.

[0029] FIG. 3 shows the target site for PIF insertion (Zhange et al., PNAS, 98(22):12572-12577 (2001) and the cannabis sativa gene for tetrahydrocannabinolic acid synthase (SEQ ID NO: 4).

[0030] FIG. 4 shows a Multiple Sequence Alignment and amino acid confirmation of MGC-s3 or LA_Contig#34396 vs PK contig #PK_{—}23203.1 (LA_contig34396_ORF_THCAS_like_{—}3 (SEQ ID NO: 6); PK23203.1_THCAS_like_{—}3 (SEQ ID NO: 16); CD_contig27237_ORF_THCAS_like_{—}3 (SEQ ID NO: 17); THC-Synthase_translation (SE QID NO: 18); Consensus (SEQ ID NO: 19)).

[0031] FIGS. 5A-5C shows a Multiple Sequence Alignment and conservation charts of peptide sequences from LAC, CD, PK and Mexican or “CSA” sequences. One can see divergent 5′ and 3′ ends with internal I→T changes from LAC & PK to CD&CSA at position 287 (FIG. 5C). Several internal amino acid changes can be seen with Sativa to Indica alignments in FIG. 5B. LAC & PK are Indica dominant and CD&CSA are Sativa dominant.

[0032] (FIG. 5A: LA_contig20041_ORF_THCAS_llike_{—}1 (SEQ ID NO: 20); PK20093.1_THCAS_like_{—}1 (SEQ ID NO: 21); THC_Synthase_translation (SEQ ID NO: 22); Consensus (SEQ ID NO: 23))

[0033] (FIG. 5B: LA_contig32071_ORF_THCAS_like_{—}2 (SEQ ID NO: 24); CD_contig32295_ORF_THCAS_like_{—}2 (SEQ ID NO: 25); PK09375.1_THCAS_like_{—}2 (SEQ ID NO: 26); THC_Synthase_translation (SEQ ID NO: 22); Consensus (SEQ ID NO: 27))

[0034] (FIG. 5C: LA_contig20817_ORF_THCAS_like_{—}4 (SEQ ID NO: 28); PK11708.1_THCAS_like_{—}4; THC_synthase-translation (SE QID NO: 22); Consensus (SEQ ID NO: 30))

[0035] FIG. 5D shows a Nucleic Acid multiple sequence alignments and conservation charts of many of the other THC-Like sequences in the LA confidential assembly with homology to THCA synthase, Purple Kush “PK” and Chemdawg “CD” closest contigs.

[0036] (THC Synthase (SEQ ID NO: 31); LA_contig-60432 (SEQ ID NO: 32): LA_contig_{—}20041 (SEQ ID NO: 33); LA_contig_{—}23755 (SEQ ID NO: 34); CBD_Synthase (SEQ ID NO: 35); LA_contig_{—}27956 (SEQ ID NO: 36); LA_contig_{—}46083 (SEQ ID NO: 37); LA_contig_{—}24266 (SEQ ID NO: 38); LA_contig_{—}86540 (SEQ ID NO: 39); LA_contig_{—}66523 (SEQ ID NO: 40); CD_contig_{—}27237_rev (SEQ ID NO: 41); PK_RNA_{—}23203.1 (SEQ ID NO: 42); LA_contig_{—}54324 (SEQ ID NO: 43); LA_contig_{—}163104 (SEQ ID NO: 44); Consensus (SEQ ID NO: 45))

[0037] FIG. 6A-6D show the nucleotide sequences of contig #20041 (SEQ ID NO: 3), contig #34396 (SEQ ID NO: 5), contig #32071 (SEQ ID NO: 7) and contig #20817 (SEQ ID NO: 9).

[0038] FIG. 7A-7D show the amino acid sequences of contig #20041 (SEQ ID NO: 4), contig #34396 (SEQ ID NO: 6), contig #32071 (SEQ ID NO: 8) and contig #20817 (SEQ ID NO: 10).

### DETAILED DESCRIPTION OF THE INVENTION

[0039] In recent years the pharmacology related to medicinal cannabis use has been transformed with the discovery of the human endocannabinoid pathways and the endogenous human neurotransmitter Anandamide (Devane et al. 1992, Science, 258(5090):1946-1949; Fride and Mechoulam 1993, Eur J Pharmacol, 231(2):401-409). Two human G-Protein coupled receptors (GPCRs) known as CB1 and CB2 have been extensively characterized and are encoded by CNR1 and CNR2 genes on chromosome 6 and 1 respectively. Three other GPCRs (GPR55, GPR18 and GPR119) are showing evidence as other potential endocannabinoid receptors (Begg et al. 2005, Pharmacol Ther, 106(2):133-145; Brown 2007, Br J Pharac, 152(2):567-575). Eighty-five phyto-cannabinoids have been discovered in the Cannabis plant (El-Alfy et al., Pharmacol Biochem Behav 95(4):434-442). Only one is known to be independently psychoactive (tertrahydrocannabinol or THC). Non-psychoactive cannabinoids like cannabidiol (CBD) and cannabidiolic acid (CBDA) have shown impressive medical benefits as it pertains to tumor specific apoptosis in 9 different cancer types (Guzman 2003, Nat Rev Ca, 3(10):745-755), pain management via cox-2 inhibition (Takeda et al. 2008, Drug Meatb Dispos 36(9):1917-1921), effectiveness with antiemesis in HIV or chemotherapy related nausea and improved muscle spasm control in patients with MS (Sarfaraz et al. 2008, Ca Res 68(2):339-342; Lakhan and Rowland 2009, BMC Neurol, 9:59). In addition the FDA has approved the use of Dronabinol and Nabilone for glaucoma. Combined with an extremely low therapeutic index, these reported medical benefits have resulted in a “compassionate use exemption” with 16 states and the District of Columbia decriminalizing medical use of cannabis in the United States and pharmaceutical companies actively investing in cannabinoid research. This has resulted in approved cannabinoid therapeutics such as Marinol™ and Sativex™.

[0040] Due in part to recreational demand, the cannabis plant has been selectively bred in the last 30 years to express very high THC levels (above 20% in the flower weight) (Miller Coyle et al. 2003, Croat Med J, 44(3):315-321). This has come at the cost of most plants available today having very low CBD content (below 1% flower weight) and considerable interest in the genetics controlling chemotype (Kojoma et al. 2006). To this end, De Meijer et al have demonstrated that the cannabinoid contents are under strict genetic control and can be predicted from DNA sequence information before the plant has expressed active compounds (de Meijer et al. 2003, Genetics, 163(1):335-346). The De Meijer study utilized PCR and Sanger sequencing to genotype CBD synthase and THC synthase in many drug and fiber strains but has stimulated many questions in regards to the genetics controlling the other 83 cannabinoids.

[0041] In addition to cannabinoids, the plant is reported to have up to 140 terpenes (Ross and ElSohly 1996, J Natl Prod, 59(1):49-51) (ElSohly 2007, Marijuana abd the cannabinoids.Human Press, Totowa, N.J.) at least one of which (Beta-caryophyllene) is reported to be a volatile CB2 receptor agonist (Gertsch et al. 2008, Proc Natl Acad Sci, USA, 105(26):9099-9104) with anti-inflammatory effects.

[0042] As described herein, using the efficiency of next generation sequencing, a draft de novo reference sequence for the Cannabis (C.) Sativa and C. Indica genomes has been generated. This provides for the sequencing and resequencing of many more cannabis cultivars to better understand the diversity of the genes encoding the cannabinoid and terpene synthesis or the “cannabinome”. In addition, as shown herein, the LAC Indica assembly herein had four full length contiguous sequences, referred to herein as “contigs” (Contigs #20041 (SEQ ID NOS: 3 and 4), #32071 (SEQ ID NOS: 7 and 8), #34396 (SEQ ID NOS: 5 and 6), #20817 (SEQ ID NOS: 9 and 10) with homology to THCA and CBDA synthases and 10 partially homologous contigs with truncated ORFs. The full length contig, in particular, #34396, 81% sequence similarity to both, was highly expressed in the PK Indica RNA-Seq data but was absent from the PK Indica Cansat3 genomic assembly.

[0043] Accordingly, in one aspect the invention is directed to an (one or more) isolated sequence (e.g., nucleic acid sequence, DNA, RNA, genomic sequence, polypeptide, protein) of a Cannabis genome.

[0044] In a particular aspect, the invention is directed to an isolated nucleic acid comprising SEQ ID NO: 1 (Cannabis sativa genome). In another particular aspect, the invention is directed to an isolated nucleic acid comprising SEQ ID NO: 2 (Cannabis indica genome). In other aspects, the invention is directed to an isolated sequence that has about (at least about, at least) 80%, 81%, 82%, 83%, 84%, 85%, 86%, 97%, 88%, 89%, 90%, 91%, 92%, 93%, 94%, 95%, 96%, 97%, 98%, of 99% to SEQ ID NO:1 and SEQ ID NO: 2.

[0045] In another aspect, the invention is directed to a nucleic acid comprising a nucleotide sequence that has about 82% to SEQ ID NO: 3, SEQ ID NO: 5, SEQ ID NO: 7 or SEQ ID NO: 9 or a portion thereof that encodes a biologically active cannabinoid synthase, or a complement thereof. In a particular aspect, the invention is directed to nucleic acid comprising SEQ ID NO: 3, SEQ ID NO: 5, SEQ ID NO: 7 or SEQ ID NO: 9 or a portion thereof that encodes a biologically active cannabinoid synthase, or a complement thereof. In other aspects, the invention is directed to an isolated sequence that has about (at least about; at least) 82%, 83%, 84%, 85%, 86%, 97%, 88%, 89%, 90%, 91%, 92%, 93%, 94%, 95%, 96%, 97%, 98%, of 99% to SEQ ID NOS: 3, 5, 7 or 9.

[0046] In another aspect, the invention is directed to a polypeptide comprising an amino acid sequence that has about 67% identity to SEQ ID NO: 4, SEQ ID NO: 6, SEQ ID NO: 8 or SEQ ID NO: 10 or a biologically active portion thereof, such as a biologically active portion that functions as a cannabinoid synthase. In a particular aspect, the invention is directed to a polypeptide comprising SEQ ID NO: 4, SEQ ID NO: 6, SEQ ID NO: 8 or SEQ ID NO: 10 or a biologically active portion thereof, such as a biologically active portion that functions as a cannabinoid synthase. In other aspects, the invention is directed to an isolated sequence that has about (at least about; at least) 67%, 68%, 69%, 70%, 71%, 72%, 73%, 74%, 75%, 76%, 77%, 78%, 79%, 80%, 81%, 82%, 83%, 84%, 85%, 86%, 97%, 88%, 89%, 90%, 91%, 92%, 93%, 94%, 95%, 96%, 97%, 98%, of 99% to SEQ ID NOS: 3, 5, 7 or 9.

[0047] As will be apparent to those of sill in the art, all or a portion of a biologically active cannabinoid synthase is a full length or portion of a full length cannabinoid synthase that has one or more activities of a cannabinoid synthase (e.g., atalyses the oxidocyclization of cannabigerolic acid to cannabidiolic acid).

[0048] Other aspects of the invention include an antibody that specifically binds one or more polypeptides described herein. antibody or antigen binding fragment thereof that specifically binds to all or a portion of polypeptides having the amino acid sequence of SEQ ID NOs: 4, 6, 8, and/or 10. That is, the antibody can bind to all of the polypeptide of from about 8 amino acids to about 450 amino acids of the polypeptide. In particular embodiments, the antibody can bind to about 10, 25, 50, 75, 100, 125, 150, 175, 200, 225, 250, 275, 300, 325, 350, 375, 400, or 425 amino acids of the polypeptide.

[0049] As used herein, the term “specific” when referring to an antibody-antigen interaction, is used to indicate that the antibody can selectively bind to the polypeptide. In one embodiment, the antibody inhibits the activity of the polypeptide. An antibody that is specific for polypeptides described herein is a molecule that selectively binds to the polypeptide but does not substantially bind to other molecules in a sample, e.g., in a biological sample a Cannabis plant. The term “antibody,” as used herein, refers to an immunoglobulin or a part thereof, and encompasses any polypeptide comprising an antigen-binding site regardless of the source, method of production, and other characteristics. The term includes but is not limited to polyclonal, monoclonal, monospecific, polyspecific, humanized, human, single-chain, chimeric, synthetic, recombinant, hybrid, mutated, conjugated and CDR-grafted antibodies. The term “antigen-binding site” refers to the part of an antibody molecule that comprises the area specifically binding to or complementary to, a part or all of an antigen. An antigen-binding site may comprise an antibody light chain variable region (VL) and an antibody heavy chain variable region (VH). An antigen-binding site may be provided by one or more antibody variable domains (e.g., an Fd antibody fragment consisting of a VH domain, an Fv antibody fragment consisting of a VH domain and a VL domain, or an scFv antibody fragment consisting of a VH domain and a VL domain joined by a linker).

[0050] The various antibodies and portions thereof can be produced using known techniques (Kohler and Milstein, Nature 256:495-497 (1975); Current Protocols in Immunology, Coligan et al., (eds.) John Wiley & Sons, Inc., New York, NY (1994); Cabilly et al., U.S. Pat. No. 4,816,567; Cabilly et al., European Patent No. 0,125,023 B1; Boss et al., U.S. Pat. No. 4,816,397; Boss et al., European Patent No. 0,120,694 B1; Neuberger, M. S. et al., WO 86/01533; Neuberger, M. S. et al., European Patent No. 0,194,276 B1; Winter, U.S. Pat. No. 5,225,539; Winter, European Patent No. 0,239,400 B1; Queen et al., European Patent No. 0 451 216 B1; and Padlan, E. A. et al., EP 0 519 596 A1; Newman, R. et al., BioTechnology, 10: 1455-1460 (1992); Ladner et al., U.S. Pat. No. 4,946,778; Bird, R. E. et al., Science, 242: 423-426 (1988)).

[0051] Also encompasses by the inventions are vectors comprising the nucleic acid sequences provided herein and cells comprising the vectors. As will be apparent to those of skill in the art a number of cells and/or vectors can be used in conjunction with the nucleic acid sequences provided herein. For example, a suitable plant cell includes a Cannabis plant cell and a suitable vector includes an agrobacterium vector.

[0052] In another aspect, the invention is directed to a method of producing a Cannabinoid synthase comprising maintaining a cell comprising a vector comprising the nucleic acid sequences provided herein under conditions in which the Cannabinoid synthase gene is produced. The method can further comprise isolating the Cannabinoid synthase produced by the cell. In another aspect, the invention is directed to a Cannabinoid synthase gene produced by the method.

[0053] In yet another aspect, the invention is directed to a method of detecting a Cannabinoid in a sample comprising detecting the nucleic acid sequences described herein in the sample, wherein if the nucleic acid is detected, then a Cannabinoid is detected in the sample. The invention also encompasses a method of detecting Cannabis in a sample comprising detecting the polypeptides provided herein, wherein if the polypeptide is detected, then a Cannabinoid is detected in the sample. The sample can be a plant sample (e.g., root tissue, leaf tissue) and/or a mammalian sample such as tissue (e.g. skin, hair), or fluid (e.g., urine, blood).

[0054] In still other aspects, the invention is directed to a method of detecting one or more cannabinoid genes in a Cannabis plant. The method comprises contacting all or a portion of a genomic sequence of the Cannabis plant with one or more primers that are complementary to SEQ ID NO: 3, SEQ ID NO: 5, SEQ ID NO: 7, SEQ ID NO: 9 or a combination thereof, thereby producing a reaction mixture. The reaction mixture is maintained under conditions in which one or more sequences in the genomic sequence of the Cannabis plant that are complementary to one or more of the primers hybridize to the one or more primers. The one or more sequences that hybridize to the one or more primers are amplified, thereby producing one or more amplicons; and all or a portion of the sequence of the one or more amplicons is determined, thereby detecting one or more cannabinoid genes in the Cannabis plant.

[0055] The method can further comprise quantifying the one or more Cannbinoid genes. In addition, the method can further comprise measuring the Cannabinoid messenger ribonucleic acid (mRNA) of the plant.

[0056] In a particular aspect, the method can further comprise detecting whether fungal nucleic acid, bacterial nucleic acid, or a combination thereof is present in the plant. As will be appreciated by those of skill in the art, if fungal nucleic acid, bacterial nucleic acid, or a combination thereof is present, then the fungal nucleic acid, bacterial nucleic acid or the combination thereof can also be quantified. The method can further comprise comparing the quantified fungal nucleic acid, bacterial nucleic acid, or a combination thereof to the quantified cannabinoid nucleic acid.

[0057] As will be apparent to those of skill in the art a number of methods can be used to detect and/or quantify one or more cannabinoid genes in a Cannabis plant such as polymerase chain reaction (PCR; quantitative PCR), real time PCR (rtPCR), and/or reverse transcription PCR. In addition a variety of methods can be used to detect and/or quantify bacterial and/or fungal nucleic acid in a Cannabis plant (e.g., SEQ™ Bacterial and Fungal Detection System, Life Technologies).

[0058] As will also be appreciated by those of skill in the art, the Cannabionoid, fungal and/or bacterial content can be compared to a control. Any suitable control can be used. For example, a suitable control can be established by assaying one or more (e.g., a large sample of) plants which do and/or do not have a Cannabinoid gene and using a statistical model to obtain a control value (standard value; known standard). See, for example, models described in Knapp, R. G. and Miller M. C. (1992) Clinical Epidemiology and Biostatistics, William and Wilkins, Harual Publishing Co. Malvern, Pa., which is incorporated herein by reference. Thus, as used herein, a “control” or “known standard” can to an amount and/or distribution characteristic of an plant that does or does not not have a cannbinoid gene.

[0059] As shown herein, sequencing of the Cannabis sativa genome revealed that the THC synthase gene has replicated itself throughout the genome via a mobile genetic element also referred to herein as a transposable element. As used herein, mobile genetic element or transposable element are elements or regions in a sequence that allow replication and insertion of a sequence into one or more additional places in a sequence such as a genomic sequence (see Jiang, N., et al., Nature, 42:163-167 *2003); Zhang, X., et al., PNAS, 98(22):12572-12577 (2001); Wessler, S., Miniature Inverted-repeat Transposable Elements (MITEs) and their Relationship with Established DNA Transposons, University of Georgia, Dept. Botany and Genetics, Athens, Ga., all of which are incorporated herein by reference).

[0060] Knowing this genome is tolerant of the copia and miniature inverted-repeat transposable elements (MITE) replication machinery enables the use of these sequences to replicate other desired synthase genes throughout the plant. Of particular interest is the CBD synthase gene that produces the anti-cancer compound cannabidiol.

[0061] Knowledge of the transposon systems which are tolerated by this species opens up avenues for improving the production of other cannabinoids. Specifically, the use of these transposons to increase the % CBD (cannanbidiol) expressed would aid in, for example, fighting cancer. More specifically, synthesizing a DNA fragment which has the leader sequence identical to the THC synthase gene and its transposon signal where the THC synthase gene is replaced with CBD synthase one could then use Agrobacteria or other pant transfection tools such as Gene Gun to introduce many more CBD synthase genes into the plant. This would result in a plant that expresses increased levels of CBD.

[0062] Accordingly, in another aspect, the invention is directed to a method of increasing the copy number of one or more sequences in a Cannabis genome comprising operably linking the one or more sequences to one or more mobile genetic elements, thereby increasing the copy number of one or more sequences in a Cannabis. In yet another aspect, the invention provides methods of introducing such sequences operably linked to one or more mobile genetic elements into a plant (e.g., a Cannabis plant) using, for example, a plant transfection tool, e.g., Agrobacteria, and maintaining the plant under conditions in which the copy number of the one or more sequences is increased in the plant (under conditions in which the expression of polypeptide encoded by the sequence is increased in the plant, for example, as compared to a plant which does not comprise the sequence operably linked to the mobile genetic element). The invention is also directed to plants produced by the methods.

[0063] Thus, examples of sequences whose copy number could be increased include sequences that encode one or more polypeptides involved in the biosynthesis of one or more cannabinoids, and/or one or more terpenes. Specific examples include sequences that encode a Cannabidiol (CBD) synthase, a Cannabichromene (CBC) synthase or other Cannabinoids in place of THC synthase, olivetol acid synthase, divarinic acid synthase limonene synthase, and alpha pinene synthase. Specific examples of other such sequences include the following:

example of a sequence that encodes an Olivetol Synthase >gi|171363646|dbj|AB164375.1| Cannabis sativa OLS mRNA for olivetol synthase, complete cds

(SEQ ID NO: 13)
ATGAATCATCTTCGTGCTGAGGGTCCGGCCTCCGTTCTCGCCATTGGCAC
CGCCAATCCGGAGAACATTT
TATTACAAGATGAGTTTCCTGACTACTATTTTCGCGTCACCAAAAGTGAA
CACATGACTCAACTCAAAGA
AAAGTTTCGAAAAATATGTGACAAAAGTATGATAAGGAAACGTAACTGTT
TCTTAAATGAAGAACACCTA
AAGCAAAACCCAAGATTGGTGGAGCACGAGATGCAAACTCTGGATGCACG
TCAAGACATGTTGGTAGTTG
AGGTTCCAAAACTTGGGAAGGATGCTTGTGCAAAGGCCATCAAAGAATGG
GGTCAACCCAAGTCTAAAAT
CACTCATTTAATCTTCACTAGCGCATCAACCACTGACATGCCCGGTGCAG
ACTACCATTGCGCTAAGCTT
CTCGGACTGAGTCCCTCAGTGAAGCGTGTGATGATGTATCAACTAGGCTG
TTATGGTGGTGGAACCGTTC
TACGCATTGCCAAGGACATAGCAGAGAATAACAAAGGCGCACGAGTTCTC
GCCGTGTGTTGTGACATAAT
GGCTTGCTTGTTTCGTGGGCCTTCAGAGTCTGACCTCGAATTACTAGTGG
GACAAGCTATCTTTGGTGAT
GGGGCTGCTGCGGTGATTGTTGGAGCTGAACCCGATGAGTCAGTTGGGGA
AAGGCCGATATTTGAGTTGG
TGTCAACTGGGCAAACAATCTTACCAAACTCGGAAGGAACTATTGGGGGA
CATATAAGGGAAGCAGGACT
GATATTTGATTTACATAAGGATGTGCCTATGTTGATCTCTAATAATATTG
AGAAATGTTTGATTGAGGCA
TTTACTCCTATTGGGATTAGTGATTGGAACTCCATATTTTGGATTACACA
CCCAGGTGGGAAAGCTATTT
TGGACAAAGTGGAGGAGAAGTTGCATCTAAAGAGTGATAAGTTTGTGGAT
TCACGTCATGTGCTGAGTGA
GCATGGGAATATGTCTAGCTCAACTGTCTTGTTTGTTATGGATGAGTTGA
GGAAGAGGTCGTTGGAGGAA
GGGAAGTCTACCACTGGAGATGGATTTGAGTGGGGTGTTCTTTTTGGGTT
TGGACCAGGTTTGACTGTCG
AAAGAGTGGTCGTGCGTAGTGTTCCCATCAAATATTAA

example of a sequence that encodes a Limonene synthase >gi|112790154|gb|DQ839404.1| Cannabis sativa (−)-limonene synthase mRNA, complete cds

(SEQ ID NO: 14)
ATGCAGTGCATAGCTTTTCACCAATTTGCTTCATCATCATCCCTCCCTAT
TTGGAGTAGTATTGATAATC
GTTTTACACCAAAAACTTCTATTACTTCTATTTCAAAACCAAAACCAAAA
CTAAAATCAAAATCAAACTT
GAAATCGAGATCGAGATCAAGTACTTGCTACTCCATACAATGTACTGTGG
TCGATAACCCTAGTTCTACG
ATTACTAATAATAGTGATCGAAGATCAGCCAACTATGGACCTCCCATTTG
GTCTTTTGATTTTGTTCAAT
CTCTTCCAATCCAATATAAGGGTGAATCTTATACAAGTCGATTAAATAAG
TTGGAGAAAGATGTGAAAAG
GATGCTAATTGGAGTGGAAAACTCTTTAGCCCAACTTGAACTAATTGATA
CAATACAAAGACTTGGAATA
TCTTATCGTTTTGAAAATGAAATCATTTCTATTTTGAAAGAAAAATTCAC
CAATAATAATGACAACCCTA
ATCCTAATTATGATTTATATGCTACTGCTCTCCAATTTAGGCTTCTACGC
CAATATGGATTTGAAGTACC
TCAAGAAATTTTCAATAATTTTAAAAATCACAAGACAGGAGAGTTCAAGG
CAAATATAAGTAATGATATT
ATGGGAGCATTGGGCTTATATGAAGCTTCATTCCATGGGAAAAAGGGTGA
AAGTATTTTGGAAGAAGCAA
GAATTTTCACAACAAAATGTCTCAAAAAATACAAATTAATGTCAAGTAGT
AATAATAATAATATGACATT
AATATCATTATTAGTGAATCATGCTTTGGAGATGCCACTTCAATGGAGAA
TCACAAGATCAGAAGCTAAA
TGGTTTATTGAAGAAATATATGAAAGAAAACAAGACATGAATCCAACTTT
ACTTGAGTTTGCCAAATTGG
ATTTCAATATGCTGCAATCAACATATCAAGAGGAGCTCAAAGTACTCTCT
AGGTGGTGGAAGGATTCTAA
ACTTGGAGAGAAATTGCCTTTCGTTAGAGATAGATTGGTGGAGTGTTTCT
TATGGCAAGTTGGAGTAAGA
TTTGAGCCACAATTCAGTTACTTTAGAATAATGGATACAAAACTCTATGT
TCTATTAACAATAATTGATG
ATATGCATGACATTTATGGAACATTGGAGGAACTACAACTTTTCACTAAT
GCTCTTCAAAGATGGGATTT
GAAAGAATTAGATAAATTACCAGATTATATGAAGACAGCTTTCTACTTTA
CATACAATTTCACAAATGAA
TTGGCATTTGATGTATTACAAGAACATGGTTTTGTTCACATTGAATACTT
CAAGAAACTGATGGTAGAGT
TGTGTAAACATCATTTGCAAGAGGCAAAATGGTTTTATAGTGGATACAAA
CCAACATTGCAAGAATATGT
TGAGAATGGATGGTTGTCTGTGGGAGGACAAGTTATTCTTATGCATGCAT
ATTTCGCTTTTACAAATCCT
GTTACCAAAGAGGCATTGGAATGTCTAAAAGACGGTCATCCTAACATAGT
TCGCCATGCATCGATAATAT
TACGACTTGCAGATGATCTAGGAACATTGTCGGATGAACTGAAAAGAGGC
GATGTTCCTAAATCAATTCA
ATGTTATATGCACGATACTGGTGCTTCTGAAGATGAAGCTCGTGAGCACA
TAAAATATTTAATAAGTGAA
TCATGGAAGGAGATGAATAATGAAGATGGAAATATTAACTCTTTTTTCTC
AAATGAATTTGTTCAAGTTT
GCCAAAATCTTGGTAGAGCGTCACAATTCATATACCAGTATGGCGATGGA
CATGCTTCTCAGAATAATCT
ATCGAAAGAGCGCGTTTTAGGGTTGATTATTACTCCTATCCCCATGTAA

example of a sequence that encodes an Alpha Pinene synthase >gi|112790156|gb|DQ839405.1| Cannabis sativa (+)-alpha-pinene synthase mRNA, complete cds

(SEQ ID NO: 15)
ATGCATTGCATGGCTGTTCGCCATTTCGCTCCATCGTCATCGCTCTCCAT
ATTTTCGAGTACTAATATTA
ATAATCATTTTTTTGGTAGAGAAATTTTTACACCAAAAACATCTAATATT
ACAACAAAAAAATCAAGATC
AAGACCTAATTGCAATCCAATCCAATGTAGTTTGGCCAAAAGCCCTAGTA
GTGATACTAGTACAATTGTT
AGAAGATCAGCCAACTATGATCCTCCCATTTGGTCTTTTGATTTCATTCA
GTCTCTTCCATGCAAATATA
AGGGAGAACCCTATACAAGTCGATCGAATAAGCTAAAAGAAGAAGTGAAA
AAGATGTTAGTTGGAATGGA
AAACTCTTTAGTCCAACTTGAGTTGATTGATACATTACAAAGACTTGGAA
TATCTTATCATTTTGAGAAT
GAAATCATTTCTATTTTGAAAGAATATTTCACTAATATTAGTACTAATAA
AAACCCTAAATATGATTTAT
ATGCCACTGCTCTCGAATTTAGGCTTTTACGCGAATATGGATATGCAATA
CCTCAAGAAATATTTAATGA
TTTTAAGGACGAGACGGGAAAGTTCAAAGCGAGTATTAAAAATGATGATA
TTAAGGGAGTATTGGCTTTA
TATGAAGCTTCATTCTATGTGAAAAATGGTGAAAATATTTTGGAGGAAGC
TAGGGTTTTCACAACAGAAT
ATCTCAAAAGATATGTAATGATGATTGATCAAAACATAATATTAAATGAT
AATATGGCAATATTAGTGAG
ACATGCCTTGGAGATGCCACTTCATTGGAGGACTATAAGAGCAGAAGCTA
AGTGGTTCATTGAAGAATAT
GAGAAGACACAAGACAAGAATGGCACTTTGCTTGAATTTGCGAAATTGGA
TTTCAACATGCTTCAATCAA
TATTTCAAGAAGATCTAAAACATGTCTCGAGGTGGTGGGAACATTCTGAG
CTTGGAAAGAATAAAATGGT
TTATGCTAGAGATAGATTGGTAGAGGCTTTTCTATGGCAGGTTGGAGTAA
GATTTGAGCCACAATTCAGC
CACTTTAGGAGAATATCTGCAAGAATATATGCTCTAATTACAATCATAGA
TGACATATATGATGTGTATG
GAACATTGGAAGAGTTAGAGCTTTTCACCAAGGCTGTTGAGAGATGGGAT
GCGAAGACCATACACGAGTT
ACCAGATTATATGAAGTTGCCTTTCTTTACTTTATTTAACACCGTAAATG
AAATGGCGTATGATGTATTA
GAAGAGCATAATTTTGTCACCGTTGAATACCTCAAGAACTCGTGGGCAGA
GTTATGTAGGTGCTATTTGG
AAGAGGCAAAATGGTTCTATAGCGGATACAAACCAACCTTGAAAAAATAT
ATTGAGAACGCCTCGCTTTC
AATAGGAGGACAAATTATTTTTGTATATGCTTTTTTCTCTCTTACAAAGT
CCATAACAAACGAGGCCTTA
GAGTCCTTGCAAGAGGGTCATCACGCTGCATGTCGCCAAGGATCCTTAAT
GTTACGACTTGCAGATGATC
TAGGAACATTGTCGGATGAAATGAAAAGAGGCGATGTTCCTAAATCAATT
CAATGTTATATGCACGATAC
TGGTGCTTCTGAAGATGAAGCTCGTGAGCACATCAAATTTTTGATAAGTG
AAATATGGAAGGAGATGAAT
GATGAAGATGAATATAACTCTATTTTCTCTAAAGAGTTTGTTCAAGCTTG
CAAAAATCTTGGTAGGATGT
CATTATTTATGTATCAACATGGAGATGGACATGCTTCTCAAGATAGCCAT
TCAAGGAAACGTATTTCAGA
TTTAATTATTAATCCTATTCCTTTATAA

[0064] In other aspects, the invention is directed to method of sequencing a genome of a target species within a genus, wherein the genome of the species within the genus vary by about 1 in about 100 bases. Next Generation sequencers drop the cost of sequencing genomes 100,000 fold by using one clever trick. They know what they looking for. The majority of these massively parallel short read (<400bp) sequencing systems are successful at sequencing humans because there is a reference genome to compare short reads to. Since the human genome is not very polymorphic only 1 in 1000 letters is different. This means that most reads from a Next Generation sequencer map to the genome perfectly and when there is a variant there is most likely only one in that 100bp read.

[0065] Each human genome sequenced on SOLiD or Illumina usually generates 4M SNPs and 400,000 deletion or insertion polymorphisms and 40,000 large copy number variations of structural variations larger than 1,000 bases. Since humans diverged so recently, we are mostly the same that makes resequencing the human genome a very easy analysis problem. One can load the 3 billion bases into RAM and scan every read across this index and find locations for where all the reads should be placed and regions where mutations occur with commodity hardware. This is described as an algorithmic problem that scales to N of the reads in the analysis. More reads=linearly more time but the reference genome is always hg19 (the human genome in genbank). This is all possible because the human genome project spent billions of dollar first making this reference with expensive tools that generate long reads.

[0066] This long read process is very different. When there is no reference genome to work with one must compare every read to all other reads so if you have 20 Million reads, the computation problem is now 20M reads×20M reads or 400 Trillion comparisons. This is called a N̂2 (N squared) problem as its not linear but multiplicative based on the read numbers. Some advancements in algorithms have made this an N log N problem by sorting reads and using small word sizes but this is still substantially more computationally intensive than resequencing and alignment to a reference. In other words this is computationally a much more difficult problem than matching reads to a 3Billion letter sequence. This is known as “de novo” sequencing as opposed to “resequencing” used for most humans today.

[0067] There are some examples of people using de novo assembly on humans despite its excessive costs as it is thought to be more thorough but this is still very bleeding edge in terms of its completeness next to re-alignment. Some have suggested to perform a hybrid approach to get the best of both methods.

[0068] With the costs of DNA sequencing plummeting the cost to perform the easier Re-alignment process is still at least half the cost a genomics experiment and de novo assembly is likely 90% of the cost of the sequencing project so efficient use of the computational architecture is now more important than cheaper sequencing methods.

[0069] Until now, cannabis has never had its entire genome sequenced. As shown herein, in sequencing Cannabis it was discovered that the polymorphism rate in the plant was 10× higher than in humans. This means the re-alignment problem needed to be re-invented to even work and enable a non de novo assembly approach. To this end, a method to generate not 1 reference sequence but 2 or more references was devised. PIn a particular aspect, 3 reference sequences, one for each of the known cultivars in the field are used. Cannabis has 3 known species; Sativa, Indica and Ruderalis. These 3 have been interbred and the strategy devised herein involved back crossing each of these strains to be pure species and then making a reference genome from each of them. By having 3 reference genomes the reads were aligned to all 3 references, variants were called on all 3 and a Venn Diagram of the variation within all there species were generated for novel strains being sequenced. This was computationally much cheaper than a full blown de novo assembly for each strain and provided important information, which a de novo assembly may miss as it leverages the information of what is already known about the plants and will be more tolerant to repeat structures.

[0070] In the method of sequencing a genome of a target species within a genus, wherein genomes of species within the genus vary by about 1 base in about 100 bases, the method comprises obtaining sequencing reads of the genome of the target species (e.g., using massively parallel sequencing), aligning the sequencing reads to at least two different reference sequences, wherein each reference sequence is a known sequence of a species within the genus; and obtaining a consensus of variation between the sequence of the target species and each reference sequence, thereby sequencing the genome of the target species. In a particular aspect, the sequencing reads are aligned to at least three reference sequences (e.g., Cannabis sativa, Cannabis indica, Cannabis ruderalis).

[0071] The genetics governing the synthesis of the 85 phyto-cannabinoids found in Cannabis Sativa L. are only known for the tetrahydrocannabinolic acid (THCA) and cannabidiolic acid (CBDA) synthase pathways. While, the Cannabis Sativa sequence of Purple Kush has recently been compared to hemp, less is known in regards to how each medicinal strain of cannabis may vary with respect to each other. To this end, presented herein is a de novo assembly of the medicinal plants Cannabis Sativa and Cannabis Indica. These diploid assemblies range in size from 300 Mb to 727 Mb, are 65% AT, and have mitochondrial genomes up to 415 Kb. Over 1.5 million SNVs for the Sativa genome, 925,602 SNVs for the Indica genome, and approximately 4M single nucleotide variants (SNVs) compared to the recently published Purple Kush, 30% of which are found in both our Sativa and Indica references, are detailed. These assemblies cover over 85% of the Cannabis RNA-seq sequence in genbank. Of particular interest is a copy number variation in the synthase genes responsible for cannabigerolic acid (CBGA) conversion to THCA. Also evident is flower to root differential expression of this expanded gene family and novel synthase homologs not found in the Purple Kush assembly. These data provide selective breeding strategies to alter medicinal expression.

[0072] Non-psychoactive cannabinoids like cannabidiol (CBD) and cannabidiolic acid (CBDA) exhibit evidence of tumor specific apoptosis in 9 different cancer cell types, pain management via cox-2 inhibition, effectiveness with antiemesis from chemotherapy, and enhanced muscle spasm control in patients with MS. Separately, the FDA has approved the use of cannabinoid drugs Dronabinol and Nabilone for chemotherapy related nausea and HIV related appetite stimulation. 84 other cannabinoids have been measured in Cannabis and their expression varies tremendously plant to plant. The pharmacology of cannabinoids has been transformed with the discovery of the human endocannabinoid pathways and the endogenous human neurotransmitters anandamide and 2-AG. Two human G-Protein coupled receptors (GPCRs) known as CB₁ and CB₂ have been extensively characterized and are encoded by CNR1 and CNR2 genes on chromosome 6 and 1, respectively. Mutations in these human receptor genes are associated with increased addiction and extreme body mass index. Three additional GPCRs (GPR55, GPR18 and GPR119) are showing evidence as potential endocannabinoid receptors. Combined with an extremely low therapeutic index, these reported medical benefits have resulted in a “compassionate use exemption” with 16 states and the District of Columbia decriminalizing medical use of cannabis in the United States for non-FDA approved “off label” indications. Despite the popular medicinal use, the genetics of the GPCR targets and genes governing the cannabinoid expression remain only partially characterized.

[0073] Due in part to prohibition, the cannabis plant has been selectively bred in the last 30 years to express very high tetrahydrocannabinol (THC) levels (above 20% in the flower weight). Due to THCA and CBDA synthase competition for their shared pathway precursor CBGA, this selective pressure has come at the cost of most strains available today containing very low cannabidiol (CBD) content (below 1% flower weight). This in turn has prompted considerable interest in the genetics controlling chemotype. To this end, others have demonstrated that the cannabinoid contents are under strict genetic control and can be predicted from DNA sequence information before the plant has expressed active compounds. This study has stimulated many questions in regards to the genetics controlling the other cannabinoids, as well as the 140 terpenes reportedly expressed in the plant. These terpenes also compete for an IPP cannabinoid precursor. At least one of these terpenes, (Beta-caryophyllene) is reported to be a volatile CB2 receptor agonist with anti-inflammatory effects.

[0074] Described herein is the generation of a draft de novo reference sequence for the C. Sativa and C. Indica genomes with a focus on resolving the high polymorphism rates in the synthase genes. This provides a view of drug type strain differences along with a complementary tool for many ongoing investigations in other cultivars.

### Exemplification

### EXAMPLE 1

### Methods

[0075] DNA was purified with Qiagen Mini and Maxi plant DNA purification Kits. Sativa cultivar “Chemdawg” and Indica cultivar “L.A. Confidential” were used as the first reference genomes (DNA Genetics). CBD and THC levels were measured with HPLC and GC analysis by Steep Hills Lab. Results were verified with Thin Layer Chromatography prior to sequencing (Montana Biotech). Sequencing of the Indica reference genome was accomplished with twelve 454 GS FLX+700bp runs delivering and an estimated 12× coverage. Genome sequencing and assembly was performed by the 454 Sequencing center in Branford CT with Newbler. The Sativa strain utilized a hybrid assembly approach with 100× of 2×100 ILMN HiSeq (651M reads, 131 Gb of PF filtered data) sequencing reads combined with an additional four 454 FLX 400 bp runs. These reads were assembled with CLCbio Genomics Workbench 4.7.1. High quality reads not mapping to the assembly were retained for separate de novo assembly.

[0076] To PCR or Sequence DNA from Cannabis, Plant DNA material was purified from the plant. 100-300 mg of dry plant material was first diced into fine plant fragments with a knife or razor. This material was then added to Qiagen Plant Lysis buffer or AP1 was added. 2× more lysis buffer than the manufacturer recommended was added as the plant flowers are very lipophilic. For each 1 g of plant material 10 ml of AP1 was added and heated to 65° C. for 10 minutes while inverting and vortexing for a minute every 3 minutes. Plant material was placed into an IKA turrax tissue homogenizer tube mixer prefilled with 5 ml of AP1 and vorterxed at top speed for 10 seconds and 2 minutes at 2000 rpm. Morter and Pescle homogenization with liquid nitrogen was used but yields can vary. With the exception of the 3× increased AP1, the rest of the protocol followed was according to Qiagens plant mini-prep volume suggestions (part number in 2011 is 69104) (increased everything 3× accordingly with the exception of the final elution step). Qiagen MaxiPrep columns can also be used to handle the increased 3× volume recommendation. Lower volumes showed lower yield as the plant oils seem to interfere with the prep but this was dependent on how dry the sample is. Fresh plant clippings used 2× volume recommendations and 1× delivered DNA. DNA purified with this method was predominantly more than 10,000 bases in length for 10 different cultivars according to E-Gel 1% gel analysis. Fragments could be larger due to the gels resolution.

[0077] After Qiagen isolation, DNA most likely didn't freeze do to glycols, terpenes and other pigments in the isolation. Use of Beckman Genomics Ampure was used to clean these samples up (formerly known as Agencourt Ampure). 100 ul of Ampure to 100 ul of sample instead of the Manufacturers instructions of 180 ul of Ampure to 100 ul of sample was used to save on reagents and keep the conditions within the volume of a 96 well plate and a 96 well magnet plate magnetic field.

[0078] Lower ratios of Ampure (50 ul to 100 ul) were tested and worked well. This lowered cost but quantitative yields across many cultivars may vary. This DNA was clean enough to freeze and used in most next generation sequencing library construction kits like the SPRIworks system from Beckman. Multiple different libraries can be made from fragment libraries to jumping libraries or even RNA libraries. Described below is the simplest library but those skilled in the art will know how to apply and RNA or DNA prep to a kit that converts this DNA or RNA to sequencable material. What is important is to be able to purify the DNA from a plant high in oil, cannabinoid and terpenes content to ensure it will be pure enough to be enzymatically active .

[0079] Fragment libraries are short (less than 1000 bases and usually less than 600 bp). To get DNA this small after isolation from a plant, a covaris or nebulization device from Life Technologies was used to shear the high molecular weight (HMW) DNA into smaller fragments that were amenable to the Next Generation Sequencers (Illumina, SOLiD, 454, Ion Torrent, Pacific Biosciences, Helicos and others).

[0080] Purified DNA was nebulized/sonicated/acoustic bombardment (Covaris Corp) or hydrodynamicaly sheared to break the DNA down to more managable pieces as large DNA acts like a viscous polymer which is difficult to manage and inefficient in ligation. Once HMW DNA was broken into smaller pieces, known sequences or “Primers” (also known as “Adaptors”) were added to both ends of the DNA fragment. These known sequence sites can be any sequence a person desires but are preferable sequences the popular DNA sequencing platforms utilize for sequencing. Once “Adapted” the distribution was measured with an Agilent Bioanalyzer or other gel eletrcophoresis device and decide if size selection is needed to narrow the library size distribution. The Agilent gel was size selected as its distribution was large but this is very dependent on the sequencing platform and strategy. The size range of DNA for sequencing was selected. It's preferable to have a very tight size distribution, e.g., much tighter than the initial HMW prep where fragments range from 50 bp to 1500 bp. A fraction of this material in the 300-400 bp range was collected and a Polymerase Chain Reaction performed to make many copies of the molecules in this size range. Once many copies were made they were put on a Next Generation Sequencer for Massively Parallel Sequencing. The fragment distribution for the sheared library DNA measured was obtained on an Agilent Bioanalyzer for the ChemDawg cultivar sequenced to over 350× coverage on the Illumina HiSeq 2000 platform by Beckman Genomics. The distribution after size selection and PCR was also obtained.

### Results

[0081] To address the polymorphism rate in the genome, a triple backcrossed pure Indica cultivar named LA Confidential (DNA Genetics, NL) was chosen to build a reference genome with over 12 million 454 GS FLX+ 750 bp reads (6.4 Gb). The genome was assembled with three different alignment stringencies on CLCbio workbench (0.8 or default, 0.9 and 0.95). N50 contigs of 1500-1600 bp and genome sizes ranging from 280 Mb to 303 Mb were obtained. An outbred Sativa cultivar known as “Chemdawg” was also sequenced with 131 Gb from Illumina's HiSeq platform with 2×100 reads from 250 bp inserts. 164M paired reads (single lane of 7) were assembled with the CLCbio workbench and resulted in N50s of 2.2 Kb and a genome size of 288 Mb.

[0082] To assess genome completeness, all Cannabis DNA sequence in Genbank were aligned to the Indica reference and significant blast hits for over 98.3% of the entries were found. Many of these entries were mRNA sequences and thus enriched for euchromatic sequence. To assess the heterochromatic coverage the number of reads (filtered of dots and polyclonals) not mapped in the varying assemblies was measured. These ranged from 9.8% of the reads at the default alignment stringency to 33% of the reads at the most stringent assembly conditions. To complement this all of the Sativa reads were mapped to the Indica references where non-unique sequence was left unmapped and only 22% of the reads were found to not map to the 0.95 stringent Indica reference. The Indica reads with the 0.9 mapping stringency were mapped back to the stringent Indica assemble and 14% of the reads were found to not map indicating a genome size of 346 Mb. Using the methods described by Xu et al (Xu et al. 2001, Natl Biotech, 29(8):73741) a 396 Mb genome size was estimated using the total kmer number/kmer volume of the Sativa assembly. This differs from prior published reports on the genome size (Sakamoto) of 1.4 pg per diploid genome but flow sorting technique can be very sensitive to GC content based on the stains used (Greilhuber 2005, Ann Bot, 95(1):91-98) and male plants are known to have larger genomes than female cannabis genome sequenced in this study. Reads that don't assemble have a GC content of Y % and consist of low complexity sequence.

[0083] To assess polymorphisms on a draft genome, reads to the consensus assemblies were remapped to look for single nucleotide polymorphisms (SNPs) and deletion/insertion polymorphisms (DIPs) (Indels). This produces heterozygous SNPs for self mappings but heterozygous and homozygous SNPs for cross cultivar mappings. As expected, the more outbred Sativa cultivar had more variation than the triple backcrossed Indica and both cultivars exhibited a high degree of polymorphism as compared to the variation content seen the human genome.

[0084] The THC synthase genes display a polymorphism rate closer to 5% perhaps explained by this being a gene governing the dominant phenotype monitored with selective breeding. With short reads alone, phasing the sequence to provide accurate amino acid prediction was challenging, however many SNPs in the THC synthase gene are nicely phased with the 750 bp 454 data. Evidence for a gene expansion can be seen in this data with the increased genome coverage in this location (FIG. 1). One can see more phased alleles than expected with a diploid plant. On the boundaries of this gene a sequence with homology to the mPIF transposon family (e value of 2e-6) was observed that likely explains the expansion. This region has coverage 100 fold higher than average and is likely an assembly knot but multiple 700 bp reads with THC synthase sequence read into the mPIF homologous sequence implying copies of THC synthase were in tight linkage with this putative transposable element. As with other mPIF transposons, a long inverted sequence is present 5′ to the THC synthase gene (FIG. 2B). The Hairpin seen using mFold in the putative mPIF transposon sequence 5′ to the gene in the Sativa Assembly. Also observed in the 454 sequence on reads which map to THC but have frayed high quality ends.

### >ALT-THC SYNTHASE 83553

(SEQ ID NO: 11)
ACAATATTCTTTTACTATAAAACTTCAATTATCATTTTAAGAACACGTAC
CAAAAATTTTAATAATAAATATATTATAATGTTCTAATCCATTGAACATG
TAAACTAAAATTGTTCCATAAACATATAAGCTCAAATAATATTATTTTAT
TTGCTATTGAAATAAGAAAGACAATTTATTTTATTACATATATCTTATGA
TAGTCTACACAGTTGTAATGTAGATTTTCATACTTGGGAGCATACATAGT
ATGGGT.

[0086] DNA sequence of the THCA synthase gene reported by Kojoma et al. Highlighted and underlined section, CTCGAAGCGGTGGCC, is the FAD binding domain. Highlighted region, CACTTAGT, is the mPIF signal described by Zhang et al. 2001 Proc Natl Acad Sci, USA 98(22):12572-12577 >gi|81158005|dbj|AB212841.1| Cannabis sativa gene for tetrahydrocannabinolic acid synthase, partial cds, strain:078

(SEQ ID NO: 12)
ATGAATTGCTCAGCATTTTCCTTTTGGTTTGTTTGCAAAATAATATTTTT
CTTTCTCTCATTCAATATCCAAATTTCATTAGCTAATCCTCAAGAAAACT
TCCTTAAATGCTTCTCGGAATATATTCCTAACAATCCAGCAAATCCAAAA
TTCATATACACTCAACACGACCAATTGTATATGTCTGTCCTGAATTCGAC
AATACAAAATCTTAGATTCACCTCTGATACAACCCCAAAACCACTCGTTA
TTGTCACTCCTTCAAATGTCTCCCATATCCAGGCCAGTATTCTCTGCTCC
AAGAAAGTTGGTTTGCAGATTCGAACTCGAAGCGGTGGCCATGATGCTGA
GGGTTTGTCCTACATATCTCAAGTCCCATTTGCTATAGTAGACTTGAGAA
ACATGCATACGGTCAAAGTAGATATTCATAGCCAAACTGCGTGGGTTGAA
GCCGGAGCTACCCTTGGAGAAGTTTATTATTGGATCAATGAGATGAATGA
GAATTTTAGTTTTCCTGGTGGGTATTGCCCTACTGTTGGCGTAGGTGGAC
ACTTTAGTGGAGGAGGCTATGGAGCATTGATGCGAAATTATGGCCTTGCG
GCTGATAATATCATTGATGCACACTTAGTCAATGTTGATGGAAAAGTTCT
AGATCGAAAATCCATGGGAGAAGATCTATTTTGGGCTATACGTGGTGGAG
GAGGAGAAAACTTTGGAATCATTGCAGCATGGAAAATCAAACTTGTTGTT
GTCCCATCAAAGGCTACTATATTCAGTGTTAAAAAGAACATGGAGATACA
TGGGCTTGTCAAGTTATTTAACAAATGGCAAAATATTGCTTACAAGTATG
ACAAAGATTTAATGCTCACGACTCACTTCAGAACTAGGAATATTACAGAT
AATCATGGGAAGAATAAGACTACAGTACATGGTTACTTCTCTTCCATTTT
TCTTGGTGGAGTGGATAGTCTAGTTGACTTGATGAACAAGAGCTTTCCTG
AGTTGGGTATTAAAAAAACTGATTGCAAAGAATTGAGCTGGATTGATACA
ACCATCTTCTACAGTGGTGTTGTAAATTACAACACTGCTAATTTTAAAAA
GGAAATTTTGCTTGATAGATCAGCTGGGAAGAAGACGGCTTTCTCAATTA
AGTTAGACTATGTTAAGAAACTAATACCTGAAACTGCAATGGTCAAAATT
TTGGAAAAATTATATGAAGAAGAGGTAGGAGTTGGGATGTATGTGTTGTA
CCCTTACGGTGGTATAATGGATGAGATTTCAGAATCAGCAATTCCATTCC
CTCATCGAGCTGGAATAATGTATGAACTTTGGTACACTGCTACCTGGGAG
AAGCAAGAAGATAACGAAAAGCATATAAACTGGGTTCGAAGTGTTTATAA
TTTCACAACGCCTTATGTGTCCCAAAATCCAAGATTGGCGTATCTCAATT
ATAGGGACCTTGATTTAGGAAAAACTAATCCTGAGAGTCCTAATAATTAC
ACACAAGCACGTATTTGGGGTGAAAAGTATTTTGGTAAAAATTTTAACAG
GTTAGTTAAGGTGAAAACCAAAGCTGATCCCAATAATTTTTTTAGAAACG
AACAAAGTATCCCACCTCTTCCACCGCATCATCAT

[0087] Interestingly the THC synthase gene has a CWCTTAGWC (Zhang et al. 2001, Proc Natl Acad Sci, USA, 98(22):12572-12577) motif at base 630. This is one base different from the motifs seen in different plants for mPIF integration (CWCTTAGWG) although Zhang et al report the outer base has only 61% conservation. Integration events mid gene (1635 bp full length) would be expected to multiply a truncated peptide but the active site including the FAD binding domain would remain un-altered at base 165.

### Homologs of the Cannabinoid Synthase Genes

[0088] The increased coverage of the THC synthase gene and its 90% homology to CBD synthase could be a result of many other novel synthase genes being collapsed in assembly.

### Terpene Biosynthesis

[0089] Terpenes are another class of molecules expressed in plants that exhibit antifungal, antibiotic and other medicinal properties like vitamin A and Taxol. Gallucci et al demonstrate the benefits of combination therapy of penicillin and various terpenes on MRSA. Vitis Vinifera or grapes have 40 unigenes related to the terpene synthesis (Martin et al., BMC Plant Biol, 10:226) and Cannabis has reports of at least 68 Terpenes using headspace gas chromatography and up to 140 terpenes (Ross and ElSohly 1996) consisting of approximately 90% monoterpenes and 7% sesquiterpenes and various other ketones and esters. One of the closest relatives to cannabis, Humulus lupulus or Hops has sequenced EST libraries extracted from the glandular trichomes (Wang et al. 2008, Plant Physiol, 148(3):1254-1266) identifying over 22 unigenes encoding terpene biosynthesis.

### Polymorphisms in the Human Endocannabinoid Pathways

[0090] To understand the variation found in the cannabinome and the impact of phytocannabinoids, the polymorphism in the human endocannabinoid pathways are of equal and relevant interest. Harismendy et al demonstrate SNPs which impact body mass index (BMI) in the Fatty Acid amide hydrolase (FAAH) and the monoglyceride lipase (MGLL) genes (Harismendy et al. Genome Biol, 11(11):R118). These genes encode enzymes that catabolize endocannabinoids, anandamide (AEA) and 2-arachidonyl glycerol (2-AG) respectively. The commonly used analgesic and thermoregulatory prodrug paracetamol is known to require FAAH to metabolize paracetamol with anandamide to form AM404. This metabolite is thought to be an endocannabinoid re-uptake inhibitor preventing anandamide clearance from the synaptic cleft analogous to SSRI drugs regulation of serotonin reuptake. This helps to explain one of the cannabinoids reported benefits in pain management (Hogestatt et al. 2005, J Biol Chem, 280(36):31405-31412). In addition, AM404 has been shown to be an agonist of the TRPV1 or vanilloid receptors much like capsaicin found in many cayenne and other red peppers and an inhibitor of cyclooxigenase COX-1 and COX-2. These findings prioritize a more thorough understanding of the 85 cannabinoids and the polymorphic diversity of the FAAH, MGLL, TRPV1 receptors and the genes encoding human cyclooxigenases.

[0091] The findings of Harismendy suggest that polymorphism content in the human endocannabinoid pathway can better guide patients to cultivars with more favorable cannabinoid content. Independent isolation of cannabinoids has resulted in FDA approved drugs (THC or Marinol™) but studies have shown a 330% increase in efficacy with combined CBD and THC delivery resulting in the European approved Sativex™ (Fairbairn and Pickens 1981, Br J Pharmacol, 72(3):401-409). Patients still report better outcomes from the whole plant extracts suggesting synergistic effects of the shotgun therapy and an interest in how each popular cultivar may vary in expression of active content. Cultivars that express THCV as another therapeutic cannabinoid are now being pursued. This genome sequence provides a tool to help selectively breed higher expression levels of various cryptic cannabinoids into plants to better study the impact of the cannabinoid and terpene repertoire.

### Description of ClustalW and Medicinal Genomics THC Synthase Sequences.

[0092] ClustalW is a tool which takes similar Sequences and “clusters” them together so one can see them aligned and compared to each other. As an example provided herein is a ClustalW of the 16 known THC Synthase sequences which were in Genbank to date.

[0093] Areas where polymorphisms existed were determined. Other Java based viewers can also be used. These can be very helpful tool for comparing new sequences and finding amino acid altering differences. This was done for multiple sequences from C. Indica genome which have some variation in the THC synthase DNA sequence and some of this sequence variance is Amino Acid altering making them very important variations as they impact the synthesis of THC and probably CBD and a variety of other Cannabinoids.

### Discussion

[0094] Gregor Mendel pioneered genetics working with Pisum sativum, an angiosperm with 10× larger genome and an 8× longer breeding cycle. The recently sequenced Date Palm genome highlighted the challenging genetics presented with a 7 year reproductive cycle (Al-Dous et al., Nat Biotechnol, 29(6):521-527). Cannabis cultivars flowers in 40-90 days making it an ideal candidate for genome directed selective breeding once many of the cannabis genomes are sequenced. Prior to this sequence dbEST, dbGSS, dbPLN, and dbHTG have a combined sequence for Cannabis of just over 2.05 Mb with 3944 entries. This study represents over a 65,000 fold increase in genomic data publically available for this plant and brings light to the polymorphism content and structure governing the medicinal synthase genes.

[0095] One of the challenges embarking on such a study is maintaining strong chain of custody of the plant matter to DNA as few countries have legal mechanisms to obtain plant material and legally sold cannabis has few quality and tracking standards to afford a properly designed genetic study. Material accessible through NIDA has been deemed less relevant as it fails to represent THC levels present in most strains used medicinally today.

[0096] As a result, the study described herein was aimed at sequencing one of the more popular C. sativa cultivar (“Chemdawg”) that has a controversial folklore over its origin to help drive a genetics based standard in the industry. Complementing this is the sequence of a triple back-crossed C. Indica strain (“L.A. Confidential”) where legal commercial entities are maintaining the seed line (DNA Genetics, Netherlands). This sequence can better aid the understanding of the genetics which govern cannabinoid expression and help build tracking and standardization tools to enable Cannabis extracts as a more measured therapeutic.

### EXAMPLE 2

### Methods

[0097] DNA was purified with Qiagen Mini and Maxi plant DNA purification Kits in Holland. Briefly, 500 mg of plant tissue was carefully diced with a razor and after addition of AP1 lysis solution homogenized with an IKA Turrax tissue homogenizer for 45 seconds on speed 10. Centrifugation steps were replaced with positive pressure filtration. Eluents from the final columns were re-purified with Ampure using a 1:1 volume of Ampure to sample (Beckman Genomics) and eluted from the magnetic particles with 65C ddH2O for 5 minutes. 10-20 ug of DNA (10-20 ng/ul) was delivered to Beckman Coulter Genomics and 454 Sequencing Service Center for library construction according to the manufacturers guidelines. 0.6% and 1.5% of the Sativa reads map to Chloroplast and mitochondrial genomes using Date Palm chloroplast as a reference and 47 mito plant sequences as a reference. Sativa cultivar “Chemdawg” and Indica cultivar “L.A. Confidential” were used as the first reference genomes (DNA Genetics only maintains LA confidential). CBD and THC levels are available at Full Spectrum labs (fullspectrumlabs.com). Sequencing of the Indica reference genome was accomplished with sixteen 454 GS FLX+ 700 bp runs delivering and 14× coverage. Genome sequencing and assembly was performed by the 454 Sequencing Service Center in Branford CT assembled with Newbler. The Sativa strain was sequenced to 327× coverage with 2×100 ILMN HiSeq (651M reads, 131 Gb of PF filtered data) sequencing reads performed by Beckman Genomics The Illumina and 454 assemblies 10,11, & 12 were assembled with CLCbio Genomics Workbench 4.7.1. SNP calling was performed with CLCbio Genomics Workbench 4.7.2. For Illumina data a minimum of 2 pairs was required to call a SNP and the default Neighborhood Quality Scores (NQS) were used. SNP lists were exported as csv files and compared with perl scripts for overlapping coordinates.

### Results

[0098] The outbred Sativa cultivar Chemdawg or “CD Sativa” was sequenced to over 320× coverage with Illumina 2×100 paired end reads. Single lane assemblies and multi-lane assemblies produced very similar fragmented assemblies and demonstrated both high AT content (65.6%) and a high polymorphism rate (0.5% intra-cultivar, 0.63% intercultivar. To address the polymorphism rate in the genome, a triple backcrossed pure Indica cultivar named LA Confidential or “LAC Indica” (DNA Genetics, NL) was chosen to build a high-quality reference genome with over 19.5 million 454/Roche GS FLX+System 700 bp reads. The Indica genome was assembled with three different alignment stringencies on CLCbio workbench and Newbler. Genome assembly size estimates of 286-340 Mb for the CD Sativa cultivar were obtained based upon the Illumina-CLC assembly, and 676-727 Mb for the 454 LAC Indica cultivar based upon the 454 sequencing assembly with N50s of 2.6 Kb. The variation in genome size estimations are a result of the high polymorphism rate in the genome collapsing, or occasionally splitting, the maternal and paternal alleles in assembly, and is a known challenge with modern DNA assemblers. Therefore, the CD Sativa assembly is likely smaller as a result of shorter reads inability to phase highly polymorphic branch points in the assembly despite the 20 fold higher coverage. The LAC Indica results are supported by van Bakel's genome assembly size estimates for Purple Kush (PK Indica) and flow sorting experiments suggesting 1.4 pg per diploid genome (Sakamoto).

[0099] To assess genome completeness, all cannabis DNA sequences in genbank were aligned to the Indica reference and significant blast hits for over 98.3% of the entries were found. An RNA-Seq assembly is publically available (medicinalplantgenomics.msu.edu) for a different Sativa cultivar (“Mexican or CSA”), and BLAST results confirmed that over 89% and 85% of the 69,557 transcripts from the CSA cultivar were present in the LAC Indica reference (Any E score, E score <E-10).

[0100] Most of these CSA entries were mRNA sequences and thus enriched for euchromatic sequence. To assess the heterochromatic coverage the number of reads not mapped in the varying assemblies was measured (filtered of dots and polyclonals). These ranged from 10% of the reads at the default alignment stringency (0.8) to 33% of the reads at the most stringent mapping conditions for the LAC Indica data. Comparisons to the recently published PK Indica genome assembly indicated that the LAC Indica genome assembly from Newbler is likely the most accurate genome estimate, while the CD Sativa assembly represents the less repetitive portions of the genome addressable with short read sequencers. When all of the 19.5M LAC reads were mapped to the PK Indica Cansat3 assembly 3.7M reads did not map (by comparison, all LAC Indica reads mapped back to the LAC Indica reference created 1.64M reads which did not map) and 15.8 Mbp of PK Indica contigs had zero coverage. Assembling these un-mapped reads produced 140,660 contigs larger than 500 bp. Only 10,394 of these mapped to the PK Indica Cansat3 transcriptome, leaving 130,266 unique contigs comprising 79 Mb of sequence unique to LAC Indica. 31% of these contigs had Blast hits for arabidopsis thaliana at an 0.01 E value cut off.

### Polymorphisms

[0101] To assess polymorphisms on a draft genome, reads were remapped to the consensus CLC assemblies to look for SNVs. This produced predominantly heterozygous SNVs for selfmappings, but heterozygous and homozygous SNVs for cross cultivar mappings with a Ti/Tv of 1.62-1.84. As expected, the outbred CD Sativa cultivar had more variation than the triple backcrossed LAC Indica, with both cultivars exhibiting a high degree of polymorphism as compared to the variation content seen across the human genome or Arabidopsis genomes. The larger Newbler LAC Indica assembly of 676 Mb (676 Mb contigs >500 bp, 727 Mb all contigs) discovered 925,602 SNVs with a Ti/TV 1.71 and a SNV rate closer to 0.13%. All of the CD Sativa and LAC Indica reads were then mapped to PK Indica and 4.5M and 3.8M SNVs, respectively, were found. Of these SNVs, 397,754 were shared (42% and 26%) between LAC Indica and CD Sativa and 1.23M were shared (32% and 27%) between LAC Indica/CD Sativa & PK Indica implying high diversity amongst the Cannabis cultivars, with a closer relatedness of PK Indica to LAC Indica.

### Synthase Genes

[0102] The THCA synthase genes display an increased polymorphism rate next to the genome at large (˜2% vs 0.6%), likely explained by this being a gene governing the dominant phenotype selected for with recreational breeding. Increased polymorphism rates can also be associated with collapsed copy number variations. In preliminary assemblies, read coverage indicate that the gene family has gone through several duplication events as described previously. Evidence for a gene expansion could also be seen in LAC Indica and CD Sativa with the increased genome coverage in this location compared to the genome average. One can also see more phased alleles than expected with a diploid plant. Both LAC Indica and CD Sativa cultivars exhibited six fold higher coverage in these regions. Increasing the coverage with the Newbler LAC Indica assembly broke these polyallelic contigs into different haplotypic contigs affording better amino acid prediction. Although it is tempting to assume this gene expansion explains the reported increased THC content in these cultivars, one must minimally demonstrate the gene expansions are transcriptionally active, in frame and not mis-sense mutated pseudo genes. As a result, segregation of the haplotypes in assembly is imperative in making use of RNA-Seq data in order to assess if any of these genes are expressed in frame. Subsequently one can stratify the RNA-seq mappings in an allele specific manner across the various tissues.

[0103] In this regard, others report convincing data in regards to the expression of transcription factors and their potential role in hemp to PK Indica differences. Likewise they also suggest the observed AAE3 copy number variation being more important to increased cannabinoid content than THCA & CBDA synthase gene expansions stating “Our analysis indicates that amplification of cannabinoid pathway genes does not appear to play a causative role in this increased expression”. The AAE3 copy number increase is interesting and could explain higher levels of cannabinoid precursor, yet higher chemical diversity of cannabinoids is expected to happen downstream of CBGA formation as most cannabinoids can be folded from this substrate or its propyl “varin” counterpart (de Meijer, 2003, Genetics, 163(1):335-346).

[0104] However, even with this increased copy number of AAE3, there does not appear to be a large difference in expression of this gene in Finola (hemp) compared to PK Indica (marijuana). Likewise, Finola is not a high CBDA cultivar and better classified as a THCA loss of function mutant with a functional CBDA synthase gene, which affords slightly higher (<%2) CBD expression since the CBGA competitive THCA synthase is dysfunctional. As a result, a simple point mutation as described by Kojoma et al. could more easily explain differences in Finola to PK and one might not expect to see a change in genomic architecture to simply reduce THCA synthase activity. Higher CBDA cultivars like Cannatonic are likely to provide more clarity on the effect of copy number on AAE3 expression.

[0105] Unlike AAE3, the THCA synthase and CBDA synthase genes showed differential expression in Finola vs PK Indica, despite their copy numbers being similarly expanded from Finola to PK Indica. Increased copy number and increased expression do not always deliver increased peptide activity. In the case of the gene expansion in LAC Indica this is partially due to missense or nonsense SNVs in or just downstream of the FAD binding domain of the expanded THCA and CBDA synthase sequences. As a result, the copy number expansions need to be scrutinized in regards to their transcriptional activity and the translational products the variants encode. To complement the sequence provided by van Bakel where they state ‘on the basis of our inability to assemble these into functional protein-coding genes, we conclude that the THCAS reads in ‘Finola’ and CBDAS reads in PK are likely to be caused by the presence of pseudogenic copies', the analysis herein was focused on the long reads to help phase these polymorphic gene families.

[0106] Phased sequence from long reads is essential in determining the translational code of such highly polymorphic assemblies. Even C terminal in frame truncated synthase genes exhibiting RNA-Seq expression and containing an intact FAD binding domain (N terminal) need to be taken into consideration as potential cannabinoid synthase genes, as opposed to assuming them to be pseudo genes.

[0107] In this regard, the LAC Indica assembly herein had four full length contigs (#20041, #32071, #34396, #20817) with homology to THCA and CBDA synthases and 10 partially homologous contigs with truncated ORFs. The full length contig, in particular, #34396, 81% sequence similarity to both, was highly expressed in the PK Indica RNA-Seq data but was absent from the PK Indica Cansat3 genomic assembly. In fact, the PK Indica Cansat3 genomic assembly only had one THCA synthase gene (PKcontig#19603) in the genome browser and the reported “THCAS like” sequences could be deduced via comparative alignment with LAC Indica. Failure to split these contigs can negatively effect resequencing alignments to this reference collapsing the entire gene family into highly covered and divergent loci. In addition, many of the PK homologs (PK_{—}20093.1 & PK_{—}09375.1 and PK_{—}23203.1) are truncated on the 5′ end and missing start codons. Confirmation of the THCAS-like sequences also revealed more full length THCAS-like sequence in LAC Indica where Cansat3 scaffold 49212 coded for a truncated peptide. The PK RNAseq data (SRR352202) supports an extended 5′ end but 5′ sequence bias creates a truncated peptide with an alternate start codon for transcript PK 09375.1.

[0108] Nevertheless, evidence for fully functional THCAS-like sequences exist in LAC Indica but a comparison to CD Sativa shows two of these genes to have broken open reading frames and two of them to appear functional. Sativa's were traditionally bred for long fiber stalks and later crossed with Indica's to acquire their pharmaceutical phenotypes and are known to express different chemotypes.

[0109] FIG. 4 shows these sequences as multiple sequence alignments and amino acid conservation plots show different 5′ and 3′ ends of the gene structures including internal amino acid substitutions (FIG. 5A to 5D). As a separate contig in the LAC Indica assembly, contig #34396 represents a 1650 bp ORF (coined MGC synthase-3 or MGC-s3) and is specifically expressed in the roots versus the flowers of PK Indica. The CSA assemblies of the Mexican cultivar from MPGR also confirm this expression pattern for this homologous contig csa_locus_{—}61504_iso_{—}1_len_{—}1623_ver_{—}2 across three Mexican cultivars. Furthermore, all cultivars (LAC Indica, CD Sativa, PK Indica, CSA), when expressed, maintained the FAD binding domain not seen active in the CBDA synthase alleles of LAC Indica (LAC CBDA Contig 27956 has a nonsense mutation 97 amino acids after the FAD binding site). The RSGGH and C176 amino acid sequences are critical for FAD crosslinking and exist in all versions of the peptide described herein.

### Synthase Gene Replication

[0110] Interestingly, many of the contigs containing THCA synthase genes have very high average genomic coverage due to cannabis LINE elements assembled at the edges of the contigs. In addition to LINE elements, the THCA synthase gene has an mPIF transposon signal of CWCTTAGWC at base 622. Others report the 3′ mPIF base has only 61% conservation, and thus cuts with star activity from its preferred recognition sequence of CWCTTAGWG. As with other mPIF transposons, a long inverted sequence is present 5′ to many of the assembled THCA synthase genes (FIG. 2B). If the THCA synthase gene recombines at base 626 (1635 bp full length) it would be expected to result in a truncated or significantly altered peptide, but the active site, including the FAD binding domain, would remain un-altered at base 165.

[0111] The increased coverage and polyploidy seen with the THCA and CBDA synthase genes in the Newbler-LAC assembly could be a result of a gene expansion generating a high diversity in the CBDA and THCA synthases. The unexplained diversity of cannabinoids discovered in the plant poses many open questions in regards to their modes of synthesis. These data provide additional context, providing at least four more synthase candidates to consider for the unknown genetic underpinnings of cannabichromene synthase or cannabichromene acid (CBCA). Others describe a 71 kDa CBCA synthase with a homodimer size of 136 kDa, and a 58-62 kDa range for synthases, with the remaining molecular weight being attributal to variable glycosylation. Further cloning and expression work is required to confirm catalytic activity of these putative genes. With the diversity of homolog or potentially paralog synthase sequences in the plant, one has to consider if the homodimers can, in fact, be heterodimers of similar synthase components, and if this combinatorial arrangement of peptides is responsible for the diversity of cannabinoid products in the plant. Such a model would favor rapid chemotype dominance seen with hyper expressive THCA synthase.

### Discussion

[0112] The findings of Harismendy and Lopez-Moreno suggest that polymorphism content in the human endocannabinoid pathway can better guide the selection or development of cultivars or pharmaceuticals with more favorable cannabinoid content. Independent isolation of cannabinoids has resulted in FDA approved drugs (THC or Marinol™), but studies have shown a 330% increase in efficacy with combined CBD and THC delivery resulting in the European approved Sativex™. Patients still report better outcomes from the whole plant extracts, re-enforcing the entourage effects described by Russo et al. and an interest in how each cultivar may vary in expression of active content. Towards this tailored end, GW Pharmaceuticals is now pursuing cultivars that express the varin or propyl side chain derivatives such as THCV as another therapeutic cannabinoid with less CB1 receptor affinity. In conclusion, complete dissection of the synthase gene repertoire and its precursors like AAE3 from van Bakel is imperative for predictive chemotyping of this valuable medicinal plant.

[0113] One of the challenges embarking on such studies is maintaining strong chain of custody of the plant matter to DNA, considering few countries have legal mechanisms to obtain plant material and legally sold cannabis has few quality and tracking standards to afford a properly designed genetic study. Material accessible through NIDA has been deemed less relevant as it fails to represent THC levels present in most strains used medicinally today.

[0114] As a result, the study described herein was aimed at sequencing one of the more popular C. sativa cultivars (“Chemdawg”) that has a controversial folklore over its origin to help underscore the value in a genetics based standard in the industry. Complimenting this was the sequence of a triple backcrossed C. Indica strain (“L.A. Confidential”) where legal entities are maintaining the seed line as clones (DNA Genetics, Netherlands). This sequence justifies further investigation into the genetics governing the cannabinoid and terpene expression. Future studies may consider a collaborative cross approach where stable inbred lines are carefully crossed to examine QTLs and alleles (Philip et al, 2011), and the various copies of THCA synthase can perhaps be better segregated and studied.

[0115] The teachings of all patents, published applications and references cited herein are incorporated by reference in their entirety.

[0116] While this invention has been particularly shown and described with references to example embodiments thereof, it will be understood by those skilled in the art that various changes in form and details may be made therein without departing from the scope of the invention encompassed by the appended claims.

1. A nucleic acid comprising a nucleotide sequence that has about 82% to SEQ ID NO: 407,642, SEQ ID NO: 407,644, SEQ ID NO: 407,646 or SEQ ID NO:407 648 or a portion thereof that encodes a biologically active cannabinoid synthase, or a complement thereof.

2. The nucleic acid of claim 1 wherein the nucleic acid sequence comprises SEQ ID NO: 407,642, SEQ ID NO: 407,644, SEQ ID NO: 407,646 or SEQ ID NO: 407,648 or a portion thereof that encodes a biologically active cannabinoid synthase, or a complement thereof.

3. A polypeptide comprising an amino acid sequence that has about 67% identity to SEQ ID NO: 407,643, SEQ ID NO: 407,645, SEQ ID NO: 407,647 or SEQ ID NO: 407,649 or a biologically active portion thereof, such as a biologically active portion that functions as a cannabinoid synthase.

4. The polypeptide of claim 3 wherein the amino acid sequence comprises SEQ ID NO: 407,643, SEQ ID NO: 407,645, SEQ ID NO: 407,647 or SEQ ID NO: 407,649 or a biologically active portion thereof, such as a biologically active portion that functions as a cannabinoid synthase.

5. An antibody that specifically binds the polypeptide of claim 3.

6. A vector comprising the nucleic acid sequence of claim 1.

7. A cell comprising the vector of claim 6.

8. A method of producing a Cannabinoid synthase comprising maintaining the cell of claim 7 under conditions in which the Cannabinoid synthase gene is produced.

9. The method of claim 8 further comprising isolating the Cannabinoid synthase produced by the cell.

10. A Cannabinoid synthase gene produced by the method of claim 8.

11. A method of detecting a Cannabinoid in a sample comprising detecting the nucleic acid of claim 1 in the sample, wherein if the nucleic acid is detected, then a Cannabinoid is detected in the sample.

12. The method of claim 11 wherein the Cannabinoid is detected using a nucleic acid that hybridizes to all or a portion of the nucleic acid.

13. A method of detecting a Cannabinoid in a sample comprising detecting the polypeptide of claim 3, wherein if the polypeptide is detected, then a Cannabinoid is detected in the sample.

14. The method of claim 13 wherein the Cannabinoid is detected using a an antibody that binds to the polypeptide.

15. A method of detecting one or more cannabinoid genes in a Cannabis plant comprising:
a) contacting all or a portion of a genomic sequence of the Cannabis plant with one or more primers that are complementary to SEQ ID NO: 407,642, SEQ ID NO: 407,644, SEQ ID NO: 407,646, SEQ ID NO: 407,648 or a combination thereof, thereby producing a reaction mixture;
b) maintaining the reaction mixture under conditions in which one or more sequences in the genomic sequence of the Cannabis plant that are complementary to one or more of the primers hybridize to the one or more primers;
c) amplifying the one or more sequences that hybridize to the one or more primers, thereby producing one or more amplicons; and
d) determining all or a portion of the sequence of the one or more amplicons, thereby detecting one or more cannabinoid genes in the Cannabis plant.

16. The method of claim 15 further comprising quantifying the one or more Cannbinoid genes.

17. The method of claim 16 wherein the one or more Cannabinoid genes are quantified by labeling the amplicons, detecting the labeled amplicons in real time and quantifying the labeling amplicons as the amplicons are generated.

18. The method of claim 17 further comprising contacting the reaction mixture with reverse transcriptase to measure Cannabinoid messenger ribonucleic acid (mRNA).

19. The method of claims 15 further comprising detecting whether fungal nucleic acid, bacterial nucleic acid, or a combination thereof is present.

20. The method of claim 19 wherein if fungal nucleic acid, bacterial nucleic acid, or a combination thereof is present, then the method further comprises quantifying the fungal nucleic acid, bacterial nucleic acid, or a combination thereof.

21. The method of claim 20 further comprising comparing the quantified fungal nucleic acid, bacterial nucleic acid, or a combination thereof to the quantified cannabinoid nucleic acid.

The application's sequence listing, which the Patent Office published only in electronic form, follows.

SEQUENCE LISTING (407689 sequences)

SEQ ID NO: 1 - DNA, 853 bp, Cannabis sativa
aaagaaaaaaggagacgaagagagagaacaaaaaaaactgtaggtgaaaaatctatctaacaaaggttctgagaaaatgaaaaaagttcagggtaatgtaatgtagattgtatatatgatctcagaaaggcaatcttacttcttataattaattatacaactaatgattattatgatttagttttgatgtgtgaagtcattgtcttgtgcagaatgtgcttctctacctgctatacctcgtggtgactggtattgtcaatattgccagaatatgtttgaaagagagaaatttgtagaacataatgagaacgctcttgcggctgggagggtctatggaatcgatcctatagaagagataacccaaagatgcattcgtatagttaaaaacatagaagccgaactaagtggatgcgtattatgcaggtagtttttctgcaggactgattgttctctttattttttttcatatctatcttcttgtgtagttctttgaaaaattcaaacattgttttcctctctaagttatttattttgtctgcagaggctatgattttagcaaatctggatttggtccacgtactattatactttgtgatcaggtattttctaaatggttcttgcatatcgaatatatattttgatttacttgatgttattcttgcatatgtatgaataaatggtgcacttaatttttcttttatatttcagtgtgagaaggaatatcatgttggctgtttaaagaaacataaaatggcaaatttaaaggtaagatcgtgcataattattcatgtactttgatttattgaactaattatttgaacatgtgaagtgtctatctgtggtgcaatgcaat

SEQ ID NO: 2 - DNA, 600 bp, Cannabis sativa
catagaaatatgtatggagatgaagatagtaattttacctcgtatagggtaatgggcaaaatataatagtataatcagcggaggcgcacgtgtaagtgctggttttgtcatcgtacgcgtagctatacgagcgtgggcaagcgtgtttgaagtagagcgaataaggagaaggtccacacgtgtcaggtgtagagtacgcctcactacaacagaagcggggatccccgaacgcttcacacgcgctcctacacgctacgctccctttgccattagcacgcgccactcgcaacgccgtcggacaagccccgtttaagtcgacgagacaaccggtggcgccgcatccacctcttgtacctcccttggggacgatcaacatcgggatgttgtacccgtcgactaagctgacgtcgtagaagtccaagccgtctgcgccgttaagagtgaactcagctagtgtagctggcggcttggccccggctccttcacactccagcttgcctgagccgcagtccccggcgatgcaagtgaatttcccggttgagtcgtggccgcaatgggtccgagcccatagacgacccgaccacgctctggggatgcgta

SEQ ID NO: 3 - DNA, 705 bp, Cannabis sativa
ttctgtaaataaagcttaaaaacccattacagatgtaactcgttaaggcctattaagggcccggaaaaaggcccatattacggcccaatatacatatcacagtcatgtaactacgttttcgtttcagtgtcggagtggggagtctcagctcagcgagaagaagtaaagaagaagcaaaagggatttttgctatttgagcagagaaccaaaaatggtgggtacgaatctcaaggcagaaacaatggctttgatggacaaaagaactgccattgagaccgatatgaacctcatcatagataccctctgtaagcccggcggcccaggtctttccggcaatctagtcgactccgaggtcgttcttttcccttctctctttatctcataatttatttcttgttcttcataatttattaacgatcatgggttttaaactttttctttaatcttgtcaatctgtagggttttcctcggtctgatattgatatcccagtcgtgcgagcagaaaggtctcgtctttctggtacaatgctctctcctcttagtcttatcatttagtaacaagttcaatcttatttggtcttgggttgatggaagttaatggtggtgaactctaatttgatttttgagtagttttttgtaagtgcccacatgtgagtttgcatttttggctgcttatgcagaatttaacattatcatgtatttgaa

SEQ ID NO: 4 - DNA, 541 bp, Cannabis sativa
aaaaaaaaaaacaggagtggtctacaaaataggaaaaattcttatcaagatggagtttctggcacaacatgtgccatcccaccagggaagaactatacctacaaattacaggccaaagatcaaattggaagcttctactattttccatcgactgctttccataaggctgctggtggctttggagccattaaaatccttagcaggccaagaatcccagtcccatttcctccacctgctgctgactacagcatcctcattggagattggtacaagactgaccatgaggtatattctttgggctcactctacaaagcccataatcaatatgggcctttatatttgccatgtagtaatgctctttattacacattttcactgaactaagtttgtacatgtcttgttgtgaaaacatttcagaaattgaagtctattctcgacaatggtcgtagacttacttctccagatggaattttgataaatggccgtggatcaaacgcagttttcacaattgaacaaggtaactaattacttcatcacctaa

SEQ ID NO: 5 - DNA, 565 bp, Cannabis sativa
ttgttagctgaaatttctgtgtatttggctcgaccggttagaagacgttaaatgaagaataaaggggttacattgtagtatagcattgtgtttaaacatatactagatcatctgaaaatgtggtaataagatctatgaatggacttcaaagtatatgaacgtgtctcatcacagaatctaaagaaaccaatccaatactgcctgctactgttaagatccaacttgattatggctaggtaatacaaaggctattgtctttttagctggattaggcttgaggctatttgatctaacatagaaatgggaagaaacatgatttttcgcttggctatataaccacatattgtgaactataagagaaactaactattcaattcttatagtagtagcatgcaaaggtcagagcacattaatacataattaaattttgtcttattcaaataagtagtatccatttggtgtggcataataaaattggggtcacatctagcgtggaagagcactagaagtttattttcatgtaattttggacgaggatttctggaaggttttttttttttttttt

SEQ ID NO: 6 - DNA, 523 bp, Cannabis sativa
atatatatatatacgttttttacgtactaatacatacttttgcaggaaatgtggggtatggaactgtattcactctccaaaaccaatgcagctacacagtatggccagggacactctccggaaacggagcgggtattctgggggatggcggtttcgtgttacagtccggtgagtcggtccatctcacagcaccaccgggatggtcgggtcggttctggggcaggacccaatgcaacttcgacgagtctggtaatggaaagtgcgagaccggagactgtggcccgctaaaatgcaccggaggtggggccccgcccgtaaccctagtggagttcacaatcgggtcgacctcaaccgacaaggatttctacgacgttagcctcgtcgacggttacaacgtcggtatgggagtcaaggccgtcggaggaaccggagattgccagtacgcaggttgcgtcaacgacttaaatgggaactgccccgccgagctccgagtgacggaatcgggctcgggttctacaatcgc

SEQ ID NO: 7 - DNA, 633 bp, Cannabis sativa
aaagcattggatgaatcgacacattagctgcagttggcctgcagttaaatataattatttaagaaaaataattaaaaatttatcgacacaccccaaataaataataattccaatcctttctcaagaaaaatattaattatgaaattgtaggatgcattccaaataaatttgtgtagtatactctgttttttttttttttgtcattcagaatccgaaattgggatatttgatatttataattctattttttgtatgtacattatagaaattaaaacatcctacaaatatttgctaatttaaataatttagagtgttgcgagttcaaattgtatgttacagatggtacttgtcattaataatctatttgagctctttgtattgtaaattattcttcatgaatatttttataaaatttaccatacatatacatgtagatattttatataattacaatatatattcaaatttaatataaaaaagaaatagaatttacccctaaaccctaatataaaaagagatgacatctattaattcattttcaaaaatttaatattgctatatatttaactttatgactacaattagagatgttcattcaatccaattcgaacaatagctcaaatctaatccaat

SEQ ID NO: 8 - DNA, 566 bp, Cannabis sativa
gtctcatctctaaaggcactatcatcctgctgtctttatggtaaagttgttgctcccatggttgtggaggagtcctctgtgttggattttgtggtcagagtgtggaagaagccggttgctgtggtggcagtgttggaagcttcaaaatcatccaacgttttcaggtttagctttgacaagggcgaggacaaggactgggcattggttaatggcccatggtgcatccgtgggtacactcttcttctccaagagtggactccggctatttcaggtccggtggtgtttaagctcctccgtgtttggatccaactccataatctcccccaagaatatttttcaaatgcgaatggaaacttgttgggaggtttagtaggaaaggtggtaaaggttgatcttgaggaggacaaaccagcagtgtggggaaatttcctgagagtgcaagtggatatcgatttcagcaagcctctttttgctggatgtttctttgagttggcatcaggaactaagaaatgggttcaagtcaagtttgaaaaaataggaattttctgttacttttgttgttgttt

SEQ ID NO: 9 - DNA, 564 bp, Cannabis sativa
tggtggtgggggcggtgggggtggagctccacatgttggaggtggtggcggcggcggcggtactccacgggttgatggaggtggtggggctggtgatccatacataggaggtggagggggtggaggaggaggtgacgcaccaggcaaagaagctggaagcgaagatccacgagaaggaagaagaggtggtggcggtaacgatgtaggcaaagtttgaggtggaggcggtggtggaggtggtggcggaggtggaggttggctaccacgagtaggtggaggaagagtgtggtatggtatatcaactctattattagtaagtgttgatgcacttgacatattaagagaataggggggtgggggtggaggcgggggtggttgatagcttgttgcactaacaagagaagatatagacgtccaaggtgatggcgatggagataacatagccccactatttggcctactagatgaaaaaggtgggggagggggtggtggtggtggtgtaggtccagtagagggcatgagagttttggacaaagaggaaagtggtggtggtggtggtggtgg

SEQ ID NO: 10 - DNA, 746 bp, Cannabis sativa
aatcttttatctttagtattttataaattttagtatgtcatttttcaatagttttattaatgtgatgtctgagtaacaaacagaaaattccaaagataaaggacaagaacgtaaatacataaaattaaaggaccagaagtgcaacatcttgactccattctgataacaaatgtgctcacatactctctctctttctcacctgtaacaacatttttcagcttcacaacccaaaactatcttttcctctctctctctctccccctttacacacctcaataatatcaaaacctaaccctaatcttagtctcacctccctcaacgctcgccggtcgctcaccggcgactatgacctgagcctcacttccccgtctccggcgagtccagctcccaccgtgtgtacggatcgagagaaccttttttccagagagagacgctgcgatgccgtcgcattccgatctggaccgccagatcggtcacctgatgcagtgcaagcctctgcctgagtcggaggtgaggacgctgtgcgagcaggccagggcgatcttggtggaggagtggaatgtgcaaccagttaaatgtcccgtcacggtatgtggagacatccacggtcagttccacgatctcgttgagcttttccggatcggtggcagtgctcctgataccaattacctcttcatgggcgactatgtaggtcagtttaggctgcacagaaggcatttgattaattcactttttaatttaattta

SEQ ID NO: 11 - DNA, 1118 bp, Cannabis sativa
ggtgtcattggcggtgtcattggcgatatcagtggcagaccaaagcgtaagtacattcctggtgctgatgacacattcatccccaaccctggttttgaggtccccatccctggccgcggcggtgctcctacttctggctctgcctctgtcactgctactggcaacccctgatcatgttgttagctgatctcttgttcttaatttagcttggcttgacaatcatagccctgttatctatcaatctatagctttttgtttgctcactctgtatttgaggtttaaggagtctagatcaatgtattgcttttctaataaggtagtaagttagtttgagtctgagtgtgccgtagttaagattagttcatggtcttttgtgtagtgttgttccttagcaatatgtaatgatatcagtgtttatcttctctatgcatttgtatgaatttttattttacttttatcttttgaagtaaaataccaaatccaatccatcaacaatatgggaatatgctttcaagttgtttccagccaaaaataaaaatactcacacgcacacacaaagaaaaaatgggacattctaataatatacagagtgatgtagaagaatggcatggttatttatagcataataccttgattttattactcagtatttatagaaggagacttaaaaaaaagttttacaaatttttagatgtcaacctgttgattttttcgtgttcattcactattttctttcatcgtgtttatgtaaatatatttctgctgtaatcaaaattaataacatcacttttagttttaacagtacattaaaaatctgaattgtttgaatgattgcaaaaataaaattaatgtcattaattatttagtgtaaaatgtacaacaaaatatcagtaagaatcaatagcgataagaaaaagtaactattattgaagcgcagaaagttaaaagtttacactatatttaccaaaacctaccaatatttaatcaaccctaaaccaaatgtatttatatagttataattttatcccgattgtacaaatgaagaaataaagggaaagatcgatacatgttacgaacttagacttcataagtcaaatcccaaccaggaaaataaatga

SEQ ID NO: 12 - DNA, 538 bp, Cannabis sativa
atggactgaaattaatttatagttacttgcagccaaacaaacatattactattattacatgcctttgtttttttatcctgcagtcttttcttgttatgtaattgctgtttttttccctctgtagaaatcattgaagcgagattacttcttatggcaattgttcaacatcgaaaatgatttcacaaaggcatctgaggaacttgatgctgaaaagaagagtcgtgaagaggttatgcaagaactagagaattttgagcttgaagcaagtaagaagaagaaagagcaagccaagtatcttaaagagataactcgatgtgaaaaggatattgctgcgaaaaacagaaaacttgacaaacatgtgagtttctatagttctttattgcaaatatgttgaagatgtaatgtttccatttatacccctatcttcaatgtctgcaatttgacttttccacttaatagggtaaaaaatgaaacggaactcaatgaagagaacaaccaagaaagtaaatgatctctctttttcttttcctttcttttc

SEQ ID NO: 13 - DNA, 836 bp, Cannabis sativa
tgggagtgacatttttggtgatgaatgagttgcaataattgaagcatctttacacaaccagcttgatgttgatgctaataatgaaattaattgctatttaaatttctgaagtttcctgcttatcacaactaatggtataataatattgaagatatctctatacatcataatccactttttgggtttgttttaagattggattctgtaacagcattctttccataatatgaaacaggttttagatacccgaggccagttgctcgtagctctaggatacggactgtggccctctatggttcttatctcagaaattgttcaaactttcatcttggccgatttctgttattactatgtgaagaggttagttactgcatctatcagaatttggtctaaacattcatctttggccaaccttcatgtgttttctggaagatgtatcgtttcaactcattactgttgtctgttcttgcagcgtttttggaggacagcttgttctgcgactgccctcaggagtggtgtaaaccgaggtttcgctgcagctgtagccagtgagcaacagtgccgccccataattaacttagctaggcacaatgttgcttctccatgtttagtgccccattttgcactcaacacaggcctaattctctttcatgtatcttggtcgaaattgaagtgggggatttaaatttgatatttatatatatcgaacatgatttacacagttaatttaacacttgcgttggtgtcattattccgcaccatgtttattttggacattttgtagtctccactttataagatattgctcaaaccactaattagattataacaatata

SEQ ID NO: 14 - DNA, 583 bp, Cannabis sativa
ttggttgaaggatgaggatcctgttccgaattgttttgtcgcacataaccagcttctggctcagcaaggtggtggtcgggttgttgaaagtactgaggaggtggtggtggaagggagttgccggccggagataggacggcaagaagccaccgacttacagagagaaatgactcccacgatgcaacaggttgagaaggaagcgggtactggcgtgcgtagtgggaaggcagttgtaggagatccgttaattcaaaaatcaaaggggaaagtgcatatgggctttgaagtgggccataattttacccagatggattatgtggacagcccatctcagttagtagctggccaatgttcacttgggccagaccaaaaagagtccaataattcaaatagttttagaggaaagaatacatctgctaggggttcgactgtaacattggaaaacttgaaggaggttaacagtaaaggggcaagatcgcgtgatcaggttgaggaacgagtggaggttgaaactgaaactgagggggtagggaggaagcgtcagtgtggtcgactgggtaatgggggtagtagcggtgtctgg

SEQ ID NO: 15 - DNA, 835 bp, Cannabis sativa
gagtgagggactgagtgacggagagagacagactaggggctgttttacctaatctaaagtatacatgataaacataaaacaacagtgttctactttacaccttataaaatgtcaatatgatataccaacaaaaattcagcaaaaatgagtctttcctgtattcaaatcaatccacagttaaattttcatacattctttaacttccccttcaatgataacaacaaatagcttgtgtagttttcagctcacaatttataattaactactacaatcaattatatatcaaactttgtttccatttcaaatttgaatgtaacctaacgctattaaaatacattagcaggacttcccttgaaacacagtcagttgagcaaagtggcccttaaatgttatcctgggatcatgatttcccaatcatttcacaagaaatgtctcagaaaatgtttcagagatatatttacaaacatatactgagcaatagcatcatattaagtaaattttctatcaagaaatgtctcagagaatgtttcagagatatatttacacaaaatttcgagtactattcatataaaatgtattcaagctcaaaaacatatacacagtaaagaataaaaagaaaattcagaggagacgaaggaaaagaaatggccttacccgattgaaaatcaggtgccggcggtcaaggtggcggaggagtacagcggcggatctgggattggaggcagccgagaatcccgttttctcaaaccgttggaaatctgtggcggcacaaaacttgggactaagtttaactgcttacccgcaccgcatatatagtcgacccgatccgacccga

SEQ ID NO: 16 - DNA, 543 bp, Cannabis sativa
aatatccaatggatgcttaacacttgcgcccgtctcatcacgggctagcaggcatgaaaaatagtcttcagctcggtgaaattttcacaccgagctgaagtgtttgcttttgatagtatattattgaactgattttagtcagatgtttgttttttgtgtgtgtgaccaagcagggagcatgggttctgaaaccaaaaggcataccacccaagtgtgttgtccattttgttgggggtatatttgttggtgctgcacctcagctcacctaccgtttatttcttgaacgtctctctgagaagtgagaagtcagtccctaatctaattcatccatttctctcttctcccttttgtccaactactctgacttcattctttttcactttcattatcatatatatatgtatcacaggggagttttagtcattgcaaccccctatgccagtggctttgattacttctttattgcagatgaagtccagttcaaatatgacaggtgtttaaggtttctcagggatactgtgagtacactcattctaatgttat

SEQ ID NO: 17 - DNA, 682 bp, Cannabis sativa
gctgcgacagcccgggtagccacgtataaggtgtgctgggttggtggatgttttggtacggatatattagcaggtatagagcaggctattaaagatggtgtcaatgttttgtcattgtctatcggcggaagtttaaatgattacaccaaagatacagtagcaattggtgcttttgctgcaatggctaatggaattgtggtgtccctctcagctggaaattctggaccaagttcggggagcttatccaatgttgcaccttggatgatcactgtgggtgcaggaacattagatcgtgatttcccagtttatgttagccttggtaatggacagaaatacaaaggtgtttcactatatgggggccaacctttgtctgatgaggtacttccaattgtttatgctcaaaaggcaagtaattccacaaatggtaatctatgcttgcctagcagtttggttactgaaaaggtctcaggaaaaattgtgttgtgtgatcgagggggaaactcaagggctcaaaagggtcaagtagtcaaagatgcaggtggcgttgggatgatcttgtctaatacagaatcttatggtgaggaacttgtggctgatgcacatctccttcccacagcagctgttggccaaaaaaatggtgatttgataaaggcttatcttagttctgaggctaatccaacag

SEQ ID NO: 18 - DNA, 526 bp, Cannabis sativa
tgtactcccatatcgaatggtgttgtgaaagtataagcaaaacaaattcacaaacacaatgtgatcttacaaagatttcgattcagaaatctctaaaaactagatgatgaaaaatatcacaatagatcaaacagatctactttattgatcaatctcaaatctcaatatcacaacaacctctctttttacacacagttacagtttgtgtgttctcttgagaaagaatgaaaattgatgtataactaagcctaaattagaggaagcaaaacatgtcatcatgtcatactttttttgattcacttatatatttcgtatcaaacgtgttagatgtatcaacctgtttttgacctacatttaattttctcaatactaatacaacccgtaggatttgtgttgactcattttgatttgttttactataactgaaattaaagttatagagtgatagatttagagttatattataaaagttatatatatctatgtatatgtaattttttttacaataaatatcaatttcagctcc

SEQ ID NO: 19 - DNA, 669 bp, Cannabis sativa
ctgactccacacccccaccccaacctcccgactccccacccgcacccacccagcaaattgacacaagaaacggtccatggcactcgatcctaaaaatgagtcgcgcttcaccaactcatcattattgttgtgtacaataacttagataagaaaatatcatcaatttcaactctaaaaaccaatttaatcaaatgtactaatataattgatcatcaagttttatcacattatgaatcatcttcaaacactagaaagaaagaacatgttcccacactcactttatgcccattcattcatttcaactaccaattgttatcacaacaaatctccaaaatggtatgaccaaatcaaaagtaatattagtgaaaaaaaattaagagcacattagtagtaaatatttagaacataaagcataagattttaacaaaacttataaacacaattatacattaactcctaatctatcaatttatgatgggatttcccataaaagaagagaaacaaatctaaatcagctttggatcttaatagtaatgattacgctattacacgaatcgtgtgagaagtaagatccgccgagccgaaagagagattatgttgcaactttggtggagccttgtaaaaaatcttaagctttttcaccacttcgggaaaactgaactcgatacc

SEQ ID NO: 20 - DNA, 750 bp, Cannabis sativa
taagtaatcttgggtggttgtaggtggtggagtagtgagacagttgggatagtgacaggaggtaacaaaggaattgggtatgcgatggtgaagaggcttgcagagatgggagtgacagttgtgctaacagcaagggatgaagacaaaggaagaaaagccatagaaaagctcagaactgaattaacacatattaacacaaacaacattcacttcctttgtttggatgtttcagacccttcttccattgcttcctttgtctcctctttcaaccaacactttggtctcctccacattcttgtaagtactcttaactaaattcattctaacaaatcaaaatcaaattcccctttatctttctcaaacattttatttttaacacaacacaccttctaatttcttctactttatttctttgtattttgtctttttctttttggatttatatcaccttttctttcttttctaatccctttacaaaacaataatattatcttatgtttctcaataatatttatagtaaccattaatatacattttgattaaaatataacacaccacttttgaaaactccttctccattcaaaattaatttaattacatgacttatataaaactattagcattaattattgagtgcttaattatttatgtggcaacaaaaacactaattatttattcagattttaaaaatacagaataataattaagctgattatttatttttttatatttgatttagtcaacaacatt

SEQ ID NO: 21 - DNA, 516 bp, Cannabis sativa
tttcatctgataatatgtgggtacagggtgctgttaaaatttaatttagtgagcatttatgtctttcaattgatggttgcagtctgctcttaccatgggccgttgttgctgtggcaaggatcagaaacagatcgaagtgtaaagatatgaagttttttaatttgacacaaaaattaattttcataagccaatgcacttccattcattgataatttatttgtaaaggaatatatcggatcacagtcatcatgtactaattactttgtcagaaaattttgaatcaataaatttttttaagctttttcccagaacttgttggtaacttgtatattgagagttgtaaggtctgaacttcaacttagtcggcagccatgtcacaaataaattgatcatttttagcaaattactattgtaaagtgtgactgtgtagcacatgtgattcattttaatgttctgacaaaataagaattttgaaattctttttcattgttttatagtctctaaatattataaagt

SEQ ID NO: 22 - DNA, 1556 bp, Cannabis sativa
ccattcaatgcgatcataagctttatgcatatcggtcttaactgccacaaaaccattcttcccttgaattttcttaagagcatgaagagccttcaaagctaggacagagcactccgctatccatcttccctttaaaaaagcagactgaaatggggatacaagcttgtcaaggattggcttcaatctgtcagtgagaatgcgggcgataaccttgtatccgaagttgcataggcttataggcctgaattgttcaaattttgaagggctctcacacttcggaatcaagcatataaaagtatgatttagatcagatgccatgagacccgagagaaagaattcctggatcatactgcaaaaatcttcttcaattatggtctagtatttccgaaagaatatgcctgaataggtcccggcgcttttaaaggatgaaaatgccaaaccgcatccttgatttccagaggagttgggatcctacagaggtccgtattttcttgatcaagcaccttcttctcaaaaaggctatcgaactcttcttgaataatcaaattcgaactcctgtacagatccttaaaattttcattgaagtatcgaccaatctcctctctacttcgtttccaatccccattaattccctggacagcccaaatttgattacgtctccttctgatgatcgtcgaagtgtgaaaaaacttcgaattgcaatccccctgggtaatccaccactccctcgatttttgcttccatatgcgttccatctttttttccagcgagataatctgaagttgaatacttctttcttccccagtgacatcccccagagccgattgtatcatggtaagtctgttgtacaagcttttaagttgtttatcacaaagtccgaaggtgttccaattccactccttgagagcatttcttgttttactctgctttcttatcgccttgaagcttcgatgaacctcacaaggatccttccaaactttttctactaattcgccacacgtttgatcactcgtcgagacttctaaaaacctgaagggatacttcagtttgtgttgccttaaacaagtatcaagaaccaaaggggaatgatcagacccgagaattggatggtgattgaggctagcctttggatattgagtgcaccaatcagaacttcccaaagctctgtcaagacgtttccaaactctgttatgattgtcacgagcattggaccaagtaaaggccagtccaatgaagcctaaatcaatgccccctgtctcgaaaaggaaattctgcaagagcattccttcattcttcccaacttttcgtcctccacgtttctcattgccatcaagaataacattcaagtcaccaattacggcctacaactttccacatctttgaatcgcccttgttaacatctcccaaaaaccagctttctcccgaggataagaagtgccatacacacagtataagtaccaagtttccaagccaaatcttgggttaacagccaagccaaaactcgagtccaaactctcatgtaaacgaatatccactcctcttctccaagcaacaca

SEQ ID NO: 23 - DNA, 538 bp, Cannabis sativa
gcatcaatgcctcgaaatcacttttttcacaactagtaaattccctgttccgatcacccatgtccttttacgactccacgcctttgggaaggatacttgctcgggtatgcatctgagcaaatacatactaaaaattacttcaagaaactaaactactactaatctgatatgtatctttgttcttgtgaaggtttcatctgatctaagcttagtggatcttgatgtcccattcaccttatgtattgctattggaacatgcataaatgtcatcacaaaccttggagtactagctgttatcacttggcaaatcataattatcgcagtcccaacagtctacctagctttcttactacaggtacttcccatctcatcttactccacacaagaaaagaaacaagagctaatcttagcttacttgatcttgttttatgacagagatactaccttgccactgctaatgaactaatgcggctcaatggtacaactaagtccaaggtagcaaaccaccttgctgagtctatggcaggggccataaaaa

SEQ ID NO: 24 - DNA, 519 bp, Cannabis sativa
ccatcaatatttagttaataagatcaattaacctaaacaatatatacttctcttcgactttatgggttttttttttcaacatatattaagatagaaattttttaggaattggaaccaaaaaaatcaatctagtatattccagtgagcaaaaaagcctaaaatgtttttttgagtaaatgaaaaagaatctcaacttcttttgcggatctaaattaaaattccatttgcaagaaagtgaaaatgacagtagtacttgggtgaacagctattaatatattatttgtagaaatgttattgagcttttccaatgacaaactacgtattttagccaactaaatagttcaaaaaaatgtgttacatttatagtaagaaacaaatctatacatacatacacacttcatatgcatatatactgtaaataataagaaggggaaaaataaaatcccagtagttgtcaaaacacgatgtgtcaatttttttgcaataaggtacgtaattgtaaatatatatccaaagttg

SEQ ID NO: 25 - DNA, 644 bp, Cannabis sativa
tctgtaatctgcaaaccataccaagtggtatcagagacctcgatccaagatgggaccaaagccaaacattcagatcgagctagtggaagagaagattgaagaggttcagtcggagttgcgacaggaggtgacggccattcgatctcagatcgagcatctgccacgggagttggatatcttgagggagaacacgcagcgactgccggaattggagaagaaggtggagttcttggttgcgcacatctcgcagctgcttcaatcaactcagaacgttggagtggccagtacgagtgccgcggatgaccgacacaaacgagcgatagacggcgattcttcggcttcacatccgcttccggctgctccatcgccggtaaggccaccaccatctcggtcaccagagccaccgattacacagtcagattttaatcactcgcgtgattttcgcccacctcgcatcgagttgcccttgttttctggcgataacccagatgggtgggtgtttcgcgtggagcgattcttcctcctgaatcggttgagcgaagcagagatgttggaggcggccatcattgggttggacggcgatgcccttacttggttccaatgggaaaattctcgtcgtcggattacttcatgggcattattga

SEQ ID NO: 26 - DNA, 596 bp, Cannabis sativa
ttgcttctccactcccagtgttgccaaatgtctctagagtgtcggtcatgcaatgtgcaaagattgtgggattcaagtcatgtagtaatttggaagacttatgtttaaagaattgctacaaattacactttccattgacctctaattacaaatccctccaaaagctttctgttgaaaatatctctagctccttcaaattgcttcctctagattccttgcccaacattatgaatgtcagagtttgtaattgtgaaaatttagagtctttctcattgttaaacagcttgaactctctctatactctttctatcgaagaatgtcctaatttcacattattgcccgatagcaaccttgattgtccaattcttactaaacttgtcatctattcttgtgacaaactaagatttttgcctgaaaaactgcccaatcttcttccttctttaatggtactggttatagatgattgtccagagttggaatcaattgctagatctgggttgcctttcagtttgcgcgagctcactataagaaactgcaacaagttaattgcgtctcgaaagaattggaatttacaaatacttcctagtctgggaagc

SEQ ID NO: 27 - DNA, 976 bp, Cannabis sativa
ccccccccccacaacttcatcatccccgtgaactgaagacgaattgagaatccattttaccacctctgcaccggagtgaaaagggagatcgttgatacgaagcttccagctacaagaaagccagagaaagttggtaacctcacagtgggaaaagaaatgttgccaagagtcactctcttcgagaccgcacagggcacaactgccaatagtgttattgaaaatccgagccaaacgggagacagtccttcataattcgccacaaaaacagttccaagcgctcatggaggggagacttccaaagatcagaactgatttcatcatttgtaatcctctccttgaccaagtcgagataaaccgatttcagagagaaagagccattagtggctgactgccaaataagcacatcatttgtagggagttctccaataccgcaggagacgattttgttggcaacagacggaacaaaaagatccctgatcacatggggtctccaaaaccctcccccatcttccagaagatccatggcagtttcaggccctgccacactaggattaacactacccgggccaactatgcaatcatccccgcaggaccaatcacagctccacaaatccacctgagagtcttttccaatgatccaaacacagttatccttgatgaaatcccgagtcaaccaaatacctttggccacctgagaagcattccttgggagagaactgttcaagaaactgaagtgatgacaatatttgtccaagagcagggtaacccacagggagttttttttggtagcaagtaaccaaccaagtttgacaagaaggcaaaaatttatgtccgaaaaagtacgaaggcctaagcctccactacttttagggagacaaatcttatcccaactcagaagagccaaatatctcccaccattagtaaagccagtccaccaaaatttcttagccagagctgttggaatatttattttacc

SEQ ID NO: 28 - DNA, 600 bp, Cannabis sativa
tctctctctctctctcttgttcttattctctctctcatagtctaatttgattgtggtctcattttcacaactcaggatggtgggtaattgtctgagatgacggtggctggtggtgtcgtggtgtttgttcaaagctgtaatggttgagttttgatggttctcaaatttggcctcatgtgtccaagaactgatttttttcaatgtgtcagttaaaaaccaatacgtagaggggtagtgatttttgaaaatagttgcatattgcttagcgaccctttcacataatcacattttcctccttagtgaccgtttggaactgatgactattccatcacattttacgtcggtggtataggcgtcagttttaggacccaatgataaaactttacctgaatattttaaatggtcaaaaaattcccttttagtagtttaagcctaggggatgaagttctttgagaaatttcgcatgaggatactactagttgcttgtggaatagactggtagaaatctatttgaagaaaaccttgacgaacaagttatatttgaagaaatggttgtatattttgagaatgtatgaaaccaatgttggaaattattttacc

SEQ ID NO: 29 - DNA, 1552 bp, Cannabis sativa
cgcaatcacccgaccactcccgccacttcttctccttcgtcttcccaaccctagtctgcaagctcttcggtttcgacgataacgtttcgtcttcatcgttatcgttgccatcgcaatcgccgccgttgccgtcgtcggctaacggctggatcgacacagttctcgcttccaatgatactgatttagcgaatagagtgttttcccttcttgctcccgggggtgtccttctcagctcaatctctgctgttgatcgtctatcccttgtgaagtacgtatttccgaacgaacggttgccggaatgggcccgattcatgctctcctctgacaaggactgccgtattttagctgatctttgcccaattttcaaaggtaaagttaaggaagactccgttaagggttctgtgtttcaagttcagcttaatgtgtttgaatactatatgttttggttcgcttattaccctgtttgtagaggaaacaatgagagttgtgacactgttgccataaagagaaataaaaggtttaaattggagaattgggtttcttccatttctgggttttctagcagtaaacggggtagtccggagagtaggaatgagtgcagtctttatgttaggcttctttatgcttatctccgtgcatttgtgcctgtgagtgatttgaattcgcaccagccttatcggagctcgcttcttcagtactccttgagttatgatggttctgttatcttgcaagctgagttcgttgtcaatgtttttattcatttttggcttgttgacaatgacttttcacccttacctgttgatttatgcaagtcgtttggagtaaattttccattacggtcggttttgggtgatacaccgcctacagctgggcttggtgagatggtgaaactttttgtcaagtacttgaatttgagttcagcaatgcagtcagatgggaatgagaattttgaccttagcggcagtccaaggtggagttccggttcatttgatggttctaggtcaaggaatgctattgtggcttcaccatttgtgaattctaatgggtcttggaacttgtcaattcagaggccactgtataggtttatattgagaacattcttatattgccccatagaaacttcaataaaaaatgcatccgatgtgttttcggtttggattacttatatagagccttggacgatcagtttggatgactttatggctattgatgccattgttgatggatcagctaagactttgaagagggaggaatcgcagttccaagcttgtgggtattcacctacttggcagggttatgtcttgtccaactacttgtactatagttccttggttatgcattttattgggtttgcacacaagtttcttcatgctgatgcggaaatagtagtccagatggtcttaaaggttggcttcttgtcgttttctctctctctaaattcaagctatatgctgtctaatttgtcacttcctactttaataagctcatccggcccgtcaccattaaacctatttatttatcagtatccagtgatttattataattcaagggt

SEQ ID NO: 30 - DNA, 832 bp, Cannabis sativa
catataaaccactacaaccaaatatcagcagcttcagagtatcctctaaacacttgggaatcaagaacgagtgagcatctgatgttatgagaggaatatatataaatgtgtagaagtaatatttgggtcacattgctagtcttcgctatacataatttacgcatccccactcatatcttgtaaatctgtatgtataacatttggatcatctgaaaatgacttacatgtccaacaatataactttgtgtttctaaagaacaatgacacacaaagctaatattaacattatttgttaatacaactaacctttttctacaaaaaagccagagcaccagaattcagtagaaagaaacagttaatacaacccatcacccaaacaaagtggcactacatctacaaaagagatggtaaccaaaaaaaataaaggatcacatcttgctgcaacagaaagaactcagaaactaaagtctaaaactacaattgacaatgacatatggaaacatagaactagaactatcaaagattgacaaaatgcctacgattgcactttgcaagttgttacaatagacttatgcagaaattacttatccaaactttctggtggaatacatcaccttccattgcattgaactgagtcaattgaaccacattatgagccaccgaatgtacttctcgtaatggaagcttgtgagctgcatttgaataccatataaaaggatagattgaaatccattttctgcaactacttgaacacctttaaattaactcaacattaatcctcacgtacacttgagttaacttgcatattcaaataacctgctgctcattaagc

SEQ ID NO: 31 - DNA, 589 bp, Cannabis sativa
aaaataataatgataaaaaaaaaaaaaaaccatttgcatacttcccacaattgccaaaacaaaaagagacccagaaaaccctttgattgcttttggcctaaatcaaaagctcacaatttgggggagccagaatcaaaaactgaggattcttagaattggaataacctgacacttgaagagccatttagggtttgcacaggccagttaaaaccagaagatgatacaggaaaatttccatcggggacaggaatatcgtcgatcaagccgtaatcaaagagccaattggtgttttccggggagaccatttccggggtaggcggtgagtgggaattgggatgttcgaggaagatgatagagttaacccaagaaccaaacacggagtggagattgatgggcttgagattttggaggagaagaagaagccaagggaaaaaacggggaatctggttgtgatggtggggaaggtggtgaggtgtggtgtggtcatcgttccaccaccacctgagtaaacgtttctttctgggttttgggccttctccctcataatttgggcctttcttgggccttcttcacctactctttccttttt

SEQ ID NO: 32 - DNA, 507 bp, Cannabis sativa
taacaatgtcagtaagggaagtgagcgctatgagccaaatcttgaagtcgttgagatggctaaaaaactggaagtagttgaacaaaagttggcagcacaagaagagtttcaccattggctaattcaggttccttcaaattctagtccaattcttctttcatcaacatgcgaaaagtaactccttctggaacagggtacttagcacaaatctcgttgaaaatggctacgtacttgaccatgaattcaaaatctagaataggagaagccttttcagtaacgaatttggttctaaccttaggggatcttgaagtcattgttaagacgaaagaaatcaaagaactagaagaaagaaaggaattttaaggcataaaggaaaaaattcagagaaagcaaatcaaaccaaggatttagaaaaaatgagagaagttatttaaagttttttttaagctctccttatataaatatattttttaaatttaaaacaagggtaaaaacagaataattagg

SEQ ID NO: 33 - DNA, 926 bp, Cannabis sativa
gtgagcccatgacacttagccatctctggaaggggagttatggctcaattaccagacttcaaatcaagcaattttgaagatctcagtggtatgataactttaactccaaatttcttccctaatgtcacgtctgttagcttctcaatatgttttaccatgattacctctattatactctatatttgtagagattatacattaaatttgattgatttcccttggttgattccttgaattttgtgtgtgaacaagctcaaatcccagccattaagctttagcgcgcttcttgtagctccaaatctaaggtatcaagtttgcatgcgtatagggttgtggttctggtacatttatggtattagaacaaggtagcaacaaacctcatacttaattaattttatgccttttgagatgactataaaagccaactgtgttgtttatggaaagctacttcttggaattacttctcttaattctaattctcttcttttagatactcctactctgatttccttccttagcataccaattatggatgatttagctagttccctttctattgctttgaatctcacatatacagagagtactatccactctcatcaagattccactgctccaactgatcccaatattctttctccaaacattttctcggtgacaaaatttcatattgtcaaatctttcagcaaaaaatatttttgtgataccatgacaaaggattaaaataaactatgtcgcttccttgtttccatcacagatcgcccatccaatatcttcttagtggaattcgattgtaaaggtgatcgaagacgtgtcatggtccaatagccctggttgtaccaaaataatgccatcatcatggacatttctagttctttggaagcccttagtggagacaacttgcaatctctctctctctctctctc

SEQ ID NO: 34 - DNA, 590 bp, Cannabis sativa
ccccccccccaaaatcttctgttcattgtcaaatcgattctgagaaaatgggttttaatcagtatatctaggtataaatttggaaatcccattaaattacctcctgaacgattcttttccaaaggatttttgagtaatgtgaaatatttcaaatccatttacagtcaggggtatatctattttgtcaaaaggaatttgaaatattcattaattgttatctgtacttgatgtgttttgcctggtgttagttgtcaagtgcttgtgcaacaactctgtttccccttaaatgctatggatttaatttgcttcagctactttaggggatttctatataagagacgtgatgctcaacatccatgcatcatagattttaccctttttagtttatttgctttaaaaggaaatctgcttctcttctttccttcttcaacttattccctcctaggaaaatatttcccctgggttttccatcactctgctttttctagcacacactctgccactctcatggatgacctaaccaattccctgtccgttgcacttaaccttacagaaaccgaaagtaccatccagacccttcatgagcccat

SEQ ID NO: 35 - DNA, 606 bp, Cannabis sativa
atatatatatattgaattggggataagttgtattgggattgattaggttttccttcaaaatatttgaatagttttatactaaatgctataatattaaaattaaggacctaactgcagtacttggattaggtgataatttttgagaaaatgcttcattaatcgtaattttgtggtcaatggaattatagtaatatatattttcaatttgattcccatttcattttaattaataaaagatgtcttgaaattgcatgcggacataatcctaaagcatctaagaggtatcatatcatagttaggctactaaattaacatggatggcccttaaaggcaaataattggggaaaaagagtactaaatatatattggtattttggtactgtgtgagggaatatgtgtgcccacttgaactgatttttttccaacatggacggtggaaatatggtatttatggaagttgaagtaacatcaccatattcagtggcctttaggatctgttctcttctatttcatacataaaagttattctatatatcatttgacattttggctatttttttaatttctatataggagagcattttttctaggtatttatttgaaata

SEQ ID NO: 36 - DNA, 678 bp, Cannabis sativa
ctcataggtgcaatttcctatataccatactaaataagttcttgtttttattttcccacttacaagttttttctagcgaataaacttagtcatttggcttgaaaaacattttgaatttagtttatttatattattttgatttttactaatttattcttgctctttactaatgatcattttatttatttgatgtttatattttgtaatttgttgtttttgttacacagtgagaatgcgcatggactgttgatactgatgtttgatttgactcttttgctagaccattttgtacatgttgccacagtttgtttagcagatgtgtgttaggccttaggataatgggattgaatggagagggtgtggaattattgtgtaacaataggaattcattaaattcttagggaggctttagggatcctcgaatttcctcttctatcttatattttcttgtattttctgggcctgaaatatcaatgtaggttataataagttcctatcaatgtgtttctttttctatgattgctacctttttttaaatgattatggtctttgttaaaaggttataataagtttgtcgaccaaatttttaaggatatcgttattctaatgttgttcatgaattaatattcttttttaggttgtatcacattatggttattttgaataagttatttattg

SEQ ID NO: 37 - DNA, 555 bp, Cannabis sativa
ttgaaatgtgaaaaaagtaataatattgattgatctctctttctttctcaggtgacaaaatttgcatgtggtggatactcctttgggataagttgcagcctttttttagttgacattttattcaaggaaaattttctcagaaaatgggctgacatccacaaaaatatggtaacaaaagagaggcctttattttatctgccaaatataaaatacactcctgcatcaaatataacagatgttattagctcaagtgctagccaagacaactctgctgatgatcaaacaatcatctttaatgtcaaatattcaaatgaagacaaccctcctattactgataatacaattgcattgctttgcgttgagaaggctgagaccaagcttggtactaaaatggctttggaatatttctctttctcttatgtgaaagagtccaacaatgataataatatggtgatgaagctagaaaaatgttcatccaagtatgatcttgcaactaataagaaaaatctaagcttcaaggatcaagttgcaagttgggacgattttggaaccaat

SEQ ID NO: 38 - DNA, 930 bp, Cannabis sativa
cgagcatcaggtggtgacctgggcattgagtgctcacctaggtgcccccaagtggtgttggcctatatctagctctctttttgagatgttgcatcatgggagataactaattgaattattgaggactgtagcaagagctaagctaaacaggcgtagcattctcatatgagcgcctatgtgatgttagtgatgtcctagtaacatccctgtggttcatcatgcatttcgatatctttatgattcaatcatctgaaccgttgaggaaggaaactagagacaaactcatcaagacctatgtgttctcttgagcatgcccccaggccagttgggcactgggcatagtgcccaactcaccctgtgcacaagtgacctttctggcttagggtttggggctcccagtgtattttctacgctcaacaacaatgtcctttacaattctgtgtgctacatgctaaaatcattatccatttaatcatgccagattttaggcaaaaaaaatttctagctgacacctattcttatcaactccattccacgtgtcaataacatcagttcaccactggcgctaataatatcatttgcatcggtggtaaaacaccgctttcaacaccatttgtgttgagcaaaaatcgatgctaatacatacaattaatataaatatgacaacaaaaatttcgtatgaaatgttttaaatgatattaaatattattattcaataacaaataagtcattaagtataatgctcagcaaagaatcaaacttattgtttctgaagacgtacaaaattcaactcatcattttaataatgagatcatcttcgatgtccaaattatcgaagtttttatctttattaaatttttataattaatatctgtaattttttttattcattaaagaaccaaaacttataactcttttctatctcattcc

SEQ ID NO: 39 - DNA, 659 bp, Cannabis sativa
tggggcagagtatcccctgaaccgggcgagttggacgtgtattcgggcagttcgggagttgggatggtagtcgtcggcaaaagatcaaggtaataatcccagggtgtgaatcctccgtcgaaggacggaaatgggtttcctagaattgagtcggaggaaggaaacatgggtggaaaagttgaaatcatggttaaaactatactatactaagtagcttctttacttaaccagagtttctgtaataagtatagggagagagagaagttggggaaaagggactaagttcagcccaagggcctcgtatttatggtcaatgatcacggtaccaatttagtaattagtattctatgcaaggggcattttcgtcataaaccgtatgtgtatataaacctgtataagtacatatcatagcttttgagtcaggtggcactatagtagggtccacatgaagcgagtttacttttaaaagcagtgtgacatattgtatatgggtccctcttcttaaagattgagattttatgtttttaagcttagtcatgaagaaacaaaatcggctgggagccactatatacacgtgtcctcttttggtacgaagttcatgaatgtagccaatagtatgggagcatgatgacgtggaaccacgtgtatggctccgctaa

SEQ ID NO: 40 - DNA, 614 bp, Cannabis sativa
ggttggatgttttacaacaaattttgtacaaccttagtacaatttatgtatatgcgggcaaatcttattcttctaatttttttatggcaataccctttaattttatttctgtttataaatttagagtgtatgttaaattttactattaaatgataactatttaaaataatttttgtacattacataattcgttttagggattggcgatttatccattcagtgactttgacgctggacgtttccaaataggtactatcgggtcgaataaatttaataataaatgtctgttggcattcaagttttctttctctttgtaatattacgtgtcacgtgtacatataataattattggcatttaatcgtgaaatttaaatttgtaaatttaaatagaaattaagtacatataatttaaaataaatttagctacaaattacgctacaatattatataacacatggagtattctcctcaataaacacatcatcatgcaagaatatgtgtaactcaatacatatagtatttggatagtaccatgaataaatggatcaccaccaaacttttgaattttatgacaatttggaggtcatcacatatttgaatataataagttacac

SEQ ID NO: 41 - DNA, 682 bp, Cannabis sativa
atttttagttttttcaatgaccaaattttcttttgtaatattattttgaaaaactttgtgccttttttagttttctatgcatgtgtgtgtgaatgtttttaagtatcaagtaaagtattaattaattatcgaattcaacaccctctatttgcgtattaggagagctaattatataaatgtttattacgaattaatactctaaacatgctgatcttatgggacaaatgccatgtttcaagttgcttatcagttatttgaaactcgaagtaagtattttatcctttcctgattacaatgctcttataaggtatctctctgttcctaactacataagtataattatttatgaggcttcaatattttacacagtgcttgggagattaataaaggatatgaaagggtttggtatgcggacggggataatacaatgatgaatcagcgatccttttattgcttacggattcggttagtgttgctcttttgtattcacgtttgagatgtaatatgttttgggctttcagatttaaattaagacttttttgaagtcagataaagttttgttacttctttttttccttactgataattggtagtggtgcagattaggtgtttgttccatctacaacaacttgccatgcgtacaatgttgctcttcaacaacatcctactacatttattgagt

SEQ ID NO: 42 - DNA, 542 bp, Cannabis sativa
taaattacatgatataaccttacccaaaaaaaaatacatgatataaaaatcaaatttttaatgaagtaaccatcggtataacaaaaaattaaaaatgccaaaaaaaaaaatacaaatatgctggattcatgccttttttcttttttcactaaattatcaaaattcaccattaccattttcaggcataatatttttctaattttagtagttcgatgacatggtatcttatttaactaaataatatttatgaagttaattttgtaatattttacatactatgtaatattataggttttatttgttattgattgtttttgtttggtctaaacttctaataaagttgtaatagttgaattgtatatggatgaaaaagttgtaggcccaaggtccaagaatggcccctttctagtttctatggactaaaagtgattgggctttcaggccctaaatcaccataatagctaatcatgatatgagaaatgaatgtatctaactagtattataatctttattttgggataattttttttgaaaaaaaaaaa

SEQ ID NO: 43 - DNA, 599 bp, Cannabis sativa
gaaaaaatttcattcctgagggcctggaaaatggcaggagcgttggtcaacccaaacggcatcaccaggaactcataatgtccgtcatgtgtgcgaaatgcctttttagctcgctcttttgctgccattcgtatctgatggtatccgaatttgagatccaattttgcaaatactcttgctccgtagagctcatccaagagttcatcaacgacgggaatcgaaaacttgtccgccactgtttccctattcaaagctcgatagtccacacagaatcgccaacttccgtccttctttttgaccaataacaccgggctagagaaagggctggtacttggggtaacaataccaatctgaagcatgttgcgacccatctgctcaattgcatccttctgaatttgagcataacgataggggcgcactgaaattggctccactccttccttcaacacaatacaatgttcacgggacctctccggcggaagacccggaggcatgtggaatacagaatcatatttgtgaagaacttcctccacgattgctggaatctgatgctcatcgtgatcggtatctgcttgcaatgccccaagttgaacccaaaa

SEQ ID NO: 44 - DNA, 631 bp, Cannabis sativa
tcctccctgcttttcccatccgctttaatcagctgacccaccttcttggcaagagttgggatattgttctcggagagacagcgagtcggaagtccgagaaactccacccagaaccgagctaattcgaactccgacattcggacctcgccttcaactgggaatggcttcaagtttagcaacacaccatttaccaaccacggcctcttattcattacaaaggtgcaatcagctttcgactcgaaaaagaacccgagtacaccatcttcgaacttcttcattctccaattctcttctaagttccagattcccagtaatatctttctgaccaccgaagccgccatgtttttgcagcccattactttgcccacacaggccttgtgcacaactatatcttcaaggctcaagtcttcaaacagcttcatcatctctatttccattgcactgtcacgctccatagttttagctatcgagtcatccctcacatccactgctaccgtgacctcctcgcttgccatttcattcactatcaccattcttgaaatacaagaaccctcacactgtagaaagcaactgcaccgaaaacaggacacaaactcctgaaagtccacaagagactagacccaccacaggg

SEQ ID NO: 45 - DNA, 654 bp, Cannabis sativa
acaaagtaaaaattctgggtccgtgtcactgtttccacccaacgcggaactctaataatattaatttcttcttcaacttttgattaatttattattatgcatggccaaaaaaactaataattattctttttacacccctacaatatatcataattgattatcaatttaagcgcgtgaggtgtgctaataccaaaatatatttatcaatctaaacttatctaactaaaaactaagttgcacgtataaccctatatactacaagaatcatactttttaatgaggataaattacctcaataaaaaatagttatttcattaataatgatttttaatggcgacatgtggttggtatttctaattttgcaaaaacaaaataaataaatttttataattgaggacacttaaatgttggtaatgtataatcttacttttagagtgaaaattttatgcggttagtgatacctattatttttgtatatatgtatacaagaaatgatgtataatctcttattgttacaacattatcatgtaaatttttaaaaattaaatttgaattattttatttgaaaagcacacatatgtttatatagcaaactagaatatttgtcagtactttaaactatttattagacacatataaaaaaaaaaaaaaaaa

SEQ ID NO: 46 - DNA, 650 bp, Cannabis sativa
aagttatcatgaggggaacaaaggtaaatggcatctatgtaatgtagggaaatatagtaagggatcatgtgacgtagtgactggccaaaggtgctaaggttgaatccatgaaatggcatatagaagattagcccatgcaggtgaaaaaggtgtgcaaattctgagcaagagaggagtgtttggagcaaatcagatttaggaacttgaattctatgaacagtgtgtacttggaaaattaactagattaaagtttgttgcgtgcatgaagttacacatcacatggattcttggaatacagagatactcttaagacacaacctgagatgcatcttgaaacctcagatagatcacagtttgaggtggagatatcagatcaaactcaaaataataagtaactgaacaccaggaactgagaaagatcaatggaaccaggccatggatgatgagatggactctctcaaaaggaataagacatggacacttatgaagaaacctgttaggtaaaagattgtaagctgtaggcaagtttataagcataaagaaggcattttagaagtagagaaggctaaatacaaggcaaaggaaagcagttgactaaaatgagattttctccctaatagtcaaacctacatcaataaggctattactaa

SEQ ID NO: 47 - DNA, 604 bp, Cannabis sativa
tgttaccagatctagagcatagttgatagatatgtttggatccaggaggcatggaggagttaggagaagaaaatgaagaaggagagaagccacgaccaatacttaaagaagtgaaattgagacctgattgaacaaatcttggaaagacaacatagggattccaagttccacaaccttgagtattggtattggaaccatgatttgtacgtatctagtatcaacaaagttgggaaaatgagcaaaacctggtggtttagatcgataaccaaaattggtagcaagattaatagtgtcaagatcttttttatgggtttccatttgatgtttttgagacaagagcaaagtcttaatttcagcaaccgaatattgatcatttcttgaattaatagaaatcacatatgtatcataaagagaaggcaatcctttgaaaatggcagtaacatgttctttgacaacaactttgtgaccaacataacctaaacgagagtttttaatagaaacaagtattcataattgatagaaagagatcctttcttgcacttttggagctgagtataaagatcaatttttgtagaaatttgagtaacaaaatatatgtgaagag

SEQ ID NO: 48 - DNA, 540 bp, Cannabis sativa
aagatggtcgaggttgatctctcaatacaatatgataaactattgtttagacaagcgtcctacttggctttaccaatttgcagagtatgttcatgctgaagagattcttgataccttgaaaatcaagtggttttcgtcttcatataaagttccagatgatctagaagaatttatttttgtggatctgcaaaggaaatctgaagaggcattcaatttaagagatgcagctcaagcgtgtctacaaaaaggcgattcggctttgttgcagagtactcttaaaagcaattttgctggctatctcaagctaaaatggagcattggagacttcaaatatgcagaaagtgttttattatggcacatagctactgaaatatgttgcctagatgaattaccaatgaaaaataaaaggaggaagaggtattgtaaaattgtttcagattatatgttttacttactgattgcacaacctactatgctgtccacagttttgggtgattggcatatagcattccaggatacatgtgctgaagccagcagatt

SEQ ID NO: 49 - DNA, 524 bp, Cannabis sativa
tcaataacaaaattgtttattttatacaatatgtatttctttatcaaagcaactacataatcaattctatggatctttttttttttcataaagctagattcttagtagtcagagtaactgctacaatggaagctgcaaaaactctcctccgaaattgagaaaggccatgctttaaaatccacttcacaagcatattcaggttgtacatattgattttccagccaagccaagatttaatgctattaagacatgcatgactaaaatagcactcaagaaaaagatgagctatatcctctttaagatgtctgcaaattaaacaattaggattagatgaaataccaaacctatgcattctttctgtattgttatgtctgtcaagttgagcaaagccataaataaatgcatgctatggcacattaaactccacaccactgtagagcaaaggacttgtctagttttatcctcctttagctgcatatatacattttgaatattgtagctgttgtatattggttaaatataat

SEQ ID NO: 50 - DNA, 715 bp, Cannabis sativa
attaacccggatcagggaaccatttagtgtcatccaggagcacttctccatcaatggaattcacggctaattcaccaacagccgcatggtgtcgagcccattttgcagagttatgtgccatgaagttatgcccccagtttatcttttgcaccctccctccctcgagagaaagaacaattcttttgaacctttccgcaaccccattcagcagttgatggtctgcttctcccgcatagtcattgaagtgattaaccacagtcacgttgtcacaaaagaaaagcactttcctaagcttacatttgactacaaattcagttgcacagaccagcatcagtgcttcagcaagagtaggattggtgacattgagttgtgttgagtatatggcctgaattctattattgcagtccctaatgaccgctgctccatacgaatggtcagtatcaatagagacatccatggtacgcgaaccagtctggtgggggagtcatcttgatcgctctgtcctttagatgaggatctcgacaggatgaatgatcatgaaattggcgacacacagttataatagcctcctgtactggagtaatattggacccgtggatcactctgttgcgaatactccacagaacatcaaagatgcaaagtgccccggttaagaaggtgtcaatgtccagattagagggcagattttttatgcagtagaaccattgcaaccaat

SEQ ID NO: 51 - DNA, 809 bp, Cannabis sativa
accatgtaagaaagcattgtttatgtccatttgatgaagggaccaattattcaaggctgccagtgcaaggaaaagtttgattgtattaaaatttacatcaagtgcaaaagtgtcaacatagtttttgcagtgttgattatatccttttgcaaccaatcgagcattgtatctttctacttcacctttggaattgtacttaattttatatacctatttgttttcaatagcatggcatccaggtggaagagaaacaatggaccatgtattgttttatcatgagggcattatctataacttttagtcatggggacagttttgatgcttgattgtatgaagtgggctcaagtttgatatacgcttggagagtagcattttaaaaaaaaagtgtggagcctgtcatccttgaggtatttgtcaaggggatatgcagtagaggcattgcatataaaatcttttaaatgagtatgtttagatgtttgtctgttggttttagtgatgtgctttggagcaacaggtattggggtaggatgcatttgttggattattggaagaatcagtaagaattggtagaatttccatattaacatgttgtgaaggggtaggagttgtagtgtgtggtgttgcagtaggcttggcaaaggaaaagaaagtgtcaagtccaggaattaaggaaccttttacggggaaaatagtttataaaagatgacatccctagaatgaaaataatattgctagccaaatcaagtagtgcgtaggctttcataccattaggatgacaaatgaatatacttttggaaattattttacca

SEQ ID NO: 52 - DNA, 711 bp, Cannabis sativa
tcaattataatggtggatagtgctaaaatatagcttcagtacaagagtagtacttcagtgagaacactagggaggaattagagagcctggtctctccctttcattacccttctcaactcccctaacccaactgttacagcaaaacagaaaagaaaatacctaacaaactaacattttatctctagtgagtagtgactcacctaccagctcactcttttaattctctttttgtttcttccttctaacatagataagctataacatgattatgttccatttcttttaaccatgtctatcaaaatgcaaccaaggaaacaaatcacttgcgagtgtcatactaaaaatataatgaaaactttttcaccctgatgatgatatgaagaaaaagttgcaaaaacatacattgcaattatggatgaaaaaaaaaacactacataaactacttaatatattgaggaggagttattagaagagatataattaagtaagaaagacttaccacaatgaactttgacaacataaatctcagttggagccctgcccaaacccttagtattcttggtagacactagttctaaacttgatggttccaaggcttggctttcttgtggttttacagggatgcaacaaatcttcccacccaaatcgttaccttcctcccactcgtaatttgcttccaataaagggcaatcattcatgaagaaagtttca

SEQ ID NO: 53 - DNA, 582 bp, Cannabis sativa
tgggacaagagaaagaaaataaaattccaaaagtggagctgtgtacattttgtagtcccttaatagagagagagatgacatctctaataaattctcctcatgaacactaccaattaattactcatatttccaccaataaacatacaatatttttaaaaaaaaagagccaaaatcatggcacaataggaaaaaaattcaaaagtggagctgtggagtggatatgatacacaatatagtatttgttcattcatatttttctgttctattggtctttgtttatatataaatgcttaaaacttgttgttgttcttgttcttattaattataaaagaaaagaaagattatgagtttagtggcattgataataacttgtaaagtacagtctcaactctctggattgagtacaactgtataaggactttaatactgactggtcttctggctggggagaaacagttaataacagaattaactgtcataactaacagtccaaactaataagtccacgtgtacgggtagatagtcttccaaaggaatggaatggagcagccataaatggcgaccgagcttctttgaatgcca

SEQ ID NO: 54 - DNA, 608 bp, Cannabis sativa
ctttatagttttccaaatgaaacttagtgtggaagacaattttcaatcattttacctttaggatttgacgtggcattgtttaattagcttgtgaggtgtctattctattgatgaagcgtgtgtggaaactcaagtattttgacgaatatttacttatgcacaagcttcgaggagcataatatcatgcacttttgcatcaattctaagcgatgcattaaatgctgggtggagggttctttcaaccgttggtgttggatttgctttgtgcttttaaagggtttttcttgtccgtggatttggaattcatacggatcatgtataaatatctccaagtgccacctttcaccattttttttcctcaaactttgaattttctatcttcacacttataatttttgagagttaaaactcaaacccaaaatcgaaaacaaacttaagctaaattactctagagcgcaatattgacttttacatcttctcaaaattagggctcaagaatatccaaacatttcatgccagcgattacaattccaatacaagaagagattgctacctcggattttaatttcaagattaattctttaatcgaccatgccaatgccattgca

SEQ ID NO: 55 - DNA, 575 bp, Cannabis sativa
gatatcacgctaaaggatgtcgtctcgagcaaagcttgcgtaggaaaggtcattggttgtaaggatatgcccgcctctgtggtgaaaaagataatgaatggcgtttggagaagattgggcccgtggaggatgaagaagtgcgacgatggaattatggggttctttttcgaagaggaggctaactgtaagtttgtcatggaaaagaggccatggctggttaatggggtgttgctaaacctcaagccgtggccgatagaaggagaagttcgagtggcagaatttgaagtggctagattctgggtccaattccataggttacctacaagatatctctctaatgacaacattcctcttgtggcaaaaaaggtgggttctctggctaaagcggaggataaaagaaaagaagaagtggtaagaagagggtatcttagagcatggatttatgtttggatgacccatccattgccttcgaggttttttctcaagtcaggaggggattcagaaacgcggatgcaattcaaatacgagaaactaccggcaatttgcttcaattgtggaaaacttgctcattggga

SEQ ID NO: 56 - DNA, 553 bp, Cannabis sativa
acaatggagtttgggtggaacggtagtactgttaaactggaagggtcaaaagaggtagctgctcatcaattgactttctctcagttacatgcgttgttcagggaaggtgacattagagattgtttgaagttatatacgacagtcacgaagcaacaagaagacaatcactcacttcaaggtttggctgatattttaccgaaggaagcatctgggttattgtctgaatttcaggatgtgtttgcggagcccaagcagttaccgcctcaccggaaggatgatcatcgtatctttttacagcaaggcacgactccaatcaatgttcgaccatacaggtacccatatttccaaaaagacgttattgagaagttggtgaaagaaatgagcgaatacggctttattcggccgagcaatagtccatattcctcaccggttttattagtcaaaaaaaaggatggcacatggcgtttttgcgtcgattaccgagcacttaacggcatcacaatcaaggatcgattccccattcctacaatcgatgagctattggatgagttgg

SEQ ID NO: 57 - DNA, 873 bp, Cannabis sativa
ttctttcaagcaatttaaaatacgattaaaaacttactgaagtttaaccgaccccaaactctgccgccttttttgggagcctcaaccaccaacgaagcttggtcatcattatagcggcggcaatcaacctccggggcacgccatgtcaaaaatatcacctgaccgattctctgcatcttccttccccacgtcactatcggctccgatctttctcattgttttcattttccagaggtttatagggagcccttcgaccccaatccatgaccccctacaatggatcttcacgtccttgttctggttttcgagcgaccaattgacaaaagtcacaatagctcctgtcactttcttttgttttatctttagcaattcctccttttcggtttcatccttacaccaaatgattgtcttgtcatcaaacaactgatttacttcaaattttttctccagatccatggatagattgaaaaagtgctactctagggtatgtcactgttatctctgaacataataacaaccaacttccaatccttgttacactgctcgacactcaaataatccgtaaagttttgttgttttgagtcttttggctgggaaattatttttaaaccaaaaacctggcttaaaagttgttagaaattcccattcactgagcttgatatatttcttgcttccattcccattgaaattgcctctttttccaatcttctgtgggactctagcattggcagttgacaatttcaccacctcagcccatgaggcattgttctttattttttcccctacttttccttccttttcatcagagaaagcatcatccttcctctccagtttcttttcagtattttcacaagacagtctgcgaactccttc

SEQ ID NO: 58 - DNA, 516 bp, Cannabis sativa
aaggctattgggcaggtgtccaaacaggagagaggcaatcctctgggatgagcgttgtatggtatgatactctaataaatctatactttctaccagacaagatgaccctaggatgtatatcccgagccccaataaagcttgggagccaaatctattcaagcttacacttaaaccattgttggataacataactagcaaagcttcttcgggtaattctttaaagaaatttgcttcaggacaatctactgttccgggatttgaagctatatatgcagctgtgcagtgtactcctagtttggacaaaaaagattgcagcggttgcctaaacgaagccatattattcattccccaacagtttgatggaaagcaaggtggcagagttcttaaaccaagctgtaatttaagatacgaagtgactccattctttgagcctaaagccgactcacttgtctaatgtgtcttgagttatgtctactagtctttcaataataagttatgagataacgctcaaatcag

SEQ ID NO: 59 - DNA, 583 bp, Cannabis sativa
gtgaaaggcttcattcctgaaacgccatatcatatggcacagacacactgcatagcatataaactcctccttctcgaaattattgaaagagaccgagaacggcgcattgaagatccattcgacaaggtctctcccgatattgatctggaccgaatcaatctgcacgctccacttagagataaaccaaagtctcttcaccacttcgcaccctccaaagagatggctagtagtgttacccgaaggacaatcacaaagggcacaagcacccgggtcattgccaaagatagcacccagacgggatccggttggtaaggcatcaacatacaatttccacacaaacaactgcaaccgagggtccaggttgccagaccagattttcttaaagaaaccattacctacactaaaggaattagcgttaagagcctagtatacagactttaaagtgaaattacctttcggggttagcgtccagacaatctcatcttccaaaggtagatccagaggattctttcctattatagatgtcgcaacatgaggtcaaaggagatcctcaacacccctaatatcccaattcagggagtcc

SEQ ID NO: 60 - DNA, 575 bp, Cannabis sativa
gagcatgtccaatagattcccatgccattgaacatagtgagcaggtagtagaggttatgattttcttatgaaacaaagatttggcaactgggagggcagattgtataactcaccatccaaaaaatttcaccttgaaaggaagagttaagccccaaaacagatttcaccaaacctctgagtattggaacttgaagaaaaatcacgatcttcataagaacaagccaagtgataacttgtttttacagtatattcccctaaacaattttgatgccaaatctatttatcattgcaaggatggaaagacaatggaatagtgagaatttggtccacatcaactggtgaaaaatcagcaattaaaagctccaagtcccattcacatgatgttgatatgtagtttgcaacctgattctcagccggtctagtatagctcaatggtttaaaataatcatggtcaggtatccatgaatcataaccacaccttacactattaccatctgctattttagtcttcatgcctttcgttaacaaatctctaccccaaacaataccctgccatgttgaagaagacaacccac

SEQ ID NO: 61 - DNA, 623 bp, Cannabis sativa
ctcaattggatgtggatagaatttgcctttgagtttttttcaaagtgaagatacacttatttgacattaccacaactcaggcctttacacagttcaaatgggttaccatctagcgtcgtccttcaaagaaactaatttgagctcaagctccacctcagcttcatcatggtggaagtttttcagttctttcaagctgcatcatattgttaaaatatttacctggcatattttccacgatgccttaccagtagctgcttccttggtcagaagaaaaataatcatggattcaacttgctctgtttgtcatcaagcttgggagtctgttggacatgcactctttggctgtaagtatgcccgatcaatatgacatcacactcaaatctagttttggattggcaaaatcttcctcaatgtgcaaaggtgattatttgtctaatctatcttgtatttactcgaaggctgagatggagcaaattatatgtactttttggttaatttggatggaaagaaattgggtggtccatggaaataaaccaaataagctagagaccttacaacaacttatctgcataattccgttgcttccaagatcaaatatcattttgaagttaatgccactctaa

SEQ ID NO: 62 - DNA, 525 bp, Cannabis sativa
aggggaatcctccatacctctcccaactgaccaacatttttctagtacttactcatcagcagccgtgcattctcctttaccacctactacacaaaccttccataattctccccttatccaatcccacataacctcttcaccctttcctactgccattaacaacaacagtaataacactatccctgcctctactatcaactttcctaacatctatgttcctgatgtgggaaatgttacacggccatttctgccttatgccacatatcccccaaacacaaatatacacttttcccgtggtaatccaccctccttaaccaccacattgctcactgctactgctgctccaaccttttccatcaccaaaccagtccccaccattcccacaccagcaactacaaatccgcaccagcagaaattaaaaggaaaggagaatgacccccttgctctctcaccaaagcgacacaatgactctccctccatgaggcaatttttgaaaagatgtcgtaatcaaagctcgatgacttt

SEQ ID NO: 63 - DNA, 1871 bp, Cannabis sativa
aaaaaaaaaaaatagtactaaaaaacttggtattgtaaatgtgatattggttttgattgttcatgaattgagactaagatttacccatattttgattattacagggaatatgtgcacatgttgaccttatgagatttgaagatggaattgctattgtttctttagagtcaccatgtgtaatgcatttcagccaagttgaagctgaaggtggtgagagtagtagtagtagtagtagtagtgcaaatagaaagaagatcccagtttatctgaatccaggctctctgattctgatgtctggagaagcaagatatgaatggaagcatgagattaatcgcaatccaggggttcaaatgtgggaaggccatgaactacagcaggctacaagaacgtccattactctgagaaagcttcgatgtgttgagtagtagagttttgattagaccaccaaccatgctcacaaattggtgtgaaaggctcaaacatatatatttttctcaaagggtattaggttacaaaaagaaaatttaactataaaatcaattttaaaagtattaaagttacatttattaactcaaatgtaactttttttgttctctctttttctggttgaataattttttattattattatttttctcaacaaatgtatagtgtaaatatgagatattatttttaattatttaaaaaaattaagcattgaaacgtaaatttttctaatgatattcattcagttgacaaacacattagttcatgtttggaactttgattttaaaataaaaataaaataaatttaaaaggttttattcagaagcgagagagaaggaaaatgaaattatatacttgtataacgttgacgaatagattagaaaagtaaaaaaaaaaaaaacaattcttttcttgagttttagaaaccaactgaaatgtatcaaatcaagctttttaatctttatgttaattggtgttatgtatagtgtgtactgtataaaacaacactaattactaataagaacccaaatgaagtgagcatggatggacacacatggccaaatggagactaggataggctgcttaacaaaaaattaaaaatgttataaatttagaccgagtaataaactttgtattcttttctgttcttcactttgcttcatattctttatcaaagttacacatatatataggtgaatacatgcatgtataatgtacataatcattatacttgctattgctacaagtttgaatactattcctattattgtaatattattatttagaatatactacatattctatacttatagtcattcataataaaattccttcagtcaaatttttgaatcacaaaaataaaatacttgttctcatataatatgaaatttcacatttattttatgcaaaaattgtaaccttaatagtgggattggagtgtactatgggactagatcttcttctttattcgattgaatttggctgtttaaatctaacaaccaaactcaatcaaattaggtctaataacatttacacagttttttctttctctctaaattaggaaaaaaaatcttatgcaaataacataaagtaaaagacaaaggtgtgggtttagggcccaggtctgagtttgggatctgcggttaggtacgagatcagggcctgagtttgagatctgcggttaggtacgagatcagggcctgagtttgagtaaagggtctaggttcgggtccaagttgagagtttaggctaggaattaggtctatatccaacattcgagctgagtccaaatctaggttcgggggtcgaggtcggggtcgtggctggggtcttgattccagggtctgggttcaagtttgattttcgaagctagggtacaaggttta

SEQ ID NO: 64 - DNA, 2116 bp, Cannabis sativa
ttttctataattaattacatgtgtaacacattcactagtatctatatttatatataatggtccctttcgaaacattctacgcaaggatgacacacacaaatcgagaaatatttatataaaatgtaaaaataaaaaaatagcaggatgcgtttcaaatttatattcgtaatttactaaattttcagattaaaaaagtgacaataaaaattaaaaactagatgaattacatacttgtccaaccaagctcctaaatctccctataaattgcacataaattcgcaagaagcgtctacaataagcattttcccatattggtatttggtacacactactcttcctaaaagcttgaactggtctaatgcaaaaaacctgttgcagggggttttgaaagcatttggaattagagcttttaatacggattaataaattacaggtaagccaaactggctcaaacttctgacaaatgatgttgatatgcacaaaaaggcttgcaacccaattcatcagtcttcttcttttttacaaacatgaactggaaaaattagtaagcttgccatggaaactgttcatttaccaatctaatggcgatgtctgggaaatccgacactctggaactctcttttgtagcatggatgtccctttgaaggtcaccatttggtagcaaacccttctatagttgatgagctgcagcacaaggcaaacaaagcgaccatgtcagataagtaaaaatgtggcttgagcccatgacaatcacttgtttcaatacgttgtagaagttaacctggtctggtctaatttttgtaaaaccaaatttatcagtccatatagattctgcttcttcggcagcgggcagtacaatgcttctcacattcaagaatgctagcagcttttcaatacatgagaacaataactggaagtagccctgtaaaattaggcaaattgagttctgtgaaatcaataccgtcccatattgattatacaaggtactagttaactaagttggttccaagataagcagaaaggtactaaaatagtatattctccaataacaatgataaaatcaggaaaataaaatacatatatttagctcaattaaaaatcttaccttgccgtggttactattactcgtagcaactaaagggagttcagcaatttcttgtccaaaaactctaagaagtcccgctgacacaacagtagaactgcaaaagtacaaaagatgagattcttataaaaaaaaaaactgtggccagatgttcaacatatgagacagtagatactagacaagttcttacttgaccattagaattgcacaatacatccctccaaattcttgacctctaacattcctcctgagagacacaaaaaaattagaaagcatgaaaatgtgccaaaacttggcaagaaattcaggagaaaaggagaaagatctttagctaacccatagaccatggctggaataaggtcacgtccagattggaaatcaattataggatcaaagcattcctgaaaaattgaaataaaatatcagccaaatattgccatgatttcaacttctattggacaaagcaatgagatactctttcccgtacaaactaattatcacaagtaagccttagttcagcagagcaaaaataaatttcctatcatttggaaaagaaaggacatactatatttctcaagtttaagtgtcaaaaaaaaaagaaaaaaacagagggaagaaaagaacaaaacccagttccagaaatataacaagtattttaggatgatcataaacctgagtcaattaataataatgagtacactacttacatggaatatagaaacagccttcgaaagcaataccctggattcagaagaagcaattttgccactaataagtctccatctcacatcaaatccatttgtaatatccaaacctttctctatgtgcttcttcttcatagcatccgaaatagagtctgggagcttctcaggtccagtaactagtaacttctgcagagtagaatgtatcctgctgcaatccatgcaacaaaaccactgccccttaggcaattcctgttgaaccactaccagcaattaacacttaataacagaataacaagggaattgcattgca

SEQ ID NO: 65 - DNA, 7030 bp, Cannabis sativa
tgtaaatccttctaacagggtcctctacaggtattttaccaagttcttgtacctcgtcgtaaaaatgcacactctcccctgccaaacaactgtgaatcagaaggaaaaaagaacaacaagaattacatatatgtttcacaaaaattgtcctttatttttgtgtttccaagtgtttaagcaggatcatagatcccttttgtgtttacaaaacaaatgtaaataaattagggagagaatgtaagacctgtctgcaaatgccatgaaggaaagtcgaaaccttttgttaagaagaagttcgttgagtggttcggtgggatttattactgcagttagttccctttgcagcagtagcccactgtcagttatgcctagagctttgcccattgaatcaaattctagaggttccctcctagtcctccttaagcttatttgtgagagcagaggttgtgagcttgatatagagaacaaagtcaatacaagaatacctgcctgaaaaatatacacaaatatgtcaataaaatacacaaattgaaggacttgacagtgtaccaaaaagggaaaagagaaaccatgccataaccagtagaaggaatctggaaacaacttgaagccatgagatatcatcatggatttcatttagaatgtaagcagcaacccaaatacctggaatcaataaacaaaccagttacttagcacaaaagatcaatcattacaagatcacacatctaactgaaactttgtttatacataggttcaatttctgggttttgaatttgcttcatttttcagacaaaaatatcaatggatcagaatgtaagaagtacaaatcttgcaatgacccagaatatgccaacttaagacccaattaaaaaacttactattctgtgtctttgtaatgagactgtctatgactatgctactgaaagaataaaaaggaattttgtatggagccagaagtagaaacctaccgatggaagaggctgaaacaagtattccattccagaggtctttgagttcatcaaacctgaactcgatatgtcggatggctccagtgaagccaaccaaaacaataacatatagagcgtggagtgacacgactgggattatccattgaaatcccatatgacaccgataattcaaaggttttctgatatgtataactatggtagaaaagaaaatagacttgttagttaagcaagaagaaactggaaaacaatcatttcaagaccaaacaatgtttaagaaatttgcaagtggtgaaaattatgtagtgtgataaaggcaaaagagaaactcagcagagatattcttacatgcagagacagcaatccatggcaagagaattagtggcaggaaattataagatctgattggtggtagacacctcctgcaatatcaatatcagtgattaagaggcaagtgatctcagagtttactcatacaatccaacaactatttctcttaagtaggtaaactggtgtacttacttgacaaaaatgtaatataattggaaggtctgcgttatgcgacagctcaacaacaaaccgaaaccaaatagaccctcaatccagactgaaagcagaagagaaattaagaaacttaggagcaaaagtagattatattaatgcaaatataacaatgacaaagtacacaaatcttgagatgaatatggtgttaggcctcaaatacatatttaggtgcaagaataagttactagttagttagagagttagtacagcttaagatcctatactttctggggagataccgaagtttggaaggtttgtaattcttctgagatattaataaaagcctatattctaattctttcaagcactggattggtactatagtgtatcatatggtaacaaaggaagcagtggttaacctgcccaaacatagcaagattgccaccaatatctccttttgtatgtcaggaaattgtctgaaagctgcattaaacacaaattaagattaatattgtaagactaagatgaaacgaccaatgattaaaaggcaacagaaaggaaattcataatgtaccactaatgacaatataagattaaaactagcaaaaacttgaagggttggaatccagaatccactgcctttcgaacgaggaatcttgtgaacagcaaagggaacaattaatcgagacagaagcctggcaaaaacaccaataaataccaaaacaacaagaactatagatattagatttcccagctatagaaaatggtatatgagaacacacatcagatgatttgagcagacaaaaatccaattccaaaacataaaatgggaataatctttttgctgaatatcataaaatcagtacttaaccgattgtaaaacgctacactgcctgatcttacagcttaaacagagagcacatatgcaatagcttgaacagaaactcaaacataagaaaacagtgaaaaaaaattcttaaatccaatcaaaactattatcttcatttggtaaccttgatcaaataaatgatgacttgtttaaactgttcttgttatcaccagattactattcctttcataacaatccgctttgcccaactacatggctggaagtaatatcaccaaaacatcataaacgcttcatcttaccaatctaatcacttcttcaaaaactagatttttacttttcattcgagaaagaaggtctttttcacttcaatttaaagaaaacacagtaactaagtccagaacaaattatacaactaaccgtcaggattcatatatatgattcaataagacagacccacttggaataaaataaaataaaaaaaaaaatcatctttggagccaaaaaagaagtatctttgtggtgtcaatacgatatacaaacactaagaaaggagtttttggtcagaaaaaacaaaaaaggggcttctctattgaatcaacagtataccaagaaaccccatttggaactgttcagaggtgaatttgacttgatcagagaaagacccaattgaagtttgttgagttaaacaataaaaaaaagatccacaaaactaaaacagtagaaaataacaaacaaaacgtacagaatcatgcaaagggtcgatacaacaatggctatgtagtcactggggcagcctcctttaatcgcacagcttgccattctattgctttttgagttattccatctatgaactcctcttctttatctctacgcttctctggtctcgatttgatctaaaacgtgaatcactcattggcttccaacaacttgagggaggagaccacacttcccctttctccaagttcaaagcaaagcagcccaattttcaaaatatcacttcaaaaagtagaaaaaaaaaattgatttttgacaacaacccatttaacaagtcacgtttgactgtggaaaaagtggacaattcagtgggtttttaacgacatatgaacataaaatattattggcaaacattgtctataggactcattggaatcatcaatttacctttttctcttttgcttcttttttttaatatataaaattatttattacaaacccaaaagcttagtttgcttctttctgccatttttttactaggtaggtagtgtttgaagatgattgcatcagaaagctatcccatttatccattataatatttccaaaatctaaaagggcaatctttttgtcactcatcatcatcatcatcattaaccacatggctgatactcattgatatagaaagaaggaaagaaagagcaaattttttgaattcattgccaaaaaaaataaagattcgtctatctacattactctcttcgtatacattcaacgaaaagccttttaaaaaaaataagaataaaattctaattcatatagttaggaggtatggaacttgttctgctttccatcttcgattggattatttatgtactcaaaatcctcaccaagtctcttcatccgggggatttattaaccacagcaaaaccaccatttgctctgcatttgaaatgtacatttcatcagatcagaacttcaatgaagatataattcctttggggaaattttcaactagggaatctataaagacattaccttttttgagtactttgattcatggttttgtttaaggtcaccatattttggagttgatgctattgccccacccttgggattcccaccagtcttcttttcatctctagctttgttgaatatgacagtaaacccttcagccgaggctggatcattcacatcccattccccaaatttaggaagaggtctcccattcccatgttgttgttgctgcaaatttacatgaatcagattaatgataaaaaaaaccagaaaagaacaaaactttatcatttttattaaaaccccataagaccctttaatcaaaattctctcataaactgtataaacattgaaaccaaccaaaccagaaaaggttccaaaagaaagaatgaagggaaaaagaacttacagttgccatgattggaaaaattggagctgattcgaattattgttcagttgggtaccgtagagtagaggaagaaaaaagcaaaatgatttagaaagatactgtttgattgaaaaagatagagaaggacagtcattttataaagggtttttagaggcttaacgttctgtttttttcttgtgtaacttttggatttccacgatgtgtactcgtctttaacgcgggacacaacctgtcttcaccactaaaaatacaaataccatacaaaacagcaaataataaaaccaaacaaagatggaaagtttcaaactatgcgtttcgaaagccaatgtattaccatattaatgaaaatattaacaagtcatataaatacaaaaggccccactttcttcaacttcttacgcgtgaggttgtaagtgaaactatgttctagaaaagttcaacaacaatttcataaacaacgtggggttttttgttttttcttttctatgtgattaaaaatcatgtctatgactattctataaggctaagtttgaaggaattgtaagacttttttatatatacttgtttatgtgtacaagcagctttctctggggacaaaatgaatgaaggtggctgtggctgtggctgtctatacattacatacaaagtaaggatgcactacagactgactagttcgaatctttaatgtctttgcttgaattatgttgtatgctacatgaaatgatatgatcatttttggtctgatgaacttgattgattttcatagcgccatagaattcccccgaccaagttgttcaatgcgtgtgaagccataggtacaatcaagctggaagaaagaatggttgcgtagccatacataagcccaacaaaagttgccctgaaaagcatcagaatatatgatcgaaactaggatagtcaatcatagcctaaaaagattgtaattttaaagtggcgtccgttgtcactctacaaaattataagagctgtgagtagcagatattaggaataccagacagcaaaggaatactttcggccacctccaatgtgtagaacaccaaacagggcagcaaccacaaagacactcttccaatcaaatccgaaaagtggcaataatgcaccgcgaaaaagaagctcctgaacaaccccattccataatccaatatctattaaactttattgtcaaaaaagaaaaaaaaaaatcaaaactattaatgaggataacttttttttgcttgcctcgctaatcccaggcaaaaaggcaacaaccaagtaatccaacggctccagtgaagtaaggacctgtataagaaaacctgaccatgtaagaatatacagtgggatggccaaaagcaggagacaggaagaagatgcagctattgaagattgatctcgactatgatatggttatggcttaataagcaagttcatattttctgcagaagcatttcaaatatctatgacggaaatttaacaatctagtagttgtactgtatagataattgacgataaaccaaataataagctctcttatgattttttttactgttataacaaattatagagctacctgccgattggcagcttcactagactcagcaaaatctggccatgtcttcaataaaagatatcggcttgatgatatcactacaactaatcctgtaagcaactgaagatgccacatctcaaaatcaactgcacacaaggggagaaaaagtgacgctctataaatgaaaaaggttattccaccaactgttcaaaggaacctagcattaaaccagaagaaaaaaatcataatcaaaacaaaacaagagttccacatgattctgcatcagccctgagttctcgaatatgctataagatcgccacaaccaaatgtagactttgttgacaatgctgaatgttcccttatcaaagaggattaaagtgaatttataaaccataactatgcaataacagaaatgatgagacatacatgatactttcgaggaacaatcaagtattggcaatccttctgttgatgcaagatgtgatacctacccattgcaaaagaggatattccaattaaaaaacagttgtatagaacatataaagtataatcatgtttggttttgcaaaaaatttatatagcttataatatagttggctaaccaggtaaagaagaatctttcaagatgaactcccacagagttggtccacatattattgatggaaattattacattggagtataaggatactaagtaagaaaaaacattgtaagaatactaagtaaaagagcatacttgtcgaagcactacaccgaaagcagctatcaagccagaagtaacagcacatgcctgaagtactgtacccctggagggaaccatattcagtttttgtgcagctgaactatcagaagggtcaaatttagtgtcatcttcttgaccatattcatctttagaagaaatgtcagcaacacctccaagtggttttccattctttttcaatttcttcactgagtttcttcttgcaaatgccctgggattacaggtaaacccctgcaatgcaagcattccagcagcacataacatatat

SEQ ID NO: 66 - DNA, 6083 bp, Cannabis sativa
  modified_base (3281)..(3282): a, c, t, g, unknown or other
tttttggttgtttatgtatttttttttttttttggaaatttcatatgtatgtatgactgcgctaaatttgtgtgggctatataaggatctagtctaagcccatattctaagcttgcctaaggcccaaaatataattgatcagcccaacctgcccatacgtggataaaatattctcaggcaaggtttttttctttgtagtattatatcatgtaatgtaactaagcttatctcaactcatcttcaagttgtcgagtgcacaacttgaagagcatcaatcactttgtttctcaggataaactagcttatatatattaccataatatacgaatacgatacccaaatatacctaaaggtacttcgatattattgcaactaagtattaacacaaactattattatcatgaaaaatttaagtatttaagtacattcgaacttatatgttgttaaaattttaatatgtaaacttacgtgagtgaagtcgatcctacaaatactgtaatgaagtatcaaataattaaatctttatttttatttagcaaataaataattaaatgttgaaaatagcaaaaataatagaaataaacatataagtaaaagaaggaaataacaatgatttagaaatataggaaattagcatcaactttctatgataaaatacaatctaattactctttcaatttcatgtgatagcggattaaaattcaatctatattcttattaggacatatagaatctaaatcatatgacaagatctcctatatatacttttgtggtaaattatacatatgatttgcattaaacgaaaaaatcataattgttacatagatcatataggtacttttgtccaatatcgaaatctatgtttatttcactgtatagcataatcaatattcacttttcaaattttgtattaaaatcataaataaataattggtaatcaaataattataaggattaagtataaataaaatagatgcaaatgagaaattaaaaaagaattagaattgtattagaaccatagagaaatatcaagtagtatccattaacacccctaattaaaaattaactactcattgttattgtgaacaattgattaaaactaattagaacatgcaataaaaagaagaagaaaaaaacccgttgataaacaatggtgatagtatttttcagccgctttctacctccaaatccgtcaaatcacgcaagaacaatgcctaatttacacaagcgggtcgcgacatagccttcccaaagttgtggcctaagtggcccattttcgggcagtgaagcctcttcacaccatgtctcgacattgacttcccaatatcgaagcctgccaatttctcttgaaattcgccttttctatccatttttagcacaagaacgcactggcattgaaattttcatgccatgaatttactccaatttcttcaattcttcaattttaaaaattctgattgcaccaaatattcaaaaatattctacggactgttcttttgccacactaatgacaaaacttcaactaaatcttaatcttttacactatttttcttcaacttcttcactttcctctttataaactaaacctaaaaacacaacaaattaaagcttaaaattaaacaaattaaaatactcaaaaataacataaattagaaccaataggcgagttaagcctgcccctatggctcactcattttaggggcccaaataaaacaatatcttttaaaaaatatacatatttttttaataatttttaaaaaaacaatttatcattatagtaagagccaataaaaaaaatttatctataactcattttaactcaagaccgacctcattatacttaaatattatggccacaaattaccgttctaaatattcatatcatatgttaaatattctaccatattattaccactcactaatgcttatcaccatataaatatagtaaaagattaagtaatcataataaaatgagaagcatgatgacatgtcaattgtcaagtgtcaatagatcaccgctaaaacaaaaaacgacaattagaggaagcaatggcatgagagatacgacaataatattaaaattaactaagacaacacagtatatagtatatatatggtagggtaattgaaattgggtaataaatgagaaattatacaagaagcgacaacatgatctgtgaaaacgacactgcccagctacccacgctacgatacgaatacaacccacaatgcaaaatgacaaataacaaaatttcactttccccttttaactttcaaatctctcacttttgtctttttttctcactttaaaccttccattgtaaaattctcttactttcttttttgttttttatttgacattcaaatagaggttaaggttatatatgaaatgcatacattacactaaataaattatattaagtttaagtttctacttttttctatctgttacaaataatttaaaatgcaacaacggtaatactattttaaatattatattttacaaaatttatagattgaaccctctattttattaaataataaaatagatcctatattttttaaaatagtacaaataagactctgagctcaattttcgacaattttaatttaatataactaacttaaagacaattcttaacacgaataaataggggtattcattggaccacatccaatatttttaagactatccagatccgatccaattatttattagatattagattttaccatccgatctgatcagtcatccaatcgatccaacatccattggatgttggattgaatcgattatatccattagatgtatttcatatatatttattgatttaatttgggtttattcaatattttagacttagtattttttggatcggatcggattcaatattatgggtctagtatatattggattagattggatacatccaatccaagaaaaaaagggaaaattttaatgttaatttttatatatgcatgtatattctacatatagcaatataaaatctaattactcatccaacttaaataaaaatactaattagttcaattagatgttggatgtactggatttttggacaccctatccaacattcgatccgatccaattggatattcaaaaataacatccaatctgatctaattacaatgggatatctaatgtttagcagttggttgtaattggattggatgatttatgcacacccctacatatagatgtagaaaatttaaccagttttgtcataacgcctctagatcagattattattaagttttannttgacaaaaaattagttcatggtcatatttgtaccatttgaaaaatacagggttgattttattatttaacaaaatagagggtccaatttataactttttcaaaatatagggtcgaaaatagtatttacccttgattcagattgccattttttaagttttaaggactataaagcaaattcgtgttagattttaagggataaatatgcaaataactatttttaataccctcctttctcaaccagagttttatttgcaccccaaaaacttatatatatacactctcattttaataatttttattttatataatttatagggtgttgttacaatgcaccctcttgagagggaaatccattgatacaccctctactgtttcggcattcagaaaaaaaattcagtccaattttttttatattcgtgtacgttatagttatttaagatattctataaaagtctaagaaattcaaaataatttaaaatatagaaagtagtgttcgaatattctattctacacccgtataaaataaaatagctacgtgtgtaacatattgtttgaaccatgtttttggtgtgttaaatttttccaaatttcttaaaatttaacaaacatacatgaccatgagaaaaagtttgactaaaaaattattttgataccaaaacaaataggatgcatcggtacatctattttaaaagagtacatgataaatttttcctaatatatatgtatatttttttttgttgacatagtgattagaaaccttcatgaatttatgatgcaaacatccataattggcacaagaaccttctcgaactaagataactcatcgtttaaccgcaaaacatgctttgtcaaatcacgggaagctgaattatcaaaacagatcacatgaaatataactgctccagaaaatttaaacaataaagttatgatatatatatatatatatctttaatttctctacaaaaaaaaatacaaagaattttgctacgtgtattacactaacatcaaccaacgcagaagaattgtttagaacaatgtattagaaaaggcaaacataatttaagaaaaatcatttttttttttttaggtttaaaaagaaaaagcaaatcagagaaaaatatgaagcttctaagtaaagattaaatgaggatttaaaaccataattgctgctaatctaatcctatgagctaatccaattccaccacttgtaaaggcaatgcataatacaattttttttaaaaaaataaaaataggaccgttagaaataagagtatggaccaagaaaaaaaaggtcaaaaaagtagggcaaaagtgaaaaataaaataatggaaaacgccaaaataaacaaacggttcatcaattcatccatgcctcctttccttgtcagctcagctggaatcgaaatcattctgacccaaccaaactattccaaatccaaaaataatgaatacaaacttacaaagtcattatttttgaattttcacattattattattttacattcaaattgtgttaccccttttcacacgttagttttttttttttcattaccaaatttatttatgttgtgagtctaataattaaatacctactactatatagtattgtgtgttgttttgtcacataaatgagttcatattgtaaacagaaaaagtcagagtcaatactcaagactagaattttgtaatgatataaaaaaaaaaaaaaagaagttatgtataataatgagtagtaaatttttgtttgaccgtagaccaaaaagaaatttgggaatgaactgaaaaatcatgaacaaggcaaggcatgaggaaatcattgtttcaattgctttgatattgcactgaacaaaaaataataattatgaattgagacagggaaaagaaatgaaaccaatttaatactttttctgaatcccaagtacagtaatccaaagaaaaatcagttaaaaaaaaaagaaagaaaaagatatatataattatgtatatatgataatgaaatagacaagccactgtcccaaagacaagtctgtacaacaagagcctctttttttgttgtctctatctatgtctctgtagaccccaaattttttggggttggggactcttgtgggggaactttgggagcatctatctcttgttttcttgaatgaaccaaaacacatgcctgagaaggcaacaactgtaacaacagctaatgattcatgacccaaatgagctttatatatgtatatattgtagtttaatgagctagtgaaagatttgttgtttttactctggtagagatgatgtgttgttgttgttggtcagtcaatcctatctgtgagttgtttcagatacttggcttcctgaatccccacctgattttgttggtatttcagatgaacccgatatttcccttgttgattcgatttccatgctcgttgttcggctctttctgtttcttcgttcctgtaaaaatttagtgctttaagatgactataatgtcatgtagtaaaagatattgtgaaatgaagggaagtcttggcagtatgtataatatgaagtgtatcaatatgaaacactatgtggcattctttgagagtaggaatggcacctcacgaaatgggtagtcatcggtttctagcattcgtacaacatgactcatttttggcctcttttctgaatcaggatcaacacacctaagggcgactagaagagcgtgttttaaagcacgtgtcgttggtttaacttctaggaatggatccacaacctcctcagctcttcttgtacccaccattacctttaaccactccacaagatt

SEQ ID NO: 67 - DNA, 3475 bp, Cannabis sativa
atcttgttgaagctatatggtttataggtgttgtaagtgacatttgggtattcttgcaggggtagcattggggatgaagaattggctgcgaataacttttgctattgaaccttcacttcttgaagatggtcttcaaaggatagaagtcttttgccataggcatgcaaagaagcaataagatttttattgtatgtgtcttgaaaatgctggtggggtgggaggttaaacagtttatatcagaaaactatcatcagcttaactaataaaaactaaactgttgtcccaatatatttaaataaaataagggttgtttgagatgatcaactttttgttgatcttgtatgaagtgggggatttacaatattttgtttttagaaatgagaacaataaatagtttttgaaatttttaaaatacaagtcatatttggttagtgtttttttaaaaaaatattgaccaaagtgaattagtttttaaaacagaaaataatattttgctgttttcaaaattcttgttttttctaactttattttctgaaaactgttttcaaaaaacaagaccaaacaaaccaattaaaaacaaaaaacaattttttaattataatgtcaaacatgcactaagattctcgttgatgaactaatcctgatcattgatctatttacttttctatattgccaaaattatgtaaagtaaaattaatgtctccaacttaagaagcttaagcacttttttcggcagaaagacactactgccactgcacttctatatctgtattttatcttacttttatgccattgaacgttgagatagtccagacaaagaaggaaaataataaagcatccaaaagacaatttatttgccatagtattttggaaatcacttttatggctaactaaccattacagtgttaggctgattagagtagaaatttaattggttgctaaataaatctatactatatactactactgttggcacacaacatctgccaaaatcaatgccccttgttcttgttcctgttcttgatttccttctccttctacttctttttcttctaaatcttccactatatgctgccggcagtatcgaactaataccaaacacataaatgctgcaaaagaaaattagcatatacataaggaattttcgaacaagttacttgccacatggaaccaacataatatatcgatatcttaagatgaaatcacctgtaaaaattcttgtctttagagaagacagattccaaaaggccgtgattgctgatattgccaccatttttttatgtgagcaagttccccatgtttccaacaccctccaaatcaagtactcaactacatgcccacagttcacttgccttttagtttttatttatacacactcacaataagaagaatcatttacagtcagtttggttgatccttttacctctttggctgatctgaatggagtaagatgagtacatttttgggaccataaacgccatgaaaaaccctattcaaatccgctcaaagtgttaggactcctattatccacataaaaaaaaaaatgacaagagtgtgaataatgatagatggttggaagtaagtgacaatcactataccaattgctgagagtctccacagggtaaaaaggtggccatattcagctcctaaaagtaggaagggagctacctgtaataaccagaagaatgggagttgtctaatgaattcaaaatctaaagaaaagttttgaagtaaaccatgagagcttttgtgattactttgagggtcatggatggctctccagagaaaagatctcttgtctttgagattgcaagatttgtaaacggtagaatcactttagcaaaacgtaaaatatcgtcttctttaagcttgaattccttattcccttcattattatccctgcaagtacctcaaaaccattaattaaaagcttaagctccataaacttaacataaaccggttgcagctgtacctttggcgtattgagtttgagaagaaagacaagcctaaaaacaaaaatcctagcttggaaatcgctgagaatatgctgaaaacatgaaaataagcctaaatttagatgtttatataaccagaaactttagagggagaaacacatagataattaaagaacatacctaaaactaaatccttgtgcgaagcaagaggagaagaagaacaaagatccaaaaccaaaccaaaggctcgacttggccacatctctccacatgactagatcacttatcaaatacccgattcgatctagactagcgtgatagtcctcatcaatttctaaataaaaaaaaaaaagaactattttcagtactaatttttcttttttaaaaaaaaaggattgctgaatggaaggagcagaatatttggaacttacttggaggtaaacttgaagagggcacacaaggaaccaagctcagcctttccttcttagaccttgtgctatggcgccttctcctcggctttccaaactcttcagccagaggtaattccttctcttctctaacttctatttccgatcgcctcctcgatcttctggcattccttggcgaggcacaacccagcaaacccaattgagatgtcctagtcttgcaacgccgccgcactcccacctgctctgacggctcttcagccatatctagccgatcagcgagacgggtcttggattttcgaagaggggaaggagaaagaagaagaagttctttaagaggaagagaactgggagattttagacacagagcagaaggtgataaagttctcttgggcgatgactcgatgagtccaagggagagatgagggacttcttcggtttgagccagccgcgatgctgatttagtccgggaccggagctcagatcggtgctggtgatttgggggagttaaatccataatattcaagcaagagtttcttcgaaaaaaaaaaataaaaagaagaaaaagaaaagaacttggtcttcgtgaatacagtatgagaaaattctggggttcaatagatttgatttttttgttgtttgactgtgaaattttggttgggtgtcggggtggttttgttgggttgctgaagaatgtttccgagtgtccaaagtagccgttgggagaaagaggcttattattttttgaattttagcggcgggggcgggtggagccgtagtgggcttcaacggtaagaaacaggcccctttgtctgctaacatttttggactttaggcttcctttcttttatgggcccgtattgagtatgggcctttattattcttaacatgaaaaagagaagtgtcaacgtaagatgatgattatatgtggtagcttatgagccgtcgattcagattatagtgagatcgttagccgtttggttttcaacttttgtcatcaatggattgataaaagcgtacatacccttctcatctctgagctttatttccaagttaatggataacttgttattattgttactttttttttttttt

SEQ ID NO: 68 - DNA, 705 bp, Cannabis sativa
tgtttttgctcatttggggagaatgtttttctacaggagcaactcttagcaaaggatttaaccgtggtttgggtacattatctgctggagggcttgctttgggcatggcagagctctcgaaatgtgctggagaatcggaagaagctataataattgctagtatctttatcgtaggtagtatttatattcaaaatgtgattgtttgtagcatattactcgttattgtaccttttgtttttgtcctcatgttacttacatttagaatttttcttgttgctcactctgtggttgctaggatctttagcaacttatgccaaattgtacccaacattgaaggcttacgaatatggtttcagagtcttcatcttgacatattgtttcattatggtatcggggtataggactggggaattcattcaaacagctgtgacaagattccttctcattgcacttggcgctggagttggtttgggtgtaaatatagtcatatatcccatctgggctggtgaggatcttcataatttggtagctaagaatttcataggagttgcaaccgctttggaaggtgattaaacacatgcttgtgactctcactttgccaaatacttgtgtttggcccattattcttctctgactgtcatgatgtttcatttaggttgtgtggacaattacctaaactgcgttgaatatgaaagggtcccttca

SEQ ID NO: 69 - DNA, 1050 bp, Cannabis sativa
tgtttaaatccgttcatatgatatattcaatttaatgctatacatctaactgtacgagtaatatttacatccctaaaatggaaaattggacggttgaatatttaataattgaaaattaagaatctttcttaatctttgttgttgccccataactacaaaaatgtggcgtgaaagaatcaaaactcagccaattttaatattatataatatactatcatcatagctttcgccatgaggtgtcttatcatggcgagtactgaagtttgttgagttcttttaatatctaactttatttattgttaatgattatgggttgagaaaatttgtacgtattggttataatcaagtgggaaatgattagtttttttttttatttattttttccttctttctaaaacaaaatgtagaaacatttgaataatagaaaatcgaaattaacaaaaagtgacatatgtatctatataccatgataggtttgctaattatagcaaaacatttttataaataattatatatatgatcaatattgcttgcttccaaattgatctgacaatgtattaaaattatatatacgttagctcttaatgtttattttactgaaatcagtttaatacgaatatctgaactgttccggcaaccattatttaatccatctgcatgcatgcattgcatggagtttcgaaacttgtgcaactttcctataaatctatacatatagcgtattccagaggataaacagtttccacagaatatatatatatatatatatataaaaataattatatgacattagaacgttttaaaaatttgtctctggcaagtggcattgaattataaatttgtacatatatatatatatatattcaagataataacattatggaatcttgttagtttctaggaggaggagctttgggtgttgtctttctcgtatattaaatttttaataaagacaactcgatcattctaatatccattctagttactatatacatctttttctcatcacacctcccaaaaattgataaacaaagctgcttgctgctaggg

SEQ ID NO: 70 - DNA, 2236 bp, Cannabis sativa
tgggccgagtcttgttctctaacaataccccctcctcaaaaataaccttgtcctcaaggttagtcagcccgtatgtgttgcaaagtgaagtgaactcttcccatgtcgcatcttcgggtgaactaagagtccattggactagaacttgcttgatcgatcctgtagagcttggaatgatgtgggaagcgagtattgcatttggcatcatcaaaggcttattagccacacttaactccggcaatgggtaacaagtagtagggtcctttccatgatatggctttaaaagcgagacatggaatgtagggtgaatgcggctgtgggaaggcaatgcaagcttgtaagcgacttccccaactctagcagcaacagcgaaaggtccgaagaaacgtcgacaaagtttagcattcaacctttttgctacagtagtctgtcggtatggctgtagcttgaccaagactaagtctcccacttgaaattggatgtcccttctctgcttattggcttgctgttgcattcggtgtcgtgccttctctaagtgagactttaaatgttgcagaatgtcatcccgagtgagcaactcatctttaaccgcttgtattgtagtagacccccttgtgtatgctggtatggttggtggtgttctgccataaacggcctagaatggtgtcatctcaatagccgaatggtggcttgtgttatagtggtattcagcccatgataaaaatctgctccattgtttgggattgtccgcggagaatgctcttagatattgctccaaatatctattggtgacttccgtttggccgtcggtttgaggatgataagaggaactcatgttgagagatgttcccataagttcaaataacttcttccaaaaggctcttgtaaagattgggtcacgatccgacactatggttcttggtagcccatgaagtttaatcaccatcttcgtaaatagttcggcaacctttgtagcagtataatgagttggcaatgctccaaagtgagcatatatggtgaatctatctaccaccactaggatgttggtagctccattagaatttggcaaacccacaataaaatccatagccaagtccacccaaactctttccggtattgcaagtggttgaagtaacccatatggtgccttagtggagtatttgatggtctgacatgttgggcaggtgcggacgaattctttaacatctttgcgcatcctcggccaaaagaaattttctcccaaccgtaaaaaagttctctcaacacctgcatgacctccgatatgcgaagagtgaaactctgataataactgggcttttagattagaattcttactgatcaccaagcgatgatggtgataaaggagaccgtctcggactgagtataaggaggtgtccccactcccttcttgaagctggtggagtaataaccgtaagtccggggaagttatattctccagtctcaactcatccaagaactcatatgaccccgtactcatcgccaacatgagtgttggttgttgttcagcttgctgccgtgagagtgcatccgccgccgagttttgtttccccattttatattcaatggaaaactggtagcccatcaacttgtgtaaaaattattgttgctccggagtttgaatcacttgagtgagtaattctttgaggctgcggtggtcagtccgaatgataaagtgtctgcccaacaaatactggcaccatttagtcaccgcctccactatggctctcatctctttactgtatgtggaagcttggagaaattttgggcccaactttttgctaaagtaggctagtggatgaccttcctgcatcaaaacagcaccaatacccacattagaagcatcagtttcgaccacaaagttcttagaaaaatcgggtaaatgaaggactggtgtagttgtcatggctgtttttaacttcgtaaaagcctgtgccgcctctgtagaccagtggaaattatccttcttaagtaatgcggttaggggggctgcaatggtagcgtaccgagctacgaagcgacgatagtaccccgtcagacccaggaatccgcggagctgtttgagtgtacttggggttggccaattgatcatagcatctgtttttgttgggtctgcccgaactccttgatacgaaacaatatgccccaaatattcaatagtgtcttgaaagaattgacacttgctgcgcttggcataaaagttatggctttttcacaa

SEQ ID NO: 71 - DNA, 2373 bp, Cannabis sativa
aatctcacacaacacacttctgaagctttgaaaaagaacaaactgtcatcaacgaacaacatgtgtgaaataatagggcaaccccaaccacaaggaagcctaaacaacttgttttcacaatctcttctaaccaagctcgtaaggctctcaacacaaagtaaaaaaagataaggggacataggatcaccttgtctaagcccacgatgaggagtgattgagccaatgacctctccattcaacaaaacagaatactccacaaaagagatgcagtcaagaattttacggatccaaacaccatgaaacccaagtttaaccatcatcttctccaagaagcaccacttgacccgatcataaaatttggacatatcaagtttgagagtacaaaaaccatcacctctctttttcttcttcaaagcattgatacattcaaatccaataagagcattgtcagtaataagacgactcgaaagaaaggcactttgttcatctgaaatgatgtgaaacacctctcacattacaagactaataggacaaaagtccaaggccttgatggaattgtaaattttagggattaagaaaataagagttttgttaataccttttaaactagaatccccattgagaaaaggaagagttgcagaataatgtcaggcctaacaatattgataaaacccagttgtgaacccatcctctcccgaactttttgagggatccatctgaaataaagcttctctaatatcatccccgcaaaaattcttaatcaaatgagcattcatatcaacagtgatctttctagggacaaaattaataaccttatcaaaagcatcaacagaagggcaattcgaagtaaacaacttggagaaattatcttcgaaaatggcaccaattttagcttgacccgtaacctctagacccatactattctgaagcttcaaaatcttattctttgcccgtctgcccgaagcacacttatggaaataagcggtattcttgtcttcaaattgaagccagtcatttttagcacgggaagcccaatatttttcttctttttcttggagaacatccaactctttttcaattttacagagttcctcacaactgacattatcaagattatcatccacaatctcaaattccttgagctttttatgaatcacaacgcggtgacgcttgtgaatttttttgttccaatcattcaatttgtctccgacctgtatgacattaagttgcacattacaaatagagtctaaatctttaattctccaaaacttaccaataagatccacacaatcttcctcgttagctcaaaaaacgataaaattttgaataaaacaatgcttatgcgacacataataatatttttggtatgatgccatgtaaacttattttttaatcaaagaacgatgcttaacgatacttttgtgattgtccacttcattttttggccaaagttatggcaaaattgtgcctaacgtcggccttgcgaaataatttgattaaaacttaatttggtaatgcatcctattcatttggatgtcaatttgaggggttttgcttttttaattttggtaatatcaagatctacatgtttacaaatttaaatttgggacattaaacaataaaattgagatttttctattagagagttgtataattaaaattttgtattctactcacttcaaattttaaagctctacacatgttaacgtgttgatcttgaacaaaaaaaaaaatctcaaagtgacatcccagtgaatagttatgcattacccaagttttaatcaaattttatctcataaaacaattgtttcaaaatggctttaagccaataaataaataaataaataaaagctttcatgacaccatcattatttaaagcatccattttgttctagtgaaaaataagttttcatgtcaccatatcaaaaatatcaggtatcgttaaagcatcatttttttttttactgaaacaagtttcataccaccatcacaaaagcattattatacatcgttaaaactttattttttttttttctaaaaaaaggggattattttgtgaggatcccttccctactccctttggtagtttagacaattttggagaccaagtaggccttatacttcatcctctcttaattgggttatctttatgcaactcaagggttcccatcacattaagcatagcaccaccacaacaaactaatcttccaaagggtcaagcataatccctcctcccatgaaggactatggtggaattcaaacatttgacccaagcaagaaaggatgtccctaccgcacaacacatggtaatacatcacaaaaacttgttttgttcaaaatattaacaataaaaagtaatttgcggcataatac

SEQ ID NO: 72 - DNA, 4782 bp, Cannabis sativa
tatcatcttattgtatttagctaattgtgctcgtggatcagtttttcccttgtacagctcgatgtggggcatcttgaaattatttggaagcagagcttccgtgatccttctcacacagggttctagatcctcatcttctaaattcgataacaccccactttgtttcttgaccaactaggtcgaagcaactatctgttcttccaacctttttgtatcactctcagggaggttgcgccttcccatcttgtcactcaaatggttcttaaggtcacctccacgtggccttgctttctcacttttgtatcaaaatcatatttggcatctagtcaccgtcgaaggtctgttgtggaccagctgtcttcgaagtgacccacagttattctaccatcttggttaaccgagtcactagggtggtttctacgcccgttgtgcgcaggtactttcgcaccttgtcctcatggcgtagctttgcctctagggtcagaagggcgtctgggctcaaaagcaccggtggccttctctgcctttaagggttgaccaaccatggtattatcctttagaggaggcctaggtgtgggcttttgtgagggcttgcccgctttgcccttacccttatccttaggaggatttaaggttctagcctctgtttgttttagggtacattgcttggccaccacttccaccgagggttcaccatcagattctgccaattctccgaacttactctgtagacgctccatcatctttttcatttttgtagtgagttttttatgttcagccaactccgcctgagttgcctctaaatctttggtcactctcaacaaactaggatcatggtcatagtgatacccatctctgatatagtcgttgtcttcaccgtctttatcatccccttcgaggtactggccatcaccaaggccatcgggtacgttctcagtatcctcccctcgggtctcggcgcgggccataccttcttctttgacaccgccagtttggaggtcagaggtgtgggagtcagcctcctccattactgtgtccagcgtcactttcttacttgtattcttttgcatgttaagcatagctgaagtgagacaacaactaactaataagagcttaaggaaatacaaattattaaataatagataaataaattttttacgtggttcaggtgttaatgatccttagtcggcgagtcaatagtagtattagtcttcttcttctttggcaaaaatgatgtttgagtattacaagtgtttacaatagcaatctctgtattcctttgatttctctctaagaagaaagctctttaggaattttagtagagttctgtaagtaaaaattgttctctcttagtacataaaaatgggaggtatttataggcctctaggtaggcgagggcataccctctttcctcactagggttccttactcagcacgcaaatgaggttgtgcaatactacaagaccatatgaccgttgatttggtaggtggctctttcattgtgtggtgcttaatcggtgcaggttatcacgtgcggacagggacacatgtcgttcaaagttctttcctttaaaagcaatatcctagacaagccattagacaataagcactacagtatgcgcacaactataatctgacgcaagagacaatgtctgacttggtgtcagacgaagtgtaaccgtcaaatatatctttgggttagggataacaaacttgaaaagaaaaatatcagaaaaaccaaaacaagattttgtatgtgtaagcttgatgcacggtgacattgaaattgggcatcgctatcagattgtgccatttcttgttagaaggattatttttggttgtcggtgtataagtaaccaatgaaattcgtttgtcatactacacatataaattataatggacttaagtcaacgtacacacaataataatttataattatttttacaaccatagacattaatttactaactcaagaaaatatcattgaaatgctgttatcaaataggacctagcagtaaattaatatgccaacatatatgtactgtctattgatgatacaattctaataattaagatttaagaatattaaactttggtctcttgtacacttatcctcttaaataatattgatctaacactgtaaattataaatttttcaaaaatatatgtatatttactataactataatgttcatagtaatatataagaaaataattttaattataatctctctaaatgtaaaactaaaaatgtccataccacaccaaatgtctctgtggtagaatcatcttaaaatttatatatttatataaataaaaaagtatctatattaaaccggtgacagacaggtaatttcagcacaatttattgaattgacatttcttgtaaattaataaatttgttttaacgtggaagaaaaaagtgatatattccgtatgaaaatgtgaacaccacagaaaattattgaattctaatttctgtgaattattgggtcccatccttatcatgaacagaatctagtaaaatcatcactatctgatgcgatctaccgacttcaccttttcattttattttatttgccttattaattataagttaattaagtccacaattggatatagtttaaggtggggttagttagttactcatcatctgcgaaatatctataacaatgtaagaccataggaaaagaagcaaaattataggtcattactaatacacattacatattatataaaagtgggacgtgattttgtcccgtgattgtactttcacggaatgtattctgtgatatacgtcatccgttagatgagaaagttatttgatctgacgactgagattgatctaggggtaattaggtttaaaaaatagtaacgtatctgacacttatctaatgtaccctgagacacatctaatgtaccacggaatacattctgtgaaagtacatcacgggacaaaatcgtatctctatataacgtaattaaatatatatatttttatgtataaaaagtaacttcaacaattcccagcttatttaatttttaaaggttagcggataaagctagtctttaaatgatggatggcgtgttaggaagagtcttaaaaatggatcttctactagattctcctcttcaagtatgtatgaaagggactctgtatttttttaataattgataataataatattataaaatgcatgcacacaaaaacagtattcctagaaattatcatgaatttgtctttattattatatctctatatataaaaattcaattttttactatttagaatttggtttgtgaaatttaaaataatttaagaggctaaaaataaattctatgattataatttattattttagatgggtataaagcaagtttcaaaactatctattttgatacttttactttataatcttatttttatttttacataaaagaagttgtttagaagtttatttttgttatctagtatatatatattattatcattaaaatagtattatattattatttggtatatattaaattaaattttcttaaacaaaatagtaataaaaaaataaaaaagagaaaatatatataaaagacgtaatgacatttttttttcactataataataagtatctattaaaatatgtcaaaaaatatattcatgatgtgatcaagtattctttaaagcactccaatgctcttatatttgtttcacatgaaatcaaggttaccaatcatacatcaattttaattcgatttttagaacgttcttactagtcagacgctttacagtgcgttaactagttacgtacttttaccatgttcgtaatattaatatcacttcaaaaataaaatcgtcacaagtaaggtgatatgaattggacgaattatatttcagataaaaaaaaaaaagaattaattgggagaacgtgatattggcagtgaaaattaaaatcgaaaatcatgaaacactcttaaattttaaacccttttaatctagtacacattatgtaaatatattaattaatggtgagagagagagagaaaaagatataattgtgatgatgatatgggggggccggtatagatcttgatgagtttgtgatctaatagatgatatatagataatagatatagatattatgagacaataataaaaagaaaacttggaatgaagagaatgttaggttaacgttctagtaattgtgacaaaacataatgattattaatggaatcaagttcaattgattattgtaggaagttatattcacacatttaatttatacatacattcatgatatcatgattttgctcttgaaaaatttgagtcattacattttactttttaatagaatgaaataaattttaaaatacatataaaaattgatgaaaaaaaattattaaattattttccatcttgcactaaaataaattttccttccaattcaaaatgagataatcattctactaaaatagtaaaaaatcattcaattagaatgatattaattttgatactttaaaatgcaactaaacaaaagaatatgataaaaattatttcctcttttattttattaccgcgaaccacatgttactttagtatttttgttcttattctatagtcacataaattacaagtaatatcttatccaacatagtattattgagaagcaataataatgtgatgtaattataatttttaatacgtgaaataatctttaattaagaagaatcatctaatataagataattgaaattaataagctaaatacattacactactacaaaaaa

SEQ ID NO: 73 - DNA, 1914 bp, Cannabis sativa
caatagatattaaatggacggttgtgattaaccgaaattacaagatctctggtataagctgcaaccggagaaacaaaagacttgttctgttttcattttcgacggtcccttctgtttttggatccaattcctttgttttcttcttctccgaaaaaaaaaaaccatttctctctgctcccaaaaccctagacagagagtgagagagtgggagtgagacagcacaatgcggggactcttcgtcttcatcaccgtgatctcactcgttcctttcctctgcaactccttctcccccgaaaaccctaccgctcgacgcctccttgttctgctcgatgacttctctcttaagtcaacccactccatcttcttcaactctctcaaatctcgtggattcgaacttgaattcaagctcgccgatgaccccaagctcgctctccaacgctacggccagtacttgtacgatggtctcgttcttttctctccctccaccgaaagtaagtttttttaatgttaatttcattgttaattcatgtgattttggttttttcttatattgatgtgatctgatttgtggggaatcaggttttggaggcggtttgaatttggagggcgtgcttgatttcgttgactcgggtcacgacttgatcttggctggtggtgcttcttcttccgatttgtttcgcaacgtggctacagaacttggagttgattttgatgaggtaagatgatggttttgttctacttggtacattttttatagcattgcgagagctatacttatggatatggcgtttttttttatcttaggattcatctgctatggtgattgatcacaccaattatgcagtgtcagacactgaaggggatcatacattgattgccagcgataatttcattcagtctgacgttattcttggaaagactaagattgaggtaaaggtttaattttcttaagtccagtttggcgttttattatttctagtaaagggtacccattattgaatgaagcagatgcaacatagtgacactcagtaatttttataatttatggaacaggctccaatacttttcagaggagttgctcattcacttaatcctgctaatagtttggtaaggtccaaagtcttacgattattcatgttatgtaatataagctttagcaatgtgattttgataagttttgcaaattatgttcttttggggttgagtttgtgatgtttgagattttcaattctgaggtatgtgatatgtctcttaggttctaaatgttctctctgcttccccggccgcttattctttgaacccaaattctaagtcgtcgcaacctccatcactcactggatctgctatttcacttgtttctgttgttcaagtaagtctctctcctgtcttgcaccttcttttttatcatttacaacttaattaacacattgcatcagcgttttgtaaagttcatttttaaaagtagaaagaccttttttctcactttgttctttcgattttatgctatctaaaattagtgttgatattgatctttagttttcacttatatttttctcagtctgcctgcagataaaattttgcctattaaagaaatatatgtggcatctgtttttgaaacaatgttgtttcattgtgttgaaattatgaacctgggccttatttattatttaatgcaggctagaaacaatgctcggattattatctcggggtctttagatatattcagtaaccggtatgtacagtagggttttatttcattcttggaatttctctcactaaatacttgtaacttatggaattttctttttcatgtcatacaggcttttctcatcagccgtacagaaggctggaagttcacaaaagtgggtgaagttttaattatccctttgtattgacattgtagtatttagttta

SEQ ID NO: 74 - DNA, 4077 bp, Cannabis sativa
tggaaatactctaattctcactcaaggcatgaagatttcttagatgagttgggagaggatgtgtgtggataaatctaatggaggttgggttttcataagcttggtgattttaatttgacaatgcttgttaagtaatattgacattattcattacaaaagaagtgtgggaagttgtcattctgggattgagactattcttcattctttagtttgttgttcttttgctcatagctgttggatttggcttggcatgagggtgtggactgttgctgaaaacagtttcttggggtgattgcaaagctttttgactcttgtgatgatactatggcggttgctatgctctgttagtctttttgtaattctcgtaatgatcttgtttggagaaggaaagtgaatacggtggagggtgttgcagtatcttttaagctcgttcttgatcaatggttgaatgctcaaagtaataacatggacccttggatgattttcatgactcttaatgatggggtagagcattggactaaaccaggtaaaaatatgatcaagattaatgtgaatactgtagtttttaaaaactgtaattgccatatccttatgtggctcggaatcatcatagtactttctttgaatctatttccaagtgcactatttgtatttacacccggatgtggttgaggtgttgggagtcaaaagaagcattgagttgaattaagaaatgtgagtggcataatgtagttctcgaaatagattatcttgttgtagtgcaagccattcgtagtagtctaggtgtctcatttcttggcaagagcttcttattatcccgactgaactttcaattggtttatttgaagtcttaattttcatttaaagagcattatagtaatttttgtaaaaaatatattttaatgatacgttcagcacataatatctcatctaatgctatgctgaggagtcttaattccgaagatgtagaagaaccaaacaagtcgaatttgctctctgtttgtttattagctggaaaacaacaggttttgcatattgacaatcaagtagccaggagatgctaaaaaggcaagcttgtggtctgtcaaccttcatagttcataccattagcaaaatattagcctaaagtcagtgaacccattaacaagaaaatcaaaaaccaaaaaaagacattaaaagttggacactgaaacgaccccttaaaacgttaaaatatagtttaaaaagggactaaagggcagatctgatataacataattctaagcatttacaatatttacaggctacacaactgcagacgtaggtcaactttgatacatgcctatattcattcattcacattttgtctgaagctaataagtgaaacctgtggctgtttttgtcttccttcaactggttatgtcggaatcaggatcgaaaaggtcttcatattcgagctgtagaaaacaaaacattataaaatgatcaatgatatgcagactttgaagtgttattatgctgagaatatcatgttaaagatcactaaccttgacttgattatgtgcaactttcatcctgtgatattcttcttgtgctttcgttgaagcaaacatattcttcacctgcaccattgatctcccgacgcgttcgccagcttgtttctggctagctttatagaaatcttcttcggtgtcgctttccctgccctgttcttcgactgggggaacctggagtcctcgaaagccctttctcttcaaacgccacctcagaacaagcttttcaaggactccaacagaccagagaatttttctgtactgccttcgtacttgaaatccccggaaagcagcctgcattggagaaatagaaaaatcattaggttttcttggctctcaaaagtactttgttcattcagcctcatggatcttattaatagttcagaaacacaattttcaaccaatggtcacctggatttttatagtttggcggcgcaggttaagaaaatctctacgaatcttccaagaacgaaatctatattgtatgcgagcagcagcttgaatctttttccgggtttcaaaattgcggaaggcatgctgaatcttcattgctgcaattatactgcgtgcttcttcctccggagaggaaccctcaactgctttagttcgaactttcaatgaatgctccctgaaggcaacctgtatacgtgctgctgcatcagcagcgttgcgataagcagccaaagtatccttcaaatacacctgctcttcactgagagtctcagggtatacagtgtcatttgcattagtatcaagggtgccgctagcatttccagctatggtcatatccttaaattgttctaccaaagccttttctgaaagataaccagctaagccttcatgacccatcaacaatgcaagatcaccagctgtacatccatcagggttcgctgaagtgggatccgttaccaagtttggctttgctcctaaggttagaagaactgccaccattttgtcactgtcaatgaaatatttacgggttgagaaatgatctagcgattcaagcaatgttaataaaacaaatgaaaatcagacagacgtgataagcaacctcgcgagagagatcaaagccctgtaaaatttaaagagctaaagaagagcaagaaaattgaactcctgattattacattattaattttataaagaaaataagaaggaaaacattataaaaatactcccccaccctgtcctccccccttgcttcctctttaattgaaaagaaaactacaaaaatgaagaaatatcatactttccattataagctgcccaatgtagagctgtccaaccatgcttatcgcgaaaatccagtgacaaacctgccattgaaaacaaatggatggcccatgaatatccaagaatggcacatagatggattatgctttgaccgtgaacatcaaattcagtgggcttagacccctcaatgactttttcaactagccaatctttcagcctgtcccttaaaatgagattgaatagtttatcctgtgcttgtggaaacagagttttcccatctccagttgaattgatgaacttatcccaggctttaggaaagttgggaattttttccacaaacttctttgcctccttcagtgtaataggtgatactttactagatagaatgttgaggcacttagatgaggagaaaagtaaatgtgcaagccgcatctgcagtcgaaatttatcccagttgttcttcacatccaaagtagtaactggctcactaattacaggggcacgatattccaaatttacaatttggctgatgggtttgtggccatctacactcagaaaaaggtttacgaatccaggggaatgtggtggaaccaaacagcgatacaccccaatttgaataaattcggcaggaacacatacatcaccacagacacaaagtaggttgtactttgcaaactgttgatactgttcatgaaagaagccagtgactagaatctgcaagaaaattaaaatgtcactgagaaaaatataggaaatgaatcgttacttatcttggcaaaagcaagaaagctgcgaaacattctccaaactttgtataaatgcatacataacaatacctttgtcttttcatttgaataagcccattcaggtgacacatcagttatattaaacatgtgctcttgaacagaagattgaagattatgaccagttgctggagaaacaaatgaatcttgagctggcaaaattgatgtttcaagcaatggatcgattacagagcctggagattcaatcaaaatgccgtctatccacctcccaaaactgtcctggctctgcaatccattgttagccaaaaggtctgactcaccagtaacaactccaacagaatcccttttctggaaatctgaattcatttgggctcccatattctgaacataaacactgttttggagatcaccaggcatgttgccactcatagcattcggattggtcgaatgatcaaaagaagagtgcatagctccctgaataggcaacccagaagattgatccgttacaaaaaaaaacttaacctccccgagagagagagagagagaga

SEQ ID NO: 75 - DNA, 1734 bp, Cannabis sativa
aatattacacacgtcggcaggtgtaacttattcaccaaaattattcaagcatgaaattgttgtttaaaaaaatagtgagttgttgtaaagataatattgtaatatcccaaacaagatgatattgaattatttgataaactagttttgttgttgaagagtgatttgtagatataaaattactaaacgaaataatattatgccagttttatattctcaatttctcatcttcacaaaggtatacccacatagattgagactgaaatatttgaaattatttgcacaattgacagtttaagatcattatatgtatatcacatcaataatatttaggagtgaaatataaattattctcacacttgataatttggtccccattttacctttctacaagtttatctttaagaatcttttttaaaagtgtttcattaagaattttttatgaaagtgttttagaacttacgtgtttgttcacaatactttaagacactttttgtagtagaggcatgtatatatggtttttgttttttatctccttttcatatctgtgtaacgatttatcttatgaacgaattaatataaatatttaaaatttcagaacatgataattaagcacacgactcaaactcgaaagttataattttcatttagttttgtttcatcttttagtttcaaaattacaaaactcaataacttgctatataatattcaagtaaattacaaaaatttatggaacctagttaagaagatccaacagctacaggttaaaatttctttttatttatttgccatactcaaatctaaacaggttacatgctatcattttaagaagagcagcattacatgtgctttgcacgtgcatgctccatctaatattattaaaaaaaattaattatcatattttcaatattatatttatttctgtaaaataatccctttaataataaaaaaataaacttcagataacttatttaaattatattattagcttctgattcagaaagttttagcatttctaaataactataatctttattaagcctgaatcaacccattccacatattttgatacaaaatccacatttgtaagtaaagaaacaactagatgcatagagattcaaacagtattttaatgtgcaaaatgtgtgtgaatgagttgtgtttgccaggtcatatttccacatcatctgatgtggtagactaacatccacataatctaataaataaaaaactatgccttataattttttcaataagttccaaaataaaggaaaggtaaatgaaacagaaaaagatagatataatgatttaaagttcaaagcaaaatccatttcgatttattcgtaaaagactggataaaaataaaatagcaaatgaaacataaaaacaaagtctaaaagagaccaccacatctggtgtgccccctaagttccatagtcaaacacaactaaaaaaaaacactactaaactaagcaaacaatggaaactaaagtgatagacatttcttcagagttttgctaatagtggcttcacaactccggcatctttgacgtctggttctttggtatccaaatcggacgcattgggcgggacatcaacagccggagagcagttgaagaaaccgtgaggctgcatacacagacagaaaggaacaacatcaggtaaagagcatagttttggagattaaaatattgttcatagaaaaatgtagagacaaacaaggaggctgggatatct

SEQ ID NO: 76 - DNA, 7948 bp, Cannabis sativa
  modified_base (4520)..(4527): a, c, t, g, unknown or other
cgtctacaagcacgagcatggtgactgatgcaatcaatgccacccaaatgctcacaaccctataagagaggggaggtgattgaatgtttggtttgagtttcgtatgtgaatatgataccattgagaatttctgcactttttttttcttcaaaaaattcctaatttgtagattctttttgttgtacaaaaatatagtaaatgcaatgactaatcagtgatactattcactaattatattgtgtttttttttaaaggtaaaatggtattttaataatcaaattctttcaactattacaatccataaaagtttgaccgaagcattctccaaattaaaaataggatctgaatacaaataagagtacgagcaacgcaattacaaaaaatttaacaaaatgtaaagaaactagcaaaaacttgcattcatgaatcacttgaccaaaaagaaaaggcatattcaaagagttaaatataatttgaatcgcaacgagtaaatcagtttcaagctttatcttcatccacctgatcgggttgacacagaaacgactacaattaagattattaaaattagagtaatttgcggcataaatacacttaagtttaactttcagttgcaaataaatacttacgtttaattcttggcggtaataatacttaaattataattctagaactttcgtaagtacatgtatgttagtaaatcgctagatgataatctttgattggtcaaggttattaattttttttatttttttaaagaaaattaatttaaatatacttataagaaaatgacacataaataatgacatgacatttaacgacaagtacttacgaagttttagaaatataacttaattattattactgttaaaaaataaatttagatatttatttataactgaaagttaaattaagtatttatacataaattactctaaaaattatattgatttttggtagaagaaacttcaatatttgataataataccttatcaaaggagaccaaaatttccaaaaaaagaaaagaaaagaaaaggacaacaaaattgtccaatgtaagtaaacccagccgagaattattaaaatattctattggtgcttagtatttttttttttttttgatttcataccgctactatatcgctactggtataattaaatattaaagaatattgctaacaatttatatataatttaaaaaaataattattatataattttgattgtcacgtataattatattgtgtaaccataaaacgaccgtagtcggaaaaaatttaccataaataaatttgcaaattaagtatttcacgttgttaattcggcaaatttccccatttttcacgtgcaacataagcaggagtgaagtgttgttcttcctctacacaacctaaaccctaatcctctcttcacttaaccccaaatcttccaagtgaaaaaattctgttgcacaaacaggtaaacgattctcccttcttcttttctggtttagatttgctatgagtcaaagaaaattgattttctttgttggtagttttcacagtggctgagaaaagatttgaaacgagatcatttatgatggttgaggaggatgaggaggacagaatttcaaagctacctgatgcaatcatagtacacatactctcgtttcttcctactaaggatgtggttcggacttgcctcatttcaaatcgttggaaactcatctggtatttagtccctaaactctctttctcaaatactgaatctcatttccgggaagagttcttcaattttgtagacaaatgtttggaacaccgcgagagaggtaagcacatcatccctgaatcaacggtaactagttttgagcttcaaatggaattctatgaaactagtttagttggctgcttagataaatggttaacttttgcggttgataataaggtgcaggaaataaagctttgtttggctgtagagagatgtaagaattacctaattcatgttaagtactactctttacctaaaacattagtacttaaagcaacatatttgactattttggagttgaataaggtggagttggattcgcgttattcgtttagttttccatccttgaaatcgttgtcattgcgccttgttcagtttgctgataatgatgtgttggataagttgttgttgggttctccttcccttgagaatttgaagttatgtcatcttctacctccttatccgcatcagctacacatacacagttcaaccctcaagttcttgcaaattaaaggttatatggatataccattgcaaattgaagtgataaatcttgaaactttggaactgcatggtgtttcctttgaggaaacaaatctcttggtatgcaaggcaattagaaatctctttttgaattgtgtttggcatacgaaagagatggctttgtcatcgttagaatatcttatttcaaaccttcatcaactcgagaatttgaccttgtgcagttcaaagcatgttaaaatctccaatcctcacttgaaaagtttaaagttgagggttaatagcatttctaaagatgaaactagagtgataattgaagctcccaaattagtatcattttgttatgaagggaatatcaatcatagtatatcaatagagtcatccaatttgttggatggaaaattcatttttgttgattattataagaattatgacgcaaattggtttatcgatatgatgagctttatggcgaatctcgattgctcctggaatatagtgagcctgcatattgattcggaaaaggtgtgttttttacttttattctttcttaaatgattctgtgctgttatttcaagtttatattatttgtatattttgatattttaatacattttcttaaatctatacatgaaggctctcatattcccagaaaaaatgaagaagatatgtcgttctcctttagttaattgggagcatcttagagttttcactacatgtaaactagagagggaatcagacttgagagatgctcttctgtggatttctccttctttaaagagactatctataatggaaaaggcataacattttaaaccatggttttgtgtagtgatactgtcttttattagttttctttgctaatatctgcatttgtactttgagattgtgtttacttcatttggactgataaattggcatgtctactttgagtttagtttttgagatgttgtacttcttagttgtataatgttatattttaatgagtatatattataaaaagcaatggttactcagtggtattctttacttataactgtgtcccactatatgtttttcagttaaaagtaaaagcaaaatatttttagaattgtgttttccttgaaattcaattattaaaagaattgtaaacaaggcttacttgaattgaaacttgatagtgaaaaagaaatataagggaggggtgttgtgttggtaatatatatgttgagattaattaacagcttcaactagcatgaaaatcaattataaaggttcgaacttcttccaaaattatggagagtctaattctctttgaacttccataggagtcctcttccactatgacaatagcaatgttacaatctgtgatcaattacagaaactttaagatcaaaacaatggtgaaaaactccccttgtatgtttgtatactcatataggaacagttaaatctgtaaatagaaataaataaggctagtatgtatgtaatattaatttatttgttttttttttctgtcagaactgagtaatatcaattagttcaattttttcttttatctaaattaacattatgaataattatatgtttatgtaagagggaaactcaataactaatacctatttattttattttttttgaaaagataactaatacctaattaaaagagaacaaaatgtaaatttttggtgcgagcccattttccaactctctactttaagaaaagcattaaccactagttgttcggtgcggtttgggtgacgcaccctatcgtaggtgagagaggctacacgaattggactttgacgaacattcaagagcaaagtaaaagctctctcggtaacacccaaagagaggagccaccttagtaggtaggccctggaagggccagctctaagcataggcgagttaggatccatttattttaagggtccaaataaaaaaaattacttttatattttttaataatttttaaaaaatactatttatttttataataagggcttatttttttttttttttttacatatggcatatttcaacttaaggccgaccctgaccctccctattcaaaagaaaaaaaaactcaaagtgcatgtaatgcaagtaaatccaacacgtgaaaaacacacaccaactcttccaagtaaaataattatttttacgaataagagcatcttcaatcgtaacattttttaaaggtgtcaaaaacttctagatcatttaaaatatattttattttatcactcttacacattacttttagggaaattactccatatactattttttttaatttnnnnnnnnaatttacggtttaggtttctaaagtgattgcagcactagttgcaatagaagttttcatacaattttttattgcaattttaattgtagtgctagttgcaataggaatttatatgtaaaatttcgtaaaaataaaagaaaatattttaaaatgtaaaaataaaaaaatcccttatttttattatttttgttgtactaaaatattccaataataatcatctttaaaaaattattaaaatattattatttaatatatatatatatattatataattaaattttcttcctttatcacaaaattataataaaataaataaataacaaagaagatataaaacatgccaaaaatatatctatgttattgatcatagtttaacgccatgtgaaatgttaccctgaaaaaaaaaaaagcagagtgaagtgttgttcttctcttcaacctaaaccctaatcctcttttctcttaattaacccaaaccttccaagtgaaaaatttctgctgcacctgaatactacaggtaagtacaaacgattctgtcttgtattttcttaagaaatttggttctggaatccttatatcttctcttgatacacagtaaatccattatttatttaaaagggttttttttcattgatgggttgtttgttggtagttttcacaggggtcactcatttatggatgatcagagaagagttgaaactagatcaataacgatggttgaggaggaggaggacagaatttcaaaactacctgatgcaatcatagtacacatactctcgtttcttcctactaaggatgttgttcggacttgcctcctttcaaatcgttggaaactcatctggtatttagtccctaaactctctttctcaaatactgaatctcatttccaggaagagttcttcaattttgtggacaaatgtttggaacactgcaagacaagtaggcactttatccttgaatcaatgttaagtacttttgagcttcgaatgaaattctatgaaagacatttagttagccgtttagataaatggttaggctttgcagttgaccataaggtgcagaaaataaacctttctttggccatagatgtatctgagaattacccaattttctacagcttacctaaaacactagtaatcaactcaaaatatttgactattttggagttgactaaggtggagttggattctagctactcttttgattttccttccttgaaattgttgtcattgcattttgttcggtttgctgatactgatgtggtagataagttgttgttgggttctccttctcttgagagtttgcagctatgtcatttgcaacgaccttatcccgatcagctccatatacgtagctcaagtctcaaattcttgcaaattaaatgccatattgatataccagtgcaacttgaagtgataaatcttgaaactttggaactatttggtgtttcctttgaaaaaaccaatctctctgtatgcaaggcgattaaaaatctgttattgatttgtgttcggggtgcagaagagtcgtcatcatcgttagaatatcttatttcaaactttcatcagcttgagaatttgaccttgtgcgatttggtgttgttgcgatcaaagcacctcaaaatctccaatcatcacttgaaaagtttgaagttgaggttcatttccccatttaaagacgaaacgaaagttataattgaagctccaaaactagtatcattttgctatgaaggacatatcaatcataatatatcaatagggtcatccaatttgttgaatggaaaattcatcattcttgatcattataagaaatatgaagcaaaatggtttattgatatgatgatttttcttgtgaatctcaattgctccatgaatattgtgagcctgcatatttactcagaaaaggtatgatgattttgtgttgttattttcaagtttttactattgtctatttgtctattttaatacattttcataattctatacttgaaggctttcatattccccccaaaaatgaagaagatatgtcgtactcctttagtgaattgggagcatcttagagttttcactaaatgtaaactagagatggaatcaaccttgagagatgctctgctgtggatttctccttctttaaagagtttaactatagtggaaagggcatctactaattgactgtcatcaatatgttttctttctaatattgctacctaagtacttttgagattgtatttagtgtttattggtagtttttgaatgaatgaatttgcatgtactttgcataagaacgaagtttgtatttcttacacatttgcttgtgcctgagtggataggatacttctaacattgtagattagaattgctaattatgaagtttagctaatttgctgaggaagattgctactttgagtttggtttgtgagatgttgtactcttattagttcttaattgtataatgttagatcctaaagaaaatttatgtccctttttgtgtaagtcctattttttgttttttaattagttttactgtacaaaatactataaaaagcaatgcttcttttggtttagtgaaatgtaatggtaatgataatagtgatgtaatgcaataagaatggttatgaaagtgataaattgatcaaattgtctttattttattttttaaaatttatattaaaaaaaagtattatagtcattttagatttattttacttagtctttgtaatgtaatcttgattacttaggttttttaatgtaatggagatttccttatatgatgtaatcattattatattatatcacttttaaaagcaaaccaaacattataatagtaatcatgatttcattacgattatcattacaacaaaccaaacatgaaattagtttaaaagctggtaaaactagagttgagttgaaaaaaaaaaaaaaaaaacagagaaagggaaatagcaaaatgaaaattcagctcgacaaatcattggctaatcgattatatttataatcattgaatcataatgtacaaagaatgacctagaatatttacacgtgttacataataaacattgcacacagaatattctaacagtatttgttataataatgggaccacataaaatgcaattactgtcagctcacaccagtaatgcagttactgctagctcacaccagtaaaatattttcatttcttcacagcccatttcaaatttgagggtgtttcaatcactgcaagtttgtccaccaagaaataaaatctgtattgtgtcaaattttttgttaaacaatcgactgtttgatcacttgagggaacatatctaacctcaagcatcttcttgatcactttgtctctaataaagtgaacgttcaactcaatatgctttgtacgtgcgtgataaatcagattggcagccaaagcacttgctcccatgttgtc

SEQ ID NO: 77 - DNA, 11036 bp, Cannabis sativa
  modified_base (3867)..(3870): a, c, t, g, unknown or other
taattgtacttgatttctataatttttaatttacagctgtggaagaggttcaggggcaatgataagccaccggcccatttgggttctagtagggattacaatgtagacatgatcccaaaggtaagttcatatggatgcgttatttgtgcaacttgcaagtacatatgccttaatatttttgcttgtaaattgtgattggtcgataattgtgcttctttgctaacatgttggctgcccttatttctctgtctagtttatgatggcaaatggaactctagttcgtgtcctgattcatacagatgtcaccaagtacttgtactttaaagcagttgatgggagctttgtttataataaaggaaaggtatattggtcttgatttatggaaacattccttcctttgacttatatttcctgttatcaactataaaggactatctcggaacttttttgtaatagattcacaaagttccagcaacagacatggaggctttgaaatctccccttatgggtatatttgagaaacgccgtgctcgcaagttcttcatatatgttcaagactatgatgaaaaggaccccaagacgcatgatggaatggacttaacaagagtgacaactagagaactgatagcgtaagtgcttttgtcatactgctggcgaatgtaactttgaattatcctttgatccacgttcttaggactattggtaatccgatattgtatgaaaatatttctggaagagtattcactttgcaatatattttagggttgagttgattaaaaaataatataaaaaaatgtttctctgcatgtgtgtctcttgcatcatccatttgcatgtatattactcaaaataataaggaaaacaaaaccagtaaggttcatcctagagccaaatataaaaagcatgatgagacttgcacacacaagcccccctctccccacaaacacacacacacacacacactcactcatctcagtcccaaccaactgagatagcctctactgaaaattattattaaacttgctgttattgattttacattaaaggtcagtgctattcctaactggcgatgaaaggaatgaagatttgatgatatctttttatcttttatggttgcacttgttttactttctacatgtcttcaataaattgatgtgaaccgaagatcatgatctcaattggtttctctcttgataacatatatggtaaaaagtaaatattttaattgtgggggaccaattttcttattagacatctgatgttttgttaggaaatatggtcttgacgacaatacagtggactttattggtcatgcattggctcttcaaagggatgaccgttacctaaatgaacctgcactggatacagtgaaaagaatgaaggtacaaatacaattttgttagcttcatagtccacttgctcccttggttttaagttcctgctgctgaattatttgatctcttcatgcaactgaacttgcaattcttgattatgtcatagctttatgctgagtctcttgcacgttttcaaggcggatcaccttatatatatcctttatatggacttggagagcttcctcaggtctctatctttctctgtttgtactctatccatctatatgcactcatgtatagttggatgaatcaactagtctctctatatgtctaaattatttactatgataaatgcaggcatttgcacgacttagtgcagtttatggagggacatatatgttgaataagcccgagtgcaaggtatttactcttcattcttaatttcatttgcatgttgcttggtgcttagtcttgtatgatgtcaggttgagttcaatgaggagggtaaagttgttggggtcacatctgaaggtgaaactgctaaatgcaaaaaggttgtgtgtgatccatcatatttgcaaaacaaggtaataatagtctcacctagagggtttattttttgtgatgcttgagccaaggggcccaagcctaatttcttttcatttattttttttttccaaaaaaagtatgtgatgtgggtaagtgaaggcagatgaaattaattaaatgttattacattttacaggttagaaaggttggtaaggttgccagggcaattgccatcatgagccatccaataccaaacaccaatgattctcactcggtccaggttatcttgccacagaagcagttgggtcgccaatctgacatgtgagttttcatataatgttcctaagaagaattagctaatctaatttggtgttgcctatcatcacaattcatctttaagttatgattcaatgggactgataatttttctcaaatggaagggatattctactcatttttccaaagacaatcccgagtagaatatcccctgctcaatgtcgccataacacatgccaagccacatttactcgtttcttttctaatctattccccatgtgtgtttttagattagctttgttggtaaattcattgaagttttggaaagatgacatgggcatgtaattttaatagtgatagtgaaaggacttcgtttacttaaggagactaatgtttgggagtttttgtgaatgggcaggtatcttttttgttgttcttactctcacaatgttgctccaaaaggaaaatttattgcatttgtgtcaactgacgcggagacagataatcctgagtctgagctgaaacctggaattgatcttcttgggcctgtggacgagatatttttcgatatttatgatagatatgaaccagtcaatgaacccacactggacaattgctttatatcaacagtgagttatagatatattatatttgaatagtaaatatatgtataggtatggattgagacttaccaggttgctttgtatatatttactccgcagagttatgatgctacaacacattttgagtcgactgtggtggatgtactcaacatgtacaccctcattactgggaaggttcttgacctgagtgtggacttaagtgctgctagtgctgcagaagaatgaagaaaaaacacacacagacacaaacacaaacactcctcacatctcatctattcccttctcttctcctctccttgggagtgggtttagggctggaatgagctttttctttacataaaaattcaagaattattatggcatccttttgcagaaggagtggaactggattttaatttatttattttctgtgttttattgtcatgttatgaaaatttaaaatggtgatgtagatttcagacatcaaaatttggctatatatttgtggcgactcgttagtactattccattacatggtcttttctttgtcatgccatacactggtgagtgattcaatacattccaatttggaatgatatacgatgaaatttacatcttctgcagtgctgacttacgtactactagtcttcttcttcttcagaaataaataaataaaataaataaataaatgagttttgattttaaatttgtaattccgtttctccctgcaattatatatatgtaagggagtaaatgacacgaaagaaacaaaataaagtaagtaaaaccgaaaggaaaagataatgtcgtcgagtagcatcaccccaacatttgcagcggccaacctcctcttcaaagccaagaccctcaccggtaccggtaccggcaccggcggtggtgttggtgttggccacctccaatttctctgctcttcaccccaccatctcccttggctgcctcgtctccttgcttttcaacatcatcgtaaccatgatgctattacgggtagtaccagtacgcgccctcctcctcgcatgcctcttcgccgcccgttctcttcatcctccaccgaatcacctgagctctcctcttcttcttcttcttcnnnntcttcttcttcttcttccttttcaatcaaagatgcggccgacatgctggacattagggttgggcgcatcctcaaggcttggaggcacgaggaggccgattctctctacgtggaagaggtcgatgtcggggaggctgagcccagaatcatctgcagcggcctcgtcaattacattcctcttcaccaccttcaggtataatattttagttagattagagcttaggtaggttgatgataatcaagtaagtgttatagaatttcaacggcggatctgaattctgatatggcatggggtattgggtattgggtatcatggttggcaggatataaaagtggttgttctcgctaatctcaagcctaggaatatgcgcggtgttaaatcatccgggatgctcatggctgcttctgatgcttcccatgacaacgtcgagcttcttctgcctccccaagattcaatccccggtgaaagaatttggtttggctctcaactcaatcaagaaaatcagactcttccttctcctgccactcctaaccaggtactctacttacttaccacttgcctctccctatttcatcatcaaacatgctcatttctattgtatgctatgctatttgtctaagaaattgaacatttgagattaaaatgctataacatggtgaacttgatcattaagacaaccagcactttagtaacaagatgaggaagtaagagagactggattttcaaatttggtggcatatggtctatcatctagtacttctagcatgagttttatcaatttttgcaccatatcatttgggtgtaatatctcttgtttgttagagttgggtggagtaaacttgatcccttgcctgacttaccttctattttgacatttaaatttctcatccactgttttatttactccatcagcatcttagaacatttcttttgagcagcaactttgaaagtgcacatatatattatattggtgagcaccttgggcttactcattttattctaagtttgaaaataatatgctagatcatttattctaagatggccacaaagtcaatgaggagcttaggggttgtgattgtctcaagttgagcttcaaattgagactgtcaaaaagtaaacttgtcttcttggagagaagagcaagttgaaagaccagttgattgtgggggttacactttcattttagtatcctctttttgttgcaggaatttgctccatgtttcaaccaaatatctgtagcatgtgtttcttattgtttataatcagctcttacactctcccctctcacgacaaatgcagattcaaaagaaaaaggtctgggaacttgttcaacctcatctgaagacaaacgattcttgtattgttatactcggggaccatgttatgcaaacatctgctggtgctgtgctgtgcagatctttgaagaacgcaaatgtctcttgattggagcaacaactccatgtaacctacgaccacaacttcttgatacttatatgccatttatcattaaagcattgttgtcctctataatacgccatttcatattttaccatttcatataattcattgcttggcttcatattttacccatctttggtttcacttgaatcaaggacgttgtaggaaaatttgtctttggagatttgtttttgtttgctgcttccctgtacttgggtgatcttatcggtgttatttagccgatttgagacatttgggagagtggtgtgctctgtctacagagggggttggtcttggttttattatttctgattgcaagctgttggtgtgtattttacatagtcaaagttccaacaatttacagcaaaagaataagtaaccaacaaatgaaagattgattccctatacacaacacattgaacaaacttgaagaatatccatacctttaaaccagccctccaagccctattcttcaacctgagacaccttaattttacaaaaactatcccaaaaacgtggatcttcaattgaatgtagttcacatttggcattgtaaagtaactgataggcacttcgaacggaatacattccgaacccctccttacaccaaaaccaaaaatcagaacaaacatccaagggaatccccaagatcaaagcagcatcacgatcattaacctcctcatcccactctttcacccctggcttaaataaatctctgactctaaccatcgtaccttccaaacccaccaactcaaaggaaatgtaagaattcctatcataaggcagccacagatagaaactccccgtgaatagtattcacactaaaaaatactaaagactgccaaattcaccttgtgtcctgaccccgctcaattcactgaagaaaactaagcattctatccacaaaagctttacaataaacatatttatcattcacaaatagcatatgaaaaatagaaataccctctctagccactttgcatccaaccatccctctcaaactttcacatcaaagcttaaaaactttcacgtgtataatggtgtacactgtagcaatttatattgccattcaacagtaaaatttaattgacgcattaaatttgcaaataaaagtaaagtgaaggagtattgacacgaataaaaatataagagagttttgaagccaattcttgtcttgtcttttaaaaaatggagaaatatttttttctccttaatcattttactaatttctctaattacaaaatttaaataacaaaaagatatgagttgataacatacaattcattttttagggaattatcgtatatactatttttttaacggtttgaattgcttcggtaattgctgcataggttgcgatgtgaattttggttacgatttagatttctccattaattattctgtgtatttccataaaaatatataaaaaaaaactatttttaaatgtaagaatataaaaaccacaatttttattgatttaaagtaaacatgctagatgacaatctaaatcccataaaaattattaaatttttattttattttttttatattatttttcaaattctcatagtttaattatgagaattttctaaatttatattaaagtttaagaaaaagaaaaagaaaaacgaacacaattaactagtttaggcggcgtttggtagcatttttgtttttaaatattttaaatcataaaaataaaagtaaaattttgtttttgatattttattttttaaaaacaaaaatatgttctataaccgctatcatttttcaattttaaatacaaaaaatataagtgtattttataaattttatttttatttgctgattttatttaagttgggtctaggaccggggtccaggtccggggtccaggtccggggctgggtctgggtctgggttcggtccgaagtttggggtctaggtcaggatttggggtccgggttgggtctgaggtttgggtctaggtctggtgttcgggtcgtgcccgggtctgaggttcgagatcaaggttgggtctggggtcaaggtcggggtctgagttagggtacgggattgggttccaaggtttaggttggggtcggagttcaaaatattgataaaaaaattgaatgtatttcttttttcaaaatttttaaaattttgattctcaactaaaaagtaaaaaacaactttgtaaaacatgattttattaaatatttttattattctaattttagaaataaaatcgaatttgaaaaatattattaaacatactcttaattttttttgacaaaaactaaggtagtgtttggtttactggaatgtaattgttattgtaatggtaatagaaatagtaatgaaatataatggtaattgtaatgggattactattaccatatttaatttattttgtaatgaacattgtaattaattcttttttatttggtttagtataaaaaagaaaattgaataattaatatattgaccaaaatgtcctcattttatttattgtgaactacctttgataaagaggtaagagagagaagggtagaaaattctttttgtaatgtattgataattgtaatcctcattgtaatgagaattcatgcaagtggtgtaatactcattacaatgtaaaaggattacaaaagttaaaaggcccaatcaaatattgtaattataatgtccattccaatcttacttacatcaaagtaaacatgctctaaatgcttatactaattgattttattcataaaattatgggtaatttatagcataacctctaaaagaatgtgaagtttgaaaattaattttgggagttatgaagcaattcatcttaaaattattaatataatgtaggaaatattaagagagagaaaaattaggagaggaggagaagtgaaggaagccaaaaatagtaataaacacacaacacaagtgtgtaatgaataatgattgattgaggttggcttggagaagaattggagtgggatgggacccatcccaccggaatcaaaacaaaaaataaagtaaaagactcgaatccaaaagagagagaaggtaagtgtggtgttctattcccccaccgcctcctccgcctccgatctctattatccaaattctgaaacttggttgcctctctattatccaaattaatatccctttctttctactttattattattatattgtgttatttcctgattacaacactctactccaaacaattattataataaatgtgtatgtaaatattctatatattaaataataaattgataaacgaagaagaagaagaagacgacgacgaataaaagaaaggaaagggaaggaaaggagaggagaggagaggagctttgattgcctcacccattcacactcagaatcagaactcactctcttcacacccacaaaatcaattcaacaacaccaacaggtttcctctcatctctctttctatttctttaattttgctttcacttttatcaaattttaattacatcaaatcaaatcctattctcatcaaatcaaaccctttttgatgaatttcagattatactattttcccaccacatgtctcttctctgattctcaccacccacaccccctttttcttaatttagggtttcactttgggggatttgcatctcaaactcaactcttccactttccccctaccctattcattcctttgagcagagacaaataatccagtccagggcaaaagggttgaagttttttgaattgaattggatggaaaaggatatggtatccgctttgccaaaagaggaggaggaggttaagggggttggcggtggtctgatagaaagggagaccgaggaagatgatactgtaaagagtcaaggagtcaaagagtccagactaaacagtggttccggttgcaattgtaatgctacgaaactgaaatctactagtgtggctgtcagagagagagactattttcaatcagggcatccaaaaaagaagctcactcgccaagaaagggttgagttgggccgcttgtttcagggtgcagtcagttcttacgattgggacctcgctcagagcttgatctcactcgctgatccacaagctcttaatgatgctttgtgcattacattggattccatctggttcttgaccacacagcaagagctcgatggtgtaacaactttaattcacaacatcatcgctaatggtgcttatgatttcacaagagctgctcttcgaacttcgtttcttgcctcctgtgtctctgcctgccacagccgaacaatgactccagctgccacagtcactataatggcgcagaggtaataagcttacgctttcttgtctttgcagaatcaatcagtcaatctttcttctttatttttatttatttgtttataccatttataatggcgctcgatatgctttatgaagaatttgtgttgtggataagtgtacttgcagatgcaagcctggcctgtaattcattcaattctgtcttttgttcttttgtttttcaataggttgcatgagcgtctgcatgaatgcaatggagatgaaatcttgaaggcggaagccggtgctaagtttcagaagtttactgaatgggcactaaaatgtattgattgccactcccgttgtcgggagaataatacggatagagttgggcacagctcagctgttgagatacaactccagttaagtgctttcaagaccttcctagatcttgctggaaatcaacttatagggaaagacttcaccgaggcctttgatgctgcatgtttccctctaactctattctctagctcatttgatcctagctgggcatctggcatctctgcaacagccatccatggtttgctgggtatgttagtagaaggaggtgcagacaacgtcagtcagtgtttccttgaagcttctcgctttgggagtacggagctcgtgcggattttattgcaggtaatatgactcttatgtctataaatctctaataagaaactttttattcttctttccctattttctccctttttttgggtgaatttctatgaatttaatactctattagttttcaggcataatagaaacccttcactttatctttttggaacaataaatgattgcattaattgtttcattcaaccttacaaatacaacggaactctgcagtataaattgctctagaaaaatcaggtctatctattgccaagaacgaaatagttgtggaagcctgctggcaacaaaattaaacatgtctcatgattctataagtgaacatatatgtcttgacccattttcttattacctgctttggtggagtgatttagcatgtcattattttcttgactaacatagttgtccaattgaaactgtgaccttctgatgctaaatcatttctatcttattttgttttagctcctcagctgataatctcatgctaaagatgtagtgcaaatagtacaaagtagcaagaatttaaaagaagaaaaagaaaagtattgtatttgatataacatatatttaatatttttggaaatattgtttttgtagattgctcaaagaaacagcttggatattgatgttgacctagcattgggttttgcttctcactactgcaagattggcaccatggagtgtctcgtggaagagggtaatgccattgctttcttgggccctttgatgagagcggcggagaggggttgtatgcaggtagttgagtggtttatgaaaagggg

SEQ ID NO: 78 - DNA, 11091 bp, Cannabis sativa
  modified_base (10969)..(10989): a, c, t, g, unknown or other
tttaaaattataaaaatacgttttcttcaacaaaaaaataataaaataactaaaaaataattaaaaattaacctacaataactataaaatcaactataataaactataaaacaactaaaaaaataacagacaactataaataaacggtaaaataataaaaagatgatttattatttttattgaaaaggtatttttataaatagtaaatttcaaagcataaaaatgaatttttttcatattcacgtatttttgtattttattctaaatttttgatttattatgtaaattttttcaattttaaggtatcatttgcagcgaaactctcttagttttgcttttatacacttaactctcttattttttttttttttttgtaacaaaatcctcttatatttactttctttgcgaatttgagtatcatcattaaataccaactagattcttactggattggctttaaagttttatcttcacatttacacaagcgtatacagtggtcgaagttttatcttcacctcaaatttataaagaaagtaaacttaaaggagttgtgccaaaataaaaataaggtgattaagtgtataaaaattaaaacataagagagttagtagtgaatttctaaattttaatatattatttcttttttaaacatataattaatatgttaaaattgagaccaactaactataagcccaatagccccactaaacccaagaaaagcccaaaagtgtttgggcctttaagttgacccacccacttacgatgagttgtgccaatataagccggcttctgtgtctggacgatgttatattctatcctctctacgctatctctgttctctatcttgatgtttctctaaattgcaatgtctcgaggaacagaaaagcttgtcaagagcttgaagaagtttgctgatattcagtacaagctcttcacaactcgctatggccaacaacttattgacattttcgacttccccattaagcttgttctctctccttttactctcgccattgacattgccggctctgctcctcgtggctttggtgtccctgagttactctccaagctctcttacgcttcaatttttgtgagttgtttttatgtccacgactttcctttattaatccttttttttgggggggttttatgcaatcccagtaagctaatttgtctgctattatgagccaccagatgtttgttgaattgtctcactggaccttaacgttgcgttttgagttcttagagtacatacaatttattaaactcttaacaattttttctgctactttttggtttttattagccatttggctgcatgggtcatctgtccgcatgtctttttcttaataatttgccttcattggatgaattcaaacttttgtttgagtaatattatcaatttatcatttggacggtattcgtaatggaataagtctgttacatggccttgatattcttggaatgacacttaatatactgcattgtattgtctgctgttgtgaaattttatattttcaacattggctaaatgcaggctgtagctactctggggacttatgacatagcatgggatctgggaaaaaaagtgatttgtcagaggtaatgccagcatcgccattacttttccttgtgacttcattgtattgtggtcttcttcttttttccctcttatcttattatgcactcttccttttgtaatgtattatttgcactcagtccttctgtaatgcaatatcttaaagttttttgaggcgccactgccaagcttgcatttactaattactttaatatgatttcctggaatgaaaaggtcctacatccataatttttgtttgttgcatgcctttcttttttttaatccagtttcaaagttgatttattactgcctttatgaagcccattcatgtaaatgctgtggaaaacttatttttctttccatcttagtgcaatctaaactgacagttgatggtagaaggatcatcctgtcctgtctaatgtctacggtggctgaatttcaaagtaattattagtgcatgattttttgttgaggttggaaaaaatatctacttgagattgatcttgaagtgcaggaactgtgaaacctgcaacggatggcaggcactgcgttgcactctgtgcagaggatcagggagggtgcaatatcaagtaaaaaattaccaattgaaaaggtagattcttttccatatagctttcactcttaaggtgcatgtaatttgatgagctaagtatgttttcttcttaaatgacaagatggtagttgtttctctattaagctcattctatggtgcagaggttttatcagttgaatcccattcatgtgacctttgtttaccaacttaaaatgctaactgaaaaatatttcaatcatgtgacctgtgtttactaactaaaaatggtaatagaaaaatattcttaaagtttcagctaatggtatatttaattaaaatttggtgaatcaagtgggattttggctcttgtcaacatgctcaaatttttccaatgaaaattgaaccaaagttatccatgggatggcccatgtacagcctcacccaatatgggatattagataccatgcattatgctttcaaagcataccaattttaatatagtatatttctatcccctgtttattctcatgcagtggtgagaaggcgacggctgaatgcattgcagatgcaattgctgataatcgggctgagttgattcaccttccgtccactgtcgatctccatgcaccattacctactaaagattgcccaacctgtgatgggacggtaattgtctatgagtttaccatatgaccctaaatcctttactattgttttttttttcttaaaaaaaaaaggggaaaggaaaatatgtacgttagtaatctaatgagtatttgtctgggtaatagttctgactataatatactttatgcttttgtcactaataagcaatgcatatataattctataaatcttatttgttccgggcgtagatatgtataaatgtttaccatattaatattagaggttacatgtaatgttttctagtattgcagggtgtaatgagttgtccagaatgcaaacacaaattacaagtcaggatctctgcagatgatgtgagttcattttttttctagtattttattttatctatggagaactctcaaatcaaattgtttgctgacaatgttctattctgctgagtgctggattttgaaatttgaattttatagaaggtgcaatatgctaagcaaaaatccggcataaaaaataaaagattgatctataattcttactcaatatcatccttttcacttggttaagtaagaaatttttattcacacatttgattacttcaaatttcacttgggttctttcaaaaaggaaagtgaaacctaaatatgcaatctcctccaatatttgaaatagaatatgatagttttgaaggctattttcacatgttgatttccaaatgcaactaaatcaaatatagtttatgcttcattcagaattgcatggttatactattggttagtaagaatttaagataactttctgcatttcatggttatactattagctaaaaattgtaggcactgaaagttcatttattggagttggacctagtgtcttatatcatccattcaactttatctgtttgcacttaacagttgtatttcagtcatcctgacaaattttatattttctgcagataatggaacctccttggaaagcctacaatgttatgaaaaagatggactatccctttgaggcaagtatcagagcttgttctgtttcctttttcttactactttggttgagatcaaatctcttgtttttatgtaatatttttttctttctttcctttgtttcagcatatagttcatagcatgaaagatcccagtattgctgcattttggttgtttaccttgcctgaggtcgtgggtggttttgagtatgatgagaatatcaagaagaaaatttggtggcaatacaaggtgttgctggtttattatgcctcctccctttctagttcaaaattgttacttcgtccaaatgaaaattattttagtatacttttatttatttaggtgccgtttggtaacaattttgttttctaattttttaatcacaaaatgaaagtaaaattattttagtatacttttatttatttaattaatcaaacaatgatagtgctgtttgtacttgtattttccatagtgctttaaccatatcatattgtgaatcaggaatccatgcgatatgatcaacttcgtgatgttgtggctaagagaaagcctggatgggagtacttgcaggaggtaagaactatgcagtgcatctgtacaatgtgtgaatttttggcagtcgatagagtgtgcttctcatacagaccatatgattttatagatactttgtaggtgaaaactgttatgttcaaatgcttaagttgaataaaaagcttttggtaaggaatgctaattcagcattaagatgttgtgtaaattttccctgccattgcaactcctctgtctttgtgcagatgaatttgatattcagtttttctggaaataaataagtaacaaagtcattaatttatgacaggcattaatctccatagatcctgctcgtgccagggaggatcctgttatagtgaaaaatgttccatactacaaagccaagaagacacttgaagcagaagtaatgaatttcatacctccacaaaggccaaaaaattggggggtatgcatttcctggacttgttattgttcttatatgtcttgttttcaacatttccacaggctttagcccgtcaattttgttaaaaataaacgtcatgaatactctgctattttttccttttgggggttgtggttagtgatacgttgtacttggtgattacgtaagagtttttagatggctaaaaaaatataatttaattagaaaaaactgtctcgtaaaatgctaactgtagtttgagccctaaattttcagtgttcgtattcttttcctttttcagtacataaataagtccctcttctgtatgcatttctatttgtttatcaatttttttatccctttggataggtgtttgttgttcttatctacatatttctagctttgatagatacaagggtcttatgcaatacattcgattatatatgacatgtcaggaaaaagatgcataagccttctaaactgattgtataacagtcgcaggagctggaccttcctttgaatgcctcttcgtggagcaaggaggaccttaaagatcctgaaaagttttatgagatgaccatccttcttaatgcccaaagagaacttgctgataagattttggatgctcagtgggaaaacaaatggcgccaagaaaaggtttgtaaagtctgagttttacgtggatggaatgattgggttatattttcatccaataataataaacacctgctttttttaggagagaaagtgtgaggagggagtgtcttgaaaaggttcaaaaagaattatatagatcagggtagagatttgaaatcactgtttatgtcacaatcttttgttcttccaattttggaagaatcatgaagaggacggaatacaatctaacgtaatttataattgaggtgttgactaataaaattcagaaccacttataatataaagatggagaatatagatgaaaataatagctatagggactaacaataatacatgacatgccatgggggtaaaaagtttcattagcagttgctcctggtgtgtagttttctgagtactgttgcaatttattatttatatatcatcttttagccacttttgttacaataaaaccatttctatttttttcagtcattttattgatctcttttaatattcagttgaatgagttgttggaggagaaggtgcggccatatatacgaaacattgataacactatcctttctcaacctgttatactgaagtctcaagataagaatcagaaggtttctctctttcatccttaaactgcattacgatcttataaattactggtcaacttgaatttcctaaaactgtgtgaagcaactatcagaggtgattcattttctgcatggaaagatgcccaaaataaataaattctttttgctaccctgttaggacaattccatctcgcacattatgtttttagtctatagctatgcattaccacgttaatttgtactgatttgcctgctttttccctcaaatccgacttcaagtaaacttcaactggattttggattttgatagcttagcaaagaatgtttttgtgtttatcactgtatcactatcacatgttgaatgttctcattatactacatatgggaaagagaaacaaatttattctttctccaatgatgtaatttctgtgatctaacgccatgcccttgcagagtacacgtcggcagcgtagatggtggtttttttgaaggtgaatgcttcgaggcgattaaaaatggtgctagtaatatttttggttgattgtatccaagtttatacatatgttttacttggggcttaatatcttgcactagttttagtttatagtttataccataaaacaagtcacaatgtggtattctttttaagcagaaaattatataattattgtaataattttgttatgaaatgatagtttttatcataatgtcttgtttttgtaacaacaagaacaagaaattgaacccagaaaggaagattattttcacattgtgagcacccagaaattgaactttgtgtcaagtgcataggctggataaatatgatatcaaatttatcaatgaaattttattctaaacaatttgaattattcattcacatttcattggtacaaactacaaagtataataagcattaacatatatttccgtataaaatattttcttcacataataaagaaaataaataatgaaagaaggttcacttagtaaatttaacatctggattcctaatagacttgagccacatatcagccatgacacgagccgagatgctccacaagaggtcttgagctttggacgacgcactctgcttcgtcttcttccctgcttttcccattccgtacgatacaagccactgcatgcctgtcagcctctgcttctcactgtcccaaacgctcctctttcctctgcttctcactttcacccctcccacatggaggcttgtcaacttgaatctcttctcttcctcttcttcctcctcttcctctggagctgggttcgcgtagattagagctatcattggtcctcccactgcctcgtatcgcctaatgggatccctcagttgaatccccaccgccattgccagcgtttctgaacctttggagtgtctactgtaatcttccaatggaacggaagaggaaatgggatgagtgcgtttagtgtttggaataattagtggtgaaacgtcgaatggggcttcttcttctgtcatttccgcttggattttgagagcttccatcgccatgacctctattttctgaagcgagaacgcaaggacctcctctggtgtcattgaattctcgcttaggctccaaattccagtcgagatcctctctttccgcccggaattcatagctgtcgccattattttgactcctgcaaccgtccgagccgcggtcgagcttgcgccttctttgttcctgccatggatgatcgctgaagctatgccttcgaacgccacctgttcggcagttttacccatcagttcgtccatggacatcaagccctgaattttcgaagttagttcgtcgagctccatggctgccattgtttgaaagaactcgaacccactcaagggctcattctcattcaacggaatcacaaacggtcttgagatttgcatagccaatttgggggtctccttccttgatatttcagtatctagaggattcatggcggccaagtatccgccatccctggtttggattatacagcccaagttcttcccaaggtccgggaggtaagctttcgatgattctttttcttcagattcctctgctccttcgagttgcatagtaggaatatcttcttgcttgaatttatattcattagtttcttccgcctcaagcatttgaagaaactctcttgtcaccttatcttcgtcttcgtctaatctctgtgactcagtatcttcatctatatgtgctgacttatggtcgtctcccatcatggattcaagagcttttatctgctgcgcaatggaatctagctctgacaatcttttagtatgaacttgatcgtgaacaatttcctttacaacttcatttccagctaatgtttctccaatagacttcactgaatccctttccttttcttcttcatcttcctccgcagtattctttttagtctcttggaattcaattcccttatcaagtacttcaaaatctggaagatcaaggtcttctgctttgctgtctggttcttttggcttattctcagctcttgatgttgatggtactggagctggagctggttcatcgaggttcaagtcatcaatgccatgaagatcattaggtgttgttccaatctgtgaaggtgtccaggcatcttttctgctagataattttgggcttggaacactaaacgacatcttcgattgctttcgggcaaatgaagtggatgataagtacttggacttgttcttgggttcctcagcttgactataaatcccagttcctccgtccttttccatgatttgaaatccaagtttcaatacgagctcgcctccttttgcctttcccaaaagattgaaacttgtgtcccattgtcgaactcgagctccttcatggctcttatcaatagattcttgaatgagttcccttaaatccactgaactccggccaaaatcaagctctggcgcatcaactgctagtgcatatatccaaaacggacgaggctcgaacttgagttgctttccactaccctggttggaataaacattgcacctaataaacaaggtctcttcgaaatcagcagccccctgtgagaccctcgatggcattgtttgaactgacccgtctttcgtttccttctttctaacacatacagagagccggagaccattcattgaagctggaaggttttgggctgtgactacttctacagaaaacaaacaacttattttctgcattccaatatgggaaagtgcacgaattggtttccagttccaaagcccctttttctcttctgaactaggcttttcttccaacttcttgaactctctttgattcgatcccctagcaggctgactctctgtctgatcacctccttcgtcaagctttggacgagaccgccatggggacaaagacaggcgtctgcgaagaggtttattgttgactttaacggcctcagttttggctgcaactccagcactagggacgatctcatcattggatgatatcggaggaatcgagcttcgaggaagggcaagggaggctgttcttcgagtgacagcagcagtgtgagactgatagagagattgactgagtgcttcgagctcctctagtagctgagtattggaagcccgccggcttcctgtactttcatctgccattattgaagagaaagagtaaggagaactgtgagaataatggtactaacacaatggcatgacatcagggctgaaatgataaggaatttacttgagaaagaaggaattgatgataaggggttgacgtggttgagagtgaagggtttctgaggtggagaaactgccatgaatatgaacatttgtggtagttgctggtccttctatagccacttaaaattcttgaaggatagggcaaactttgtatacaccttctctctcttcttttttcgatgaaagagacagaattgggaactataagcccacaatttggtcccagcaaaataaatgcttcttttgttttacttataacacaactctaccactgcttgcttctttttccgttctgtgcccctcaactcaatccaaaccttgcaacctttccaattaacaaaacgaaatttctcaaagagttcttgttgttatataagctttatacttcatttttcattaagataagtgggttttagatttttcttttcttttctataggtataattggtgacctaagaataattaactgttttgatttagatattggaattatttattttattctgtggttggcatagcaattagtactcaatgattggtcttgaagtgcaggaactgtgaaacctgcaatggatggcaggcattgcgttgcaccctcttcagaggatcagcgagggtgcaatatcaagggaaaaattaccaattgaaaaggaaaattcttttccatatagctttcacttttataggtgtggagtgtagaccatgtaattttatgagccaagtatgttttcttctttaatgacaagatggtagttatttctctattaaaagctcattctgtggtgcggagttttttatttagcacattaaatcccatgcatattattaaaattttcagctaacagtagatttaattaaaatttggtgaatcaagtgggtacttgagtatgggattttggctcatgttcaaatttgtccaatgaaaattaaagccaaacgtatttatggcccatctgcagccttacccaatatttgataccctgcgttatgctttcagagtgtacaaattttaatgttagtatatttccatcccttatttattctcatgcagtgctgagaaggcagtagctgaatgcattgcagatgcaattgctgataatcgggctgagttgattcagcttcaatccatccaccgtggattcgatctccatgtaccattaccatctaaagattgtccaagctgtgatgagacggaagtgtctaatagtttatgcatgatgaataaccatatgacttcccaaaatactttactgttttaaaaaatattatatacttactattaagagttagtcccacannnnnnnnnnnnnnnnnnnnnttgtgatatataagatgaaagggctactcttcccatagccaattggttttgggatgtaacctcattcatcttatcctgtgagcctaaattgccaccgtccaa

SEQ ID NO: 79 - DNA, 2542 bp, Cannabis sativa
taattttaaaaacaaaacactgactaaaaaatattaccaaacgtgccttaatttcaaatcgtaatagtaaaataaataatttattctgattgtgattccaattcatcaataataagattgaggatgaatctgattactattgaatacaagtaaagacaccataagagtccattacctgactacgtttgtcttcactgaaactcaaagttctgaccttgacttctcctctgctggttgttaactcgtctaaaatctcaccatcacacatctcaactccatcttcttccccaagcctaggtgcttctctcccctgatacaaaagtcaatacatttatgagttcatcagcatatatgtatagatgatagtaatgtaatactaactatggttatgtacccttagagagaggctaagagagagtcttggggcgcctgtgatttcctcatactcggctgcatcgagttcctgaagataacgaggatgaaacagcttgggaaggagatactgtcttatgctgattagaaggaagaagggtaatgggaacaatattccagctataggaatccatgtcacaccaaaacacaccaagaaatatacaaattgaaagagtgtaaatatagccatgtatttgtatggaacaatctccacaaaagaagcatgacctttttccaagaccctgccaaaaacatagtgtttgaatataaatcagcatattgaattgttgaaaaaaaggcacttataattagagaagtgtcattcatttacttgtatcttctgccaggagtaacaaaaagaagaagcattctttcccaaaattggttcccaggcagactgtcaatggccatgtaggcaaaatatccccatagaactgatgtaggaatctttttaattgcaggcatggcgaaaaccgatgctgcaacaagaagtgactgtagaaggttgctcaatctctgctcattaactcggacaggcaagtgtgcatcaatgtgtttctcaggatcaaatgtgtcctttgtattctccaattcgtttttaccattcatcactgccttctttaagtcttccagctcatgtacatctgaattagtctgcaccagaagaaaaaaaaccattgtggaatgacataaaaatattcttgtattcataaaacattctattccttattgagaagactacttacagatggacaactatccatttcgatgaacacggcttgcatttttccatagatttccgagttgctcgctttttgcttcatgcattctttggcactctccaccattttccttctcatcaactgcacataaaaaaagatttagtcattcatctaaaaagttagctcaatcacaaggaaaaatgtaaattaaaactatgacatgtcccatgtcctgttgtacatacctgcctcttgagaactgctaggctttttgtgtgcattggcgattgtggcaacactccattagatggaggcaaaccaattagtccacagagtagtgtctataaccaatttcaatattctcaccatcagtacatgtatgcagtagaccataaagatttaaagcatcaacaagaaaatacaatcattattatataccatgaatccaagcaacaagatatcataatggtaagctgaaggtttctttagattgaactccttttgctgcgccaattgggaggcaacgctatggtcgaaaaagtaaagcccagatatcatgacagcaggaatgaaagcagcaaatatgtatgcaggaggaacctttcccatatcctgtagtaaaacaaataatgtaaaagaaatttgttcacaaaatcttgagatgaagaataacatgtttacctggattacagtccagtggtgtaaagatgtagaatcccatggaagagggctgtagagccttctaggaactccagtgggaactttgcttggtacactgaaagacaaggctgtccacaccaacaccatggaaggaacaccataatctgcaatgaaacttctgaggcaccctgcaatgtgcatagtaaatattgttagattatcatcataacatcaaccaagtcattcagaaaatgctagctacaaacctgtgccataccaccatgaccttgcttttctgctctttaaagcagtaacaagaagaccaaaagtgaaaataatccccaacaatccatttgcatatagccactggaattgatatttctctaaagttggatcttcagctttaggaattccaaactcactcaccattccctttcatcattaaaaaagtaaaatgaatattcaacacgtgatttcagctactttttgtatagaattattttctataataaataaagtaccttgatagcctcttgaatgaataagacagatatcaacatgccaaaaagctctcctgcaattcttgtaaacctattgattattgtacaagcattgaatattgcaagtagaaacaacaaaagtgccgtccacacacaaaccctgcattaaaaaaaaccatatttaaatcatacagaaacttatgagaactcaaaacaaaagaaaaatag

SEQ ID NO: 80 - DNA, 8375 bp, Cannabis sativa
tctctctctatattagttttctttctctgaaaaaaacataaacctaaagattgatcttgagtaaagggttcctctattttgggtttgggcttattttcgtttcttatgcccacatttgctacttgataatcttcttctttctccgccaccacgcctgtaggtgccccattacccgatttgcccacacctcccaactattcggattttcccgtcgccgccgccccctagggtttggatattctcatctttcttttgccactatcggttcctcttatcttctttgtttcctagggttttatacctctatagattggggatttgatttttttttcttccccttcttcttactttcttagctttttagctactgggacgaaccgcttttcttgggattttacaagattgacaaaagggttggtattcttctcatttctaacattggtttggtttggtttggttatatttgtattttgtttttcaagattagtttggttttatttgcagaatatatacacaaaatcttatcttggtccggtcgattaatacacaaggtttccatttttagtgggaagtattacattgaagaagaaatttagattagaaaatatactgtggaaagttctccaatttgaacgaaaataaaccatttgtggctattgcaaatttgggttttgcttttgagggaagtagatattgctcttgagtatagtggtgcggcttcgcattttgagagtgtagtctgtgtgttgtacaaggaagtgttgcctacgttgttggtgaagggaagttttggcttgcatgggagaacatgaggcgtggtcgcagccaccaagtgggctattgccaaatggcttgttgcccaatgaagcagcttcggtgatgcgagtactcgattcggaacgatggttgaaggctgaggagaagacagatgagcttattgcttgcattcagcctaatccgccttcagaacagcgacggcatgctgtggctgattatgttcagcggctcatcacgaaatgttttccgtgtcaggtgggtattctaaccctttgttatactggataatatgttgtttacaaactatcttcaatgaggacaatgtgtgcgctttgcctgaggtttagtaatgaaaacattagcactgaagatatatcgctctgccgaggtggtgtttgcataatttaaaatatgcttgaaggggtttgaacacattagttgggatgtgcacttgtttcagtaatttttttgaggaatggttttatttttcatgttagatttgagataatagatcccataactgatgtatattcatgttatgggcactacaaaagtgttcattaacaaaaataaaaaaattgttatctacacataacctttaatatctaaatcactagactaatgaggttgtatggaaaattagagaacttcaaggctctgtcaaattcagtgatttcatggtaggttgaggaccttgaggttgttagagattattgggcaatttaagcctttttaataatctttcttcattcactgtgagtaaattattagaagttcagtagtcttattgcaatcttctgattattaatttttttattaatttctgcaggtatttacttttgggtctgtacccctgaagacatatttgcctgatggagatattgatttaacagcctttagtaagaatcaaaatttgaaggagtcttgggcccagcaggttcgggatctgctggaagttgaggagaaaaatgagaatgctgaatttcacgtgaaggaggttcaatacattcaggcagaagtaggtctttcttaattaattaggttttatttattttggtctttgctcttgattttgtgttaaatttttatattatatatcatttttttttgaatgaatattacatatcatttttattatatacatacttaaaatatggagacatgatattcttgttattgagaatcactggaaaatgagtccaaaaggttgataagtcactagaatatgcacatgagcttataaggttattactttctgactatatatctggttattattatttcaatttgtttcatttaaacacaaggaagaacatatgcttgcctataattgtagttaggtgtatccttgattcatcaagatcgacaatggattttgtgctaagttgacatgtttgtggatatcatttgtagttgatataattgatgaagcccgcacccatgtattttgttggcaactaataaattttatagattccttatacattttctcacgctgccttgagttattatgtttccttttcttgccagattcccccctccccctctcccctcattatatgcttgattatagaatcttttattttttactattaaaatgtttatagctattaattgtttatcatcattattggtattttcatgtttatcttgcaatccgtggtatatacttgtatggaatttacatggtatgatattggtagtttttatggtttttcttcctaaataggtgaagataattaaatgcctggtggaaaatattgtggtagacatatcttttgaacaactcgggggattgtgcaccctttgtttccttgaggaggtgagagtttttgttttttggaggttctacagaagcccttttcttttgaataataattgatgaaaatatttgggtatccttatctaaatcatgttatttgcttctacaggttgatcatttaataaaccaaaaacatttattcaagcgtagcattatattgattaaagcctggtgctattatgagagtcgtatacttggtgctcatcatggacttatctcaacttatgctttggaaaccttggttctttatatatttcatgtttttaacaattcttttgctggaccacttgaggtgactctttgtgctcttcctctacttttattttctttatttaaaatgaaattgtccattttgtttcttatctatatctttctctcttttttttgcctattcaggttctctaccgttttctagagttttttagcaagtttgactgggacaattattgtgttagcctttggggtcctgtgcccattagttctctcccagatgtaacaggtacaggcaattcacttgaaaactcttggcattacttcaatgtctctactatgtccaaattgccattaatatattgttcttttgatgtttcagctgaacctcctcgaaaagatggtggagatttactactaagcaagttatttctcgatgcttgtagctcagtgtatgctgtctttcctggtggaccagaaaatcaaggacagccttttgtttccaaacatttcaatgttattgatcctttgcgtgtaaataacaacctgggacgtagtgtcagtaaaggtatgttcattgttcatgagcgtttgagaacatactgtgtcactctcatgaacataatcaatatgattctagctgtagatggtagcattcaactttggcgtgttgaaatatctacaattaatttttcttttcttgacttctgtgactgcttggaacatctttagttgatgcttcattcatctagctacttgcaaataaagctaataaataacctaatgtttttaatgatattgaataattggtaacaaagcagaattccttcatttctgttctaggatttttttgtttggtttatgatgttttgtttgggttgttagttgttgaatgtgatatatatatatgtatatattttccaggtaacttctttagaatacgtagtgcatttgcttttggagctaaaaggctagctagattacttgattgcccaaaagaggatctattttttgaagtaaatcagttttttatgaacacttgggaaagacatggcagtggccatcgccctgatgcaccaaggaatgatttgagattatcaaatcacgaccagttacatggatctgaaaatattagaagcagcacagtgagcaaaaagaatgggatgtcatctaatgaatctgaagatgatgggactcatggttcatataacattccgtcccagcaagacaatgcttcgagaattagtaatgtgtctacagtacctcatatgcaaagccaaaggaattatgggaactcaaggaactctgatcctattaagaaagataatagttttaaccaggctgcacaaatggataaaggccagagaagtttgaaatctgataacttggtgaatgatatacagggtaggattctttttgcaaggacacgttctagtcctgaactttctgatgcatatggtgaaatctcttctcaaggtaggcgtggcagagccccagaaagtgggaagagccaaactttatcaactaggttggataatactaggaggaagaacctagaatctgatacagttgcaaatcatggtgtcagactgactgatgatccttcagcagtcagacacatctcttcccgtcatagtactgatgccgctgctgattcaaaaagtggttcaaacagctaccaggatgagtcagccttgggggcgatgactgatgattttgcttctgtttcgggggcccatgggatgcatcaagaggagcaagatcttgtgaacatgatggcgtcttcagtggctcatggtttcaatggacaggttcatgttccagtgaatttagctcctcatcacattccatttccaattcctcctaacgtcctagcttcaatggggtatactcagagaaatatggctgggatggttcctacaaattttccatggggctcacatatgcaattttcacaaggtgttccaccacatatggcccattatttttccggcatgggactggctgcctcaagtccagatgatcccccagaacctgctattgaaaattttggttctgtggaatcgaatctaggggaaaatgatcatgatttttggcatgagcaggacagggtggcctcttctggaggatttgatttagataatgggggttttgaggtacttcactctgatgataagcaacaagcatcctcatctgggtataacttccatccttctcgtgttggcagctctggaggttctttgcgagtccaaccgaagaatactaaagaaaaccatggtccaggaagagaagatgttgtggatgattttcagtatcatgataaccgtaatgaagttttctttgatgatagaactacaagttcaaggtctgtgtctgcctcgcatactggttctttgagaagtaaaacttcttcagaaagttcttgggaaggatcatcagcaaaagtctcaaagtcaactagggaaagacgaggtaggaaaaatgctcctttttcagtgccatcttctactcatgggaaggataagactgtatctgaacattcttctactcaggcagatgatgacaacagagattggaattcattgtcacctgtagccacagaaatagcagagagaaacccagtacctcagtctgctgcttcttggcaagttccaaggcatcaaattcctggtaccgaaccagctcagacaagtggatctgatttaataccctttgctccaatgcttttaaatcctaatgcacgacagagagctatggataattctggggctcttccctttacattttatgctacaggaccacctgttccatttgttacgatgcttccattgtataattttccaactgatacaggggcttcagatgcatcaacgagccagtttggtgcagatgaagtggcagaaaacagtgattctggtcagaattttgactcatctgagggactcaatcaacatgttgtgtcaaatacttcaaattctatgaaaagggatacttctcttgagcctttggaacagaaacgcgacattctcaatagtgactttgctagccattggcaaaatttgcaatatggacggttttgccaaaattctcggtattcagctcctatgatatcaccagttatggtgcctcctgtttacttacagggacgagcaccatgggaaggtcctggaagaccactaactgcgaacatgaatctctttacccagcttatgagcggtgggcctcgttttgttcctgttgcacctctccaaaccatgtctaatagacctactggtgtttatcaacgatatgttgaggaaatgccaagatatcgcagtgggactgggacatacctgccaaatcctgtaagatagatttcgtatccttttattcttgtggattaccattacttttgtcttcatttgttttttttttttttttaaattgtgtaggatagaatttctcattcattatattttctattgtgtgaacttttttttttacagtgtatttgttacattagtttcctttttttttttgtgaagatttttatttattcttttttggtcatctaaatttgcttcagaaggtttcggtaagggatcgccattcttctggtacaagaagggggaattacagttatgatagaaatgaccaccatggtgatagagaggggaactggaatgtccaaaaaacgcgaccttctgggcgtacccacagtaggggccaggctgaaaaaccaaatgcaagattggatcgtttgacaacaagtgacagccgaagtgaaaggccatggggctcacataggcatgactccttccctgcgtaccaatctcaaaatggtcctattcgcccaaatactacacaggcttcccctaacaatgtgccatatagcatgtatccattgccagggatgaacccaagcggcgcaacaaatgggccgaacatgcctgtggttatggtgtattcttatgaccacaattctggctacggaacacccgcagagcaggttgagtttggctctcttggacctatgggttatccaaatgaagtatcacaaataaatgagggaagtcgagtgagtggtacattcgaggaacaaagatttcatggtaactctgctcaacagtcttcacctgatcatccttcttcacctcacaaacagaggtagttaatttggctgtatgcaaattagctaatcttttatacaaagtagattaaagaaaaaaaaaaaaagtgtccagcgctgaagcgcatttgtatcgttattttcttacattcttatagctgccaatttttggatagaaatagtagctgctgatggccggccaaacattttacatttttttccaaaagcaattctggttgtggtgatttctctccatctcttcagaaagggtccacttgccaaatcatgtcacatttgtctggcttgtaatattattcccattgctcgtctattggccatgtgattattttgctgggattttttttgtgatgctgttcattttattcttaccaggggagtttgattgcgttgccaaagcagttgctttgaagtaatagttgaaagatgtggatcttccacctctggtagttccggaccaaagacgaatgatggtgggagacgaaactcatcgagaattttccctaccaccagatgatggtgatggtgttcccgtgctcaccgcactctgaaaagaataattttgaaaaatctgatttggtgaattttgtgcttttctcgtgggaagccaattgacttgtacactactagcaattagttatcaatattgcccagcatgcatgaagtgttgctgtgaatgcagacattaatctgaagataaaaaaaagtagtgaggaaggggaaacggttctagctccattacttgtatttcattttaggctacacattgtaactgactgtgctagaagctcactttgtcacagaatttaggttcttatctagattttgttccgtcatttttctttacacacccaattaggatttgtgattcataatcataactgtagtcacattaatatagtcaattttcagccaaaaagagattaaatacagtcagaagttttaaatatcagttcctttattatagtacttgtctggccgaggttggctactttatgtcaagtagagattctggtttgtgaattattttgcgtatttgttagaattaaatgttgtaataattcttcatttcagaaaaagaaaaatgttgcaataattctttgcaccaacaaaaattgtacatcttaatatttgaaatttgcaccaaaaaacgtagcttgaaccattacaagtaaacatttagacatgtaactaacaaaaaaaatgaagagaacgggtagagcaccaattaggtaagttagaaagaatacaaaaattctctgatttgtacttttgaagattatcaccataaaccttcattgactctcttaacactcccttggtaaacattccaatgtatacagatattgagaaaagtaaaagaaattcttctctttactgaacaacactttagacagttatttcgagcgcaatccagggacattccttagacccatcttg

SEQ ID NO: 81 - DNA, 11222 bp, Cannabis sativa
accggaataacgtccgatcttgtttctggattgagtggaaaagggatataggaagtttgttctgttcctctgtgcatctctgtgatgggtaaatccccatgaaaaaggggcaactttcgtgtagtttgtgattggatgtaactgttaagattttttctcggataaatctttctcttaatagatctcatcttgttcctcaatcttcggagaatgcggcgttgtattattgtaagttctctgttccgaacatttcctgaaagtagacgacaagttttaaatcttaatgcaggcaaggcatatctcgttgaatcagtctagttcgccacaaaggggctatgggattcgaacccaaatattccagccaggacaggacccctcacgaatagaataaatgacgactttcaaacacgagccgttccccatttcagacgacggtggacttacttcgttcttgaacctgcgactgatagctcaagctcgccaatcaataagagacggctctctctggctagttaacgaatttcaagtgatcgatcggattcgactttgccagacggagaccggcttgaccctaaggtggaaagctctttgggcgctggtttttcgattctctctttcctctcttgaagataaccacttatttacgcaataatgattgagtgattttttctgggtaagacgcccgagcaagagcaaagagaatccttctcaggtctctctcccgacggcagcagttcaaaaaaattatccatctgaggttgaaaccaaaggatttaaaggccaggttgatcagtgaatgaagaaggctcatgcccgtccatctcttgcatttggggtttccagaggcaagcaaaagactaaaagcaagggatgtaaggaaccttcttggagacctgctttatttaatctaaaatcagtcgtctctcaaaagattgattcttggatagcttgttctgaacttccctataggttttgcagaggcaggagagggtcgagatcagatctacgggatttgctgcccccttgaaatgggaatagcccttactgtggatatcttctactgatgagaaagatcaaagctagcataataaagtattcaaaaagaaatggcatggcgcacatcttctgttcgagaatctatcccctttcttaccagaagtgatataaaagaatatctctattaaataaaggaatattggaggggatatttagctaaaggtgcggagcgaagtctgcatttattgctagttcttctaccagtctcggaataagccttttaaactaaactgccgattcgcacctttactctctgtctcaatcgagccggtcagatcaatagagatttcaggcacgaagaggctccaataaggataagataaggctcttcaagaccttactctaacaagtaagcaagtaaactaccttgccttttgaaagaaaagaagaaggtaggaaaaaaatacgggctttcctttgttcgagaatcccctgcagtagaagaggaggcatgccatagtttaagaaggggacagagatcctaactagggctattcttcgtggactaggctttcgtttttccttttccggggccccgcttgcagggtatccgctctttgctcgcttcgtacacccagagctactcgctgcgttatcgctccgttcactccctctggggattctatctcgtctcatcggtcattgaaggaaaactatcgatataagcatgagaaacagcaaattcaacttaagacgttgatggtattgtttacaagtttatggaaaataaaagcattatcaacagcaaatgccagacacctgtaattaaccgcagagacggtggaaggtgaagaggtcgagtcagaggtaacggttgaacgctaagtctcaactcttagattctttttaaggcggacagaaatctgcatgttatgcacccaatagtatcagcatacattaaagtgaaaagtggtgatttgaagcttgatacacaggcaatgaaacaatgcattgaatttgactgaagcaggtaacatgttttttaggtgttctcctgtatagtgagtctagtgcttcgcttgatggaagcacagggaaaaaaaggatccgtgttggcgcactaccaaatgccctaagaccttattgtcccttcaccccaaaagcctgcctacttagccgtgtcccactcccattctcttcctcgttagaaagccgttcggttggcgtacttctgtatagacccaccactcaactagtcttttcgacctcttcaacgtatttaagtatccttcttctcttccgcttttctagctgattgaagcagggatagcctccacgtaactaacacggccgtcttgagcaaaacgaactcagccctaccaaatccgtcgaatggtttcactcctcttttcccccttctgtcagttccttgtcagtcagtcgactcccgtccctcaaaagattgtcgaacttcacggttattcatcgatagatgggtaatccccggcggtcagagaagaaaacatctctatgaaagcaggaggtgttaaacattagtctgtcttcaaatgcgggaaggttagacgttcagttcgatgagggcaggttccgtagcattagaagcttaagtatccggaaagaaggaggaatgaggatgtagaaaagaagagttggtcttagacgttatcttagctgtttaaataaagcagcggctaggcctctgtccccggattcactgattcaagggttttttagatgggatggacagaagagtttgaagcagtacggaagagtttgaacgggcgagtgactttagagttccactggttccaaaggctaaaagccggaatagtggatccagtagttctaaatatagatagaagaatcccgaatgaacaaccatccacaaatgtcgattcattcaagcaagagagtgcaaaatcctttcctttgacactggtcccgtaaacgagtgaaaaatgccttgtttttcttttccctttcagccagtccaagagttcactcgaaagcggctgttagatatttggtttgaaccggttccgccccaccccttatagtaagtactggtgagagggaaagagcgcttctgccctttacccaaacagtacaagaatggcaatccacctattggtgtgctgctgccctcaaccgacctgatcgtcccaatccggttgtcctcactaaaaacagatccacaatctcttatctaatgaatatgaatttgttatctaatcttcgtttgcctagctgcccattgctagaacttccagcgctaaggtggttggtgtggtaaggcaagcaactacgcaaacgggggatgctgacggtacggaacaagcaacaagggctttcgcctccaccactttcgctggtttggaacccccttcccaactagaggagtctcgcttatcgtagtatgctcgctcatcccgaatttccgtttcattacgtgtagtcagttcagtaaggttcgttttcttgtactgaacacttttcaaatctttaaattaacgaaatggttcaaaccccgtctgctattttctatcgtatagcggatccgacccatttttagagtgagcagatggatctcggttagtgatttcgctcgccaactggctcccttttcaagggaattgcgccgtcggttcatctcttacttacaatcaatattttttttcctttttctttccgtttagtaaagacttctaagcttgttctattcccgttgctactgccttttactagcttcccaggcgtccttaattaaggtaataaaagagaaggacaaaagagcatggattagatgaagctaagggcatggttgttccagtaatccaatatgtatgctggcgaagagctgagaatagatagaatgtcttcctgggtttcaagaagaaagagtgcagaagcataagcccttgaatggactctagccctatgaaggttagttacttggtttcctctcttttttattttctgatgaggtactttaaagacctagctatacttccttttcttgtatgcaaggctactataaggtgtctatctagaaagagaagcacaaggctgcattgaagcgcttttttttgaagtttatagaatgtaaggaaagaaaagactagattaggttgctgctgttgtttttcgtaactagatgcgactacggtaggttccgaaatgagataccttaaaatttataaccctgtggttttataactagatagaatgcataataaaaaggagaatcttagctaagggaacgggggctttgtgggatctcatctccccccagtaagaagaatccacctatcttaggtgtaggactaagcatgatttccttacagcgctggaagctctctaaagtggctatctatcttaaatgtatggtttttgataggtcttaacttttccctgaggggctctcttaatcctttcaacgagagtgtgtatatcttcatatatatggtcggcttctttttttcctttaagcttaggatagttgttcctttctgtgattccttgctaaggttaggactagcctacttccatagggttctctttcctcttttctactccacgagcgtttaagggtaaattcctatattgttaggaccttcctatctagtgttttaattatttgtatcctctcttattcttcctttcgggccggtatctttcagatttgaagcgaggatctgaaagagaaggtaacagcaaccttttatcttattccttcgtgccctacacccgtaggtcacttctctcccttcagagagggttaacaggcttattaatgcaaggagaaccttgattcaggtagctctatcttgctccggttggttctgttcagtaatcaactacctggggcaagtggctcctgtcggtttagagaaagcaaggaaaggtaagaatagattagatcgatcaagacaggtagctatgtagttagttgttcctatccgcctagtgggctatggaactaagagaatagatagagcggtaacctcaaccgatatatccgcttttgttatccgcactccgcttattgatctttgagttccctctttctttatgggtcctcccaggcggttagatcaagataagacagataagaatgttattaaatggttgtcttcttctttcctttggtagtaggtatgggttctttttggaatggtttaccttgggcatggagctagcaaataaagtatgtctgctatcgaatagggtaggcaggatcgaagagaagtccctcttattgtgagtttatgttgacccgtttttcttttctttgctgattcctctcaatgaaatttgccgtgttgcactaacaaagatccactctagaaacccatgaagattcataagaataggaagagaacctaaatagaatagaggcagaagatagtgagtctttctcatcctgcttccacctctcgggaatagatcattcttgatttgaaaagaaggatgatgactcatcggaatcctagagcattcatgtagcatggatttcttctgcggagaagctgtagaggatgggcagcgaaaaagacctaagcctgagggattttagagaagaagaagaatatgaaattccactgttggaccgtggttgagaaagaaaggaaagctggcgcaggccaggggattgaacagagggggcagctctttgttctcttcccttcgacctctgctttgatatcctcatctctggtaacggagatcctcttcttactggtttctctcctctttttagcagcaggaagattatgaacaggctctgaccactgctccgtgggcttctcccccggcccgctcaagcaagacctttccgaatcatagaggaggtagaaaacgagatgaatatcagagttgcccgccacgctcgattaggaaagcgccactcgtagtatgttgacgctatccatccttccaatgctacgtgttggttaatcaaagcttatattcatttcttaggccccaagccgagctctcccacgttccgaacatgagacttctggaactcgacgccccatcgttcgtacccggccacggctctcaccttgattcccctttggttgatgaaggcgaagttgattcccatatccttaaaaaaaaggcgctttatcttcgacgttctattctactgtttgttctatatggattttaaatggtcaaaggcctaatagatttcattcaaagcattcataggttctcacggaactcaccttgtgctgctttccctctcttggagtggagctctcagttgatgagaactggccttgtgctttcgctccatctcccgtgacatacctttgtcttgaacctgttgtcttttaccaactccccttataaaactactagtgggtcagcgggtctctcgtctatggaatggccagcacctacacccgattcctaaactccagctcctgctcatgaaagtgaagatttggatgtccacccggctgaaggatccaatagtgaattcttcttttctttactcaatgctgaagctggttctgaaggatcaaataggtcatggcttggggagtcattgaaaccaagactttcggtttagtgtatattaaaaagaacagaggaaggatatattatatatagtagagtattcggcctaactcacaggcggagataaaggctattaaatagtcgcctaagcagacgatggacgagactctggaagagtggctttctgctgaggttgcttctgacgggcttgtgaccaactcggtaaaaacccctagtgaaaacgatgtctgtatgtataaccgccgcttcaaatcaattgaatcaatgcaagcaatgctgttcccacatgcctattcattcctatttggttggattcctcggttcatgttatgccttagatggaatagcctgtttttctagctattagtttccttcattcaggtatggtggcagggaatacgaagttcgagtaggcttcgtcggtttgagaaggtgaacgacaaatccgagtgatcgaaggttcaagtactgagcgaatattcaaacgtctattcatgtgagaacttcttgcgcctttggttgacaccaccttagccttagtcagtaagggagggaggtgactattagatagggactctgaaagttcatgtgaagaggttagtggaagagatcatgtttccggggttggagtcaccgaagtggacgataggcaagagaagacccaggagtggacctgacaagcataagattcattcaatagccaagccggagagtctgcaccactccgaagtactaataactaagttgaagagagagcggggcaggccatagacgaaagtgaactatagactacttaccggagaccataggcaatggacgaaagaccagcggaagggccttagtcgccgaggtattccttttcatttttatcttcgtagactggtaggcctcatcaaaaaatcgcacatattgtgtgctaggatctaactctttgaattttttgtcaaatgaatctagataaatatttgttaacgattttctcatttcgtgtattgatgtgtactgctttacactttccatttatttgttctactagattgccggattatagtatttttcagtgaaggaaagcacctgcagcctacaagcggaggagtctttaggcttgcagacctgaggcaggaactattattgaatgaaatacggccttaaaccgatactagaagagatagagtaaggaattaccaatcggaagcattagaagaaaggattactcactcatagggattctattaagacaagacccggaggatataactcgttataaggcatatctcgttgaatcagtctttttcgccacatcgcgtataacgggaatcgaaccccctctgctgctggcgggcggatggagaatgttctacttcgatccagcaacttgttaggtcttgaagagccttcggaccctttctatgttattagtaaagggcttttctcgcttgttgctttcttcgcatgctttcgcgcattaatagaatacatatatcaaaaggtagtttacttgcttacttgttagagtaattccttgagttttcaataactaaagcgctaacgagcgggtgcgctaacacgcagctcaatcccttgctttgttctatagtaaggggccttttcaggatgccgggtgcgcaggaacgcccaacctatacaaggggtttccgccttcatttggtcgtgctgctatgatgtaacgtgcagtcgccccgaggcagcaggatgtatggtatagggccccctattttctctcccttaaagtcctttatggatttcgagtcgggaatagagctgtggcttattcggcgctatatcacaattcattctcgggcatagctgttcacgaaacgtggcatgggacatctgtcggcggtgggagtcttacatccgagcgagaggtcagaccaatcccattcatcctggtccgatccgaacggatcttgttgaatgaattgatccattgttgtatgccctacttcttagtgaattttttcctactcggacccgccgtacttcctttgactactcctgagatatagtggaaacattttgttatggtggagagtggggagtgaaaacaccaatgcagcagagaaggaccgcatgaatcggaatccacaactattaagacagacgcccgagaaagaaaggcttcacgttctccaagtggttggttgatcttagcgtgctagccgctgcttcatttcgtatagtgataacgctttctctttcttagcgctccgccccccccttgtatagatagtaaggggaactctggttgcgcggctttctcttataggggtctattttctctgacttgactcagcttgacctacttgactcagcggttagagtatcgctttcatacggcgagagtcattggttcaaatccaatagtaggtaaaaccggccgaaacccctgcttttgccagcatgacagcaagcacggactggcggcaaggagtcaactgaatgaccaaagcatcggttgcttccacttgtggccttcttcgaccgccttgacaccttaatatcaaggaaccccccctctcttcttctcttcatgtatgtgggctgcctgcccgtcccgaatagacgaagaggaacaagctgaagaaaggcgcgagagatagagttgagtatcaactcacctcccctcttccacaattaggtgaagacctggggggccggaaaccccaacgggaaacctttcaccgcgccacacgattctttcgcgaagcgctctctcagacgtttccattcctgcccccgcaagcaaaggggtttcaagataccaggcgaccaagtgaaagtgaacagccccgagcaaatcttctagagagcgtaccctttctctcttctaagaaaaactaaataaatatagaatacaatttttattctatggacctccgaccaatgaggtgatgacacatgcatgcgtgcacatgaacttctaaaaagtgggttccaaacctgggtgttactatgtaactcaatccattatccattatagggctattggtttcttttttttttagaatagactctgagatagaggagactttaaggatattttgtcgagataaggacttgcaaaagtcgagtagtcgcagaagtaaggtctcagactcgcagaagacaagtgaaaagtatctcgaggcttcgccgtgggaatttcgcgagagttttcgccgctttgaaacaataagtctcaaaatatcgcaaaaattcagcgtggtttttctcggaaggttccgccagaaatagtttgggattaaatcgtttggtctttggaagttccctgattggtttgagaacctgattgaagaagaccagaatttttgaatacacgtagatccgcagatctagtgtttgaagttattatagtatgtttttagggattccacagttcagacagaaacgttgttgagtatgtggctttactccaaggtgactcaagtctcgattgagcagtcatttttcatagtcacgggtcctgctttagcaccgtttcacatttgcaactgtagagggcggtttatgaccctccaattttccagtggaccgaaaggtcgtgagagatagcaaaaagatgcacccatttctaggcgaattcagtgtcttgtggatgctatctatgaggtagttagacacgccccttgggggatccgttgggtcttttaaaaggactcaatcaaagggcacaaacaaatgaagggaaagcctgcagtttttcttcggtttttagttttagtttctctagatcatactcatgtatacgttccgaaatagtacttcgttcaaaaacttggccagctttaaaagcaccaaaaatagctatcgaaagaatgagtccgactccaagtgttgtgatgtgctcagaaagaaatctatccatgatagaatttcttttttcttgtagttccgcttcttgctctaaaaatgcaataaagacttgtcggaaatcgccggtggttttttccaccaagaaaggcatgggagtctttgggcattgcttgagctaagtcaagcttggatcaagttaagtaaagactgactacaattaaagatccttcacagcacactttctatatatctttcttcattatcggctgcatgctatctccgatagagcaatgggaggttcagtcttaccgcgcaccgcactcaattcttcccccctacccaaccaaccttcttcgaagaaaaactggtaacctcaaacatttcttataagacaatttatgcctttgggcctatcttagaagaaaataaggttctttcttaccgaatatagtgagtggtctaatgggtttctttctaggagatggatttgttgcctcctcgaaagtagcctttctgctgttctttatgtgagaggttttatgagctacaattcatttcataggggaacttttcggttgtgaactcatacctattcttcgggtaatcaaatcccctctttgttagtagatagagttcctttctggcattcatagccttgagtgagaaaagccccttttgtttccaaaccttctccttagctctagaaagacgtttccttatcaagagatgctaaagctatttatagttgtttttttcggaaggcacgacttgtcgtcgtatacttcctgcaaattttttttgtaagaactagtagaaag

SEQ ID NO: 82 - DNA, 8355 bp, Cannabis sativa
tatatccttgaggttcatactgttctgttggttaatgaaaaggctaattggatttactacatactgataattgtcaaggaaaaaaaatgcttaacttttaactgatactgtcatgaggtcatttatggttgatacctcatttaaatgacagatcagaaaaagtcaaaaaatgatgacacttcatatatgtgcacagctgatacctcatttacttcggtcatttatggtccttgaggtgcacacctgtgatatatgtgccatcatttttcatatataagtggcgtaaagctaaatttttaacgaggtgaacgtgacgcttcattttgatattttgggtgtatgatttacttgatatcttttgccttatgttatacttcttgagtggttttaactttgcctcatggtgggagcagggcatttggttactctagtgaggacgtccaaatggttgttgagtctatggcttcacaagggaaggagccaacattttgtatgggagatgatattccactggcagtgatatcccagaaaccccacatgctttttgattatttcaagcagcgttttgcacaggtttgctttttatgtattgttgatgatttttcaatctatcttacacgtttaactaaaaaatgcttcacactatgaattatgatcaggtatttcttttatatcctaaagcttatgtagttgatttttttagaactcttgaattgtaagtgtatttatttatttattttgcttcaataagtttgaagatccacctatcatttgctgaaatctttgcaggttacaaatccagctattgatcctcttagagaagggctagttatgtcacttgaagtcaatgttgggaagagagggaatatattggaggttggacctgaaaatgcttcacaggtttgtttagtatttcttttcttcttaatccatgctgcatggtggctgttcttctatgttcccaatgaaaagaaagcaatgaagtatattacatgagattgagcatggtttatttattttgcaggttatcctgtctagccctgttctaaatgaaggagagcttgagttactgctgaaggaccctctcttaaaaccccaagtcttaccaatattttttgatattcgtaaaggcatagaaggttcgttagaaaggacattgaataagctttgtgaagcagctgatgaagcagtgcgaaatggctcccaattgcttgttctctctgaccgaactgatgagctggtaagaaccattttaacttcagtctactttcatttatttctctctgtttctgtttctgtctgtctctgtcttttcctcttctttttcttttttatacttctatatgagaaacaaaccttaaacccaaattttttgccgaaaactaaataagaacaaatttatcttcattttgaaaccatctcaaatttatatcacttaggttccgtaacatatccatttattattctgtttctgcaagggacaaagagtatacattaaattgaagataaatgtgtataaattgcttcttgtggatgttgctttaaatgttaaacaaccaaatctaaaatgtgtggatactatagtaccatattacaaagaaacatgttatacattctttctgcttttatgcacatcattaaaactgatagattttctttatccaaattggttgtccttttttgctcattcattatttaaattcttagcattactattttcattcatttggttggtaatgttattattttttatgcatatattgttacatatatgtattattccttcttgtttctgttgtgtactgtaagctaaaaattcttacattgacttgtgcttttatttcattttcaggaaccaactcgtcctgcaattccaattcttctagctgttggagctgtacaccagcatcttattcaaaatggtttgcggatatcagcatctattgtggcagacactgctcagtgcttcagcactcatcactttgcctgcttgattggatacggtgcaaggttgtcctcagtctctgctatctttgtttcattgatatgctgccctaagttttttttttgttttttgttttaatatatacatttatatcttctaccacttttggtcttttatctaaaatggagttggtgatcataattttcatgcaaattgttcttttctactatcataaaggtttatgtattcatagctaattacatttattttccttagcttataatcatattagaatattgtgatatcactgtgagttactaatgcttgggagggtcctctctagatttaatacctattttctagtctaccttgagagaacatgtagtcgcaggcttggcataattctagaaattgttaccgttgtattaatgttacccgatttttaccttttaaaccatgtccatggaaattttgtattcatagggcatcgttcatattgaaaatctgcatcaatctccagttactttgtgatgctggcattttagctattgatttttcatttatcaagttagttgttttcataagaaaatacaatagcatgacattataatttcactatcagtgccatatgcccatatttggcattagagacaagccggcagtggcgtttgagtaccaaaacagtaaatttgatgcgcaatggaaagatgcctactgttactattgaacaggctcaaaagaactactgcaaggttagtttatttgctttacaaaagcaagcaaataatgttttcctttttttttttttgctgttgttatgaaattatgcaagttatttaggtttgacattattttggtttccagttacattgtacatttctactttggctttcttaacattgaggtcttccaccaattatttttagaattctggtctttcatgatgcgaatgtaatgagactaaaaatttagagcaaatgaaattaatttgattgatgtttgagaactggaaggagtgaaggcggcatgtgtaggggtggtaattcgtgttgccgtatcatattcgtgttcgtgttatataagttgacatatttaattggtcaacccaaacccgacccgtgtatatttagtgtcaagaaattttaaccctaattcgacctgtcgtgttcgtgtgtcgactatacttatgttacaatacatgttgatcaacatgattggtattgtatatttaatttttataaaaataatttatcacaaattatcaattgtaagcaattttttttttaatttatatattttcctatgaaaagtaataatacttttaactttaaattaatatttttaataatatattagatataaatgagtcaattcgtgtcgatttctcgtgtcacatgcgttaaccctaacctgcacaaataataatcgtgtcatttgggttcgacccaatttcaacctgcattgcatctgtttttcatggccttaacctgcaataatttgtatcgagttcatgtcgtgtcatgaccggaattgccacccgtagacatgtatccaggtttacctattactgagaatgtcactgagtatgatgccttcctgtggaaagtttgctgaatattaagttaattatatacttatgcatacttctattatttctaaatttataaagtcatcaattaaatatcatgttgacatgcacacgtacagtaagcagaaaatgagtgtccaaacatgagcaaactgctttagttttgttgttcatctaatattgtaggcttatctgaggaagtcagttcaaaaaaacaaatatataattaagaattaatttcgttctttctacttttttaaaagttattgacctccttgacacatatcacatatgtttcaagtgcttgcttttgtgtgtattgaacttttgagattaaactcttttgtacgccaaatattttctggaaaatgtttaactactgacacgtcaagtatttctaattgacaacctcttgcatctcaggctgtcaaagctggtcttctgaaaattctttccaaaatgggcatctcattactttcaaggtattttattttcctttggttttcatccaacaattttagggcttatcgttatctattttttagttgaatttattagagctgcatgtgtcttcctttctgtgatgtttcttacagcatcagctaattaactaaccagtttcttgtgtacagttattgtggtgcacagatctttgagatttatggattagggaaagaggtggttgatttttcatttcgtggtagcatgtcaagtattggtggactcacatttgatgaggtgaggcagaaaacagcaattttacatcttattttaaacatattgtaacagtctatgacaaagattctcataatttttttagtgtgttttgctacaactgaaaatgttcagaactaggggtattgtagatgaacatgcaatgacttgactcccagtatgagattggacatgtcatcaactctatttgttaaattaattgttgtgattcactgcttggtaatttatttttaccatattctgcagctggcaagagagactttgtccttctgggtaaaggctttttcggaggatacggctaaaagactagaaaattttggatttatacagttcagaccaggaggtatcatcttttttagatctgtctttttttattcagtactaataaagaccattcctttgtttggtcaaaatttaatgcattgaaatgctattttaatggaatggcttcttcaccattctggtggattagccattccttgtcaaaagtgggaggaaaggccattctattgcacaatgaaaaaattataatgttttttattcatattaatttttttcccattcctattcgtttgtttttattattcccaaccaaacttaccctcacctttatattaagatttagttttttttttttttgatgagtaaacttgtgttatagtttgagggaacttttttttttcctttgcttgtttaagttctagtattgttaatagtattatcctttcatagatacatttatatatttttgtatatagtactcgtcatgtctatgtttctatggttccataggtgttaactgttagatctttatccaatggaagtgaccaataaatgaaatttagtagtttatcaaaaaaatttattaagttatgagaaatcaacatttgaaattaatgacaattcaattttccacttttggaatgcaagacataattgttaataatacttttggcatgtgtacttaatgttattaggggagtatcatggaaataatcctgagatgtcgaagttgctccacaaagctgttcgccaaaagagtgaaagtgcattttcagtctatcaacaacatttggctaatcgacctgtgaacgtgagttccttaatcatttacaatcatgtttagaaagtagagttgaactggattgaattgagtaatttttgtcgtgtgatttgattatgtacttagaaagtatattggtaaaattaatctaacaactcaattaatcaaccttccatgggatatccatttgtatcacttgggataattttattctatcaattctctaatcctcgtatatatcacggggaaaagaagtttatttaatttgttttctcatagtttattatttgcaaataatcaactcactcaattcccctcatagttttaaatctaattctatatcataacctatttatcaaaccagacatttgttttgtgtcattgttctgtaattttatttttttagaaaaatctttaattttgagattaatctgtattttgttaatttaacaataggttctccgagatcttgttgagttcaaaagcgatcgtgatccaattccagtaggaaaggttgaacctgctacatccattgttcagcggttttgcacaggtgggatgtcacttggagctatttcgagagaaacacatgaggcaattgccattgcaatgaacaggataggaggaaagtctaattcaggagaaggtggcgaggtaggttgtttcacctttattattgactttaactgaagtccttttagatgtaaagattctttctgcttttgtttccaaccatgaataaatattgtaaaatgtgaaatttaatggaatgccaatgtttaggatcctattcgctggaagccactcagtgatgttgttgatgggtactcttccacacttccacatctcaaaggtcttcaaaatggagacacagctacaagtgctatcaagcaggtcatcaccctgaattctatcttctagattgctcttaatctaatgttactgtctgtatattattttgaaatttacaagatacaaagattgttgagatgtttcccccaaaagtggttttggttacttttgcaatttctattataatcatctcatcaaaatttattacatcttcaggttgcttcaggacgtttcggcgtcacaccaacatttctggctaatgctgatcagttagaaatcaaaattgctcaaggtgcaaagcctggtgaaggtggccagttgcctggaaaaaaagttagtgcatatatagcaaggttaaggaattctaagccaggagttccacttatatctccaccaccacatcatgacatttattccattgaagatcttgcacagttgatctttgacctacaccaggtatctgcaagctaaatccccttaattatcgacagattttttagatgctgattaaagatatactaatgtgtactgaataaataggtgaacccgaaagctaaggtgtccgtaaaacttgtggcagaagctggaattggcacagttgcttctggggttgctaagggtaatgctgatatcatacaggtacatgtttacggtgcagaatattgtttcttctctctcttgtgttgttcaggccagcggatttatgctattacatgatatcaacatagctaatgactctgaatattatgcctgtacttcttcatgtttgaaatagctatgtaattttattaagttttcaagcatatcatgttttattttatatttctattctttcttcacaaaatttttggtatgggagatcattagagaacaatagctaaattttatctatctctctaattttccctcaatttcttatttggcctttgacaaaaatccttaatctactcttacagatatcaggacatgatggtggaacaggggcaagtcctattagttccattaagcatgctggtggcccctgggagcttggagttacagaaacacaccaggttattgaatttacattaaaaaattaagttcaattgatttattttattatgtatttttttttggataccctctctgagtacatctaaaattcgaaatatctgtagacacttattgcaaatggccttagagaaagagttatcctcagagttgatggtggcttaaaaagtggagtcgatgttatgatggctgcagctatgggtgctgatgagtatggctttggttctgtggcgatgatagctaccggatgtgttatggcccgtatttgccacacgaataattgtccagttggtgttgccagccaggtacttcagttttatttattatttcttgctgtttagagtaagcattatgttattccctttgtatttttattttcagagagaagaattgcgtgctcggtttcctggagtgccaggcgatcttgttaacttcttcttatatgttgctgaggaggtaatcttgtgccttatgttctttcattctctctctctctgtgctgtgtgtgtgtgatcagtagtgtggtttgttatttttgcttttatcctcagttccttaaatgtgtttttctagtcattatttatctccaattttcatggcttagccactcgaaggttatcttgttgctgttgactcttaaattatattgccaggtaagaggcatcttggcacaattaggatatgaaaagttggatgatataattggaaggtcagatttattaagaccacgtgatatatctctggtgaaaacacaacatcttgatctcggttatcttctctcggtaggcctaattttcatttttctctgaatgtctatttctttagtagtatacattatttgacttctaatcttgattacagaatgtggggttgccaaaattgagcagtaccgaaattaggaagcaggacgttcattctaatggtcctgttctagatgatgttttattagcagaccagcaggtgatttttgagaactaatgcatgctctttcaattattatgtggttccaacttctatcccaatctatcacttgatgaaatggatgaccattaatattcttattgtgttttcatattaagaaaacttgtttctgtcaatattctgctatttattagtgctagt

SEQ ID NO: 83 - DNA, 4694 bp, Cannabis sativa
tgtaaacatatatactcaataaatttctaaaatatgtgcattattgtaaacatatatactcaataaatatattgaaaaagaaaaatcaaaataagtgaaagtgacaatatacttacatgtcactaaggctccaggagaagtataaattagtaaaaagttattcaaagaattcttgagttacatctttgcaatatcactttaatcaattcaacattccaaaactataataaatgtcttatgttgccacaagaagtttctgaatcaaaacgttttttcttctatgtttttcacaatccaactttcctaacaatgttgactaccctatactctatttggtatctcatatgctattcacattgccatgaatttgaagaaacaagagcagcaccgaaaacaaaaacgaaaggtcgtgctgatgtaggagttccgtgttcagggaaaggttgttcctgtacctaatatggatgacattacagcatgagcaaggaagtttttatcttccttcagtaataacatcacttattggagcagctaggctataaggagaagggaacatgggatcatttatagggcccgggggaatcataacatcgccttgattcaaatttctcatgtttttataacccaattctgttaaataacttggctttgaaatattagtgtcaatctcaacatctccggcaagcatgcctacaacacgtgacattgacggccgcaatgttgctgatgcctgagtgcacagaagcgccacttgtactaatttgattacttcgttttcattaaattccactaatcttggatctagcaatcctaaactttggttattttcgtgtaacgtccatgcctgtaaaatattttgactaatcaagcattatacattgaaacaataacgctagtttggaaagaaagaaaataagaatgccttaatttttcttttaccgtttcaaggagatatatgatttcaccatctggagtattgtagatgtttggtttcccactaacaagctccaatacaacaacaccaaaaccaaaaacatcagccttttccgttaggcgcccacgcaaggcatactctggagccagatagcctctgtaagatgacaaaatgcctcactatctttattttttcaataaataatgctttcatgctttaggacactccaaaatttcttaagttataactagaatatgaatgtaattttaacttcaggacaaccatcatcagtacaatcagttcttcattaagactatcatattcaatgagaatgaaaatagattcataaaaaaactatcttgtagcatcaattttaatgaacctgaagaacatttagataattgtggaattatgagcaattatagaaagaataggtcctgtaagttggttaaagagacttacattgtccctgcaactcgggtgctgatatgggttttattttcatcatagagctttgctaaaccaaaatctgatattttaggacaaaatgtatcgtcaagtaaaatattactagctttgacatctcgatgtataatccttggcatggattcttcgtgaagataagcaagtcctctagctgtgcccaagcatatattgatgcgggtaggccagtccagatgcaaattaacttttcctgcaaggttggctgcatcaatattaagtaccacaaagatacataccaataaaaattctaactgtgaactatttagtgtttcacataaatactgtcaaagcctgggattatggaaatatttacacctaaaagtgaaggggcaagaaaagaaaagaaaagaataaaaaaatatatattagcccttccagacagtaacttggatatgatgtaaaaccagcccaaagaattttgcaatttaatggtactattctctttttctttacatctatcacaaaaggtttcaaatgattaaagcttttaaaataccaggcaagcatagcatatatccagtagcttcgtaccaaatagtaactgatcaaggcttttgttttcaagatattcataaaccaagatgcgcctatttccttcaatacagcatccattcaacttcacaagattgcgatgttgcacaacagatattgtggcaatttcagatacaaactgacgctttacgtaggtagatgctacagcaatttgtttaacagctaccactgttccatctgaaagtgtgccctacaatgtaatcaacaccacaaaatgagaaatgtgatagaactgggatatattatgaaaaaaaaaagctgaaaatgctattttccaattcagctacaattgaatattaaaagcataaagatcaccttgtgaacttcaccaaatcctccctctcctagcttattgcacggactgaaattatctgtggccgctcttaattcagcataactgtaagtaactggacgagggcctgttccaagaagttctgcatattcatgcaagaatgtacacgatataagatctagtagggatataacaagagatgagcttaagactatttacataacatgaaagcattactaacagataaactgcgtagatatgaagtattgggaaaaagttaattaaattttataatggaagtgtcccaaatgaaaatctaaagaaatattcaatgcaatgttaatatagcctgagaacctgattaattcaggaatactgttttgcagccatcagtgaaggtttaaaacaaaattgacttcagaaatggattatctattgatgttcattaacaggacttcaactgtaactcctacttacattatcttaccttcatcatcatcatcacgtgattttctcttcatatatagtattgaaaataccaatacaaggaccacaactgctgctgaaaccgcaataccagcaactaagcctgttctgttctttccttgagtagattgtcgacccccagcaatacttgtaaaatctgagcaagaaaatatattcattcaataaaatgatttaagaaaacagaagcaatgaagaacaattaaaccatctgactatgaatgtgtacatatagaaatatgttacctgaagcagcatggactgccgctaccaatggaccatagtaaccttctttaggtatacagcaggtccctttaccagcccagaacaaatgaatttcaagatagttctcagacacattaatgttgtatgtctttgtaattgctctctcaaccccacctgcctcctttgctatgtcaaagtcctttagtttgagattaccctataaataagacgaccagaggtaagctcagaaaatctttatatttttgcaataacataaattaattgtaatttctactcagaaagttaacattgagtttttaaactggaatattttcttatttaattgtacaattacctgaatatatatgtcaaacacgcgcctagctagacctgcccatgtctgtgagtttcgatttggaaaaccaatttctgcaaagtgcagagttacagtgtatggcccattctcaagaccaagaccgtagtatcttagagatcctggggacatccttgcagtatggaaaagatccggattctcatctgtgcctgtgacttgtgcctgggtaccttcgagatccatcttacctgttttgtcagcaaacaagcccaccttgctaactgcccatctctcattgattacgtaaaactttgcaggaccaagaactaagtcctcaggttcatacactatgccagttcttccaatcaccttaggtccaccacacttgattgagaagtcagcatctgtaagatccaatacatcataactgtcatgtcggaaaatgaaaagaatttaaatgtcatagattgaaagcaacttaaatataaactgtgtaactatcgtgaatgaaggattgaaaagtaataaatgaaaattctcaatttttcagttacacaagtgaaacaataaataactcacttgacaatgtaattgacctcatttttaagtgtgttaattttattgtgcacttattcatacaaatacacaaccatctcaaaacagacatactataaaataaagacttatggaactgggttagattgttgtgtaaggttcacaatggatagtttccaaacgacagataatcaaaatcattacagtctcatatatccttagtagaacttgtttttatcacaatgaagtgttgataaaaatgcataaataaataatattggagagccaggacatgtatgcttaacattataatgcatcaaattgctaacaagtaattgaatataagtaatttacaaagtggagaatctcgattgcatggaaagttcctctgcagacattctaatccaggaataactctgcaagcaaagaggataattagtgcttattgaaaggaaaggaaaaaaaaattaacactatagaaatcttgtgcttgtcgaactaaactaatatttagttcctaatagaaagaaaatttaaaaataaaaatagaaaatcatcaacaatgtgaaatactcacgatctgtttgagctgtcaaatgtaaagttattggccactaagttcctgcacaaattttactcgtcatattttcatttttgctaaaactgtaaagagctaaaaacttccaagggaaagagagattgtgttttgacatcacaaccattgtcataaatgaaacacaaagcaatgtgtgccacgtaaaaatattaataaagaaataagagagagagagaga

SEQ ID NO: 84 - DNA, 6266 bp, Cannabis sativa
aaaacttgagacagcctaaatttattgagctgggcttcttagcttttaggttatctttcttcaccggaaaaataagactagttttagcagcagttactagtttaagacagcgcaacatatcctcaacagaatcatcaatagcacgcaattgcaacctgtatggcatgcaaatgtgaacatcaaggccttgaattacccaatcccatgtgttacttacaggtcctttcacaccagatgaacccattgagacactaggaatacgtgaaatttgcatgcggctacttttgaatactctggaaccattaaaactaagtataagcccttcaagaagtactccaatacgggcattttcagagaaaattgactgaacctgaaccagtgcatcaaccccatctccagcctcagccgatatgctcagcatctccacatcaacagcaaaaatagactcctttttcttgtgcttatcagaagttcctgattcagcagtggcatgtttcttctcttcagcatctcccataaactcattacttcgttgctgaagcttctgattgtgtacaagtgactttaatttcaaactcagttcaaagagcattagatgtacatcaggctcccacctaactgtaatatcagttgcactgaaaagagaacatacagaaatctctttaagaccaccagatcgtcgtacaaatttagcattttgcatgtcaaacagtgtcacttttgtttccattttttgctcatccaaatattcctgataaattgatctagctcgttcaagttccatctgcgttgactgtttatccttgtttacacacaaactgaaatgaaatacgtcaagagaaatggaatactttaactttttggattcattagaaagtgtagacattatgtttgcacgtcgaggtgtgccatcagctgagacacttattataactcgaccaccttgtgatccataatttacacgcttagggtcatcaataacagtattttccagaactgattcaccactgaaatttacagagcacctttcaagattaaacttcaaaagtcgagttcccttccccgacgatttggatgaacgccccccaccacgcccctgtgatgttctttttccagaggcagacagagttttcaagagcgcttgaaaagacatagctgttgatataattgactcaacacgcttgaaagtcaaataaacacccataccagttacatcaacagacaaaaccaatttacacctgggaccatcttcttcagatgattccatatccttcttgccccaatccaaactaacctttgctatgtgcactaaggaaccagaatttgattcaacaccaaaagggttttctttcaagcattcttggtattcatctgctaggtgcaaatttaattctccaagttccatgtgtacagcggttccagtatcagaaatgttatttgcatatacgtgcgatgattgagagcaaccctacattagaaaaatcaaaatcaactgtcatatttataataattaaaaaaagtagaagtagacccaatattacacagccgaatactaacaacccaagcttaaaaacaaaatcttttgcttcttacaaacatagagtgtcaaagaggaaagacacttacagaaatccaaaggatacatataacaataataatatataaacacatcacttacatgatatagtggcacaccactgatactataaagaacaatagtcatctcaggagctgaaagagtacatgtccacataatagctttggcatcactaactggtgggcttttaatagaagaaacttcatcctgcagcaccattctcttctttttagaaaaatggaggcgcaaccatggctgtaatctacttattataatgttgcatcgagtaccgccaagttttacatcaacttcagctctaataggtaatgatggctgaaaattaacatttataccagtcagtcaatactcgaagaatttgcaaaggaatgtagctgaagagaatactcgatgaattgaaaataacaaacataataatgaaggtattttgtgataatatggctgcaatcagtattgctaaaatcaagtccgacaggactaagcaagtcgagctataacaacattttatcaatgcaaagattgagaattccatgttgtctttaaatcgtataacttataagtgcaatcatttttttttctttttttagaaaaagaaatttctttaaatcctagtgtcaatcataatttttgttttctttttttgaaaaagacacagagttcatgtcttagactgacctcctcacaagtttataagggagcctcacttatcgtgctttgtctccaagatggtgtgtgatgtaaaactgatggagaaagtgttatcatttattccttaattgttcttgttggagctatggtttaaagttttgaatgaatttgacatggaatgggttataacttcagctctaatttctagaaaacattaatccaataagtatttaaactataataataataataataataaccaaatcactagctcaaaattctaataccactaaaatcaatcttgcccaaacagatacatgacatctcagacacaatactaccagttttatagcaccatacttacctgtgtaggaacatagacaaatgagacgacatccacttttagtatctccaggacagaagagccagcttctctaagtagctaaaatgcaaaaggaagaaaaatgtcaagaagggtcaagatgttgacgtaattactaacagctctaataatctttcaataatagcaacacccttacatgaatctcactaaaatccagttgaacgtcaatgcgtgtactatctcccgcatcttcactggcttgtgatttgatgctcttcaactggattcccattatgttattctcaacaacaatattgtgttctcggtgcacaaatttcacatccaactttggtaaattgaagcacagctataaaaagcacaacagtagaactttcattatctgttaaaaacttagaactattaacacaaacacagtcctcagtgccactcgagcaacgtaaggtactatatgtagctatcacagaataaacaattttacaaaccttctctggaattacagaggtatactttgaaagagcagcagcagcgcgtggttttttgtttacgtttttagtgtccaaagagcgaacagttgactctatagctacatcagactgataagaagcttgtgatgaactcttgctttttgaaagcatctcctcatttaggttcacagtgacctccccacattctatgtccacattcttgatgactacaccaacttccctacgttcaaatgaaaataaataaataataacaattagctgtctttcctttaataagattataggtttgagctgattaaaaaaggcaacacaaaagtacaccacaaacaatagtcttggtgactgaatatttaaacagtacctatcatgaccaaattcagaacagagagaaaactcttcacagacaaaagcagcagatgctctctccaaaatggcagagctcaaagtgccggtgggaaggcatcctccagagctgaaactggaggactgatcacacataactcgttggtcacccaagtgaacaacaataggcaatatatgtagcttaacagacagattttgcttagattgagaatctttagatatgtcaactatcagttccttcacttcaagagtagcttttggcgtctgcaacatttcaaaatagtatttaccacccaagaaaaaagaaagtacaaccaaacaaccattagaaatgagaagctaaaagtgtttctgctgaagagtacacggaaaaaagttttggtcgtactatactaagcagatagaaaaatctgtgcttagctatggtgggatttgtgtttaagagagagaaaaagagagaagagggggtagtagagccagaagagagatttgaagtttgcacagctgtttcgcaagggactccatggattaaaacaccacaccgaaattcttgtaaacattcacaatgaaaacattaatgcaaaaacaaaaccaaccgtaaaaaacaagtcattgagatatcaaaacacattagcagcaaagaataacacttaaaaacacttaagccgttaattaaattgccctcctgaaacaagagaaaatatcactcatctcaaaaaatttataccttcaaaaccaaatctgtcacagaaatggataaaaaccttgcaacattggcaacaaccatccatttccccctgcctgaagcacgtggctttttagttttagcttcagatgtgcttttagttgaaggccgcattactatttctaattcgcatattaacaattgcagctttggatctctggagaaaaaaccaaacccaagtttgaccaatgactgacgtaagcttattttaatttctccaatcgataaagattcaatagggccctgtacattagaacattaacataaatctcacctaaaacaattaattggacaaataataataataataagccttacaattcaaaggctaacgtatcaaaaaacacctttttgaatgtgacaacaacatccctcagacatttccatccaccaacacgaaatttgacaaatgctcccactttgcgacttaaaaaccaagcgagaagttttgaagcaaatctatgaaagcatatttagtgagaattaaacaattcaagtcatgagaatgtaagaactagaaaaagtgatgaaatgaacaaacaaattacttcggttcggatattaattagcaaaatgaagtaaacaaacaaacattgatgccataaacaagaatgtttctttcaaagactgtaaagtaacatcatattactttcacatatccaccattccaacattttccaacctacttctctttcttaaaatggcgtaaaaggaaattacatttcgctaatcataactagccaagattatgaaccaagaactcatgtccagggcaggacaaagaaatcagcaatttaagaaccccaaacaaaatcttacaaatcagtgttaaaagaaacccacaacaactatcctcaaaaactagagtttacccaaaagaatgtctaaagatatacatatacaatacatgtgtacatacatataatacaaactagcaatccacaattcatcaatcaacaatgccatcattacaaacacaatctccataaggcaaccaaagatagttatgctgcatcagtttcaaacactataatttgaagagagtgacccaaaattgaatacctattaaatccagacagcaaattatcactaaaagtagatgaagatgatgaaactcacaacaactatccacaaaactagagtttacccaaaagaaagtatagatatgtacaatacatatacaatatatatatacatataaaacaaactagcaatccacagttcatcaatcaacaatgtcattattactaacacaatatataaccattaattaatccataaggaaaccaaagctagttatattgcatcagtttcaatttcaaacactataatttgaagagatgattaaaggtacacaaaattgaatatcattagatttaaacagcaaattatcactaaaaagtagatgataatgatgatgatatccataatagttgtatgtaatctatatcaaatgcccacagcaaccacagcagaatacaaaaagacccaaaaaaaaaagtgcatatatatacataaatatacacacacacaaactagcaattcacagttcatcaatcaacattgtcattatttctaacacaatatccataagacaaccaatggtagttatgttgcatcagtttcaaacactgtaatttgaagagaaagacccaaaattgaatatttataaaatttaaaacagaaaattatcaccagatgatgatgatgataatgatgatatccatgcttatacaatataattagcatttcatataaaatacgaagaatatactcacatgaagagcaaccacagcagaatacaaaacaacaagaagccgaaaaggaacttgactggagaaaccgccattttccaatttgcaaaaattctccgacaaatcaaaattgattgaatcaaactacagaattccaacgaaccgaacccgagaaaaagctaggtctgcacgaacataacttcatcatcatcgtcatcatcatgatcgatcgttcttcccaagacgaaaaataagaaatgaaaagtgttgaatgtatgaatatgaatgtgtg

SEQ ID NO: 85 - DNA, 3521 bp, Cannabis sativa
gttctctgctcagctctattccaagtttgcacatgtagctattggttatagttaggcttgtatattttagcaacatttattaccattggcttctgtgtagagcaatcatttgcaaaaattttgaactaataataagttattcgtgactgcttattgaactgtttactctcttttaatgctaaatataccacagacttcttatatgacatataattattggttagctcaaatatattttggctaaaatttgtagataacatgtttgcaattatttcttttgtagctaagggtcgtttggtaggctaaattatattttaagccaactacttatatgatatagttgcctatcctatacttttccattaggaacgttaatttgttggtttgataggagggattaacttcttagattgaattgtaattgatagatcagttaaatctcatctgatttataaactcctgaaatctttattgtttgtgtttaatgtactaattcaaacagtaaattaacgtttctttcattaatttgttgcaagttacgtacaccaaattaaaatgtctctttattagccaaccatttccaatgttactttaataaataaatctaaacgcatatactaaactagcaaaactgaaccaatttcttggttgttaccttacctatatattatgacatgaattgagttgaaatatctaaatcaaaaagttttgtttaaacatgcaaaacgagaaacgagagctggaaatattcttcctcccattcatgtctcatggccacatgataccacttacagacatggccaagttattcgcagagcgtggagtgaagacaaccataatcaccaccccaataaacactccattcttgtccaaaaccataaaaagaaccaaacctcttggacgagaaatcagtatcaaaaccatcgattttcctcactcaaagtctggtggccaactacctcaatggtgccaaaaccttgactctgtcccctcccaagacttgttcatgacattcttcgaaactacttctcaactccgcgagcccctcgagcatctgctcggggagcatcgcccgagttgtctagtggccgatatgttctttccttgggcgactgaagctgcagccaagttcggaatcccaaggctagttttccacgtaataagtgtcatgtccttatgtgcttggcagtgtttgaagcttcacaagcctcacaatagagtttcctctcattttgagcctttcttgattcctaatcttccgggagagataaagttgacaagaatgcaattgcctgaatttgtgagagaaaatactaaaaattacatgacaaagttgctagaagaagtgatagaatccgagttgaagagctatggagttgtggtaaacactttctacgagcttgaacatgagtatgcagagtattacaagaaggctttagggatcaataaggcatggtatataggtccagtctcactatgcaataaggacaccaaagaaaaatcccagagaggaaaggaatcttccatagacgagtttgattgcttgaagtggctcgattcgaagaagccgaactcggttttgtatgtaagttttggaagtgaggctagattcacagcttcacaactcattgagattgcttcagggcttgaagcatcagggcaccaattcatttgggttgtgagaagaaacaaagaagagaccaaagaagaagttgagtggttacctaaaggttttgagcagagaatgaaaggaaaaggagtgattataagagactgggcaccccaaatgctgattcttgatcatgaagctgtgggtggttttgtcactcattgtgggtggaactcaattctggaagcagtgtcttctggggtgcccatggtgacttggccaatctctgctgagcagtttttcaatgagaaacttgtgactcaaatattgaagattgggattgaggttggagttcagcaatgggttaagtttgttggggatagtgttgagagaagagcccttgagagggcagccacaagggttatggaaggtgaggaagcagaggaaatgagaagcagagctacaaaatttgcccaaatggcaaaatatgctgttgaagaaggatcctcttattctgatttgactgctatcattcaagatttgaactctattacttcatcaacaataacaaaatataaactctaatttattataaaaaaattaagttataatttaaactaattataaataaaaataacctcaaaattataatctattatatatttttttaagttttatattaaaaaatataatttgtaaatttatttatgttgaactaatatttttattttaaattataatatatgtgtaaatattatatttatttaataataattttattatgatatagtattaagaatcgtttattgttattgttgttatatttaatatttcaagtgagttataaccacttagttagaattcttttagttttagatggaatattttattttgtaaaaacatatcatggccatacgcttcaattaaaagaaagtttcaaatagtgacaaaaatataatataattagagaactccaataactaaagatgaaattttattgttttataaagaaagtgattgatgctcctaatatctaatctaaactagaaaaatattcaaacaatcaatatttggtttgaactttgactattgctaacacttgcatcccaagtatataaaaagtgccttcaataatatacattagagcaacttttctccattaatcaaaagctaagctttcttacaaacctttcgactccaataaaagcgatcaagtgtttcgatgtattgtatttatagaaattttaattttcatacttatcttaattattggtttaatttataaatggtaaaaacgagcattgaaatggtcttagcacttaaatattcatatgacaataaaaaaaaaaaataagatgagacatttataaatttcattattttttttttgaaggaaataaatttcattattaagtttcccttaattgatcgaacaactcaaaattcaattatcttaactacatcgagcccttttaaattggacgagactctccagtttttggtcacttttttatggtaccagttgttactttattgaatttgttttattactaggttcatgatttgattttgatcgttatggactgatatgcaaatcgattcctaaacaggcaaatctaattttaacaaatactgaaaccaaaatacattattgctattagagtactgttatttactagtggtgtccagtactttttataggtagcaccttacgattggttaacgatgttcactaaaaattatttttttaagttatatgagacccgataattaattataagcggtatgagaccgatgaaggtgctaaacaccaatgattcctttagcaattatctttttattatattctctccaaatgaagtattatttgttactttatcattatttattattacgaaaattactgtatata

SEQ ID NO: 86 - DNA, 594 bp, Cannabis sativa
tacggaaaccttgttacgacttttacttcctctaaatgatcaagtttgaacatctttccagcacaatccgaccactagtttcccaatggtctggattgaccagtccgaagtcctcactaaatcattcaatcggtagtagcgacgggcggtgtgtacaaagggcagggacgtaatcaacgcaagctaatgactcacgcttactgggaattcctcgttcatgggcaataattacaatgcccaatccccatcacgaaatgggttcaagcggttacccactcctttcggagcaggaaacagtatgcacgatgaccacttcagtgtagcacgcgtgcggccccggacatctaagggcatcacagacctgttattgctctgtttcgtgcggctgcgagcgccgcttgtccctctaagaagtccttacagtgctacagcatccttaccctagccaattctgtaggctaatagcagcagagccctcaacagccgaaaccatcaagagatactaccacccacaggttgactaagggggagtactgcagtgtaaactgcaagtctatttagtaggctagagtctcgttcgttatcggaattaac

SEQ ID NO: 87 - DNA, 1361 bp, Cannabis sativa
tttcagcattcaacatactcttaatatagtcaacttgctgtgattggtccaatttgttcaataacgaatgcaaccgacaatatcgatcttcccagtgcaaatttcttagagcttttaaattacttgataaaggtgtatcagaaacaaggggatcagtggattctttagatgctaactgcataccagacttttgaggaaggggaacagaaggtttcctagaggagatcatggatgatgtcattgcaataggagaatgtccaggtaaacaagatactcctgggtttttagtttgtggtaatggttggatgatttccttctgctggccaaatggccttgactgaagacgattagtgttggtgtttgtgtttgtgctatcacaagtgctgctcttgcctaattctgcctccgattttctacggacatagacaaggtgcccatttgtgaagttactgtttgaagaacggtgttgagaagggctttctgggcactcaagtgagtctctcttggtgccagaaagtttaatggtactggttaaaggactcgtatcctttaaaagaggagatttttcaatagagttgggcactctgactctactgtcgttttgcaaatctctcaacacggtcttctttacagcaactggcaattgcttatcactagtaggaaattcagtttcagtagtgcccatcccatattccctaactttggaatctactgtttgttgaaccattgaagtaattaactttctgataaaaatgaaagatcttcattagaaacaagcaatcattaacaacttagataaatagaggagaaagtaagctagactaaatagcccattctacgtaagcaccctcgacaagtaagctaagtaaattcttgcatcagtcagaataataagtatttagcaaattttgcaaatagaaattgatccaaaaatatatatctagtttgtttacttatgatatcaacatgttaatgacaactctaaacacacgatataagaaggccaaactgaaagatatgatcatagatcgggtacccagggcacaattccacattcaatactatatcatatataacatcaaagaaaaatttgatagaagatcaatttgcagattaaagaaaaataacctcggattgttttttcctctgttaaaagtctccggaaaaacactgaataggcaataaaattttcaaaaaaaaatgcccaattaaggctgaacaaattaacataatatcattccaaattcaatctcataaaactctaaacgggtctgcgaattattcctcaatgcatattattttcataagagcatagacataaatgagcgtaagattttcttcataattcgattaaattttca

SEQ ID NO: 88 - DNA, 2969 bp, Cannabis sativa
attaataagaatcccatccaatatttgttgacatattttaagtaattattaggtcaagtcaaggaaagcattcctcatcacaacatgagtgagtgacacatatatcataagtgagacttttgactaggaatactgattaatgtgaaaagggagtgtataagagaaaattaacatttgacacgcttctgacttgttcacttgttcactcggctaccccttgacttcaactgataaaatctctttttcacttgaaaacaaatagagaaataaagaaaacaattcaatcataatatatggttttttctttttttgaaatggaatcatactatataaggtttcgccctttcacgagccaatctaattaaagtgcgaattgaaaattttaaaatgtatacttgtggattaaatatatattaatatacaaaagtaaaaaaattcaatacaatctacacttatttgtatacattttaaaaattataaatgtaaaattaatattttaaaagtaaaaaataattattttaaaaatttaatacatatataaaataaaatagtgttgattaaattagaggaagactatataatatgcaataacatattaatatattattgctattagaattttatattaacatatggatttatcactttttattttattttatgacatttatagctctcaataatttcatatctttcatacttcgctttcgacagctcagcgttcccatactgtgctatataatgacaactacatatgtatcataattatttttttattaatattgaggaaggatttcaacttgaaattttctgtgagaagaagtataaattaaaatattaaactatgcctattaattgtttaatagggccttagatatatagtttattggaataatgacataaaatttcaattttcataaaaaaattatatttttatatttaaagaatttttttttattttaatagttttttttttatataaaaacaatacgaaaacaaaaaaaaaactaaataaaagtaaaaaaaaaataatatccaaacaatattaaaataacaacaaaaaaaaaaataacatttagataacaaaaaattatttttataattttttatttattttatctctaatttatttggtgaaatgtttgggttttctttcatatatatatgatcagtaaactaaatataccggaaaaattgtcaataaattttctatttcgcaagagaaaccagttctgaatttgtagagaaaacgtcaaactaaaaaaaaaaaaaaacaaataattaatcctctacctctttatctcttatcactttaaagatttggttgttaaactttatatttaatccatatgtcttactatatatagatccataataattaggctatgccactccatcattccctctggacacagaacattaacacaacaatacttattaaatatctataattattcatcaatataatttctattttggaaaaaacaaaaatcacacatactcaaagttgttacacataccaatatgaaaatattgttttagttttttttcttctaactttcaaccatgcattaagaaactaaaaaccaattattacacgaaattagaacaaaaaaaaaaggaagaaaaaaatgaatgaaagaaatataaagaaaaaagagattatgatttgacttaatatgtgtttcgtagtgtttgactcttaaagcttttgaaacctaggacgactagggttacgtaaagcaaaacatacgtggcataatatccatgtaacgtatattgttggtttttcttccaaactgtctaaaacgcgtaaaaaattattaaaaatcgacatggtcgaaaataaagagctgcttcgaaatatccttacccttaaaccccggaacctcttcatataccaatctctaaaacctaattattctaatctgatcattacattcttatgattagtttaagaataaagaaaaaaacaaaaccaaaaaaaccatacacaaacaactactgcaacaacatgttataatactattacagacaaaattgctccattggagattagggaggaagaaccggtgccggagatcgagccaactctacactggccagtaccaatgacttggctctccggcaccggcaattcaatctgtcatctattctcacacgacaaaagatacacgtcttctaccatactggcgccgccgtctaatctggggatcctctcgttcgaaacagcaaggattatctcccgtcttgtctctctttaccggtctctctccgaagatgaattacgacggctgaggatggaaatcatgatgtccaaaggtgtttgttacttgaactctagagatgagcggtaccttcttagtttggccggagcggagaggttggaagaacttgacacggctgccgaggccgtgtctagactgggaagaaaatgcaccgatttggagcttgtgaggtttgattttctatatgctgatttgagacttggagatattgatatgaagaaacttgatttttgttctaaaaccgtgcataaaatggtggagaagcttgagaaattggtgggttttacagcgaatctctacgctgccatggaatcgcttaccgaattggagaattcggagaggaaaatgaatcggtggaagaagaatcataataatacagaccaccgcagccacggacatatcaaacagttagctaataaaaccagtaattttgatcattttcatcagaaaattacctacttaagaaaacaggttcagcattacagagatatctcgctgtggaatcagagcttcgataaaacaattgggttcatggccagaatcgtttgcgtagttttcgcaagaattgaaacggttttcggaccatacatttctggtcttcatcttcaccttcatcacaatccaaataaggtttcaaattttccagactactgcctcttagaagatagtaaactattacat

SEQ ID NO: 89 - DNA, 6301 bp, Cannabis sativa
atatttacaactaaaataaaatacacaccattattgtttgtaaaacgggtgtaatttgggtgtgtacatcattagttctaattaaattagcttaggaaacatgatttcagatagggagaataggacatcaatagtagttattctaccttgacttggtagggtttgagtttgaattcaaacctgagaacattaaatatacatatttgtgttatgttttattagattagtgatgggaatggtgacgttgaaggggcctattaagtcagcgacaaactcccagcgaggccggtttgaaggtcagagtgactgaccctaaggcctgctacttgccctctatcagtataaataattatatcatttttggtattcaattcaatgagatcttcttcttaacaacctgaagtttcaaccaattgtatttgaccttatcgtatgtgcttacgttgaacattttagctccggacccttgagcttgggggatcccttaaatttaatatgcacgaacctctcgcatgtgcatgtgaatgtgatggaataaacaataattgtcttcctaagttttcctgccaaatgaaagaaaaatatttcaattaccctttttttttaaagaaaaaagaaaaaaaagtactcttggctctggtgaatgggacagacatccaccgacctattttctacgcacacaagtcatattatactatactataataggcctcatggtcttggtgggtggtagtattgttgatatgatcatcactattccttaaattaacatattgaattaatacacccactcaccttgtttttatttatttaagaaaatagaatatggaaatcatgtccagtttcatttaatccaagttccacgaaacgtttgtccttatatgtaaaatatatgtatatagttcatttaatttcatatgtattatgtaaatttgtctttttgttgataataattattaattaagtcaagacccttacaagaatctttccaaattaagtttttgttaagtagagatttaaaaaaaatccagaagaaagccattgttcatagtagacgattgaaagaaagattaatatataaattgatagatagataagtagtagtagtagtggtggtatagtagggtagggaaagaggagagtgtggggctgagggggcagaggaggcatgtgcacgcgtgaggatgaggatgacgacaaggatcacatggcatttgacggccgataactattaacacaagaccagaccagaccagaccagaccatgccttgtcttggttatcttatttatctcctttttgtatttagaagagcctggccaatggccatccttttactgttattttttgcttaatgctgctttaaacattttatatttgtttattacaataattaaacaagaggcagcaaatgtcagagatttgaaatgattctgatatggacggttgagatgggaacatgcatgcatttctatatggtatagtctcacaaaacgccaacttcctttttatcttgcaaaaatgatgatgatgatgatgtgtctgccttgcctgcaaatgttaatgttaatgctattgttaatgttagtaaagcacaagcagggacccgaatcagattgctcctcactcattcgtttttttttttttttattagttttgttttatgtacgtgcatagattctttattagtgaattaagaccatatatgcatctatatattagatgatgcatgctaatcaactattgatggattgtaagaagaggtgtttaaaactaattactatgcactcactcaaacatgaggaactaatttgttgtctcatatatttttagtaagtggcctggcatcacccacgtatttgctttctggtcaaatcagattaaatatataataatattcatgaatcctttgttattttgctattactattactattaatatacacagagtaatatggtcattcattcccttaatggaagtaaatattacaccaatatgacaagaatacaagccaatgaagtagagtggtaattccatgcaaaagaaaagttcatttcagttaatatctccatcaaatcaattaattgtctatattaatttgtttttatcacataactttttcatagaaaaactgtttatattatgtcactacaaaaaaccactacttttagtgataatcttttagtcacaatataatttttgtgtgattaaatgtgactattagtcataacaaaaagttacttgtgactaaagtatagtatttagttacaagttatcactaattgaaatttagtctcaacaaattgtaatttttgtgactaatgtttttagtcaaggaccttttagtcacaacacaataataataatttataattagtcacacttttttgtttttttagtcataaattttgttataactaaaattttttgtagtgtgtttaaaaaaaaaaaaaactaaatatattaatataaatataaagataaaggagtttctcatgccaacttgctcaactggagcaatttgagcaatactagtggtagactagtagtacacttctatgcataaagcaactcactcaactcgggggcaacaatccctatataagtcaaatatcatatatatatataacacacttttcattatattcttttaaacataaaaaaaaaaagaaaaaaaaaaaaaactttaattaattttcacctcatacatattagttaccaagtaatgtatatattctgtaaattaagatgaaatatatgagtggaggtataaggcaattataaaaaccctggtacactacctaaccctatttttccttttctagtgcttccttttcagctcctccataccctttctccaaaaacaaagccttccttgttctttcatcatcaccatcatcaatatccccatacttattcatgctctcttctctcttcatgtcttaatctcacaagatttggacaaagccaaagccaaagccaaagccaaacatatatatatatatagagtctaaagatagtaaaagtggatcggagacatgggaagcggccacttccttcagaagcatcagaggagaaagagaaagagtcgtatgagtatggatatgatgctgcagctaattacttcgaaccctcttcttgtacttggccatctcaacaagaagctgatgaacataataattacttattatcatcatccacaatggccctttctgattacaccacatcccaccaaccttataattactcggtgcaatctactactacaacaacaactcaatctgcagatgttgtaaaacaagaaatagtacctgaccaatcgtctcatcaactatcccctcaaggtaccaaaacttcatatagtaattaactagctagtatatatactctaatacctatgattgtagtgttaccatatgttaatttttcactaataagtgatatataatatatatgatgtggatcgatctattattcatgaatcttgatctcttaattaatggaaaattattgaagtattagctttaataatccaatataagtatacatttattttgaaacactctttgtgtgcggggtcaacgtgttaatttgtttatattgcacatgtgtttacattatatatcttattattagacaagttcaatgtatctataattggctttccgtaaagacctctctctctagttagctatactctctctatatatatttatatgtaaatatctatatataaagtactagatactctcacagctaataatgttttttcccccaattttttcgagataaaacaaagattgtgtgtgtttacatgttatggggttgcactactggttttcgatcgtttatatctatcttaagacataaaaatatataaatatcttatggataaacattggtgtgaatgtaacatttttccaattactagatttttaagacatatgtttgtacttttaactagtcacaacatcaattcagagaataaagggttcacttagcttccgtgagtttccatctaacttgcaatcctttctttctttctttctttctcttttctagactttgactaatattattggccttatcttttgctttcagtatattatatatatatatatatatatatttctctatatatatatacatatacacaagtacacgcttgcctaatttccaatcaataatatattaacatattcaatgttgaaaatgacccctcccctttgcttgattatatgtcttctttccacacaacgtttcttttcattataataacttcatgtgttgtgatcgagtatatatgtattctgagtatgacaaacaaagagttattcctagctatagagtagtaactatatttataatgtgttatttatatatatatatatttatataaagagagctatataactgcatgcttacctgggcatatataaatatatatatatatatatatgtgtgtacttggaagaatgtttgagtttttattattggatggttataggggggccaaggaatctgtggccctctggcccagaagagacaattaattaatcaatatatgtgtgttttttttctttaattggaaagttgggaccgagttaggcattaatgataagttgtatgctaattaaatatcacttcgatggatggatcttattgatttaatatatatcttaaccttattatatgggggcgccgacaccccacttcatgatgatattccctctacaatcaatgagtaagtgcatgcattcgtgagtagacattaggcggggtgtgcgtgcgcgcgcgcgcacaagcaatatgcatgcatctcttattataaactttaacaagtatagtacgactactaggaccttcaatatcattatggtatagctagcccaaaacacaagtattaattattgttttttagctttgataatattaaattaaaatataccacattcgatattaaattccacatattatatatactttatgttgaattgcatacacgtgatgtagacattagtgccccatattagcctatcttcatatatacttgttgaaagtaattaattactatatatatcatcatgtttttgattgataattaatttgatgattaatcatatatgatgatgatgatcagaaaatgcagtgaggagaagacactaccgaggagtgagacaaaggccgtgggggaaatgggcagcggaaatacgagatccaaagaaggcagccagagtttggctgggcactttcgacactgctgaggacgctgcccttgcttacgacaaagcagctctcaaattcaaaggcaccaaagctaagcttaacttccctgaaagagtttctcaaactcaaaccaatataaataatagtaatgatgacaacatgatcaatatcaacaagcaccagccagaacaacacagccattcggcttatcttagtggcgacgcttacgtggtacggccgccaccacaacatgatcatgaatatcaggcagctggttcagtaatgccgccgccgccatcttcggaagctgcttttgggcgagacttgtaccactatgcacaacttctttctagcaatgatgttgattttgattaccactcttcaagcctttttaatcaacccatgcatcctccaccacctattccctactactactcatcatcatcttcttcttcatcatcatcatttttgtccacttcttcttcctcctcctcgttcgaccaccaaccaaaacagctcccggaagatcaccatcgcaaagactttgacagctagctagcttcgtttgtccagtctagtaccggtccagatatacatatatatatatatttatataaatttataatatcttatgttatctttacgtagtttgaagctggtatgatggtgtcatcatctttcttttgagcaattgtttaaaccatcaacaaatttattgttgcgttatatatcattatttttatatatgtgtgttttgttatgccagagatgtgcatgcattgctattaataagtctcctctatatatatctagcatctattacgtattggttagcggttcgattagaaatagtctatattggtattgtgtagaaaaataatactatatatatatatatttctatcattttcaattgattttaagatgtaattttatgcatacaatacactcactttcatcctaaattttaatatagtattaaaactattaaaaagcttttgttgccttcacttttaaccttcgtttgactctttttcgactaatgtatgttagtttttagtgttaggatctttga

SEQ ID NO: 90 - DNA, 8099 bp, Cannabis sativa
acattatcatcacttgctccttccttgtggtgggaagggaaggaagtttgtgtatatctgtgttattaagcaagtggagttaaaagttttcatgaagcaagctgtcactgagttatgtttgtgtaacataaaagtagcatttaaattaactaaatgcttacatttacatattatttattaagaatctcttactaagactaagatttccaaaatcccagatgcatgttttctatttcatcagaatatcagaagaactctaaaactaacctgagaattgtacaaccatcaatagattacgaaatagggtatgccagatttggtcattcaggttcagctgaggtatgagacaacacagctacttagggcttgggtggagaggatatcttcttctatactagcaagtatgacgcttatagtaatgatctaagcttgattcataagtaatactcaagattttggaaacttcctgggcagagtgattgctgaattgaactagagtttcataatatacctaatcacatatggtactaggatgaataatttaacactaaaattaatcttatttgcgtaagattatttattccaacaaaaagtgtcactatttatcccacacaatagaatgattgactaaactattaatgcttaattttcttaaaataaatttacataaattataatatgtatcttatttaatataacattaaacacaacaaacctgtatcaaatttcaactaaatataactatattcaatttaagaagttttatttattagaagtgacttgttatataggtgtaatttatgtgtgtactactcatcattcttcttatcgttatctaaccaatcctgtatatcaaatgagatatcaaatttctttctagtttaatttagaaaaataggcaaaatctcattaaataaggagacgcgtaatccggtgtggccgattacagtttaacaccaactcagatcccacaaattccatcttcctgttcatttgtcctcaacatcacaactttctataggcaccacgagttttgtaagggtgagtatcatcacacgtaatcccagccctaccatttctgtattattcttcctttttttctccgcttactttttaaggcagtttcctttgtattgctttcaaaatgcgctaaacggtttcgctgcttcccgttcccgctatttaactacaaacgaaaagcacgcttcacgaccaaccccacatcctgggccccaataacctacaacacgtcactcaatcctacggtcgtgattatccaacgtatatacttgacgattaggagaatagtactatagtcatctcgtacaactggtttcagtggattatttcttcatcatcgtcttcactcgccgttattttacaaagctaacagttacctttgtccctgtcacagaccgttaggtgctgccacctgttctttctctatctctctctctataaatatctttttctcgagtcttgattcccatcgaagtttttctctttagcttggaaactaagaaaacgaaaatggagcgatcggtttctctctccttcctctctatactgctactgattatctctcccctgtcttcggcgagcttcaacgatggaatgagcttcgccaagtccagcttcccgtctggacaggctcagaagttcatcagggacctcaatctgttcccccaacgcgatgtcaatctcgtcgacggtactgattcgcttgatcagtcgaagaggctcgtcgagaagagcttcaggatgcccaaccttgctgactctggtggtgtctctgtcgaggaccttggccaccatgctggttactataagattgaacattcttatgatgctaggtatgcttttttgttcccttaattgatagattgttgagataaatttaaccgataacttttttttttctgtcactttctcttcaatttaagtgggctcgactcgatcgctctcttttatctgcatgttagggtttgataatgattgggtcctgacctcctattgcgaggtgaagtggttttgagaaggaattgggtgatttagttagatggttagagagatgattatttatgagtgtcacatgtactagtttttacaccatacgtatgtgtattatcgtatactgttgacttcaggaaaaaaattaataataactcttactgttgcaactactgtactttaggatgttctaccttttcttcgagtcacgcagcagcaagaaggatcctgttgtaatctggctaacaggaggtccagggtgcagcagtgagttggctgtgttttatgaaaatggtcctttcaatattgcagacaacttgtctcttgtttggaacccatacggttgggataaggttttcttagcccccttttcttcttttgtttaatatatccgttgtaatttggattattttaagtgatataatgctcggtgcttttgaattgctcttgctatattgtatgtccttttgcctgttgagcatattaagtggccttaatatacataaaacacacacacacacacatatgtacgtatatgttatggtaaagttgcattgccatagagctttgtgtcttgtactagtcgtatttcagttttacaatattgcaatgcgtttgttattcctctatttgttccctaaagagtttaccttctcatgtgtttcaattttcaggcatccaatcttttgtatgttgaccaacctactgggactggttttagttacagttctgatagacgtgatattcgtcacaacgaagaaggcgtcagtaatgacctgtatgacttcttacaggtatattttctaaccctttccgtttcagcttatatctatatttatgggaagtttttccaactttatgatctatttataattgtcactgatcagtactttttaagtgatcattcctaatgtcattcaaatactgtaaactcccttttctttaatgacaaaactacctttgattaatatacaaaatactgtaaattctgagttataaaaaaataaaaaatgacaatggattgtaaatccataattttgtagacatttttcatcttttctcactgagctgtgagaattaaagccattgttaagtcattaaatttaatatatgtttctttggtaatactgatgttgtctagcatgcttttttgtaccgtttcaggctttttttgctgaacatcctcatttagcagataatgacttctacattactggtgagtcatatgctgggcactacatacctgcttttgctgctcgagtccaccgtggaaacaaagttaacgaaggaatacatattaacttaaaggtattgctaatatttccaaccttatggtactgttttttattcataatgtatctctaatatttgcaaccttgtggtctgttttttatgcataatttatattttcttttgaaaaaacgctttaatgggtgaaaaattattgacagggatttgccattggcaatggacttacagatcctgcaattcagtacaaggcttacacagattatgcactagacaatggcataataacgaaatctgattataaccatatcaacttgttggttcaaccttgtgaacttgcaataaagctttgtggtaagaaaacgaacaacagtctttctcttttgtttgatcctttttttccctcgatttattgagatctgcttatgagaattcattaatatattatatttgtgcatacctgattgtttatgtgtgcatgttttaggtactgatggtacagtgtcttgcatggcttcttattttgtttgcaatctcgtcttcagtagcatcctagcacgtgctggaaatataaatgtaagaaattcatatcttttataatctacttaaatatttgatcacaagttagtagttagtaaatttctaaggtaagtaagtttttttttttgctcatatctcaagagaaaagttttttcataaaagcttaagtttgaaaagttatttctttttccattctacagtactatgacatcaggaagaaatgtgtgggaagtctttgctatgacttctcaaatatggagaaattcttgaaccagaaacctgtgagggatgcacttggtgttggggaaatagaatttgtgtcatgtagtcgaaccgtttatgaggccatgttgttggactggatgaggaatctcgaagtaggtattcctgctcttcttgaagatggagtgaagttgcttatatacgccggagaatatgatcttatctgcaactggcttggtaggattttggatttcttttatcatagtacaagacatcgatttaatcattatagggaacttctctgctcgttaaatgtgatgataaccttttaatataatatataaattgatatgaacaacagggaattcaagatgggttcatgcaatggaatggtctggtcagaaagagtttggagcctcttctgaagttcctttcttagttgatggatcagaagctggagttctaaaaagccatggacctctcagtttcctcaaggtctgtttcactttcatctgctcacgcactaacacacacacacacatcattgtgaatacacgttttaacttaaattttttaaatcaattaaagcaaatagaagctgacttagttggttggcttggattatgaaaaatcaaacaggtacatgacgcaggccatatggttcccatggaccagccgaaggctgcattggagatgctgattaggtggactcggggcaatctttctgaaattgcagtggagccggacaatttggttgctcagatgtgatatcatctctgggtggtgtattttgttaagcactgtttaaagacttcggaatgctttagaggaatagcgaaatatgttcaaagctgtttcttaatgtggttgtaaatatttccgaaacccctgaatggtagtgggacatgatagttacaggaacaataacaataatgtactagaggtttatttccattcatgatacatggcactctttagtttttctagtcctgtcgtggctttgtccctttaacttggtattaatgtttttcgtttatctggaactgaaatgcctttaaagtttaaacgaatttcctggtttcggttgtttgatgggagattgagaaaagggcaataatttggctctcctacgtagatgtaattcgtgttttggaaactggatccataatataggtagtgatgtatttatatctacataatgaaaattaagatatgcatttgtacttttttaatgatgtgtgtctaatgatttatgcacaaatttgatgttgggaagaaatttcagccaattgctttatttgttctatttgttcgattgtattcacaaatttgatgtgtgtgcatgaaaaagttgagcaaggattttcgagtaatatcatgcaataatgaaatgatcataaaaaatatataacattaaatgacacaaaaacagtaaacataaggaaaactgtaaaacaacaatattattaagggatatttgctgccaaattccctcaacatttacaattattaactctaataaaaaaaaaatggcaccaagaaggtacaggtcaaacataatggtagcataaagtacttacttaatagtaactgaaatgaaatgataaaaagggatatttatccaacgttatcatattggtcagtttagtagctggatagaaagtttgagttgttcatcttcaccctccctcatggcttcttctcttacattctctctaattcagactctgaattctcgtacccctcctctgatttccgtctcgccaattccttttcgaacgccacacatttcaacaggttcttccaccttagcaaaaaatgctcatcaccacttcaacttcaagaacaaacaccttacaaggacatcttccgaaggtaaacttacccttttcaagtttctcgattttatcatcttttgagcttctatctttctctggaatggaatcttacgacatgggttttctttggattaaagtgtaaaagcctttatggatcctattctttatctgggaatgtttttaaggaaccttaccaaacaacagtacatttttcatcatggatttatgtttcttcacactgttctattctatgttctcccttttcgttgtctctagctgattctcctaaatttaatttattgtatttagttatttcgatgctaattctgttcatgaaattcatcatcatacatacaggtacagaaggtccacttgaagtagctgaagaatcaaaatttgttcctttaaatgccgaagatgcacaatacggtccacctgtaagttctggttagtttctttccatgtgtctttagcttttctgttcacccatcaaacaaacttttgttttgcaaataaactccattatatttaagatttcctttcaagttttggctgtctaaaacctatagtacactaatcttgaaatatacctgagacaagaattaacttttcttgatttataggctttgttattgctgggttttgaagtggaagaaattgggaaggtgagtcattgttgttttatatatatatatatataccagtttttagtttggtttatcctttgtatatatcttttcttcctttctttgatgtacatatactaattctttttaaaaagatcagatcttttaagagttggttcagtaaatctaagttatgcctcacctcatagccttactcaagtcttgtgatgtggtttgcagatacaacagtttttgaaagagttggatggcgaattcttacaggtaccacatctaagcatcaatgaagaattttagctgagaaatgagtcaattaaaactgaggatttgaattccactgtctaatccaaatccatctaatagcctcctcacccctcccattccttccacatcatcctctttcttgacatacttttatagttactcaaagtggatgacagataggttttgtacaaatataaaaaatattcttttaaatcttagttcctcaaaactgaggagaacaagtagcaaaatatgtgtattggttaggaaaacagataatttactttcttaaattgctaataatatccttttctctttctttcttaatctcattgcattagattattctttgcaccgaagacatgattactcgttcactctgggaggctataaatacaaagcagcccaatctgaaggaagtgaaggtaatttcattaattactgtgatatcagtggctttaatctgcttctgaagttctttaaagcttttcaaacatttcatgtacatttatgcaaaatggatttttggggatgatgctcactcacatgttgagcttgattatgctttgtaataacagatagccaagtcactgccacgcatttgctttttatctggtctcagtggagaggagatgataatgttcattgatgcttttccagaggctggtatacatttatattgatttgtatgattattatggttcattttatcatattcattttcacctctccataggaaattggcctaaaattggtttaaaaattgaaaccctttttgacaatcacttcaatgctttcagcttataatggatggattttattacattctaaagatatatctgaaatcagagcctttaataatataagtactacagtacagcaatgaaaactgagttttgacttgttaaatcatatcacgtacaatgagtagttcatgtgtaattaaaaagggtcctggtttataggactagaaccagctatctttgcagcactagttccaaacagtgccgataaacctatgcaggaggtgatagaagagataatgggagaccatgaaatgatggtaagtctcttctgatttcctacataaatctatcatctctaaactatctttctcacctagaattacttatatttctccagaaatcaaaacaatgaacaagaaagctccaaatacatattccaagctccgaaggaaagaagttttgctccacggtttcccctgcagcttctgaaaatgctgacaagacctaggcttcatttggggcaggcaatatttttctgtcgacctttgttagttgagatttattatatgtataaaaatagacctgaa

SEQ ID NO: 91 - DNA, 2071 bp, Cannabis sativa
cccctagaaaagtacaccttatgtgcttcttgctttcaaaacatacatgaactttctgaaattaagacccaaatgtaggactttgcagtaacaaattctatacacaggaaaatatctctccgtcaatggctaaaggaaatgagcctgttgaagctgatgattgcagttctgatgtagtaaattctttgcgatttgaggtaaaaggttttgcataccaaaaggattcccaccctatgctgtgctgaatctgctgattacttattattccttataatagtcatgctcatgccttataaataataatgttctgcagtataatagtataaagatggaaaaaatattacagatgatgcctttgtatggattttcaaatttcaatggatgtttccctcattctttggagattcatatatatataaatataagtataaatataaatataatttattgattatgtatatattaaaaattaaaatgtatgttgtttgtcaactttgtagtaacgttgtgtgaattttaccgagaggtctctttctgctcacttaaggcttgttttctcttgaccgtagaaatttatttcaagcatgcgttattcatctgatctgcatcaccgtaccatgtccttcctgctgtgtgtatgtcaagtttcaatggattgctaactcaatctttttaattgctgtttttgcatgttttttaggtgagccaatacactggtaggatccacttgtattcttgcatttctggcacagattcaagaccaagaccactgtttgagaattttcgacctgaggaacttgagcctttagattctcctgttgctaacaatagaagaactttaaattctatcatggacaacccagtttgtaggaatgctgttttggaattcagtaaggagtggaataatctaaggcctgtggagcgaaaaaagttaactggaaaaccattacaacttcctttgtcagtagaactctgttttttgaatgaaagcattaaccacaacactggggtatgtatgtactttgtcctttgacagtcgagctgtgctttttgaattaaggattttcctttgttctaataagttattactgttgctttttcttattactactattacataaatatatatatatatatatattttttctccttgtaaatacaatgtatatttgatgaatgtgaaggaagaagtattgtgtgtatttacattggctctttataataggggctgataaaagttggaagcaagcgccgccatacacctttgtatgagattagccaagctcttccacccaatgctgtatggaaaaaagtttatctacgttctggcaatggaaaaaaggagaaagaatacactcaaggttggacgatgaatgagccactctgtaaattatgtcaagcaccatgcaagtaagtctcaattgaccgtgtggtcaactgttttggtagactgaacttttcttcataactgttttggtaaagactaaactttttcatcatcaggagttgcaatgctaaggaacctgaattttttgaggatcttttctgtgatcttgaatgctatgaagaatatagaataagaacaagtaacagatcccttcgtcaggtcagtattcaaagcatactaaaacacagagtgtgttgactgttgagcttctctattgtgctattgtgtgtatgggaacactaacgtacaagcaattgtcaggagctttttcaactagagaatggtatttgtacgaactgtcatttggactgtcataaacttgtggtgtacataagacctctatccttggcaaagcgaagagagtatattgagaaagctgcacccaaaatagcaagtcgagagaagttgtaagtcactcaagccgaaactgataagagtatcacttttttctttccagagttttgggagagtaggacgtgttaggtaaatcaccttgttttaattccttgaatctgattacatgcaggctcgagaagcttattaaggatccaacagagggtaatgcatggcatgcagaccatattgttcctgtgtaccgaggtggaggtagggtaccattgctac

SEQ ID NO: 92 - DNA, 4930 bp, Cannabis sativa
gcgcacaaattggggggggggggtttccatggatgttacatgtagaagagacctttgggatcgagtaaactcagctaggtccgaattgtcacgaaaatgagcaaacatccatctttaaaatcgaattttgggttatatattgacgtgaattctattccataaaattctcacatgcttaaaatttaaccaactttaattctaaaataattttattcatagaatgtgaaaaataaaattatttatcatagaaaatttcacatgaaattcatcaaatctaattttaatgcaaaattcaagcaaaatttgtttctaaaatattgttaagcgtaaaatatgactaataaaattatttttcatagaaacatatacaatttaacataaaatttatcaaatctcacataaacaaaaatatgaaaaatccaaatcaaccccaaaaaataattcaaatcattttaaatctatattttcatgaaagtaaatcattaccatgactttgaggctagttgttagaacttattttactaagattagatactaaacatgtatatgttgattatagtgtataatctaacattctaaatatgaataatcataaaatgataaataaacatgtaaaagtataataaatcttacattagttacagtaaaaataatatttggatcaccttccttaacctggtaaaacgacaattatttctttctgttgcaaagtaataacaagtattgaaccttgatctccttccttaacctggtaaagcgacaattcttcatagtcttctacaaaggtttgagtatcacattgaatagtgtgagctgatacttaatttacctttagaacacattttgagagtgagaattcgaaatccatggtgtatggctatttcaaaatttctgaatgaaaaagaagaggaggatgagatatttggattttctatattcttgtctttctttgtatagatatttacttagggttctgagatgggctaaaataaagacaattgggcactaaaatctttccatgatcgaaatacacttatgggccatagagtaagattttttttttcagtttatttcaacttcgtgaaataatgcttcttttctaatttttccacttatcttatctaattatttaaatactaattttaatttaataattataaataattaccaatacaatacaataaaaatatattattaattagacccataaagtgtgttaattaaaaaataaatccctatttctctctttctcaaaatagcccaaacttggtaacaattctctaataggacatagtctatttttgaattctgattgacttattaaattaattagttgagtctacaagatgatattatcccagaaaatgtggataccatgggcctatgtaaccaagctcccaataaacagtattcgaaatttatgaataaattttctgacttattaattccttctgactccaatatagatcaattggccaaagatcaactaagtgacattgacttagaaaatacataatggtaagtttatgatattttttccatggtaaatatcggtccagttcgatgtatagacgatacatccgataccagtttactttgttaataccctggaatggagattttacttatacaagtataagtaaaccacgtcgctaattatcacgtcaacgtaaatccagtacactaataaaccgtggggctaaatagtttgaagcatataatcatgattattttctactatgtagacaacactataatcatgagtatatatatgttcagggtttaatagaattaatatattaaatatataatcatgaaattaatcatttgaatcatgcaacataaaatgatttctgatttttatcaattagtaaataagaataaattgaaatagattttatttagggcataaaatctcaataaatggtagtgtaggctcaggtgtagactttgatggtgagtcaagagtaggggagaagtggggtgaaaaatagatgggcatttggaataggaatagtaggagttggatcttcagctgtagcagtttgagtaggtttagactgtttatttttagcatagacaaaatggtactcattagagataacataaaaagagataaagaatctgccagaggcacacacacacacacttataaacttcgtgttttagactataaccatgaaaagtgcactcttcagatataatggcaagtttgtgtctatttgagggtcaagtattatgatagtaggagcactcaaaaaccctgaattgagagtaatcaagctgcacatgtgaaagagtttgttaaggtgggtatcctctttgagtactgaagatggaagtttgttaatgagaaagacagaggcacgaactacctcatcccaaaattttacggaaagagtagcatgagcagcaagtatcaatgcaattttaatgaaatgcctatgttttctctctgctacacaattcttttcatgagtggtgggacaagagagtttatgaggaacaccattataaaaaagatatgagtgaaggtctaaaattaacccccaattatattgcaactattttatgggaagattcagctctttctcagcaagatttataaagttaatgaatatttgaacaacataaaacctatttttaaggggataacccaggtaaacctagagtatgcatatgtgaaatgaccatattagttatatccattagaagagaccattggagaaggaccccatagatctgagtgaataagctgtagagattgtgtgtattcaatgttagatctaagaaaaagagatttgtgaattttaccaaggcagcaagaggaacaaaaatttgatgcatttttattattgttcaaaatattacatttgttcgttacatttgggaatgtcttgacagtagggtgtccaagatgagagtgccacaattgaaacaaagatttgctagtggtgtttgttctaacagattgaacattattacacgaaaatttaggtgaattaatttctttgtatgaatggattctgagataaggagctgatagacttgaaagtatgctagaaggggaaaacacataaaggacaactttaagagtactctccaacagcaccttgtgtgtttcttgatccttgacaagacaaaattcagggtgaaattcaaagaaaacatggttgtcaaatgcaaattgagatacacttgtcaggttcttggttatttttacgacacatagaaaattgttagtgttagaattatggatttttcaatagagagaaaatgtttcttaccaatgttctcaatagttaggccagtgcttcccatgtacacctgatctttaccattgaagttattttctcgagagagattaccctcattagaggtgcagtggtgtgttgcttcaaagtctagataccagacattatcacaaacaatatcagttgtggccaccatagctgttgatgaaccttgagtggtgtgacagaactagctccaaaaccagggaaatctggattaagtctttggtaacatttggatgcatagtgtcaggttcaagaacagagttggcatacatacttattgtttgaaccagatccacgatctaagctattgtttggtgcaaatccaaaagagttaaagtttccccttcctcaagtggtaggtggacgagaagaaaaggcacctgagaaattgttatttctagagtaatttttattactattattaagtgtacctcctattgcataaggagtccagtgatcgttttcgttttcgtttccatgtttatttgagtcaagatccttgtacttgcattcaattagatgttcttgagtcgaaagaagagcttcaagagcagtgacttcaagaggttcgactcaagaattcatataaatgacaaaagtgtcatagtgaggagatagtaatccatgaaagatagcatccatatgttctttattttaattagtatatccaacagaattgagtttgtcaataagagagcaaaccttgaataggtactcattgagagtgagagcacctttcttgaaattttgtagctcaattatgtattgattgatttttgcttccgtttgtgacgcaaagtacattcgaagaactgaccaaagcttggctgagatttcactattcataaattgtgtgagaattggcttggccattgataaaagtaaccaagaaaataatagttaatcatgttgttctcaatcaatgaaggcaggattcaatgttccagaagcatgatcatttttaagagacattgcggtggtggagttgcagtacagaaaatatatggttcaagcttatgacctctcatagtggaaagaacttgaggtttccatagaaggaagttatcatgatctagttttgtagttaacttgtgaaagaaaataataggcacgaacaacaaggttgtagcgcttgtgggtgttgactgacttgttgtagatgaaatggttggtgaattgccattgatgaacaacgaggaagacaaaaaatcaagaataataatcagatccgctctaataccatgtaaaagaaataacagtttgaaaataatgattcgcattaatttgcaaatgaagtattacaacctttttagtagaggaatatacagaaattcaaaaaaaactaagagcatccatgaaactcagtccctgatttttactggtgcacatctcagaattggcgtaggggaagtagctgtccttggatcaccttggctggcagatgggattaacccgtatgtaacttctacacatcctgctcttgagcaatgcagagttaggcaactaatacagatgaatggtgcaagttgggatgtggatttggtagcagatctcttcaacagcagagatgcgactataattttgaacaccccaataaactcgggtataggtgataactactactggaagca

SEQ ID NO: 93 - DNA, 5122 bp, Cannabis sativa
ggggggggtggggggagatttgaatgtttatgaatgcttttaattccatgctccagtccacttagttgctggttcgcgagggagtctcttttattatcaatgctcgcatttagcttgtccatattatctaaagttttggtcctataatgtagtccttgctgtctataactataatatgaagctagtactaaccacccttttatactactacagtgaatgatctttagaatatattttaggttggccttgcctgttgagaattattctgctttcctatattatggctgtgacattggtgagatgatcagctgccaaaacacttgtttatttctcaaaagtgcaagtatttagatttctgaaggatgtattgattccattttttttttctgtaagcatgaatgcttctcatgttgcaggtctgcaaattcagcaaacactgtagaagttgtgataagtgtgtggatggttttgatcaccattgtcgggtatatcttacaagcacatttcccaaagttcccagctaatttaaagttttcattgatattttccttttctagaaagtaacttcctgaatatattctgtggctgcagtggcttaacaattgtgtggggcgcaagaattatgcaacttttatttgtctaatggccattagtcttgtttgggtatgtttaacatctcatttatatcctaatcataatatttttggttactaatgctgctattggcccgtcattcagcttgttattgaagctggagttggaattgctgtcttggtgctttgctttgttaataagaaaaatatggagactgaaattattgagagacttggaaatggctttactcgtcccccatttgcaacagttgtggtacatgttacatttgacacactttattactgaatctgacacctcattttccaatatcgatttcaaaagaatgctctttaaagttgtgcctcattatctgtaggctgtgtgtactgcagtttccatgcttgcatgcatacctttgggtgaacttttcttcttccacatgatacttatacgcaaggtcagtggctgagaaactagggataattaatttcaatttctataggcatatggttagtctcaaaggaagttagatggaatgtgcttggttttttgaaaccatagaatgaatgtagttggttgctatttagaaatgctaccccattcatcactaattaattagaaatgatcagatttagcaaaaagtaatttatattggatgattgttgtgaattcattccttctcaatttcatgttgaattagggtattacaacatatgaatatgttgtggcaatgagagccatgagtgagacacctggtgcagcaaatttggacgaggaatttgcaaatattctgtactctcctacaggatctgccaccacaggcttgagtggtgggagttctttgagtctgcactacaagggagcattttgtactcctccaagggtatttgtggattatcaggtaatcttagtgtatgattattcctcaaaaaaatgcctcaacaaaatcatattttcttcaactcaattttgtttggctttgatgcaattactttccacaatcgcaattatttagcatctagctgtagaattcatattttaataagatcagaccatctcaatctcatacaggccttatctttctgtaagtctatctgtagaaaaaccttttatttagttgtagaaaagactcttgtttattactcaaaaattgttttatatataatattctcttataagtcttaactccattggacttggagctgttattatctatgttagggaaaagaaaaaaagtagcaatttctcaacgatgccaatatcaatctggtaatttaaatcagtgacagaagtaatgaattaagatggatttgtttgcttaattaatactcaattcaattgggctttaactgttatctatttcagagaaatggcagtatttttatctgtcatataatgtaaatgtttcccgttatttattttacctggtccacctctttaggctataactccctactattatttttattatgaaatatgaacaatagatgtgtaaatggttacaaaatggcctaccgtggaagatatgtaataaatgcatttattgttcctaatttgattagaagtttttataaaatttcaaagccaattgaaggcatctactttcatattttcttacattaggatgaagtcctgccccagttggagccaggaatggtaccatcaacagtcgatccagatgcaactggaattgcagaaagggagcagagggttccaaaaaagcctgttcgtatcagtgcatgggaccttgcaaagctggatagaaatgaggccaagagagccgcagccaaagccagggcatcatcctctgttttgcggccagttgatagtcgtcagctacctgatcctgaatacagctccagcagcaacatgagtgttaggagtagtgtaagcactgatacaggagtgaataaagagttgaaaggtgacttcaggttatctccattgggaaattcttttgctctgagtcaaggtagccgggatgagtatgaaactggtactcaaagcatgagtagcttcagcagtccaagccatgtccatgaagcagtcactcttagccctcttccacagcgtcctggtttgggtcgttctgttccagctccgtccatacctggcttgattcctgatcgttcttcgatttcaaaggcaatttttccaaatgttaaactacaaacatctcaacctcttggatttgatgagaagataatgcaaaagggtggtagtagtgatccactattgctttcagcaccagctacgtcacttctccgagatgttagaaggacatctgttgtttgggaccaagaagcagggagatatgtctcagttcctgtggcagcttcagatgctcggacgagaccatccttacaaataggagtcagcaactctaatgctgaagctagcagttatagcaggaagccagttgttccacctccacaagagtcttcgtcttctgcagtaaggcctccactacaagcaacagagaaactaacgtacacaggagactcgatattctttgggggtccgcttttgagtgtcccgttcagggatggtcctaaaaatgaaaaggggtctggctcaagagaaggacaagaaagggtgggaacgaacttcttcaatgagtctagaatcaaacgggattccaactcaaaccaacttccggtgtttgttccggggggctttaaccataactctgggtctgggttaaaatagcttttaaactaatgatttgaaatgccaaggtgcaagcaaactgaaatgcccccatttgttcctctgcaacgttgatcagggaagagggccattgaaattgaagaaaccttatagagatgttctttattcatgaaaccttgtccaacctgttgaaaaaaacacagcctcatgttgttacagcaattttttttgtttgtaatgaatctctgactggtcaatgctgtcttttggggaactctgtgagtgaggaggtgacattgtattgtttataactaaattgtaggcaaaagtttagtgttattttttgtaggtggattcgctgtattttagttatgtggatagagacagttttccaggcaacataacataagaccaacatttcagaagagttttatgatgtttgatgtttgcgcattgtgaaaatttaataggcctcgttgtttaatgtttgagttatgctgcttacacgtggttttttatgacaatattacaaaaagtaaacggtctaacagtaattgtaatattggttagcttggctatcttcacttctggtgtaatttaaggtatctatatggtataaaatgatagatttattttgtttttttgtttctttttggataagaaaaaatttattttgttgctgcttgctacacacgagcattagagtaccattttactagattggtgtgaggtttttacactatttcttaactttaagaagactctaaattatacaccaaaatacactctggttatctagtattgaattattatgttaaattggtgcataatttttctttgctttctaacttcttattaatatattttaaaatatatgttaattatttgttgaaaatatacatatttaatattataaataatataaaatgtaagattttctaaacaaaatatttttacttgatattatatttggtattgaattattaaagttgttgcacaaaaaataacaaattctattcaaaattgatgaaaaatatacaccaaaatagtaactgttcaagaaagtcttactactataaattctcttattataagaagatatatttactcaaaatttacacaaatctttacccagtatatttatttattcaaagggttattggtctcaaaactttcatattctttatattttgtagtacttaaactcttagtttttattttctaaaggtaaaatctactaaattttacttctgttcacaaatctaaaatattgtctgtctcactatattatgtgtacatattacacgtttactttgatccattttctaaagacaaaagtttgaatgcatagtgaattgttaacaagcattttaggctatcatgagtcatgtggcacaaccacctgttttatcccatctcatgtgttgagaaattcggccacactagcttagatgaatcaaaggtttttatagaagactgtgaagaaaggtagtttggattccttaaggacaaaggttagagaatccaaagggtggagtcaagatatttcattgtatgattgtaagtattcttactttaatctctgtttatgtctaaatcatttagaaacatgttaacttttattcagcaaggactacaatagtcctgaccacatcaatatagttggtaaagttcttatttgtacctatacgtacagacgtccgcatagggacttgggggcgaatgttattccaatttttattctcataacgtggcatggttacatggacaaaatcagttctacgtggcagtattactcaccaataggaaggccaagtcagcagctgaacaaacggagaccctggcactcaaacgggca

SEQ ID NO: 94 - DNA, 1867 bp, Cannabis sativa
gactataagttcaaggcaggagaaaaaaccctgtcccaggtaaaggagatagcaaaatttccattaatgtacacagactactgacaataatgcttccagtgtccagtccagtcgacgaatttatggaaatatgcaaacaaaatgatgactaattctcctccattggcagtaaagctaccatgatcaaatttctgcccagacgacatatttaagaaagcacacaaggaaaaaggataactaatttacctggatttgccaaccgctccatcactttatgcagtgaatcagaacgtaagcacatctgacatctctgacttctaggttcataaggagcgtatgcatcttgtcccaactgcagtgcctacagagtgccacaaatgtaaatttctttcttttgcagttgaactgtattgttattatttctaagtcaccccagaaagaaaacatgcctttgcagtcaatatttatccttcacaccacagttcatgccttttcttgtcttaaaatttgacattaagtctcaataaaattccataaaattgactttaacaactagttctactaatcgataaaacaaattttatgggtaaatcagaataaattaatggagaaatgtaacagaataaatggaaaaaaatcagaatcttttgaaagatgttgtttactaaaattatatagaagcggaatcataatgattttaccttgcttactttattgaaaaccaaaactggaataattaaattgaccaaattgccctttttgattaagatataacataacgtagttattttgtaagataaagttcaaataacaaaattgtcatttaatatattaaaaaaaataataaatagaaggcgttactcttagtgacattccttaaaaaattgtacagaaaagtatcccctttcttttactccttaaccaagttttcccattctttattttagtaaacaatagaataggaattattaccatacttatgatcccctttccaagtaagtaaacatgccattaaatatgaaaagttaaaactattataagttacaaaacttacctgatgaattgtcatttcattgagattaatatgcgtgtaagccctatctttagccaaagctgtaatatcactgtaagtaacaattgaaacataaaaaacacagtaaattaatacagtacaaagaaaaactaaatatcataatcaaagtatcacaacacaaattatcaaaagaaaaacaggtatcacaacacaactttttttttgaggactaccgacatagtttgtaatcaaagaagcaatatttaggtattgaactttaataactgacctccgacaatatatatccagcaaggagtcgttatcatcaactataggtattgaacttacttgagctgccaaaaaagaaaaaaaaaagagtagggtaagagtgttagcaaaatgaaaacatagtggcataattacttcaacattggacaagtatacattttcccaccaatatcatctgcttgttacctttcaattaataaattataattattaagtatgtgtaagcaaaatctatcataaggcattattgtcatacacatgaacttaaatggatcacagcttcgcactttattattattattattattatttttaatttgctctatccgcccaacattacaataattgaggaataagaaactataacaattgctacatagtgctcgggggaactcaaacctcaaaacattttaagagcaaaccatgcaagcccacttcagtgcttggcaaacattttgtagcagagtaatcattagatttaaatgcttattgccatggggcagtgaaataagaaaactgaatcttgttcgatcaattcaacaaaaa

SEQ ID NO: 95 - DNA, 1174 bp, Cannabis sativa
agtaagtacttcacaaccgatgacagaatgcttcaactaccaatattgggtttgataattgatatttggtgggtgtaaattgtaattaagttggattcttaagagcgtcatttgagtttaaatgtcctaatcatggagtcacatctttaattaataaacattcaaatagaagcaagtacattcacagactcgtacatattcttttccaatccattttgttgatctgcttgtttttggtttatttaataataataataataattagtagaaaccttctccatccactaaccccgtaaagtcaatttatgtagtagtaataatgcctctcacgaggctcttgtggcatttaattgtaagagttgtaacctaattattacttgctatgatattgtccaaagtagtattgttatttgattttagtccaaaaaaagtcacattctattaaaaatccttcaaatgatgtggtagtacgcttacctttttaggcttcaccccttattttgaaaacaccaaaactcataaataaagcttgaattaaaactactttaatatttcataagaaagttgagacaaaaaaaaagtgtcactgtgtagcaagtacatgatattttatcttctactttggaattgaccattaatgggtgattataacgatctttggatcaatttgaaattatctttcatgtatattttaagttattagttcaacaactgagccttttttttataaaaaaaaagttcaacaactcagttatgccattgccaataaacataaacataaacataatattaattatttgcaattctatcaattatatgagctgttgccaaaatcatccagaagagtgggcggtgttatcaattaatttaattgggtgagacacttatcctacttttatgtggttcacaaacttatatagacaacacatatgattcttactttgtaagtcaaatatatataagtattgctattatttattagtagtgctaaatattattatgaactgattagcagtttatgtagtaattattaatttaaaatgtataaaatttaatgattaattataccaatcgattatactttgtggtgatgttaataatatttaaaatttctcagtatacatatgaaatattttttaattggtattgtatcaattaattatttaaaaaataa

SEQ ID NO: 96 - DNA, 977 bp, Cannabis sativa
ttttttttttttttaatctttcttagctatttgtttacttgtgaactattttagagcatctatttagtaggctgtaaatagaccaaatccaactaactcaacatatgctcaaaataagtaattaattaaataaaaatgacttaacccgatgaaattggtaggttaaggcttcaatcatcatcatataaataattaagcatgagtaataatggacctcaagtacaattagttaagtagctaccttttatgattgtcattaaaataaaggccggttattctttaatcataaagaaaaatagagtacatgattgataatatatacaagttgtggaaatcactatccgaaaatccaaatccccaataaaggtatacaacccaaaccaaccattaaaaagcaaacttatattacatgaaatacaaagaggaaaggttttgtgtgtgtgtgtgtgtgtagtggctttattacaactagatttaatggggttgagccattggtcctacttctatgaaggacaaggaatatagttaatctaatccaataatattataataaaaatatgaaaggggtttgtgagtgagtgactcaccttccttgaaagggcactaaagtgttgagtgcaagttgagagagagagaaagagagagtggtggtgtggtgtgtggggacatggatcgatagaatgaagcatatgaggttaatggagtaattgactttaagaaaggcttatccaaatgaaaacaaagaaaggatcaagaattttgtctaggaccaatgaatctctattaattttcctcctaccatccttctaaattaatcggtcattttcatccatagtcatttccattgcccatttatcgtccattattattattattattattaaaaaaacaaactcatttatagcattttttttttgggcgtttagtaacattttatttttgggaattacttcaatactatttttttaacttttttt

SEQ ID NO: 97 - DNA, 5400 bp, Cannabis sativa
gggcaaggagttagccgtagagacaggaaaatatccagtggtacggcttcgggcgcacagagtgggaatggaactactttctcttattctaataatattaatggtagtcgtggtactgcttcgactactactattactaaagttgaacgagtggtgcggtcaaagtcaatcgggtccgtaaacgaaattgaagtgggactggggcctgaacccgaaacgagcaattctggtccgagtgctggaggaagaaggtcaggggtgacggttaagatggctccggcggtggtgcggctgagtaagtctaggtctcttggaggatcgcgtagtaatagtcaggaacagcagcagcaacagagggttgtggtgcagaggtatgtgttggagtttgagcgggacccatcttgttcgtctacggaatttgatatgtccaagttggttattagtttagatgacaattctgacaggaaaatgctctagaaaccactggttactccacctcctcctcctcatctagctaattaattaattaatactatgttactttttctttttcttttctttttaaattataataattaaaagagttgttcattatttgataattggggataaaaccaaaaatagttacctaatcatgaatatgatagatgggtcgtgatcatcatgtgttaatcatatattcatatattgactcatctttcaggttggttgactgaaaaaaaaacggagctgtagagaattgaatcatggtttctttctttttttcgttttttcacgataaatatagccttttcttcttttcttcttcttataaattccctgttttgatataggggtggattccttgaacataatttttaacacaatttatagttcattggattcacctacattaaaacacatgtatatatcaaattaatattacagctctttattttttttttcctttttcattcctaacccaaaataaaataaaattaattgtacttaaaaaataaaaaatcgtcgttgctcgctgctcgtcaccatctgattcaacacgaggtctttctaattttcttttcctctttaatcttctgaggagtgctattttgttttagttttgtaccattatttttgatagtattgtttttctttgatgatggagagggcaccttaaaataggacacccattcaattaaaaacccaaatagtagtcgaaataaggaaccaaaataaagaaaactaaacaaaacagagtagaagcaaagcctaagtaaaaacgaagacaaactaattgaaatcactaataaattctctagtagtattgagctagctactgttctccatttttaatgcagtgaatgaaaaagaaatagtaagctagcttttgttttttcctaaatagagcagctttttgttgtttattggaaactttaccctgctgtttccaaaaattatgcgtgaattatgtgttaatgaaattgtaggttttatgtctcttagcttctttgtctgtatcctatgctattcataatagtttttatttcacagcttatatcttcttgatttttattaggtagtggatgaaaatgaagaacaatatggtgaagtcaatgttttacatacaagtaaagatatagatagattgaaaacaccataagtgggattgatttttgggacaatgaaagaagcaaaattatattacgaagaatatggccgaagtaaaggtttttcaaagtacagagataacctaatcaaatgatatcacaagcatattattatgttgctcacattaccaaaagaaatttttacaccaaaattataaaataattttttttattacatatatacttccacacggtagttattttttacacttttgttatttataattttactatttatacactttacacacaatgtcactctttacatgcaatctaggtatctacaaattaacgtcagttgattaacgcctatcaatccattctttctctctcttttttccttctttttttctttttttctttcagttttttttttttaaaaaaaaaaatctccataactgatcttcttccctatccacgatcaaaacccatttttccactacctaattttctagtcattttcttttctaacttccattaaccaatttatgtaaccatttgtactctgttttctttggcctaaacttatataaaatcatggttattactgattcttcatcgtccccttctccattgcccaaaaaaaaaaatgaaaaatagttgttaaatctgtagcaaataagtccaaaagaaaatgcccagttgtagaagatgatgactcagactttgctccgcctgtattgaaatgagatcgtggacttgcgaaaaagaaatctaaaatttccgttcctcaggatattttcccaacttctaagaacatgaaggggaatgttgaagttgatcatgggttggagatttgtttttagattcgtatttactttcccccaactttgattctttttttttagttatattttttggtttgtgtatattgttttgattttttttagggtttagattttctatgttatttttatccttttttttttttgttgtttttggttgcaatcattccgttgctttaatttagtttatattttgattattatgttcttctttttggtttttctagattttaattttttgatatattttcttgtttatattttagtttgtttccatatgtatttagggtttacctttattttgtacatttgctctttgtgattgtttctttatagttgttttgtaattttttttacaattttaaaactatcaattcatagacattattgtttagtattgatcatatttttctttagatttttcacatattttcatcatatgttctctgtggaatccatatatcgataacatcaagtactaaatataagaactaccctagaacttgatcttgaacgagctaaattgggttatatatttgtgaggggtctactcctttttttgatttttatgcttttttaatttttatatgttttgttgtttatattaggttttgttttcatctaaggttatgtttatgtattttttttctacttttgttatgtgtgactgttttttcatggttgttttgtagttttattacagtttggaactttaattgtttactcattcattattttatttctccttttttgtatgcacgattgggtttacaaatttagtcctcgagattattacagattcaagtgcgttactacatgcactgactctgttattcttaacataaggaacactatttctggcaatttgttgaagatgttctgagatacatagtttggtcattttttggacattctggagtacaaattccatcctcaaattgtgcacatccttttatcgagagaggttaatcaacccaacccgaaagaattttaggtaaaggttgttggccgttgtatttgctttagtggagaggagttctatttgatatctagtttggaatattttggtgattgcaataaaatgttatttagccaggaatcaaactagttggtcgatatatgctttcctgaaactaaaactattgaccataagtctattgaatatgtattttttgggcactagctggggcaatgttgaatctcttggtttgaagttgacttttctatatttcattcattgtttccttttaagtaatactcctaagaaggaacttcttaggtcaaaattagatatcattgatagcggtcggtgggatgattattgttgtggtaggaagtcgtttgagttgacaattgattcattcaagggtagagttaatcatggtatcaagatgaaaaactagaaagagagaaagggaggtgagtcttatgatggttggtatatagctttggggtgtccatgggtgtttattgtctggttttatgagtgttgtcccgagatactaaaatgtttttgcgaacgagttgcatctagtatttcgagaattctcaattggaccaatgatgttggggccaaaaatctaacttttaaggttttgaaagataagatatttgattttcctttaaagcaggtgaattttagtttgttaactgttttataattgtttttcccattctattaatttttgttgttgtttcgaattataacttttgcaaactttttgcagttaatgttgaagaacattcatccttctgatgaagaaaggaagtctttgaaagtggatggcttatttatggatgaatctatagatgatcgtggtccattcaagtcaaccattaagactagttcgtgttccaaaaaatctgattttgatgatataaaaatgttaaaaaataagttggaattagttatatccactcaggagttgttggccagtaattttattgcgttgaggtcttttgttgatcttaacttcaagtttttgttgactgttgttcaagatattcaaaaaaaagttactatcatttacgatcgaccttctgttgaggtatatatttttatagttttggttgtattttataattcattgttatgttatagttggtttctttaatgttttattcagttgcattactattcttaaacaggtgaagacatccaataatattgatgatcttgattctgattatgatcctgctgctgctgctactgatgatgatgataatgatgacaaaggattactagaatcagagaatattgaaactgagtctgctaatggtgatgagtcaggtgaagatcgtggtgatggttctgctgatgatgatgagtgtgatgataaggttggtgctgatgcttctgctattggggaggttcaaggtgatgttgttgcaggtagtgaagatgataagtccaaggatgttgataatgtcaagggaaaagaagttgatataaagggagataattttttcaagggcttaagccagcttgagattgatgatgacccagttattttgactggtttggaggctgttacaaaaatcaaggtatgttgctttattattttttttagattgtgtttcatagtaaatgttttgtagttttatagagttttgttttagttttgaaattatcaatttttacttgttatttttcttttcaataggttccaaattccattcctgctgaggtagttgaaaaaagagatgccaatgtttctaatgaagaagaggatgacactgttgcttgtactcctcttttcgacaagagaaagtgtgccccagcattaaaatctcctttagtagattttcggtcggttgatttgaagaccagtctaatagagttaatgtgctcaggttctcaatctgcaggagatgagcgggattttaagattgttacgtatgtcaagggtcttcgtactcttgatgattctttttctaatcctgtttctcctgaacttgaggcaaag

SEQ ID NO: 98 - DNA, 3918 bp, Cannabis sativa
aaaaaaggaagagaaaataaaaaatgtaatatattttttagtgaaaaaataatgatgtatagcttgataagagtttaattatagtttatcccataattctaaacaatgataatataatcaaatggcaatgagtcattgtttatttatattaaataagtttcttgcaacgtacccacatgcatgcatgcattaagtcaagattacaaaatagggacaatagtatttttgtaatctattttataaattggttcaaattaaacatctcaatcaaattttagtcaagaaaaaaataattaaaaaaaataagagattgatgcatgttaaagatttacacattttagtcttaatttttttaactttttcctcttcttgattagatggtccaaacaagtatttagcaaaaataaagatcgaaacaaacttattaaatgaactcaaaattttgaatttatttgacaaatatgaaaatcaccatcttttcaaaacttacagaagaaagtgactttgtaaatcatagcaaagaagaagaaaaaagaaaaacatatactacaaagatgtaccaactttacaattacctaataacaatagttttatatatatacaaagaaaaaaaaaaagacagttcttaatgttgccaactcttctagctttcaaacatatcaaacatgacaaatacaacggttttttcctgatatttgtctctcttagtatgcactaacattttctttaaaaaacactttgaatgctacctgttctgttcacgaaaatctctgtcaaatttgccaaaaattgatggggtttaactgaggggaatcgaaggatgttgatcgatgagttttcgaattttgtattgatgatttgcagcctcttatcttagctttacttatatctgagaaccaacacaatgtacaagaatgacaaagggaatttgataaaagataacatttagcatagaaagatttacaatcatgttctaaggcttaccgattcaaattcaagaagggggctgctgatttcttaatcttatcccgatttttcgtaattcctcgagttgatgagttacttcttgaacaaattgcaatcccttgttgccactttgaagagagttaatcatatgctcgagaaaacaatgatcggcttctagtgattccaatctgtcgttgaggtctgagacttcactttctagagcagccaaactaacttttctttggtcagggaaacttttttgcttatcagacgcacaatgattaaattcgccatctgagctagatgcctcttcttgagaagcataccttccattattacaatcttcagtttgactgtttgccaaattcatctcctttttgtggcatttttctccctctagcctatcatcagcaaatatttttgaatgctcaccattagctatgccggggaaaggaatactacgagaaaattcatttagtttcatttccaagctctgcaaacatcgtgaaatgtacagcctttcttcttcaaacccggaatgtgaaattttaatatcggaaggctcctcgctatctttggacatcaagtttggaggaagacttgtattatcttggcagggtatgatagcattatccattttcgacttactcaagccattcgattcaaaattctccccatgcaaatcctctgtaactgtttcgtcgggaaaattcatcctataaaattctagctcagcttccatatcttgcatctccttttccctttcagctaataaatcattagctttctgaagtgcctccatgtcgtactctgcttgctcttccatcattctcaaatactgaagggcctccatatgaagtgctgatttttcttcttgcaatcttgtaatcatggccatggcctgatttgcagcaactgaagcagcactcctttcttctcctaactccttatacaaagatttaatgcattttctgtcgtattcaacttgtcttcttaatcgatcagttatactttcaccctcgatttcactaacagtgcctgcatctaaagattcaagactagactccactgaggcagaccttcgaaaaatctgaatgtcatctgagctagaaggtatttggacatctccatgatcatgctcccatctgcttgtatttggctcatcattatgtttatcgagcttcatcgttacagagtgttcaacaataactgaagatgattctctttccctgccacttctatttaattcacacaactcactttcatcaatgtgggttggcttcagaattgaattgtcaccaacttggcaagtttcaacacatgtaacagatggaacacttagtgaccgaagaacttcctcgtggttgtcagtggatgcatgtctaatgtcactagttcctgtattttctgccaaaacaatttcaaataggaatcaggcccatataaatcatgagggcattcacacacaccgaaatgcagagaaaaaacttacctgtcgttgatgaagtttgagcaaaagagggacagtaatccaaactgaaaaggtcacgcagatatggaagttcaactttgttgtcaattgattcttcatgtggaatatgattgaaatcacacagatctggaagttcaagcttgttctcagttgatgttttttgtggaatttcaggtacatttgacgcttccagccaattgagtccatccacgcaatctgctttagccccattgaaatccattgactgatgagcctttcgaacatcagactgaatccacatttctgagagcaaggatctactatcagggaaattagttacatttcctgatatcaaatcgttggagggagctttagatggattctctgaagaaagaacaataaaatcactttcagattcactatttccaggtatagtacttctaccatcatcgtcatcatcagactttgcaacctcagattccgagtcagaattgatattcagctcagtgtaccccacatcagacaaaggaacaaaactatttcttccaagaccattagactttaatgaatgataatattgattcctcatctttctgaaggtatttcgatgatgcaagtgactatgacttggaaattgaggtaaagggatgtcacgtttaggaactacattcccagatgattttagttggaaaactcttggcttattctgtttcggtctccaaggcttgccacaacaagcacatggctttgcacccacagaaccaccatttacaaccaagctttgcaaaccagagccacaattatgcattcccaacttactccccaaaatcctattcatttctgagaaagataaattcttcctagtgaatgaaaagatgcaatcatcacacatcccgtggccatcagcaagcttaccatgaacatgacaaaaaatcaaagatgatatctctgatatgtgatttctgcaaagcaggttgcgataaaagtcaggcctttcattacctataacatgatcgagcctggagcacaaaatgcaaggagtctgcagtttgcaataatctgcaaactttgtgagtagatatgacaacacaacatcaatcagcaacagaaatatcaaaaaccattcacatgctgcaaatgttagattggccataaaccccatcggtttccggggttgtgcttccatcaatgaattcccctctacagctgccatttcccccaaaaaccaatcaaggagagctttggggaccaaagcaggagaccatttcaatcctatttaacccaaaaatgaagcatgagcaaaagaaacaataagaattcccaaaactcagaattttcttttttttttccaatataatgagacaaacatgcagaggaaatgaagaaagaaaattgaactttcaatagttaagaactgaaaaaagacatttaagggaaacccaattctgatcaaataccaacatttaaagcagagcatccca

SEQ ID NO: 99 - DNA, 2733 bp, Cannabis sativa
aaaagaaaaccttaaaacttgccttcacaagtgagcgcatgaatgcagtcaaatgctttctcccattttctgttgaagcactcaaaataccaactcgtgaatagccatattggtcaggtgtccagcctgcatcccctgtaaaattcaccaaaattttccattgcgtaatctaaatcttcataactttgactttctcatccgtataacccctagagataatttctattctatccaattcatcacaaaccttttgagggagtcaggagggttagttgacaaagtcattgccattggcatgaagaccatagtaattaatgataccgagaacttgattgcaacagcatatcacaccccattaaattatattgcaattaactagacgtgggtagattcacaaccccctcaacatatacttaagatatctaaaattttcctttgtaattatatcatcaacaatcattcaactaaagagaatgttggaagaaaattccacaactacattggtctcattttgcatctgacataggatgaaccccactgcaggcttctaagaacattttcgaagtacaggaaaagtttcctgcttaatttcttactatgcaatgttattagcgctattcaatgggccttctcaaaaaaagatacagcagtagcttttaattgattatacagagaaatgttatttacgaattagaaggatatcaaacttagcggaaattgaatatttcaggggtaaaataacggtttaccccacaaacaaccagaatagaagctaaagtgaaaagaaaaatgaaaaacttacgtaaaccaggaatgtcctcagctttgacaggtttcttaggaattccagcttctttctgaataaaatgaggttgtgattagaaccatgtttcatgatttgtttcatcaagcaattcaagagcaaataaaatagcatgatgctataattcctaagctccttaacatttgtggtattaaatatacctactaagaatactaataatcttttacctttataaagtcaatccctggatacacaatgtgacagttggagagctctcttatcttttcatccaatcgcctgcggaaaggaaaaaaataaaccaggtcaaccactactgcatgaattgcatagaaattgaaaagccatcaattgacttttacctgtctctggcggcgaatcatagttgacaagtcaatgtatggaagcttcggatcaattttgcattccataaggattcctccatcataatcttttatgtacctaacatcacaaatatatgcttacatagtgtcatgagacatgacaaaataagaacatatccatgagacgagatgaagtttagaaaaaaaaaaaagaaaggtgagaaacctataaataagaaaattgtggttaactgttttcatgcaacaggagtagtacagaaacatacccatgccaccgatctttctccaagtgaatctccttggtaaaaccctacatttggaaaagggccttgaatacaatactaaacaaaatgtgctatagaaggaaaagttaaaaatgagatgaaccaagaaaaaataatgacgagtgattatagaagaaaacctgcttaataaaatagccaacagcattattgtcagcatatgtcagaaaatgagttagcccatcaacatctcgcgcatgttgttttaaatgattcatcagcctagtaccatagcctttaacttgttcatcagccgtgattgcacagaaagcaatttccccaaacctttggctgtagttttacagaaaaaagagtgcaaccaaaccaatcacgtcagctatgcatacatattgaaaattaagctataaaaagaaagaaattggtagtaaaacctaaggagaagcaaaccattacctgacatatggtcgataggtgatgccaccaacaacatgattgcgtctaataaccataacagatttgtggcttctgtaaagaaaatcttactccaatgaataatctaacctattgatccttcaattcaatatctttattttatggtctttcttacttacttacttacctatccataacaagacgaacaatgtactctttgggcatgtttggtagttgcctcccaaaaatatttttcaaaccaattaacctatacactccataatcaatacataaacatttttaaagactatacaataaaatacagaccataatattattattaagcattgatgagtttggaaaagagagaatcaaataccagaccatgtgctcatcaataccatcgtttgaatagcaagcaaacttgagttttccagcttcctccttcaaatacaaatacaaagattcaagcttttcatacacacaaataccaaaattgagaaaattaatcaaattactaaataattaatcaagttacctctcttttcaaactttcctctctagcactataagcaccactggtctgcaaattttccgtaaatattttggtggcgtcttctttgaccacaattccctgagctgtggtggcgttggcgcctggaccaccggcagcggtgccaggagcagcaccagcgtctttagaattgtcggaattctcaattttgacagtcgcagcctcagtcttcatcttggtattgcgtgtggtgctgtcgaggcgtgcagcagtgaaattgcgcatggaatcgttatcgaagtcgtcatcgtcgtcaacggcgacatcgtcggagtcatcgtcggagtcggaatctgc

SEQ ID NO: 100 - DNA, 2515 bp, Cannabis sativa
attacataaaatattttttagtatagaaaaaagatttaccataccagttacattactagtgaatacctatttagccacattataggttgcaaaattacaaaattttgaaataaaagaaaaattacagctaataacaaattagagagttatttacattaaagtatatagttatcaataccccaaatagagcatgttcccttcaacacgttgataatcttctcaaaatcactctcgatcaacacaaaattatttatctaaactaccgttgattccatagctagcaaacaagtcgtggcttctctgggtcagagaagttaagcatgctagtagctacccaagaaatcgactccctgtggtctctagcaagagccaacatgcacattatatcacaaccaaccctaacatcacaattaattttaatccaatcttttggggggagaccagacaggagacgcaaccgtcaccggctctgaaaaaaaaggcaagcatcataatctgcataacacatggaaatatagtcaatgcaatgattaatgttacagatagaattattatgaaccttatcgttgcgggttttccaaattgtgtcgatcacaatcgaagcatacaggaacaactttttgacaaccacgcctctagattccatactccataagaatttaatccaatcccacatacgagccccggagtttagaactggcatcacaccccagggagaagacctccacatgtgataagcaaagttacaatataggaaaaggtgcttcattgtttcctccatcgccccagataagggacaggaaacatcttcaacttgtaatctcccaaccataatggactggataggtaaggcattggagaggatactccaccacaagactttgtgacgctccaaaattttagaattccaaagtttattccaaagagcaggagcaacattgcaaggaggagcacgattcgaggcctggaccagataggcacatttagtggagaatttaccgtatgattctttggcccgaatccacttgtctctaccctagccagaaggtctacctcctttagtaatattgttggttgtttcctagccaaagaggtaatggagtttgggcacatcccagtttccattgtctaaaagcaagtccacaactttttccaaccctccggcctagcaactacagggtgagggtagaactcctggccatgaacaacccacggatcctcccgaatattagtgtcattcccatccacaataagtttacaagcccctttcaaaagaacttccttagtcttcacaacattcttccagaacttagagtcagaattcatggccgaacacttcaaaaaaggtctacctctaagatatttaaccctcaacacctggcagcacaaagattgctcttcaataaggagagcccagccccatttggtaagtaaggcctgatttatttccacagtcttctggaagccaagcccaccccgagacttgggaaggcacaaataatcccaagcctttaaatatatgcccctgttacctggctcacaggcccaccaaaaatctcttaccatcccgtccactttagacgctagtttcttggtcagttttatggttttcatcacatagacgggtaaagaaagcccaactgatttaatcaaagtagcacgaccaacctttgacaatgatttcaagttccacccatggagttttgagacgaggttatccaaaatgaagttgaaatcagcatccttgttgcgattacgaaacaaaggaagcccaagataattaatattattcactaccatattaagcccaagcgcctgcttaattcctcgtttcatcccatcgctattattattgctgaagaagatagaggtttaaagtttattaactcgttgcctagaccaatcacagaacttttccagacattgccaaacacccttagcttcctcaatcgtggccctacccacaagaataagatcatcagcaaagaagagatgtgagagctgtggaccatttctactcagttttattcctctaatgatgccagaatgtgaagcgttttaaaaatacaaaagaggatgttagctgcccagataaatagataggtggacaagggatttccctgccttatgccacattccagagtgaatctactaaccatgcctccattaaggcaaatgttgaacgaagtcgtagaaatgcactgccggacccaaccacagaacttgtccaaagccttaaagctacgaagcacatgatcaataaccttccagctaagattatcataagctttaaccagatcaacttctatagcaaagtagccttgtcttccttttttgagcttaaaagaatgaatgatctcttaaactaaaacattattatgctggatactctaccctgggacaaaagctgcctaagtgggacatataagtcttgggaggacccggcggatcctattcacgatgatcttagaaataaccttgtaggttacgttgtaaagggatatttgtttgaatt

SEQ ID NO: 101 - DNA, 1901 bp, Cannabis sativa
cacgtcgattactaagaattgtgccattagagttcttgtcgttgaattttctacaactatcaagggtagccgaatgtaccccatgggtgcaatgtcttgaccaaagaagtcatacattacataggtgcaaggtgcaaagtttgtcagttggagccccatcttttcataggttgatttgaaaaagaatgttggaggaggctccgttgtccaccatgcaccaagcaatcgtcatgttcctgatctgtgtagtaacgaccaaagggtcattgtgtgggaaattgacttgggcaacatctccctctgtaaaggagatggtaggctccccaagcttgagttgcttggagcccctttctttgacgaccaagatgtcacttttaggctcgtgaaggaaagtctaagcatagcgttccctagccttattggcctcaccttcaatgcgagggccacattttatgacccccaagtgaccctccattagaggtggcatatgatctctgttttgggcatcctgtgtctgtgcttggtcattctacacataacgacacaagtggggattgtttttctttatgaggaattcaatctccctctttaaattctaacatgcgttggtgtcatggccaaaatcattgtgaaatcagcagaattttgacatgtccctcttgctcatctcccttttgataagaggggcttcttgtataggacagtagattgagtgggcatgtaaattttattaggtttctcggttaggaggtgaagcaggtatacttctcctctttctctttctagttttgtggcatgggagaagtattgtactccccttttcttccaccgttctgaccggaactgttgttaatgcacttgcttccagtgttcttgccattagagatttggctggcactactagtgctggcctgcacatttggcaagtcttggggttgtacagcaccctaagacagcctattatttactttccctatttaggcttatttgacagcttcctctagctttataaaaccgtttgctcgttcaaggaacttcttcatattgttggttgagatcctccagatacctttccaaaagtcactcaatggaaggatacccccagtatggccatgtaatgacctttttctgttaggcctttgaccttggtggcctcgacaatcaacctttggatataatccttcaaaggtttgccttgtcgttgtttgacctcgacaaggtcttccagctacgatggtattagtcttgaggacaagaattgagtgtagaattctcaagaaaattcactccaagaattgaatcttcttggacctagcttgaagtaccattgctgagctatttccaacaaagttgtcagaaagatccaacaccgcacatcactagtaattttctagagatctgtctgcatctcgaagtacttgatatgtgccaaaggatcttctcaaccgatatatattttccataccgacatcttaaacttgggcaagggcaaggcattgatatatgccaagaatggagagccccttgacctgtctagttcaaggtctgatggttttaggccaattaagccctttatcatgtctcttatttgatccagtattgcttgcacaaaagcatatgatgctgtaggagcctagttaattggcctttcttaattggactgtagccttggattggacaagacctggccgaccataccttaagaaaggatatgttcaacgctggccagccctaagcttggcatctggctctggctgaccagccctaggttctgtaactggccatggccggagccctacctgagcagttttgcatggtcgaccagctctatgctgggcaatgtcttgtcacccattctcgcctgatgggctggtgcgccctgtgtgttgacaaggggtaga

SEQ ID NO: 102 - DNA, 3844 bp, Cannabis sativa
gctttactatgagctccagcaagctcaacagatatgatgaaagttgatttgccagcttctttcagatactgcacatctccattcatcagtttcaccaattttctactgatcagcaggctgatgccctcttcagatacatctccttcgtttccgaacatctggttcagcaatgcttccggtatccccacccctgtatgaatcaatctgatcccaaaaaaaggagcagcagcccaatgaagaaacatgatgtaaagtcaattctaagtaacaaagaagaaattttagtgatgacagaattattaaattaggcgaaaaggggtaccttaagtcgagacgcacgagatgaacagactctcctagctgatctttgctgaggttggcaactataacaatctggcctccgcttggtgtaaagttaattgctattagtaagaaatctgatatgacttgttgaagtctgagactgtcaccatataaggtatcattcatagtctcttctgctgcattttgttctatggtgattccctttgctttgcttttcatcatgacttggctcatagaggcaaccaatacctcacccaaagtgaactcaaccatttccagatcagaatagctgttgtagaatgaagataacaagatagattaagaaccagaattattgcatatatttaagcataaaagaatatatgtatctaaataaagcaatcaaacaagagagactgtgccgtccatcatcctaagttgcagacattgtacagtttaagaagctaaaagttgcatgatttctctgctagataccgagaaagaagatatattttcgacatgagaatacatacccgtctatgatggtgtcaagatcagagtcatcaagaatcttgctaagctgccgctggcattgagcactagtattcagaagctgtttttggtcacctcccaactcagtactttccatcaatttccttgaaaatattattccagccaatggattgcggatctgtctcttcatatatgctaatgctttcaatctcttcacagcagtttgctccattaagcgctggacatgaagtgcttgctgcagttctaggctagcaagctgcaagaagcaaaagaccccagtgactgaaccctccctgtctaatttcttactcacacaaagcaggcattctacgtatttcccattccgggccaaaaacccaaaaggaatcttttcagattcttgacctgtcatggcattattcaacacaacgccaagatttatgaaggcctcttgatttttgagacggcagcatgccatgtttatcccgaaaacctctcccataagcattttatcaatgacctcttctcgtttccaaccagttatctttgtcattgctggattccactcagaacaccagccaaattcatcactaccaaaaattgggggtatcaatgggttccggttttgtacaattgccttgtaatcaccttcgattcgagtgaacttgtccaaaatagtcttatgagcagttagatcttgggccacaaaacacaccccgacaacatttccatgaaggtccctacttgcacaagcattcactaccaagctgatgggaccagagtcattcctagaaccataagttttgatctcaaattgaatgttcctttcctctttgcctgaaaagaaacatagtcaaactaaattatctccatgaaggggaaaaagataccaaaaaagattattacaaaaactggtgaacaacaccctttcctcccagaaagaaacataactgttactgtacacacatgacaaggtaatgcagaatatgcatactcattctaaactgccaatgtcctggttaacacatacataaaaatttaaaaggtcattcctacatgcttataaacagtcctagtgagtaagacatgtccattctaaactgagtgcactggttagcaaatgcatgaacatgcctacatggttctttgtttgctcatatgtaaacacatgtctgcaaatggtctttcaggtaaagtaagagggatattgaaaataaagcaaattatgaaagggcaattacataccttccaatgccaagtctaacattgatttgacaacatcagttgatgaatcttccacaagagtcagtaaatgcttcccaattgctctctcaaccggaagaccagtcaagtcagaaatcttagtgttccacccgttaaccagcccatcaatatccacagccaaaataggcacagtggctgtttcaattaaacggaccatctcgcctgtcacagcttcaagttcttgcatcccttcaattcttaagtcagatagctttgtattgacagtcacagtgtttgaatccaaagtgtccatatctttgaatgcattcctcaggataagctgcaaagaatggattgcatccatttcgtaatccttccaagggaagctccttgtcctgacaacctcaagaaaagccttgaatgaagatcttgggtgcatcttccttgcatcatccttctcaccagggtcatgtttggcaccaccccatcggacttctgcagcagtgtgggagcgaaaccagaaaatcacgtctttggatgttatcctcacagctgccataccacatactatatctcctagagagagagccccaggatagcctgcatcacacaagctatctgtactcaaaccagtggaatccatatggtactcagagagccatgaggctatgtcatgaagctgagaatcacttggagtgattcctagcctccataccttgtttttgtacaagagagcagccccatcacatttcaccaggtccattatatttgggttctgtgtcacaatacccaagggtgcatcacgcatcagcatatcacacaatagtgtttgggtcctcaggatgttcttctcaacgatctgattttctagttctaactccttattcacatggatggcaaatacttgaaccaagaactcacaggcatacctcagagggaaaggaacgaatctcggagttgtattgtggcacacaactaaaccccagagtctctttctcttttgtggctgcacagattcagggctgtcaccctcatcgtctccatcattgactactacagccataaccagggaagcaatggaattcatgttctccatgtattgtaaatggcagctgtgaggagcccttaaagttgaaccacacaaggttagatcaaacggaagcttctcatcctgaaacaccttaacatgttttgcacaacaatccacaatcatacgaactttatttttcataaataaaaatcttgcagcttgaggaatatcagtggctgggtaatgtaaacccagatatggttccagaccaggctttgtagtctcagacaccacctccccatgatcatcatcatgaaatttataggccatcaccctgtcataccccgtgagttcaaagacctcttggaccatagtgtcacaaagcctttccatgctcccactaggcagagcctgcaatctagtaattgctttagctgctagtttgtatgattgcagggccccggcagcagtcatggggacttcataaggtttcactggctcaaagtcaatgatcaagctaccagttacccggtgaacaattgcataaaagggctttccagaggtcttgcaatgaactaatatgggatttaatagagaaacatctccaaatcccaaggccttttgcaatgcagaggcactgggagcagtaaaaatagtcctcacatctgttccaatgcctagaacagggtgatctccaacacttggaaccgcatgactgatcatggtcagcatttcaggtgaattctcactgtatgcaatgaccttcaaagtttt

SEQ ID NO: 103 - DNA, 2493 bp, Cannabis sativa
cggggtggacagcagcacgtcctggaactttgaaaatgccagcaccaccgccgtttccaataaactcgggcagtggctgataatggcggtgatcctcggaggggaggtctgcgcagaggttctggtcgagtctctggttggggttggtggtggaagaataaggaaagaattcatcgtcgtcgtcggagtcgtagagggtgagttggggcatctgggtgtcgtcgaggctgtggttgcgttgttggtggttgcgtttgggggctggagcagaggttgtccggagctgttggctgtaagattgggatttgcgtggcggtgggacactacttagaccggcgagtgcctctctttcatcgtcttctattctgagttcatccattgatggaatggaagttaagaaaagacaacagaaagagaaaaagaaagagaaagagaaagagaaggtggtgatgtctacagagttttgttatttttgttttgatgaaagaaagagagggatgatgatgatgaaggaagaagaagagaaagaaaaggaaaaggatgatgatccgcatgcattgctaatttgagcttacgttgttcttctctcttcacgtatataccaaatataatcctattacatagcaacaccatacacgtaccccctcccctcccatgcacttccccattctccacatcacttctccttttcttcttcttcttcttactattattattaccattattattagtttgtgtagtaataaacaataaaaagttttttacttttattgtatggtaattgaaaataataaaaagaaaaacattacttttgcattataaaagaataaaaataaacaacattattatttgttggttcaaaatctcaaactatttgttccgaacggatagacacagaaacagaggggcactgatctgctctgttcctttcattaatgtacttacttaaaccaaacttttatattatgccaaaattagacactgattgatgctactacactttttccaataattgaaattgatttcgatattccaatcctatgtttacaatttatttattttaccaagacttctttgaaaaaaaatacaaaattaataattccacaaagaagagtatttttttaagaaaaataaaaagaacaaaaaaaaggggtttactgagttgagtttatctgtgtgagacaggcaattgcatatccattttcatactggaacgtacaatataaaatctcgtaacaaaaggagggagcagtatggagcaattggccccgttccttgccaatataatcaaatcaattctacaaaaaaatccaggcaatttgtcctcatcccacctaatttacagacaaaaataagcacttctccctctaataatgtatgcacataaaagaatttatggaattaatctaggtagaatagagtcacaatttttcggagattcttagcctcttgacaagtttccatgagcagtcgactatcatgaaaggcaaagcaaatcacttgctgtacttgtgaaatgatgtccatattgcataatctgcagtttcaccacacaaatactcagttatcatttccatattagcataagccaaattcctcttctaagtcaaatgaaattcaaatacacagtacactaccctactcactatacagaatagcgagcaatgcaaccaacaccaatactgtccattgactggtggacagtaatggtgctaaagcctgcgtacatgtttctttctatagacatggaaatttgcaaaggctgtagtaaagcagacaatcaattaaacgacaagtgaagttcagtagaaacctgctggcttcaatcaagggtaagtgatcattgtaaggcttctctataacattcttcacctgcattcagaaatgaacaataactttaaatgatttattcttggtgacaaaaccagccatatgtgctttgtacttttgataacttcatttacatcaagccttgactaagcgaatagcataacaagtattaatttgtaaaaatttattgtttctggtcatgcttcctgattctttggaaattatagagtacaatatgcagtatacacttactagttaaattcattgtaagcaattaactttggtagggaattgaagcaagagataaatcaagctcaaataaattccaactgagccagatatattcagagctccaccaagtaaaaccatttatctaaaagacatgaattaaaagatagtcgagtcatttctcttactttggacaataattcctggctctcaggcggttgctttttcaagctctgaggcaatattactgttagtagctcaggtttttctgctctcaaagcaccccttataacagctgcattagtgccagacgctcctgatgtatatatgtgatttttctgcaaataatagtgttataccctagcattagaaaaataaagaaacaacacaaacatctggcatgctcagtataaatattaattattcagcaaacaa

SEQ ID NO: 104 - DNA, 6199 bp, Cannabis sativa
ggccaaataaatgaaaggcttattataaaatgaaatcaataactacgattcagtaggtcaataagtttcttctcctcaagaaaaggaacatatataatatgtggacaatacttatcgtcgtggatcacgtgcagaagaaaaggtgataaaatgggtccaaaatagttaaggggtatcgcaattttaagccaaagtggaatcgtgggcaccacttgttccacgtatggcactcaattcttagctgtaaaccaatagataattacttaagaccaccaaaatttttgagaaccaaattcgcacacaaaacatattgtgttgtgtttctttgctttatttaatcgttttctttctttgtttgtttctttttcaagaaaaaaacaaataataaaaataggcgtagcaatagtcacttaattgaggaatgacaccaccaacttaaatggcataaaattatcttcaaggtatatatttgaaagctatagttttagtttatatccaagtgctcgaaatggaataatttttccatttaggatgtttatgtgagcttcaatttgaaaattagtttctccctagttttatttatttttcacttcctaaaaggtccaaaatcgaccctcttaaaaggctataagttcttgtccttctaggtgttagtgggagtaccactattgatctatctaaatgggcctttataaggttgatgtgtctgaatttctggtcaaaaaagatgctgcggttacaagagaattttctaagacatctttttcgtttgagaaaatggggcaataagcatgggcaatggtcaaccaatatacgccagaataatagaaaccaaacaaggcctgggaatatttagatttaagaaaaaaattatttgttccctaccagaaaagaataaatgtgcagtgaaagggttgtggatttggtatccccaagcgaaagtttactttagaaagaaacgaagaaaccatttcttacttcaacataaaagagttgctctctaaatacggaacccagaacaaggttgtcaaaaactaaggtgaaaatataaataagtgtgcacacacacattgctattagaatgaagtaataccttacaaatggctagaaatattttaaataattattaaattaaattatgtaaaactcgatatatatttattaaaattaccacacctattccaattggactcaaaacacgatttgaaaacattggacaactgaaacggtgagtaccatcacacgaaaaaaaaaaaacaactgtccaaaacaatatggatacaattcaagaattggtcgtataagattggtattacattcattatagatttgttaaaattaccacaccttacccaattggactcgaaacgatttgaaaacatttgtagccgtggggcaactaaaacgatgagtaccattacaacacattaactgtccaaaacaatatggatacaatacaggaattggtcatatgagattggtatttcattatcattatcataaactctcaaccattctaaatgcatatgaagttcggtttgaatgagtcagtcactacacaagtataacagaaatcattacactatatctaaaataagaacaaagcaagagatatttggtcatactatcttcattttgtcttacataatatatatacatgcaaactgcagcaaatgccaaacgcaggatctatacagcacacaatcaaatcccacaggtacattgcagatcagaaactgaaaacacatagcattgtgtctcgcactaactacctggcaattgaacttcttaaaacatttttcccgaagcgctactttttttagactattgagctcatcagaatggggtaaggaacggcacatcagtcttgcagaaaaggcaccgcttcgttttaggcagcctcgacaaatctcgttagaaattgagatagtttactgtacctaattgaacttgtggcaaaaacaagaaagccttctagcataataaccttcacttttttctgttgtagaagattccaccaccggaataatgccgatgacgtgttccccccctcccactgcttccttcccacaagtgacctcgggtggaacctctactgccgctaccctgcatatggttcaatgtttgggttcccaacccattcagttcctcctcctctctatcattatattctaaaactagccttttgatgtcttgtttctcctcaagctcagctgcttctttctgttttgtgctctgtacaagagagcaatcccgagggatgtacatctgcctagtctgttgcttgctcccacgcttcacaagaacttttacctggacgtccttaattcctccaccctcctcatccaatgcttcatcaccactttcaccaccaacccccctggttgatccttcaaacacgttcattggtatcatcatatttaatgtgggtcgaccacgtagttcttgcctgcgctgatccatgctttcctgcatttaatttaatttgacgttagaaataatcaatattcaccaccagcacacaagccccacaccacagtcatcagaataaaacacattaaatgatatgccacaagagttaaagaaaaaacacttgcctgcatgacagcctttagttcttgctcaaaagttgctgcttcaagagggtcaacttccatcaccttctgcctcacatggacttcatcctcatctgaggcaggtccacccccatcgtcatcctcctcatcagtatcacattcttcatcatgattctcatcatccagttcttcttcatcacgcccctcttgatcaagagtcccgcttccagaatcactgtcactgtctccaaggccatcatgcaacctaccatttccctcgttaccattcacagcactctgtccatttgctgaaatagagttgaaagaactccttatttcactgtcagagtgcttctcactacttgttttgtcagatgggagagtacgttcatgctcctcaagttccaccagagctaaagtaacttcttcaatagatgagtatcgagtcatattgggacgtaaatcagcaaataaatcctgaaaatgaaagcttcagtacaatagatctccctcaaattccaggaaggtaataaattgagtgcataaagggaatgaagatacaacacattttcaaaaacataagggataaaacagacttcagtgttttctcatttcaagcatataatataggtgtaatataaacggtgctataatattacttccagtcatcaaagcatgcaagaagaacaactacaaatgaaattaaaaaaataaactgcaataaatacctgtaaatcaaattcaatatccagtggtaaagcacctttgctcaagatatatctttgaaagtgtattaaaaatcgatcaagtttccttttagaagagcctcgatcaaagtagtgcccacaggtctcaaggagagtaataaccatcctcatgcggaaacaatcctccggtgggtctagtagatcttgctatgagatgggaaaataatattagataccatgtcagaatatttttacataatatatttcgcaccaaaaatcaaacaaaataaatattaagaaaaacaaagacatagttatacatggcatagtgtcattaaaaattcatttttgacatacaagtccataagaccatgttctacttttagctatatgacaccccaaatgacacaaatcattttccatatcgcactttagctgtatcaccatcccaaatagcatctataaataaaacttaaaagaaaaaaaccccgttggtatgaagagattccatctattattttcacatcaaagcatgtatgtcagaaacaaaaaagattcataacaattgttctgagcacatagaagaatacctctggtgagccatggccaaagacaagaatcaaatacagcgtctcaaaaataacagacgaatccacatgctcatagttgtatagctctcctaaaaatcgcatatgggctaagcgtctctgctgcataccatagtcatttaattccaggccaacccgaatctcttccaaaacctgcaagttcaaacatatgacaataaggcaaaaacatattgcaaaaaccttgagatgcaccagtttttctagaatgcaggcaacttagtagattatatgtaaaaaacgcatcaataagagtcacagaacttgtaaaaaaaaaaaacaaatacaaccagatcacttgctcagactgctttctgataaaccctggtccaatgtgtctacaaaaagagaaaaggccaagcataagttttatcaaagcagtttattcagtttgtctttcattaactgttttaggctgagttgttctttttgtattagttagtagcttctaattaagttgttgatgcgcaagctttattctctatatatagagaattagaactcagtttcagttatgttgaaagagtttagatttgaaagagatctctttggagagatctaggccccgtttagacagcttttagagaaacttaaaagcacttgttgaataagctaaatgccaaaaactgtttggtaaaacaaaaaaaaatggcttattaattaatttaagcttcttttgcagctagaagccaaaagccaaagctgtctttaagcgtctattttttttatcagaaaaaaaagagccaaagctgagtagctgagttgcaccagctttgggattatgttcgggaaacccgaatttcatttaatgaattcttcacttgaccaaattacccccctaaaattaccctagtattaattccgctgatgccttccttactcagctatgatatgatattcacttaagtaatcaacaacactacgttttcactctccataacacatcctctactacgaaagtagctatcccaaagaaaacccacaataattccacacatcctagctgattttaagaaaagtcccatggcgaggacatttaggcaagctcaaaacttagaaaaacatcgcagctgaacttttactcctcataacttaacctaccggattactccagcccctcccacttccagcacaagtttgggacgaaataatcatagattcatagaaggccttcccaaatccaacgttggggacacgattttggtggttgttgatagattgaccatgctcacttttggaagcttaaacactagctgaaacttttatgcgcgaagttgttaacttacatgaatttcccatgtccatcattaccgatcacgatcgaatttttgtgagcaacttttggagccatttattcaagcaacaaggaaaacaactcaagaaaagcaccacataccataccatcgaagggcaattgaaggttcttaataggtgtcttgacacgtacctacattgtttcacatatgagcaaacaatggcctaaatggtttatcttgggctgattcttcatacagcacataatacatccctcaagtccacaaccttcaaagcattatatggtcaagatctaccacctattttgccttacaaaaaggagacagcggtggtttcatctattgaaaagttttcaggcacagaatgagatcgtgatgatttaaggacgcatcatgcatctctaacgtgcacagcaacgtatgaaagcccatactgatctaaaaagtcgaaaagaggagtttaaggtggggagacaaggtcttcctacaaatcaaattatataaccagcattcactcacaaaacggtccaatgaaaaactgccaactagatgctagcccataccctattcccaatgaatcggtgtagtcgctttcatactccagctatcgaattcagctcttattcatccatttttccatgtctcccagctccgctgcacagtaggtgatgctcactcctctcctacattacgtccgcaactgacacctaaattggagctacaggttgaacccggacaggtcctccaacaccattttataacagctggtactcaagcaaattccaacgttttgatggaatggcactccctacctgactttgaagctacacaggagacttgctcaactatcaatgcatgatttccacttgaggacaaggtaagattttagtagggatattgataaacccttgatgtgtctaccgaaagaggaaaagccacaaatgccaagcataagttttatgacagcagtttattcagttttagtctttgttctaattgttctaagctgaattgtt

SEQ ID NO: 105 - DNA, 6225 bp, Cannabis sativa
agaggatttagggtttttcttttggccaaagaaagagcccaaaaaaagctgtttttgggttcaaatatggcggaaaatctggtacaggtattggaaccacaatcccgttcggatggggttttgaaatgtaagcttgatttatcgaagggatcttcttcttctactctgtttcagagaagaattaagttccatccagcgaggaagccctttaagggatttcgtaatggtggtggtgattttcggatggagacactaaaccccagtagctcggattcaaccctactgggatcggtgaaagtaggcaagaaaagtgatgggtctgagattttggaaaatgggttggatccagagctcagttttgaaattacctttaggaggattgtaagttgttctagtgtcttgttgctatgttgatttcttttttttggtatggtttcagacgcttttgaacatttttttctttgttttcagtttaaatgactctaattgatttggttttaacgatcacttttaacgatttatatgattttgatgagagcctttgcttaattggttacaatttgatttgtaataggaagacgactcttacattattaaaattctttccagcttacttcaaattggtaatttgtttgaaaaagttcatttttttaaaacttaaatgctatattctttctttttgctaatcagtctcagctattttcaaggctttttcctttttcagctaaacttttttttttgatatgggattcttgtttttactcgttttgttttgctcaattgctctgtttgatgtaattgtaatgttaattttggtcccaaatgctttgctattatacaataaatttatgggggacataactatgttaaacatctgccactgccatatatgagtctttttttccctcgctggaagaatttgtataccacagcataactgtgtggatggatatggattcagggtgctggtttagaaaatctgggcaacacttgctttctcaactcggtacttcagtgcctgacatatactgagcctttagcggcatacctgcaaagtggcaagcatcaaaactcttgtgagtgaatcttttgttattggagagaatacgtagaacagtttctccaatcctattttatgtgattaattgttgcctaggcaagtatgtatattgggaactctgaacaatgttacagctgaacatgagtagaattcagttaatgttatgctttaatttctgacttaaaggtgaaagtcccttaaccatcagaatggaatggatggatcttataagggaagttgcgaaccattgcgagaaatattactgttgtgccaactttcaaagttgattacaggattttttttttacttaagctgcgtgtacgcttgcatatttgcaggattctgtaattcatttagtttctaatttggtttgtttatttgtgaaggccatattgctggattttgtgctttatgtgctatccagaaacatgttagtcgcgctctgcaatcaactggaagaagtttagctcctaaggatcttgtttcaaacttgagatgtatccttgtttatttatttatttacggttaagaatagaagagtaaataattattatcttcagtaggttggattgttatttaaaccatccactcctttcggtccccttttcattttcaattttgttatgatttcgtaacactcttcatgacatagggtctctagtaaatatgacttatctctagttggttttgttatcatctaaatcttccactcctttcggccccctttctttgtggttttgtttttgaaacatgttgatttcatataacttggaacctgtggtccttgacctcccaaataggcatatctcggaattttcgtaattgtaggcaagaggatgcacatgagtacatggtgaacttgttagaatcaatgcataaatgttgcttaccttctggagtcccaagtgagtcccctagtgcttacgagaagagtttggtacacaaaatctttggtggcagcctcagaagtcaggtagttatctgaagcttagtcggaattgtttgtaattggacaacgtttcttttgggatttaggctctggaagccaagagtcttgcactgtttggaaaactgatgaaagaccctcttcaattattagttaatgaaatttattcctctaagtttggaatttaattgtcattttatttcttcaggtcaaatgtttgcagtgttcatttcgctctaacaaatttgatccatttttggatctaagtcttgaaatagtcaaggcagactccttgcataaagctctagtgaatttcactgacgctgaacaactagatggaggagaaaggcaatatcaatgccagcaatgcaagcagaaagttagggctcttaaaaggctcacagttcacaagccaccaaatgttcttacaattcatttgaaacgatttcgtgcacatgatcctggtcaaaagattgataagaaagttacttttggtccgacattggatttaaagtcatttgtcagtggttcctatgtaagttatcttttattaatatttttatgcactttttttcttctctgaatttgttggtaagaagattcctctttttgttacagattttctaggtttttcctcatttgatctcaaatgatgcctctgtctacccttgtcatttttgctagactttaacctcgatttaattaaacttagttacagctgaaatgagcatttcatgtatacgttacttgtgtaagctttaggattttggttttctatcaccacaaaatatctcaaaaaatatatttggatgagatagtgacaattactagctgagaaaaagaacaaatggtgacactagagcctatgttaaatttaactgctgtgtggactggatatctgtatagctatgatgttccatgctttctttagctgccctgttctacaacatgctataacttctaagatgatgtctcttgtactttgcaggaaggagatctgaagtatacactctatggtgttttagttcatcacggatggagcacccactcaggtcactattactcctatgtccgcacatcaagtgggatgtggtattctcttgacgacagtcgggtatgatagatgaaagaacaatactaatatatgcaaatacaaaatttagagtttgtgtggtagttgaatatacgttcattggtttttgtataaaatcttctcaaagtagtggcattctttgttggtttttgtatcatgtatctgaagaaattatacgtggtgccatgttgataatcattatttggcacataatcattatttttatcaatactattttgctataccctctgaagagttagaaagaaaagtgtttgattcattttcattttctatggcacgtgggaaattagcttatggttttttttttttgatttatcaggttgtccaagttagcgagaagacagtccttgaacaaaaagcttacatgttattttatgtgcgtgatagaaaaactataattccaaggaaacctgtggatctttcccagaaagagaatgctaaaacaaatgaaaatagagctaaaaattacatgaattccaaccaagtattaacaaaacccattcaaaatggatcaactgtagttggattgaatggcgtaacctcttctgcttccgtgacacaaaaagatgcactaaatgttggtccacaaaagatctcccctttgaatgaaatgttggatcaacccaagttggaactatcccaaactaaagctctagtgaaggagccaatggaaagggttcctcttctgcccaaaatttcggaacaatgcttgaaaactgatcaaccaagtgacaatggtgatgcttgtaagatcgaaactgctacttcaacggtggctactcacactaatggcttgaaggaggaagaaagcttaaataaaaagtctagtgtttcagttgtcacatctcccattgtagaggaaattcagagctctacccccactactgaccaaattaccaacaagatttcccaggaggtaaggggtgttcaattctcttatttcatcttaccgctctttcattgttaactagattgtaactttctttttgtgtgcatcagcagattcctacattgcatgtggaggagtcaagagtggctttgcttaaagcgcccactggtttacaagaccaaccaaaccgtgaaaaaagctcggtatgccttcaatttttttctcgagtctgtttataaatttagttattgcactcaaactctgatcatatacaaaatattgaatatcgttttttctcagattgaaaatattacgaactgtaatgttgctgagaatttgttggataagaaggcttgcaattctggtccagattccgtccttgatgagtcagtaaaagcttctggcacatcaacggtaacgaaaggatccctacacggggaagcttctgattgcaagtcccagaaaaaactaaagaagaaacttttaaggcgtcaggttgcgagcatgagttttcgctcaagcatgtttttgagggcatcactggctgtacggaagaaaaagaaacataaaaagagtaaactcatgcccttggatagcaagaatgttagcaaggaggttttatctaatagtgattgcttcccatcagatttggggccatctacatctgagaaaacccctacttctccgagaaaacaagacaattctggtgctagaaaagaagcaaatcgtactcccactactaaaaatgaaaacacctgcggtgattccttgaaaacagctgtggatggatatctcccagagagaaatggtcaaaatggctctgttctagctacagatgagcaattgcagaagaaccagatctcaagggaaactgtcagttcgcactcgcaggactctgagagagagaagatgcaaaatggctggatggatgtgcttacccatggtctgtcggagacagttggtaagtagttttcagaaaatgttctcttttagccacgttatctatttggtaacaatcgtaccaattttatctcatttcatatggaccagatgcagtacttagtacttacttctttttggcttgtgacttgtgaggtgctttctatcttaattttgctaaacaaattgtttagagacccaacttggtttgacttaattgttatccttgttacttaattacacattgccaaaattcgcaatgaaacacccaactcccacaatgtggcgtgccgtcaatctttgctatttaattattttcatgtgggactcagatgttgctagaatttatgacacatcattgtgtgtaatttgaatgtgtctcaatcattactctttaagaatgtttatttagtcaatgcagtggtgcattgatcaatataaccctgtgctaagtttttatcttcttctcttagattgggttttcattgtgtgaattatctgaatagttgttgggttgcttatttgacttgtatatcttatgcagtcgcacgttgggatggaatagaactgcctcctcaggcagtagaatctgttgctgctaacaatgtcagcattggctatgtagcagatgaatggtatgtgcttcatcttgttcactaaaaggtgttaatcgaattagttttcttaattgttatccatttgcgaagataacaagcactttctctttttacagggatgaagagtatgatcggggaaagagaaagaaggtaaggctatcccagcatgaattcggtggagaaaatcctttccaaaaaattgcaagcaagaaaacaaacttcaagaaggtaaagatggataggttcagatccggaaaccagcctctgaggatatgataaatcgtggtaagtggagccacgagcacatttttttgacacatttcctgatagaaactcttgcttttgttgatctgaaattgtgagagatagaattgagtgttggaattccttaactttttgattattggagagagggattgttgggtggtgagaatatgttataccttattttggtggggaaaggtctttcatgtagaatattgtactagcttaaggatggtttatccaagtgatgaactgaactggtttaatcttggtcagtaatgtacttttgaaccactgattagaggaatctattaatgtggtacttctcttttagttcaagaaaattttggttctgaataagaagatgaatatcacattcctcatttgatttgatgg

SEQ ID NO: 106 - DNA, 14144 bp, Cannabis sativa
gcgacttaagggtagtgatcaattttctcaatggcaaggagactcaatgggaagttgaaaattactctttattttgtaatagtctttctccttattttgtggggtgtgtattttcttgtattggtcgatcatgtaattttgttgcttaaaatgtggcaaaataaacttttacccacaatcaatatagctgcgtatttgtattctctatctaggtaaacattttgtgtaatgacggcggtgtctaaactttttatctatgaactattttcttaagaaaaaaaaaggcttcatttccatccctagtttgagggtctccactccacgtttagtcttcgacttttgagatttattttattttatgtttattgtatatatattttcctgaaacgaaaaccagaaaagggagggaactctcaatactctctggctatggcggtcatgggttgagagcataacaattagaaataagagatgcgatttcgaattgaatgaatgatgcagggactccaccaacagcagcagcagcaactagcggggcttctctccgtagccctccccaaagacgatccctcctcctcatccacctccaccaccgcttttaactccgaagacaacgacgccggtcgaatctccgccttgaactcactccatcgcgccattctctacacgcccaactcactcctcgtcacccactcagctacctttcttgcccagggcttctgtcagcttctctctgacaagtaaacaaacacttcaatctattccagtttgtttttcttttcatcaatttgttttaaactatatttagatacaaattcaatctgaaatgcatgagactaagcgggaattcaagaatgcgtttttatcaaatatttatttgaaaatttagaggctaaatgggttatcagcttcatggaagaagggtttgccttgtaaaatttctgtaggggaattttagcttcatgtatactctgtaatttgcactttggggtatagtatcacaaagtaaggcgttgatttgttaaacaagctagataatatatatatatatttattttagaatttgagcgtcctgtaatctctggatatattggatctcaggtcatacccagtgcggagggaagctgctgtaggctatggcgctctttgtgctgttatatgttcgactcctgtaacgtcaaatggtagaccgaaccatgttttacttggaacgttggttgatcgtttcattggttgggcattgcctttgctgagcaatgtcatctctggtgatggggccgcagaattggctttggacagcctaagggagtttctaaatgtcggagacattactgcaattgagagatttgctttgccaattcttaaagcgtgccaagtacttcttgaggatgagagaacctccttgagtttgttgcaccagattctgagtgttttaactctgatttcattgaagttttctaggacatttcagcctcattttcttgacattgtggatctgctattgggttgggcattggtgccagaccttgctgtatcagatagacgaatcattatggaaagtttcttgcaattccagaaacattgggtgggtaacttgcaattctcacttggactgctttctaagtttcttggtgacatggatgctttgcttcaagatggaagtcctggaactccacaacagtttcgaaggttgcttgctcttctttcttgtttctcagtagttttgcagtctactgcatctgggttactggaactgaatttattggaacaaataagtgacccactcagcaaaatggttccgttgttgttgggatgcctatccatgtttggtcagaagtttgggtggtcagaatggattggagattcatggaagtgcttaactcttttagcagaaatattgtgtgaaagattttccaccttttatacacctacagttgatgtcttatttcaaagcttggaaatgacttctaccacaccaacagttggagctgggaacattacctcatatcaagttcatggggttataaaaactaacctccagttactatcgttgcaaaagtttggtctcctcacatcagctgtgcagaagatactacagttcgatgcaccaatatctcagctgcgtttacatccaaatcatttagttacagggagttcagctgccacgtatatttttctacttcaacacggaaacaatgaagttgttcaacaagcagtgtcttcattaattgaagagctagagctactgaaggatttgctagtgaaaagtttgggtaaagtagatggattcaatagtgttgaaaatactaaagtctgttcgaaatttgaattgtgtgcattgattaaatttgatttgaaagttttattgacttgtgttttactgggtagggattccagtttgattggccaattagatgttgcaccattatatcttaagaggtctgaagaattactttcttttattattgagaaattgaatccttttgatttacccgttcgcactgatgtagagttgcaagttagtgttctcaagacattggataggttatctgaagctgaatttttgaacaagtgctctacaagaaatcagaactgtgaaaaatcttctatggacaattctgctgaaaatttcattattcttaactgcttcataaatgaacattcaactgtcattattgagcatcttcggaagtacagtcctctctatgttaaaggtctcaactattcttctcctctagcagttaaaatcgcaacgctttgttggatccagagattttttgagaatatcaatgctatttacaaaaaatcaaacccgaaaacttattttgatgaagcttttgaaaatgtggggattattaggaatgtgcttttctctattttgaatgctgcatcagatagagaaccaaaagtgaggtcacatgttgcattagttttgaagttgcttctgcaagcaagggttgtacatcctttgtacttttatcacatagctgaaatggtcctagacaaacttggtgatccagataatgagataaaaaatgcatttatgaggttgcttgctcatgtattaccaattacaatgtattcatgtgggctgcatgactatgagacaactacatcatcttggtccagggttgttaaatttggcaatgattctaatttgcattggaagcaaatttttgccttgaagcaactttgtcaacaacttcactcacaacaacttgtttctatcttgagttatatttcacaaagatggaaggttcctctttcatcttggatacaacgcttaattaatggttgtcgtagttcaaaagacagtcttttaaatcaagttgaagaagcaggaaactttggtgccaatgttaaatggttggatgtcaaagtggatgagaatactcttgagaagaattgttcagttaataatttggctggtgcctggtgggctatacatgaagcagctaggtattgtattgccttacgacttcgaactaaccttgggggcccaacacaaacttttgctgcgttagaacggatgcttttggacatttcacacttactacaacttgataatgagcaaaatgatgggaacttaagtatgattggggcatctggtgctcacttgttaccaatgaggttattactggattttgttgaggctctaaagaaaaatgtatacaatgcatatgagggttctattgttttaccattggctagtcattcaagttcattgttttttagagccaacaaaaaagtgtgcgaggagtggttttctcgaatatgtgatccaatgatgaatgctgggttggctctgcaatgtcatgatgctaccattcagtactgtactttgcgtttgcaagagctcaggaatgttgtggccttatctttgaaggacaactctagggcccatatagctgatcacctccatagtatcaaaagtagattttctatggacatcatgaaggttttgcatcacatggcactagctctctgtaagagtcatgaatcagaggctttgattggcctacataaatgggtttccatgatgttctcttccttgtttggggaggaaaaccaggcttttactcataaagaaatattgggacccttttcatggattactggacttgtgcatcaggctgaaggtcaatatgaaaaggctgctgctcactttattctcttgctacaaagtgaggagtcacttggttccttgggctctgatggtgtacaatttgtcattgcacgtgtgattgagtgttatacatctgtatgtgactggaagtctctagaatcttggctattagacttgcaagcacttcgtgctaagcatgctgggaagaattattctggtgctctaaccacaacaggcaatgaaattaatgcaattcatgccttagcatgttatgatgagggagattttcaggcgacatgggcattccttgatttgacacctaaaagtagcagtgagcttacacttgatcctagcttgggcttgcataggagcgagcaaatgcttttacaggctatgcttttgcaaaatgagggaaatgaagaaaaggtgcctcatgaattgcataaagccagattgatgctggaggaaacattggctgttttacctcttgatgggttaagagaggctgttgcatatgccatccaattacattgcatctttgtatttgaagatggttaccagctcaaagacagccaagataaattcaaacaacttccatcaattctaagttcatatgttcaatccatgcaatatccatcatgcagaatatatgaagattgtaatcaatggctaaaagtaatgagggtttatcgagcaatttcaccaacatctcctgtcactctaaaattgtgtgtagatttattgggtctagctcgtaagaaaaacaatctaatgttggctagtcgtctaaagaaatttctcaaggatcatatcttgagctgctctgaagaaagataccagggtttccttgtctcatctctgcagtttgaggaaattatgctaatgcacgctgaaaggaaatttgaagatgctctcacaggcctttggtcatatgtgcgcccttgcatgatctcttctgcatctttagataccaactcggatgacagttttttgaaggcaaaggcatgcttgaaactctcactttggttgaggcagagttatacagacttgaggcttgataagattgttgctgatatgctttcagattttgggagttcttttgacacagatagatccacctttagtgatgaaacctcgagtggtagtccaagtatgggtcctattattgaggaaatggtaggttcagctacaaaattgtctaccaatctttgtcctactatgggcaaggcttggatttgctatgcttcttggtgtttaactcaagctagagattctcttctcaatcctcaagaaaatgttgtccatacatgcttgttttctcctatcctcacccaggaagttctacctgggagatttaagttaaatgaagaggagaacacaaggatagaatctctgattacacaactctttcagaaaaagtttgatagtgacacaatttctgcagagcatttgaggaatgagaaccttataaaggttttggtgcagcaggtagtgaatattattgaagcttcagctggagaacctggtacagaaaactcaggcgaagaatgtttttctgccactctagcttccaagttaaaagtttgcttcctgcataaaaatttgggcttagatgaatatgaaatattatctctagtcaataatttagttgtaatttggtggactttgaggaagagaagagtttcattgtttgggcatgcagctcatggcttcatacaatatctttcatattcatctgtgaagattggtgatggtcatttagcaggctttggtgttgagtttctgaaacaaaaatctagtagctataccttaagggctacgctgtatattttgcatattctactcaactatggggtggagttaaaagaaacactggaacctgctctgtcaactgttcctctatcaccatggcaggtgagaaggtgtttcatagtgtatcatgcatcacttaattttttgatgaagataacacattctgacgatgaatcttttgtaggatgttacaccacaattatttgctcgattaactactcatcccgagctagtggttcgtagtcaattggagggcttattaatgatgttggccaagaagtctccttcttctattgtttacccaactctagttgatgtgaatgccaatgaagagcttccacaggaacttcaacacgtactcgactgtttggtaatgggaatttctttcactaatatgctttactcatctatgccttattgtttaacaaggttccatttgaccataatttaggtgattttgcttaacattattataatatttataccaatgaacctcttttccaatgattgacaatagcttttactggggaaattatatataatgtatttttaatttataagaagttggcatcacaatttataacatgcctgtttgaaatggaatcaagattgttgaagcagagagtcttgttacatgcagactaaactttatccaagattggtccaggatgttcaacttatgataaatgagctgggaaatgttactgttctttgggaggagctgtggctcagcacgctccaggatctccacacaggtcagctaatttctcttgattgtgctttttgttatacataatgctagcataaaatatttgaatttttttaactttcctattttattgacttaagtttgagttgaactcaagtcaataacatacagcataacgggttgtgtggcatgactggtcagtttattaatgattgctgcaaaactgttgagcactttgttctaagttttttctttttcatcaactatgtgcacaagcattctgagtggaaaacttgctgcttagtttattttggtttaatgttttttatcttacattctttaatatattttcctttctttcttcaaaaaaaatatacatttttctttctaaaggtgaaagtgaacaacttattatcattttgtattgaggagctgcagcaagcaagtttttctatgtggattgcagtgttctacttgtttaatttgcttcaatgttataattggtttacttgtaatcattcaataattttagcctttgtaaaggaataaggttggcgtacttatgtgtgtttattaaataattgatatgcctctatctggatatagtaattttatattattcctattatagtttttggcgttaaatctagctacttagatcttttatttggtagaatttcaatggaaggtttccttacgacattttatgtatacgcttcggtatggggttttatctatatattttatattgccttctgaaaggcatacagctcagcactggcctaaattagataggtacaatacgccatgacctacagaaagaaatttttgtgtgtatgctttgatgggaagctgattcctagtttgtttcataactttattgattggattttcaactcattaagatttttcaagtgaattttaaaaaacatactaaattgatctcttctttctgtgtgtttggtacctcttaatagtccgtcaaaagcaccaaggacttctccactaacctaaagaggttgtccttggctagcatacaatggaggatttatcctccttaaaaaaagaaaggcaagaaagtttatgcacgacatatgaaaaaaataagaataatgatttactttttctttttttggatggaactaagaataatgaattgactagtattttttcaatccccaaagctttatcttatcaattcgttgaggttctttcctatataaacagtgatattttgctaatgcagccatcatatcctcaaaaaactaatgagtggactattattggtgttcatcttttccatatttatgtgcatggactttcttttagggccatcttgtccctaaaagttgtttgtgatagacctcagtttgtttataagaggaggggccgaatatgataaattagtctattaatatcagtcttattttttttatatatactcttttaagttttgtaattaagtggctgagctgtctttttgtgataggatcctagttggcattagttgatagtaacctgggcctatatatatagaggaggggtctctaagggaggggtagagaaaattgtataggaaagttgtggagagattcaccctctcgaaaggtgaaaataaggagagaagagcctctcgaacagctctgaatttttgtatgaattgttggctgagattaatagaaaaaagatactttgagagactcaattttggtgtagctttttgattgaacttttctaactaaggaaattctatcaatttgttactttttatttataaatatatatttgtatattcatattatattatatgcacaaactatccaatttaaatttaattgcctccatatgaaaattgatttaatatttgataagaatgactttctctgtcaatattgattttagatttcacttgtttcaagttaaatcaatgtatacgatttatttttttaaaatcttccatagtttctgcctacttaaaatatcttggagaacaaaatgttttctcatgaaggaaaagatagatcataatgcaaattctggatttaagattatgtttaatacttgttcaaaataacactactgccattttcacatttatttgtattctgtagatttatatatatatttatgaggttgtctaattaactatttccagatgtaatgcggcgaataaatttattgaaagaggaagctgcaagaattgcagaaaatgttactctcagccaaagtgagaagaacaagattaacgctgctaaatatgctgcaatgatggctcctattgttgtggccttagaacgtcgtctggcttctacatctcgatatccggaaacccctcatgaggtatggttccatgaggagtacagagaacagttgaaatcagccatcttacgctttaagactcctcctgcatcatctgcagcacttagtgatgtgtggcgaccatttgatcatattgccgcatctttggcatcttaccaaaggaagtcatcaatttccttaagagaagttgcaccacaacttgcttcattatcttcttctgatgttccaatgcctggtcttgagaagcttgtaacaatatctgaatctggcattaacagtgctaatcttaatggaactgtcacaattgcttctttcttggagcaagtggatatactgtcaaccaaaactaaacctaagaaacttgttatactgggttcagacggtctaaagtacacatatcttttgaaaggaagggaagatctacgccttgatgcgagaatcatgcagttattgcaagctataaatggctttatgcggtcctctcctgaaactcatggttattctcttgggattcgctattattctgtgactccaatcagtggtcgtgctggtcttattcagtgggttgataatgtaataagtatatatacactctttaagtcttggcaaagtcgcaatcaactggcacagctctcagcaatgggtggtggcaatgcaaaaacttccgttcctccacctgttccccggccaagtgatatgttttacggtaaaattatacctgcacttaaagaaaaaggcataaggagagtaatctcacgaagagactggcctcatgaagtaaaatgtaaagttcttcttgatcttatggatgaaactcctaaacagcttcttcatcaagaattatggtgtgccagtgaaggtttcagagcttttagctcaaaactgaaaaggtatcattgagaatgtaaagtagttttgaagagttgattcacagtctgttttatatgtacttttttaaaccaaatacaatttggtattgcatgttgattgccagaacaacgttgcttttatcacttaaaatttggtactagcatggactgatgactactgctggtatcataataaacttttagtaaattgtacaacaaaatgataatattgttataatagactagcatgcactgcaccatacagctctttttgaacagctgtagaacatacaatgtaaccgttttcttatctcataggtattctggaagtgttgctgctatgagcatggtgggccacattcttggcctgggagataggcatcttgataacatacttgttgatttctgcagtggagatattgtacatattgactataatgtttgttttgataaaggacagagacttaaagtcccagagattgttccctttcgtcttacccagaccattgaaacagcattggggttgactggaatagaaggaacctttagggcaaattgtgaaacagtgatcggcgtattaaggaagcacaaagatataatattaatgttgctagaagtgtttgtttgggatccacttgttgaatggactcgaggggatttccatgatgatgctgcaattggtggtgaagaaaggaagggtatggaattagctgttagtttaagtttatttgcttctcgagtgcaggaaattcgagtgcccctacaggtatgtctccttgatgagagagaatgtatgaaatttcactttctgagtaccaagtatgaattttattttcacttttccatcctgatattggtaaatcctggatgttaggaactgcaatgtgcctataacattttttttttaaatgcacatttgcaactcgtttatttgataaatcattttagcgtcacagcgtaacatgcatgtttggacatgtgtgagtaattttttttcttcaataataaccaggagcatcacgatcttttattggctacactaccagctgttgaatctgctcttgaggtatgaataagcattatttaccatgttcacctcacttcagctttcttcctttttcagcagttatgtgttctgaacatatttttttatcttctttgttcattctgactatatgtttatgttatcagaggttttctgaagctctaaaacaatatgaaatttcctctgctctcttttatcaagccgaccaagagagagctaacctaatgctgcgagagacatctgcaacatcgattgttgctgaagcaactagtagttttgagaaaactcgcgcatcatatgaaattcagtcccgagaattctctcaagcaaaggctgtggttgctgagaaagctcaagaagcagcaacttggattgaaaagcatggaaggattcttgatgctttgcgaagcaatttagttccagaaattgatgcccggataaatttaagtaacatgcaagaagctttgtcactttcttctgctgtcgtgatggcaggggttccattgaccattgttcctgaacccacacaagtacaatgccacgatatagacagggaagtctctgacctagtgtctgaactggatgctggactctcatctggactaacagcacttcaagtatattctttggctttgcaaagaattttacctctgaattatcttacaaccagtgcagtgcatggctgggcacaagttttgcagctgtctgttagtgccctttcttccgatatcctgtctatagcaaagagacaggctgctgatcattttgccaagactcatggggctgatcttgattctgtcaaacataaccatatagaactgtgtcttcaagtggagaagtacatgtcagatatagagaaggttgaagcagagtgtgctgagctagagagttctgtaggctttgagactgaatcaaaagctaaggaccgtctgctgtctgcttttacgagatacatgcagtctgcttgtcttgaaagtaaagaagatgtaactcttccaattcaatctggacaatctaaatatgatggaaaaaaaatagttatatcagaagaattggatgagaagcgggagaaagtattatgtgtattaaatatagctgtcagttctttgtataatgcagtcaagtgtaggttgcttgacatctttggtagttgcgttggaggaggaaatgcaaataataggtttcaatatgattttgaaactattttctgtgagtttgaagagcaagtggagaaatgtatgctggtaacagagtttgtaagtgaactacaacaattgattggtatacccagtcttgagtcagataaagatgattctcaattttattctgaaaaaagttgggcttcgatttttagatcaagtttactatcctgtaagaacttaattgagcaaatgactgaaactgttcttccagaaataatgaaatcggctgtttctttaaattcggagattatggatgtatttggatcaatttcacaaattcggggttctgttgattcagcactagagcagtttgtggaaataaaaatggagcgggcctccttggctgaactggaccagaactactttattaaagttggactcattactgagcaacagctggcccttgaggaagcagctttaaaaggcagggatcacctctcctgggaagaagcggaagagcttgcgtcacaagaagaagcttgtagagcacagctggaccatcttcgtcaaacgtggaaccagaaagatgtccgtacatcttctctcattaaaagagaagctgatataaggaattccttggttttgtctgaacgacagtttcggtccctagttagtgttgagggtgagagtgggctgcatgtcctgggaaggaaggcgttaactactctagttaagcctttttttgaagtagagtcaattgatagagctttctcttcgattggaggtgctttttcttctcagtcaaatggaatttctgaaattgctgatttgttgagttctgggcaccctatatctgaatgtatatggaagtttggtagcttatttgatgaccagtctttctttgtttggaaagtaggagttatcgattcttttcttgatgcatgcattcatgatgtatcttcatacgtggataaaaattttgggtttgaccaactcttttctctgcttaagagaaagctcaagatgcaacttcaagaacatattggtaaatacttgaaagaacgagttgttcctactttattggcttgcttagacaaagaaaatgaacatttgaagcagctgacagaggcaatgaatgaacttgttatcgatcaagtgaaaaatgatattggggttgtaaaaaaggtgcaacatatgcttgatgaatactgtaatacacatgaaactgcaagagcagcaagatcagccgctttccttatgaaaaggcaagtgaatgagctcagggatgctatccacaagactggcttagagattgttcagatggagtggatgcatgatgtgactttgattccttcacataacagcagaatcaaatttcagaattttcttgctagtgatgacagtttatatcctattgttacaaaccttagcagacctaagctgctagaaagtatgcattctgccatgtcaaaaatagccaggtcaatggagtccctgcaagcttgtgaaagagcatcacttactgctgaagggcagcttgagagagcaatggggtgggcatgtggcgggccaaattccagcacgacaggaaattcttctagtaaaacttctgggatacctcctgaattccatgatcatttgatgaggcgtcagaaactgctttgggaagctagagaaaaggcatcagatgttatcaaagtatccatgtcaattttggagtttgaagcatctagagatggcatttttcgatttcctggggagctttatcctttcagaactggcggagatggcaggacatggcagcaagtttacatgaatgcactgacaagattagatattacttaccattctttcactcgtaagattacttaggccaattactgactcatttgtaaaagtggtattattaacatatgattaacaatgtatgcatgtgttacttattaggcactgaacaagaatggaagattgcacaaagtaccatggaaactgcttccaatggcttacatgctgcaactactgaacttcgtattgcatctctcaaagcaaagtcagcttcaggttacgttttccctctgtaacatttgacattttattttcttactaggacatgcatttatct

SEQ ID NO: 107 - DNA, 11077 bp, Cannabis sativa
ataataagtaattctagatatgtgtattttaccagaatggaaaatgaaatatttttacgcatcatttgagcatgtttgagttagctctgaactcagcatatggtgaagaagcatgtcaactctttggctccgagtctttgtgctgcacggaatcaaattaattagtttagcattgatgatgtctgacttctagaataggtgagtaacaacattgtttgatgacagctagttggaaatacatacccaagtgatcgacgtccttttcttgaatccgactcctatattaatgtaaattacagcaaataaatgaatcacggcgcaaaaatattaataaaaaaaattgaagacaagtttgttaccaaaaagaaataaggtatcctttcacagaaagtcactagtaattttgaatttattgaaagaaagttcagaactacaaacctcttcttgtccttcacatctttctgatgtttcaatatctatttcagcaaagaaagcctccaaaacaaatgctacaacctgtattatttcaaaacagtagaagttaattttccttagttttcagaggagaaataagatacatgcattagtaaaaccatttttatttagggctaaataaagcagagttcattttcagtgtctcctaaaagaatacagctgttatctgagttatttttatttagtttttagagtagaaaccacgaaataaacacaagaaaagtcatttatttagatcataaggaccaagtaatgagaaaagttcaatatcttctaaagaatagtcatttggatactgttttgaaataatttttctccacaaccccgcctcctaaagagaaaaatgactatctagtccatgaactgaaaggcctaactggagtgatcgtcctaactgagcaaagccaacaaatttgatcatataaacttacaactattttgtattgcaggactaggtttggtaacaagaaaatcttagagaagcttgcacattttatcagaaatacatatgattctcagtaaacattaaaaatctggtactggtacgcataactgtgatttatggctattgaatatgctaaacattgtcgtcctcttttcagccaaattcttagaccttcggttgcaaaaagttaatagatagcagggaaaacttacaggtccagatgtgcatgtgttgttatagagagtgatgatggatgttaaaacacattattaccaaaagcatattgtcaattagagtagtaaaaaatagtgtagatcaaattgttagattgactatattctgttgtctctgaaacacgtgtaaaacataatggaaaacaaagataaatatttaaaaaacataaaacagtttaccaaattcagtagcagcaagatagtaattaggtagaaactgatgaagtatacaagtgaccaagaagtgcctgttaaatccctgtaactctgaaatgataaaacaacacaaaattagtgacttcagcattaattagagtctattcactttaagagaaagtttttaggaaaacatggtaacatgtgcagtacttttgatacaaaaactctgtcaaaactctcaacgtagtgtaatatgttggtcaaaataccgactttctcatccatcaaatccaacaatgtcttctgtaaaacaagttcctagacctatcatcatttgtgcattgtgctctaaagctacctcatctacttaaaagagactagcgtggactgttacaactaattaacttagaagatagatgataataagaataaaaggtgactagcaacaagacaggacatgggatgaaaagtaacaataatttagtacgatttaacacgagattacctgcatccacacttgccaatttcccatgactagcaaattgaagagtgtcaccatcccatttggataatcattgaagttgaagagtaaatagctgattttgtcaagaaatggcattttattcacatttatcattgcagggaaacttttttgggagaaatataaaaaataaacagataattagattattatacagtaaatgaaaacttaatattaaatccaagtatttattagtatcaagttgtttgtttgatcatggactaatgagattgatgatctagtgttcattttttgctcacatttcatcacccattacttctgattctgatggactaaggaaatttaagatactttttttccccctaagctttcacatttacattaatcttattcattgcaatgatcagcatgtcctccattttagtattttgtaatcatattttttttcagcagctagttacaataccaaaaacgagactaataaaaaaatttctccaatcacagaggatactcatcttcagcaagttctgttccctccaacttaggatttccaacattaacaattcccccaaagacctacaaacaagaaacatataaaatagagggtgtggtacaagataagcaccaaaaccaacaggtaaggagtgcagtaaatttgagtgcttttttttttcacctgtacaccaatagagcaataaatgcataggacacaaaaaattgtccctagatatggcattaaacttggtacaagggttaaaaatgttgcgatgaaggctctgtaacgctggacgtgcatcagaatcctaagcaatcgtaacattcttgcaaggagaaggtagcgaatcctgtaaatgataaggaaacaaagttactggttttttcaaagctgattggacagctaatacttaactccattatagcaagaagtaaaataataaaacaaccgcacttgatctattaacatcaaaaagaagagacaagaaaaatagagatgactttgtaatcagaagaaactaagtgacaataataataataatcacaagagtcaacatgtaaagcaaagacaggcaatggtaacagataagcagtccataccattcaccatttgaaagaaaagtcatcccttgaggggatgcaaatgtaaccgtttctccaacaactgcaaatgtaaaaattatatattaatcaagttgacaaaaaaaaaagtggtgtacttcacatcatttcctcttttaatctatacattatctcttctctcaactttctttgttttcattattgggagtgagttcacttaatagtatttactcacctataatcaccgtgattataaaatcaaagcgattctgaccatctctccaatagttctcaaatccatatgcatagactttcaaaatcatttccaagacatatatccatcctgtaaaagaaatcaaagctttaatacaaacagcaagatagcacaaatatcattcaagtaatctgacaaaacaaacaaaggagataagaatgtttgtagtgataaaatgtactttcagcttggactgaaaataaactttaaccaaagcaaggctaaaataaaatgtaggcacaagctgtaataagaaaggagcatcatttaaacgacaaaaagctccgagtcccatttctagagtatcgattactgaagttctgtaagaataagtgcagaaaacccttaccaaaaacaaactccagtccttgccagaacgtctgagctgaactatctgttatatcaagctgcaaaacccagacagatttcaaaactaacatgtttgtgaccattcccataacaaaacaaaacaattaaaacaattacacatggagccagctattaatcatctctatacaattcaaatccttgtctaacaaggtggctgagccctcccatggtaagaaaacaaagtaattaaggagattgttttatttattacaaaagcagtaggttaataattaaatgcctaaaaaggtgtgtttataatcttaaaatataaaaatccaaatatgcattttcttctttaaattatcaataggaaaaaaacaaggaaagatggaagacccgaaacaacatctcacccaaaacaaatgatgcaaagcatctggaactatctccaggactccacttctaaaggaatataatattcaagttccctctttcactttatataaatagatatgtatatatataatcatacttccaagaccgagtaactatgcaaaaagaagtctacaaaaatgaactcatagccacgaagggaaaaaaatgtctaaaaggtaaatattagtaagattaagattaaattttcttgaaatatcagcttcgaaaaagttcacaaaataactcccacatccgcaaaaatagtataacttcgaaagatattagagggtgattgcaacatattatagaacaaagatcaacttaatgaaatcagatatctcttaatgatgtagagagctgtaactttaaattttatcagaagtgaggaccttaccgttgtttcaatgatgacagcagcaagattaataatgagaattgaggatactatgtatccaaacatggggctacgaataaatttcttcaacttttcagataagtctgaatgatagaaatatgagcagtactcaaagcaggatggctgcaacaagaacacattgtcagtcagcagtttaaaagttcttcattattcaagattctgcagattataagaaacttccatatatagaaaataaaattttcgcttacagtatcctctttctgaaacttcagggcaatggcattgcaaagatcagtaaattcatccaagttgatctgcattcagtgatagtatcaatcaaataagaagcccaataaaaaaatgagatttttcatatatgggtgatgctaaattttcagatgcaatttatccacgcaaattgccaaacatgtacaatatagaggacatccctttaaggagcactaatgacaataatttaaggcaaaaatacaagttgactcattccaattccatccggagatccaactcctataaacaatgtgaaatacatatactgctcggctcttcaacccagaattattcagggaccaatgtacccctatttttcacacggaaagtggcactaggataagaaagaaaatgttaggccttaggataaataaaaagggtatatgggtcattgtaatgggggtattgagatagtatacataggagagtattatttagaagggttttcggtagagaattatttggtgaaagtgagcattaggtcttgggaaagagttgggtctctcgaatacccagcaaacttgttctctagctattattatccataattgctactgtttggctctattttgctactgtttataccagaatgtttggaaattcctatcagaaaacttacctttaaacaaattttccatgtatccaaattaatctattagtaaggatgaaccgtgttagaccagacacttaacaaagaagcacagcatgccattagtcagagttggatctattaaagcattttgaaaagataagctgattttatcatcacaaatgtacctcaagcaaaaacaaataggtaacatgcatgttcatcaaattggttatacgagaaaccaagtgacataatgaatttaattacacatccaaataacaagggaaaatattgggaggacattaaattagttagaggaaaagaagaagaaaatgtgtagacaagtcaaactagtggtgtggaatcaatcatatccgttgccataccttaaaatctcgactatcatctagctcatcaaatatcatttcaaattcttctctgcttatatttggcaaagtcctattaaaatacagacagtatcatatcagcattaacaaaatcaagttacataacagcagtacgatagataattcaaatgcaacggcttagtaaatgtgatcttttactctgccaatgttatatacaaagttataagagaacaaagattatacatacaccttcttaacaacatcaaagtacttaacagaaggaagtgacccattggtctaatagtgttcaaatcatagccgataacatcttatataatgtttacattatcagagcagccagagagccacattgtataggagaaaaatgtgaaacataaaattctaaattaaccgcgactcagtttgtcacctaactattgattttatgattcacaccccaaaagtactacaatgtacctgtacttgttcagttccttgaacaggttaatgcattcatcctggttaataaatccagccttctgtcgagcaaacaaaatgaagaacaatttgtgtcatgcaaaactactggaaagattagcagaaatgcatcttatattacaagtgaatttaaactcaagtagaaaagaagcacaattgaaagataaaactaaatgtacagttttacatacagctaaatagtacaagactgatcagtgatttcaggtagtaaaatttctaataaatgaactaagaaacaacaacgattattcgtggtttgtaggaagaccatggattctccaagcattaaatgcatatgagcacaaaaatgtgcctcttttggtcgaaacatgtgttttcacaatactgtaattattttacatggtttcttttaaacgtttccttccccaaggttgctctccatgctcactaagcaagcaagaaactattatggtttccatcatttagcctaattacataagtcactctaatcattataaaagcttaaagccgcatcttcattggcatctgccagctaacaacaagtgatccattagtaaaatatcatgattactaaacaacaagagactaaatgaccatcatctagtaaatatggaaacttggaaaggaagggaagagaaaaaaactaaagccgcgtataagaatacatatcaaacagacaaagcaagttcgctagttagtgacactttacttacatgcttatctaataaattaaaggctttttctagtgtacgcttcctcatttggtccatctcagaaacttgtgttgcaagctacaaaataaagaaaatgagtaattatatgcatccaatttctcaagtagtaaacacttattgctactaaagaatctactgaatcaagagttgttttactatcgacacataagataaacatctaaaacatacctgacccttaaaactgtcgtatacaacagcaagaatcaagttggtgacaaagtacaccccaatcagcacatagaggacgaaaaacaaactataccaacgtgaagcccttaagaaaaaaagaaaaaaagattaaaaagaagaagagataataatccactatattatacactcacatatgattattcaaacatctaatacgaatgatgtaaaagaaacagctaattattctaatggaaatgtccatagacacacaatgcagatcaatagagccagagaaacataataattatcaaaattgtgttgagaaccatagatagcctagaaaacacataaatagctgctagtctgtaagaaaaaaactctgattaaattattgaccaagtgtcttacaagatttaagtctttggcaactaaagcaagtcatgctagcccacatattctagaaataagtaatcatagttgtgttagtttagtacggtctaggtggcattatgtatgtatttgattagctattagggagctgaattgtaagtagtttgttgctaggttgtgcgtagccaaaggagagtagttaggagcgggcagaatgttgggtataaataaatctcagtagccccatttgagggcatctgattatttgtgtattttggaaagtaaaacgctttttgggagatctccaagtgtctcgaaaatttggaaaagtgtaattatgtctgtgacgtcaatgaagattattctctagatttcatatttggtctgggtctctcaagtcattctatggtacttggttgtgttgcaacattttattataatttacatagacactacaaattgaagaacacaaaaagatgatagaacccatctagaaagttggatttaagaatatacaaaaatgccatcaaatctagctttaaacctgcaatgtcctgcttaaatataagattaagttaaacataaggaaatattaaatgcttgcgcaataagaggaaaacgtaattgtgtggtacagaccaatcattcttcaataagtgatacagatagcatttgaaaaagaaaattagtcagctagaataagtgttttgttttaagttggcatcatcccatccatcctattacatctagtgcatgtgattcctacttattttggggggtataagccctcaaaaatgttagtactacctagtaagtgatatgtcacggttaaataataatttttgaaacccaacatgaatgaatcatactaattcctatttcaagtttgtactcacttgtaagcaggaatccagacatctggattattggatgtagtgaatagaacaaacatttgatacaatgttgtaccataggaagtaaatactatttgcccctgttcagtatcctcaaacatgacataggctacccaactagcaaacagaagaaagagaagccatagagcctgcaattgaagagcgtaaacagcaatagccacaagaggatcattattaatgtaaaagaagaaggaagtccaaacgccaaatagaagcaaatatttattttttgctctcttacataaaaaacaagggatcacagttaaatattaacaaataatgaggaaaaacagcaggataaaagaagcatgacaaaccaagacgtttaagtatgtgccaagcattccagccaggacgatgatactcgatcttagttccctatcaacaaaatttttatagaaaaaaaaaagttaaaaacatatatatttttaaaattgcacaactataaaaagaggagaattagcaagtacagaaatgaacttaaataagaaaagatcgtgtcatgcctgcattctcacacattctcacattagcaacatcactgatatgaggagaaaggaagcattctacaatttcaaacttaatatgcccatgtcatgattggatgactgctaagaatttaatacagacaatttataacctctaatcatattcttagagtgccttccttgttaaggaggaagcaatgaacagctgaggacaaggatagtttatgacaaaaacagaaactctgcaatttataaatgcagctacatgctaccatgcatgtacaatcaaaactaaataagagattcagtcaagtatatacatatatcacaagtttacatttagatgctaccaagcttaggtaatgatacatatatcacaagtttacatttagatgattagttccatgtgatccgaggatatgttttcgtagcttaggaaaggccaccttaacttacagtgatatagcatgcaaaaagactaccaataaattaatacaaacccaaaacacacgcataaaaacagattttttagattactacaactgattgaatgacccaatccatcaagtttcaattgtctttctcaaaacttagcctctcagctcagattgatataagaaattactgtacatagctagacaagatggttttataatagaagaacgaatgccacctttaattcaagctaagctcaaaaacctttagttcaatgtgaagattcttgcgcttcccaaatttaatttttatatattcgtgtattatgtgcaaaaacatgaatgggaaaggggacactttatacacaatacctgatgttcaagacaaaaaatataactcttatatatggtgcaatccttaaaggaagagaagtaacacccactggtgacaaatatagagcataaaccagcaaatcagcagctaaaattagtaggcatatgacctgaaagaaagaaaaaaatatcataagattttatgtcctgagattaataaacattaataaatcatttcttttgatttccatctttctgtttattcttccttctttcctgatctaagaagacgtagttcaattcaattgtcttatatgtattataaacctcaaatttcctgtcaactaatgattttgcaattgttagtaaaaagttgcaagcatcacatcaacattctgtccccaataataaataggaaaatgatgttattttgcatttggagtttattggcctttcattttttttaaaaaactcctgatacttgatctacaagaataactaaaacattaagtcaaataccttaaaataattcagaggacgtttccagtgaaacccttcatatgatatgggaaagaaaatatgtaccacaagtatagcaagagttatgccctgtgggaaaaggaaaacaaaatcactggacaaattaaaacatacaccattaatattcagctatactggaataggtactaatctggtgcaacaatttcaaattttctacatattgtaatacatctgaagtacattatcttacctcataaataagtgattccaaattagacaaataaggaagctgcccaagaaagaagtaatccctgtcactgcaagcattactcttgtaacaccacaaaggtttctgtacatagttaagcaactaattagcatcaaccaaaccttctcaataccaatgttaaacttaccagaagcatattaaaagaatgaaaaactatacaaacctctaagaaatttaagattaagagtgcaaaataattgagggtccaaatgaaatccagccgaacgaaaaagaaatagagctttgcagcactttgaaagttagattgatcaagtacttcctccggtaaaccaataccatcttcagcctgcagaatgaatgaatatacaactaattaggatatcaaatcatttcattgaatttccaattatagtaaaagaacttatactgctacagtacaattaattcaaagaaattgtgaaagatatgtacattaattcaaactatatataattgttgtaacaaccttccgtacattcttcctttttgttagacaacttatagccaaaaaaaagagtgagcgagagagtaattcaaacatccagaaaaacatttctaaatcaattaaagaaatgcaaaacaaaaactaacaaaataacttccaaaggtcagtgatctctcctcctccaaaagtcgtaagccaaaaagaaaaaaagaaaaaaaaaaaaacacaagctcaaactgtcttatcttattgttttacttt

SEQ ID NO: 108 - DNA, 2467 bp, Cannabis sativa
agccaatcgacctttcgccttgtgttaacaaagataacactctgggtgattgccaatgtttcgtaaagatcacaaagtgtctcgagcttccactcctctttctccacgttgacgtgaaattgtttgataccctcgagggtgagctcatcacgtttcaccaagattctcacaggtttgttcatgaacttcctggtgatctcaagagcctcaggtggcattgtagcagagaacacaccgacctgaatctttggcggtagcaattgaaaaatgtcataaatctgcaaacacaaagcaaagttgtcaacacgagcaatagcatgtaaactaaactaaacactacttaagtggtaatcacaaaacaatgttcagatcattaaaaacctgatccttgaaacccctagaaagcatttcatcagcttcatccaaaacaaacattttgatgttatcaggacgcagggattgtctccgaagcatgtcaaacacacgaccaggggtaccaacaacaacatgcactccactggaaagaatacgttgatcttcacggacactggtaccaccaacacatgcatgaaccttcacaccgagataatcaccaagagccctcataaccttctcgatctgttgggcaagttctcgagtgggtgcaagaaccaaagcctggcaatcaagtaagccatagtcaagctgctgcagaattccagagcagaaagtagcagtctttccagttccagactgtgcttgttgaatcacatcaagtcctttacaaaaggggacaatccctctctgctgaattgcagatggcttctcaaaacctgcaagtaacaattattacacttaaaaactataaaatattaagtaatttgacattaaatggcatggaattttgctttaagtaaagcttaacacctatatggtaatagaggtttacacaaactcatagatacaaaatcattcaatgattacaatcagacacattatcattaaactcccccctcaaaaaatcaaagtaactatttgtaaaattccaaaatagatataaacataacaaaataaagtaatgcataccatatgcataaatgcctcttagaagattttcttgcaaacccatatcatcaaaactttcatgaacctcatcatatgatgtaaagaaatcttttccatcactttccagtctgctctcatcagaaaacaaaacatgagtatcaacatcagttctaccgaatttcggttataacgttgtatcgaatagaacacaaatttcggttttaacattgccaagaatagaatcaaaaatagagcaacaaggaaagaaatagactcacaattcactcatcttggaatcatactgacgagcatcaaattgagagccttctggtgctaaacctgccatgactgcaaaatcacataatccatgttaaattcaatactaaaactcaccaaaaactcaattcatcccagtatatatatacattatatacaaaagaaataatctatacaaacatgaactcttaaatactgagcatagtgataaatccaaacataaacacaagctttttctttttctcatcaaaaaaagaagtgaactttttctagaactatttaactatcaaaatacctaataatatttacacgaattcttctaatcaaacttctattaagtaaatatccaacgaactcattattaacaaggcatgaactttacatacattcgacccaaacccaaatccaaatcaaaacacccaaaagagaaaaacaacaaactactaactttccagatcaaaaccaaatcttcctacctagggttttttgaacatgaaaaaaaagcaaataaaccctagatttacaatagatcaagccctaatactgaaatttgagctgaaaatagcgtaagctttacgaattagaagcaaaacagtaaagagagagtgagataagagaattagggcattacctgataaagtggtaaaggaggaagaagaagatatcgttagttttggggtttagggtttttatgtgcctttctttcacttctttcttttttcttaaataccatgccttttataagcaactcaaaataataaaaaaataaactaaaattaatttataatatcttttttttataaaaatcattcgttcattatgcaaaattttcaaactttattgatatttttaaatattttttcaaaatgatgtatatatattttaataagattatatgttttttcaaaaagaaaaaaaagattatatgtattttattttaattttttcttacgtaaaaataattattttatatatgtattttttttaaaaaaagttaattttaaaaaatagtataaaataagataaactatataaaaaaatttggagtacaaataaatttttttttacgtaaatatcaatcattttttttaaaaaagatattaattaaattaaccattgaggaccattacacaacattcttattttt

SEQ ID NO: 109 - DNA, 2491 bp, Cannabis sativa
ttagctaactggacagcattgcttataatgatagtagatttctttctttgagcaaagacatcttagatggtattggtgtgcactttttttattgcattgtatgtgaatatgtgtgaatatgttgtgttttctcttaccatttttatatgtatgctattcttttttttttttttttgagttaaatttaacttagtatcttgatcgcactaacatttgaataattcgttatagcattcatgtttcatgagatacatgatctataaaacatatatatatattttcctttctcaattagaatgaaaagtatattataagtgataggagtgtagatttgcttggtctattgtgttttaactgtagtataattgtttattatgctttgaagatttgagtttgtttctagattttctttataaatcttgtttacaaatgaaagaaaaatttcaatatctactaaactagcatttgatcaataaaatttaaaaacacgcacacatagactcagcggtggctacaatctactctggcagagctcagagatatccactgagtatctagagattcaatacagcttattgatttctaatagtagttttgtatttggcacttaatcagcaagccaataaaacaatcccactcccaagccttctctaagaaaaaaagaacagtaaatttagttttgtatagtccaacttcccttttcccttagtcgatttgagatctgttattgaccgagctttaggtatcgcactgactagcacaagttgtctgcatagttagttaggaaggacatacttataattgctttaacttggggagtgggtgttatttagaatccaatcagagtgagattcctctgctgctgttggagtttgaaaagaggtagggagagaaactccactgacccttacaaaaagcctaagcagtgtaaaatggttaggcagtggcattgcttagagccttgaagctagtactacatactggaacaggagtaagagtttgatttgaagaagaaaaagaaaaggtgaaaaagaaaaaaagacaacaaactggaagaaaggctttgccttccctttgccttttatgacttgcctttgtctatcacttcctctagaggaagatgaagaaggtgttgttctgtgtgcttgaagaagcacatgtggagattatcttcttcttctttttcctgcacatcatgtctgtgagatggttgatgataggttatcacaaaataaaggttttgagttttgaatattaaacctaagattggaaagagtagtgatgagagtttttctattgttcccagtatttatggactccctagaggggtgactagtggcactctatttgatttaaaaattgtaatgaagaaaaaagaatgaataaaggacaaatagaacagatcagcccaagaggatcaatttttttcttaaaaaaaattacaataatggtccccccataccagcattattctccttattgggtaaatgcttctctaccactatgaatataatattcctatactttgtcatatattaggacattagtatactcaattaagagatagagaaagtgtatgcttagtcattccatgtgtggaaaagcatggaaatcagagaataaaatgaatgaggtaggaagatgatgagttaacatgtggagggctccttctccaaagagtagaatttatttattaagcaaatgaatgaggaaaaaagtcaagtaaaaagcagtctaatgaagttgtcttaggagagaatatgggaagaaagatttgggttttttttttttttttttttgctttataggccacaaccaatatgcaccgtccacttcttccctcggtacagatgcttgtgagaatctttataaaccccactaatctcccttatccactttagtgggagacctaagctaattgtggatagactgtacatccaaccaagaattattagctaaaagtagagtttatatattggaaaaacttgctattaagcgataggaacaaattgactttcagtgtaatcgagttgtgttgtacttgtctttcctcttttatgtgtgttttcttaagtttttacttgttttctttgattaaagataaataggtggcgctcactccatgcatgcttgcagactcatgaacccatttgggttttgagcgtatgtaaattctatttaatatttgtattggcgacacgaaatcacttggcaaatctttttgtcttgttcttcaatccttgtttgaatatcgttttccataggagaaaaagccaaaaagaaaaggacaaagttatgtgatctctatacgacaattgggttgatttagatggattctgagctctttgagtggacaaaagtaaagtttgttttcaatattagaaattgggatgcttatgcttacgaccctacatcccaagtcttactcccttttgctatttgtatgtgactgactcgtcactagagatgtgtaaaaaacagtctcctaatc

SEQ ID NO: 110 - DNA, 5013 bp, Cannabis sativa
aaaaaaaaaaaaaagcattacaggacataatccatttcgtgaaagagtgaggttgatggtcttcattctgggctagccatgataaagaattagactggtcatatagatatgcgcaatccaccaccagtgacaaccgctacttcatatgttgaacatcaaatataagctgaaatctttcatacatacacgaatacatttcttatgctaccacaaaggcgctagatgctcccttgaaatggcgaattgatccgaaaaggctttttgaagcaccaaagtgtttaattctgtacacaccaggagttgcagatttgggaattctccattccattgttgcctgacttcgggtactaagcttgaatggtctagaccacttgaacctcaggcaaaaatcatcatcatcataagcagggacccaagtatcctttcctcgaagaaactctacaagtgcaaatgtgccttccgtcataaggtcattccgagggcaagctgaccagaagaccactttcaccaggtcacctctcttgaaggtagcattctgaggaacatcagtactgacatccccaaaattaactccaggaggcgtggcgtccatcacaactggtgtcagtaagctaatttgcttattgagaagatctggaggctgtggccctggttccacttctttattggcgacgagtgcacttgccagcttcttgaattcctgaatgtaggcgcttaacgtgtgtggtccatacaaagtggaggcaccctggagagtaacaaaaatcaatagaagtagaatgagaacagtactatgtagtatgtagtttccaaaacataaggttactatgatcagttaacacctctttatctattttgtaattgtatcatgtgtatttgcatgttctttatcaagagaaaacaagaaaaatattgaaactagagtcattaaaagcagcaagatgtatattgttttactaaacatgcttagtgatctgccagatattcatccattttcctatttcttactcccaaaaaatttagacatccattagcaagaactgacctcatatctctgcacctcgtactcttcaaaagtagtgacatactgagaatatgtattcgtcaatcctgctataacaacatgaatctccccattattaccagcactgagaacagtcttcacagcatcacgaaggcgcctaccagccatggttgtaaattctgtgtgaaattggaggagaaaaataaatatcagaaaaggtacagcctaaagaaacagatccagatagagagatttatatgtttctaaaaggaaagttaaatttctaccagccaaataatacaaatgactccatttggtcctactagtgaaagtgaagctaggaccaaacttaaaacattataaaaaaagaccaggaaaagcaaaacaagcaacaacctccaggtacactgagaatggctagctgccctatgcgcaggatctggattggaagtatagaaggctgaaaaagaaaaaagagcaaacatgattttcttgagttggagcatcaatctgttaggaaaaaataatagcaatcctcactataacatatatgcattaatacaagaaacagatataaaatgtaatttgagaatataatcaatttaaagtagctttagccttgaagtggtttttgttgcagtctatcttcaaaggctttgatacattctaagcagactatgccttaaaaatacagctagtacgccttaaaagccctgttgtcatttaaggacagatggagctaccaggagctatggggataattaagatatctataaacaaaataactagagagtacgtacagtttcctactgtatatcttagctgcaatgaatctcacttgtgcgtatcttctctatataaaacttacagaataatggagttagaaactaaaataattattatcttcaataacggttaaccatgatttacagctatgctattgactcgcaattaacaacagcaagttctaaatagtttgatcgtggaattaaaatcatcaaacccatcttaaagattctttccctcctcttgacatcattttaaaagaaatatatccaaacaagtgtaaaacctaccgcccagtcatatggttctttcatttcaccagtatcaagcaagattggctttggatgttgacaatcaacttgttctttgcctggtgtttttagtaaattccgcaccaacttccaaaatggatttccctgatataagatcattaagaattataccagcacagaacagtcaggaatatatagtatgacagcgtagggaaatgtatagcctaaaatgtcttcattcacaaattacctgatcatcaccttgcttaaaatcgaaagctccaggtccatcagttgttccagcagcaaagccaaaccccattgcagctgggcatgttttaaccacctcataacctccttgtttggggatctttacttctaatttggagaagtctatgtaagcgtggcgataatcaatcttgcttttcagtgtttcagatgctttgttgaatagatctacagcggttttgaactgcctctcaccaataatacgtgtactctcaaattcgtctgggtaactgacaacatcaagaatgaggggcaattattgagatataagatatgaaagtgctacataccaaaaattcatcgcatggagataaataaataccctggtcctcttccatagcataattcattcttcccaccacaggtactatgattgaagtcacaaggtaagccactgtctatacagaaggccccaagaacatttggactaacatcaccacagttggattggcaaaaggcagatacaaatgcaggcttgttagcctgcctgagaacacccctgactcgtcttgcaacacttaaagtcctggtagctggtttaccagaaggagactggaaggatgcagcaagctccagtaactcatggtctgcatcagacagatctcaaataattatccaaagatatgtcatatttggataaaatcttgccccacttttccaaaaattaaaaactgagaactaaaaaattaaaaaaataaataaataaaatgaacaggaccatacatcataaaccctttaagataataaactccaagtaaatgagaatgcaagactcacgttcagagtgtcctgaaactatgttagagactcttcgaggaattccttcggaagcaaattcatcagaaactccacgttgctcaaaccaatcttccataaatcgtgcagcagcacccttgttatccccactgattaatggatttgtacgactcatagaagtcccatgagtggcaaaccaattgaagctacccactggaccccactgatcatcaacaaactttaaaagggtcatctctttgtcaacatcatacttgtatttactgcgttctgctgcaggattattaagataggcactaggactgcgatttacaccagcatctaggatctctcctgcaagttaaggttaaaattaatataagaatatttattgtcataaatttatcttattaagtaaaagctttagaatcttctctccttacccttgtttacaaaaattgatcctggactgagattgtcatgagcctctataatgcttttctcaataccatcgacaaggacatcaaatgattgacgcacaaatccaagggaagttacaatatatacaacgtattggagatagcccccaggcccagcatgggtgtgaattccactgatagctacatttttttcgttgtataaatcaccatatctgccaagtaacatataagaatttagtttggttatttttaaaacaaaagaatctagttgaacctcttgttccctataaacaagtccttattacaaaaatgctacagggcttatggggcattggaaaattttccctttttatgcatactaaagttacaagaatttcggtccatcaaatcatattagtctcaaaattttgcaaaacttatattcttttttgaaaaaaaaaacattgtgtacctacggatgcagagtaatatctaaagaattattataatgattaccttgcttttagcctctcaagcacttttattgtcacaagctgtgaggccatacaagcatcaagattaacaaacaccacccgtttcccttgaggctctgcaacaataaatgtgcgagctcgaagccttaggtgaacaccagctgcaatctggcctgtgttagcataacccatcatattgacatcggcagctggtcccgtaatgtcatagcttccaagaccaatcaaatatttggaattcccccctttactgctatgtaacaacaagaaaattgcaatccaaaaccagctaccaacgcatgctctcaaaatattgaaatgaacacgagaaaacaactccatcgtagcaccaccaaattcagagtcttacagcataatcaatcactcacactccctgaaaactcacacagacaccaaatcaacatagctaaagcaaaatcagcattgaaattcaaataatctattctgccataattccacacccaaatacacaaaaataacttcgtactgtttgaatttgtaaacaacacaatgattctagcaatgatacttattttggtgagggattgaggtttcaacttaaaaccaattgatacattcttgggactatttccaaacatccaacaaaacagttaaaagtcgctgaacgagagaaaaaacccctaaaaatgatgaagcaggccaaacatttattggtgagaagttttagtaccttgtatttcagaatcgacggagctgcggttccattaaagtgccattgatcgaagaagtccttgtagtttaaagcattttcagccttagtgagcagaggtatagagagaaaaagatgattattgttgattttataaaggagagcacctacgcttcaaaaatggagtcaaaggaaagacaagtatacccgatagctgagaaggaaagacactgtggcggtttatggttttatttgattttctttttta

SEQ ID NO: 111 - DNA, 3448 bp, Cannabis sativa
gtcgggtcggagcgtacgagacgcggtgggcgggtgggcagtgcgcgaaggtagtggcggagaggatcgagaagggagaaatggaggcaattgtgtttacgagcacggcggaggtcgagggtttattgaagagcttggaggagtttggtttggactggagagaagtaaagaggaaatgtccgacattggtggcggcggctcacggacctgtcacggcggccggcgccaagaggcttggtgttgacattgacttgattggtgctaagtttgagagctttgatggtgttgttaaagctcttcgcttgagattgcttggttcagcccattaaaacatgtgaaattcttatgttgatgtgtatgagaatgatttgttttcttgtttaccaaacctaagattgaattttgtttggagttggattagattttcagctttcatagctgtattttcttgtttgtttcccgggaaaagatgtacaatgtaattgagtttgagttttgaccttaaaaatagaaagaaagcaacaatattatgaccaagcaacttcttttcttttgaattttcctctacattcatgaaatcttacacaaacttatatatgacaccaaatacaatatacagtacaccataatagatagcaacaaataatcaaatatggtagaaacaagccctaaatcaactcttaactaccaaacaacaattctttataagttaaaactatatataattatatattgtgtatgttaatagtaattttatgcagtaattaaatatgagctaaaatttgaaccccagttgcttctgaactctgaaacttccctgtttttacttactttgtgggttcaatcctgataaaagcttcagtacttcttccatggaaggtctatcatttggagaacttgtacagagcaaagcaacttcaagaacaagtttaatttcctcttctattgaactgtttgaatcaacttcattctccttcaaaacctctgtcagtacaacttccataggcttgttcttcatgctggttcctgcattgtttttcatctttgtccaattgctgtttgataaaatttccagtagaatctctccaaagttgtagatatccatggtaagcttttcttttatgttcccactgaattcacctatagccaaaaaaaaaagaaaaaaatgtaccatcttagcttttaggcaaaaacatactagcatatataatattggcatgcatgcatgcatgcatacatacatacctgtttctctttttgaaaatgaatctttgtttagctctagcaggtaattgattccgaattcggccaaatggggttccatattttcgtcgaaaaatatgttatttgatgtcaaatctccatgaggaatagctggagagcaatcatggtgaaggaagcataaacctctagcaatgccagtcacagttctgtactttgttccccagtccttcatttcaattctctcatcagccaaacttccattgggcaagtagtcgtacaagaggtaagccatatggttgttgtagcaaactccaagcaatctagtcagattcttatgccttgcattccctatttggttaataaactccaacatcttcttcattctctttgcctcccactcaatctttttgactgtaacagttattcctgttggaagaactgctttgcatactgagctaggtactgaaggcacagcatccatggattctgctgagctaaagctcctcaaaacatctttagctgtgaactgaggcagcccactgtaggatatcatcttccactgccctctactacctctacgaaggtaaagtattgctactattgatagtgttgtgagcataactactccaatgcagagtaacacaacccataagagttttccactgtgtttgcttccgaacatcgccattgagcgagaacatgattgaagaggtgatccacatagctttggattgccagtgaatgcacttttgcccattgttctaaatatttcctttgagggaatcgaaccggagatgtcgttgaaagatacattcagaagttgtaaggttgaagaatgactgaacttggttggtattggtccagtgaaactgttttgtgagagatcaatggcagcaagagcaggtagactagctagctcatcaggtatatgacctgacaaattattgtttgctaaagcaattgtctcaagtgaatggcaattggaaatagttactggtactgctcctgataacttgttcatgttcaattcaataacaatgaaagagtcgcagctttggaatggaggcagattaccagaaataccacatgaagaagctgaaaagttttgaagaattggcaaggtccatgttttggaaggaatggttccacctaagtctgaattataagagatgttgaagtattgaagtttgatagcttgggataaatcttttggaatcccaccactaaacttgttgctggataaatcaacatatgtgagctcagaaagatggttaaatttcaatgggatctcacctgagaaagagttatcttcaagccttatacgaacaagtgaagaacaattggagagagatggtgaaagagcaccagtgaaattattggaaaacagtatcagcttataaagctctcctcttgcacagatatctggtggaatagtgcccatgaaattgtttgtggagacatctacccatttgagttttgagttctttcctaagctttgtggaagttccccatggaagaaattgttccatataagaagtgtctcaagtgatggaagctctgcaatactttcaggaacagcaccactcatggagttgtacatcagactgagcagtttaagatttttcaactctgagaagctctcagggatggagccagtaatatgattatcagaaagatccaagcttgaaagaggtaaaattctgcccaactcccatggtatatctccagtgagctgattcctgaacagaaagagtgattctagcttggtgagattgctgagctcctttggtattgaaccagagaggtttgcaccagcaatatcaagatactgaagctcactcatgttgcccaaatgccatggtatacttccctgataagaattgtaaccaatctccatgtgggttactgttttgagcttccccagttctggtggtatgcttccactgagaaaattccctgcaaggtggagaaactcaaggtttttgaatgagccatattcaggtgggattggtcccctgaaatagctaccagcaaaatttaaagtctggagtttttcaagctgggaaacatcagcaggtaatgaccctgaaaagctgttactaaaagcatctagaacaaccaaattctgtagaccagagattccaggaggaaagtgcccagaaaagttgttcctgctaatatccaaacttttaagactggtcaggttgaaaagtcccaaagggag

SEQ ID NO: 112 - DNA, 7498 bp, Cannabis sativa
aaaaaaaaaaaacttaaaaaacaagaactacacgatggttatgaaattggtgtactcaaattagaaatgggctttttttattaatttaatcaataaaaagaaaatttctctgaacaataataataataaaaaaaaaaaaagaccaaattcaaattgccatataatagctcattcaatactctgcatatatcccatgtacgatacatcgaaattgaatgccagacattactttgcgaaaactctgtgcactgcttcaaagttaaaacgttaacaactaatgtatggtctccagtccaatccgtgcacctctttttttattattattattcaatttttttattcttttgcaagatctctcacgtgataaaataaataaaagaaaaggctagctccatatgagttaaactgttctcgcactgatcaccaactccaatacagatccacatccataaacattattccaacaatctcaactgacattggtaaagttcctcttcttctcaaccaacacaagactgagggggcttataaattctaacacctactcttcccaggttattgtctccaaaagacatggtaaaaagaccacttatttacattaaattttggaatcaggtgctatcaattttcacagaatatatttacgctaggaatatatatgaaaacagaaaattgtgaagcctttcatttactaaaatattctgtttcttttcaatctatagagagtggaagagggattagaaaaagaaaatcatcactaccttgacttccacacaagttttgtgcagctctttgttaaggtgagactcagataactaagtgacatgggcagatcatttgattgagaaatatctccattgcacgacctaaaactactgccaggatccagccccactggcaattgcacgggcctcggccagagaaagagccattgccagcatcatctgctcctcaaaactttcaggaacaatgggttcgggaacatttagaaggttttcctccatttgatctggtggtggtggtgcagatatagtgccggcatcttctgttgcgtcagagcttgcatagcttgttcctgcttcagccacctcagatgcatggtcaacattccaatctctgtcatcccttgtcaaaaccatcccatcattggaagatacatcagcggagctcactgctggcggataattcaaggcctctctacctaccctgctgtagaacctgctagcgcttggaaccatgctgaatgttgactcattaccttctggatgacttgaggactctccactcatttgctggcgctctgcaagagcagctatggcacaggcaagaccaccagatggtgatgaagatgatgatccagaaactgtagccatggctggtgagacatatcggtcttctgtgacataccgtccagaagaagcaacatcaccataacttggtgttttatttttaccagtgtcctgcaaatattattcatgtgcagcacaagggaattaatatcttaaacgttataccaacacaatatcaacagcctgaaaatgaaaagaaaccgtaagtttcagtctttcacggattagaacttccacctgaatggaaagccaaatcgcttcaatgaccattaaatcttcaagatccaggtcaaattcctcctccctgcaaattcaggattcaaaagtgacaaaaataaggacaaatgacgccatcaacaagtcattatggaccatctggaacagaagttgtacaaattgcagaaaatatccagacacaaacaagtgttacattatgtatttacatataaaatggcatatcaggttctctatgatgccaatttcatttttaacattgcactatcttaaacaggacagcaacattctggaatgtgacagactactacttaacaatgaaagaaaaaacaagtaaaaggcatctcaaaatcacgtacctatgaacccttgatggcaacggtggtctacacattgatgcagcgcacgagtcttgggaagaatcaatttcatctccttcaacagcagatgtagaagacgtcactgtcaatatagaacaaacaaatttttagcacatctgacaaatatgtaggatttgaaaacacaaagatgatagtcttaggaaaaaggtaccatttactgagttgtactcaacatcctcttgtgccacatttcggcttagaggatccaattcttgccttttctgcattctttcttcctcatcctgaagttcttgctgacgaatcctaatcttagcttctatcactcgctgttcttcctgcattaatttcagaagatttgaattacattatacaaatcagtaaagcaatctcacaattcaaacaaacaagagtatcagattatgacaaagtacttcttacaatttgctcaagacccttctcttcctttgttttcactcccctgtattccactgcataatttgacgttttgcaaaagggacatcttataaagttaagcgggacaaatatatagagaccaagcgaagtaaggagggaaatatcaaccaatctgtcgcttttaaaattaaacctttgaaatacatgtttttctttaaaataaaacaagaaccctgtccataataaacatcagttaaattactcttttttcccctcttttttgaatatatgtgctaaattatttgatttcaaaagagaagggagtaagaagttcctgcaatagtaaaaccccaaaccagcactaaaaacaaaataaaaaagtttgactagtctaacaagtcccaaatcctcaataaatcagaaaaggcaaagtttttgaactcctttaacactctaagccaaagggccatccaaaatttaatcctcatttatttattctattcagatatccccttccgaagatgctaactcttactaagtaaattactttatttttctcagccaaagggccatccaaaattttaaccctcatttatttattaatttaattcagatatcccccttcaaagatgctaactctttctaagtaaataatttaatttttctcaccccaaacggctcaaaaaaaagaaggcccaacccaactttttaccaattacaaacgaaagacacgcagctaaaaaagaaggatactgtgtaggacgagttgaattgggaaccttcatctgcagaaagcactctggggaaaagcacaaaaaagagaaaaaggaaaaatgaatcaaattattgcattaaacatcgatatgcacttctgtaaggtataatgtcaataacttataccagtgcaaattccttttgtgcaacatcttgatctgttgaggcttggataatactaacacaagaggaaaaggaataaatagattgttagaggctatatatataaggttcaaatggcaacaacaacaaattgaaaaatacatttgaattgaaccgcacagctaaaggataaaataagtattgttttagtcctttggaaaaacggatggtaaagtagagtgtgtgagtattgtttttgttctttgggattaataagtattgtttttgttctttgggagaagggatggtaaagtggagagtgtgagcttcgacatgtgctaatggaacgaaaaaaagaaaataataagagggttgtaaaatagcaatcgtaccaggaagcaaattgggcattcctctagatcacaaaccaattcttcttcgccaggatagcagggagcaagcttagattcgagtatgagcttcctgagctttttatgatccacatctttatggtggtaaagaccctgaggctttgtgtatttctcatcaatcacttgtcttcttcttccaagcttattacccatcctatatgaccttactctttttcttcttcttcctttgttcttcaaattcgaaaatcaaattaacaacaacgaaaacagtacaacctaaatttcccccttaaatcaatctctataaatagcaatgcagttggatacactaaactaacaaacacacttgcacaatgttaaacaagcaacatcatatgatatattgacggagacactaaattttttagatagaaatcagacgatgccaaacaaggaagttccacttgatgtagacactaaattatgtccattgtctaacatatccgtgaattattacaaaagcaaatgttccatatattgttataacaggttatctaactaagacaatagaccattagtgtactcaaagacactagctttataaaaacagactagcaaatactacagctggaagaattcaggtgaaaaatatttatcttatcattttaaacatgcaacgaaaaaataaaacgtaaataaatggttcaatccattccactgttttgtttctcggtagaaagacgaaggaaaatcaaattgcaagcacgtcaaaatgacacgatgtgttcctgaaatttttaaatagaatctaggaaataaattagaccaactaccctattgtatgtgactctgtgttacaaacttacaactcacactcacgagaccccatgtcctgaagctcaattcgcaacaattcttaccaaacataagtggcagaactatgcacgcaggaatgaaattcaaactttcctacaaagaaaaaaagaaatcccaaattcaccaaagtgccgttccaggaaaaaccacatcaacaagaattgaggcaaatgaacataaagctggcagaaatgcgggggcttctatcaagaattcgcggaaatgaaaatcaaccatgatatacaaagtcaaaaaccctaatttccatggtaagacgagtaatggttcagaattagaaacaattggcagccaaagacaatgccgaaatcatcaaaaaccgaagcacaaaaaaagcgtcagtttgaacctaaaatctaaaattcaccatcaacactcgactccaacgaagaaaattcaatcatccaaaaacaaaggaaagtttacgtagaaacaaacaaagcatagtttattattgaactttctttatcttcttatcacaaacaattaaaatcgtagaaatggaatgaaacaaataaataaatagaaaaagtgaccagaagtcgaagacaaaccttataatatgatcttagaacgaacgaaagagagaaagagagtaggaaagtcagatggagggaatgaaagggagaagaaagaagaccataagagctctctccctgtggaagagagaaatgtagagagagagagaaagaggaaagagattgtgtctggttatataatgttttgtttatccttatgatattattactattattattatgtttttatttttgtctatttcggtctttcggacggaaacttttggaagagagaggggaaatcaaagaatggaaggaaggaaggaagggtggagtagagtagtagacgaggaaagaatatcatcaaagctgaaaggaggtgccgacccgacccccccgccccatctccctttcttttcccctcacgcgctcttttcacccgcattctctcaatcgcgctattcactattttgtttttctcaaacgctatattcattatattctttctttatataaaaaagaatgtcaatacttaatttaatttttaattatagttttttaaattttctaagtatttgatcatattatttatgtgttattttttattaacatattttaattaatttttaaaataaaaataaaaatgtaatgactttaactaattaaaaactatcatatggtaatttatttaaaacttaacaactaagtacctataaattttttaaaattataacttatatattattgcacttaaatatttatttataattaaaaattaaacttaaatatttatatcacaaattaatcaaaaaaatgaagaaaaaataactaccacaatttcgatctaatacaaatattttctaaaaagaccttgcaaaaattatctattccatcatgaaatattaagaacattgaagcctcttttagtacattgcattgtattgtgttgtgttggattgtattgtattaatattaatattatttaatacaataatatgtttagtattgacttatattaatagcttgtgtaaaattatattatatttactataaactcgatctcaaccctaaccccggtccgggaccgaatcggggtccaacgctaggtttgggtctgagtatgggtttggattgagtccgaggtctagggctgggtttgggtccgagtctgaggttcagagttgggtcgaggtctaaggctggctccagcttcagttggctcttagtctaagtctctgtctgaccccaagctcgggacgaggtccgagtcggggagtccaggtcttggattcgagttgggggtctggacccgggtctaggttcacgtcagggttcgaagtccaggggtcgagtccgagttggggtcggggttggggttcgggtccaggtccaggtcaaggtctgtgctccacggttaggtctgagcccgtgtctaagtccaggtcaggatttggggtcggggctgggttttggggctaagtttgggatcgcggtctccaaccctggactctttgtaaatattataatagaagctaatataatattatattatatctaaacgtagtattacttgttatttaatacaatataactcttacatggcctatcaaacgaaccctaagcaacaacataacacaatcaacttttttaaaaaaatattagttttgttactaatatttttgtaaaaacaaattaaaattaaaaattttgttgttttaaaatttacttctttatatatattattctaattattggcttataattttaactttaatacttttgtcaatgtgtaatttttataaatatatgcacgcatatgtgtttggggaaatattgatgggccaacaagagacctatagtgttaaatatatatatataggaaagatccaataaataaatataggtaaagcccatgaaaaactacgaagatcaagatcaaaagtcaagatataggaatatagttaagaaggtcaccccactagatgagtcaaagttatatttaggctaatttagattttctccctttaaactttgacatatactaaatcatgccttttgaatttttcaggtcgttaaaaattctccacgaactattgaaattgttggatttaaaaatttttatccaattttactaaacaaagtctgatgtggatgaaaatttaaggggtacaattttgtacttttaaaagatcgattggcacgatttagtaaatattaaagttcaaggggcaggatttagtatatggacaatcgtcatattagtaaattgaatgaaattggacagaagtctttaaatctaacaatttcaatagttcagggagattttttaacggcctgaaaaattcaagggtataatttagtacatgtcaaagttcaaggggaaaaaaattctaattagccttatatttaattcgaatcaatctgagataattcccatatcagatcacgctgaggaagactcatatctcaattagtcaatt

SEQ ID NO: 113 - DNA, 3452 bp, Cannabis sativa
agtgtataggtccataatttaacatctttaatgctccataatttattctgtcccaatttgttgcttcaattctaagcaactaccatctttatatctctatatgtcttaacatcgaaacttttataatacacacacacgcgttctaaattaaaaagttattatgaatacatatcaggttttgaactttgaatcagaattagtcaaacgtagactttttctgatttcattcttgatcattctcttgagattattagtttaaatatttcatcatttatttcacaagaataatattatacatagtttcgatcaatatggcagatttgtttcttggagcagcaataggaccaccctttcaaatattgttcgactgtttggtaaaagtcccaatagaaaaagctgtaatgttcaaaggcatgatcatcaagatcaagcaaaaagtccaagctatgaaccctttaatcaaccaaatagtagagtctaatatggctctggataggcaaaaatctgagatggaagagtttgtactcaaaatggtgaaagggaaggagttagttgagaaatgtgacaagtatagtaattggaaatacatgtggaaaagacatggctatactaccaagcttcaggatttggatgagtctcttgaccgtttgctcaggattttacctcttatgatagccagaactaccaatgagactcatattttggtgaaggaaatccatgccagcactgttggaggaacaagccaagggaatttaagacagattgaggtgaagggttcttgtaatgttcctgaaccaccagactttactgttggattgagtgactctcttgaggtgttgaagattaagcttttaagagttgatgatgttatgactgaaccaatcttggttactgctcctccagggtgtgggaagaccactttgattaaaaagctatgcaatgatgatcaaatcaaaggtacccttttcatatctaagagaatttcttataatattttggtgctttcagttcactctgatttgatatgataatgatactcaagattgtgactttatttgaccattaatattgaactagatctttagggtggaatacttaattttgggcttacattaacatttttgtcattttagcccatatagttagttagtgatttatagttaatggactcagtatctgtgagaagtccaattgaagtaaaaatgtgttcttttctagttcattgaaacttttgatgaacaagtccagtctaactagagttttttttcgctaggttcctcgctaactctataaattgtttcatcgtaatagtatgcttatatgatttgcctatttttacttatgagtttcttcttgtgttttttgttatgtgtagagaaattcaagaccaacatcttgtttgtaacagtagcaaagaatcccaacttgggtcttattgttcaagaactttatcagcacaaaggctattctgtatctaatttcaaagacaacaaagattcagaactcaaattggaagagctcttgagagaaattggaaaagagcctgtattgttagtacttgatgatgtttggtctggatcagagtcccttgttgaaaagtttgttttccaaatacctgattacaagattttggtgacatcaaggtatccatttccaagatttaagcatcaatatgaaatgaaacaactgagtgatgaagatgcaaaggctattttcttgcattatgccacgttcgaagatgaaaatgcagccattccaaatgatctactgaaaaaggtacatacattattataccagtctgcaatatctgcataaacaagattaaagaagaaacaaattgattttaataagtgtgagttgaatttcaggcagtggattattgtaagagagttcctattgcacttaaactgattggctcatcattaagggggcaggacccccgattttggcatagacagcttaagaaatggtccacagatgactcatctattctcagttctgagagtgatcttctttcttgtttgcaaaccatcttagatgtcttggatgagaagcatgctattctcaaggaatgtttcatggatattggtttgttccctgaactcagaagaatccctgcaactgctctcattgatatttttgcagaattgtatggagtaacagaagatgatgccatcactaacctttatgagcttcgtgatcgaaatcttgcaaatattgttgtgacaaggtatgatgcagcatgacttttcttggttcaaaaactgtccattttcaaaacagcatagttatttgctcatggctaactttacttttttaatatatattcagaaaagatgcagatgaaatagatgattactacagtgaacactttgttactcagcatggtatgcttagagagctagctttacaccaaagcaagcaagatccattagaaaagaggaaaagaatgattgtagaaatagctggagaaaatcttcctcagtggtggaaaaaacaaattgatcagcctttcaatgcccacttagtagctttttcaactggttgatctctctttctctctccctctcattcaaaaaagacataatataaatttttggtttggtctaattgagattccctttatctttgcagatgaatcatttacatcgaattggtgtgacatcaaagtacctgaagcaaaagttctagttctgaattttcaaaccaagactcatgccttgccagagtttgtgaaacacatgagcaaactaaaggttctaataatcacaaactacagcttcttaccagctcaattaaccaactttgagatacttgacaccttaaccaatctgactcgaatcagactagagcgcatttcgattccatccctgaaagaaactcacattgtactcaagaaactgcagaaattatctctcttcatgtgtgaaattgggcaagccttcagttgtatcaagatatcagaagtgtttccaaatctagaagaaattaactttgactattgcaatgatttggagacactgtctgatgggttctgtgatctaatcaagctgaagaagctgagcataacacattgtcatgatctgtcttcactgcctgatgacatggggaacttggtcaatctacaagtgttgaggctaagatcttgtattgagttagaaaagttaccagactccatctgcaccctatccaagctagcatttcttgacatatcagactgcatcagcattcgaaacttgcctgagaacatcggtcagctacgcggtttaaggaatctaaacatgaaaaactgttggagattggtggagttgccttcatcagttcttgactttcaacagcttaaagatgtggtgtgtgatgaggtgttaaaacaagtatgggaattttatttgcctgctgatgccaatattgagcttaggttggccaaggatgatgttaacttatattggctt

SEQ ID NO: 114 - DNA, 2014 bp, Cannabis sativa
atcacagaagagaagatagggtggagttttttcttgacttttttatttatatattttaattttctgttttgccagtgaaacaacttctgatatgcagaaagaggctgatgagcgcacaattcaatcttcaaatatttcttctccagaaccatctactttggcagggaagcctcagctatggaccatcttagatggacttaggctcataatgtcatcaacctacttaatgtctgtgtctttattcttgtggctgggtgccgttgtatcttcctttttctactttcaggtaagaaaactcaaggatgatgataaactcactagaaagtagcataataagttgtttgagcttcatccacttaacttcacctataaatgttatctcattgtcctttctgttttcctttctctcacttgtctaagtctcagatatttacattaagaattttaaaaaatgctcttctttatttttggtttgatgcagaaagtgagtgtaattgcaacaacagtttctagctctcttgaaagaagaaaattgtttgctcagataaatagctttattgctatctttattcttacgggacaacttaccatgactgtacgtactttaaagatgagcttgtgtaacatgttgtatctcaatcaagttttgtgcagcaaaggatattacaagtattttctttttaacataccgaaattgcagggacacattctgactgttgctggggttactatagctatatgttctgctccatttgttgccttattaaacatggttgctcttgctgtttggccaacctgggttgctattgctgtttctgagaccctgcgtaaggtttgtctaatttaaattatgctttaacagattcaaattaattttcctatcacaatttctctagtttagcaattacccttttctggggttgaaagttaaatgttgtaactggtgacgtttgcatgcaaagaaactaatttaattacacaagttataccaaaagtatacatgctaccatttacatacatgtatatgttatacttgggggagaaagattaccaaaaatcaagactcaaatgtgatgaacgccaaaaataaaataaaataatttggtacttatacatggcttctcaactacggcataggttgttacttacgttgtgaccaggccaggaagagaacttctgtttactgtcgtatcgcgagatgagaaatacaaagccaaggtatgccaattttattttgaatctattatgatctgaaagctaactatcatgtatgttcattcttattgcttaattttatgttatcttcagttatgcatagatgttgttgttcaaagacttggagatgctacagcagcaggaatgtacaaactactattcagcactcataatgggagagcatcaaccgtctcactctatgccgtgcctgtacgtgtgaatatttactctttttagatactgtttgcattctttatttggtaaatccaaactgtgaatagaaaataagatcgaagtatcaccaaatgagattttgattgtatatgtttgttcaacactgctatcctgaacacgaagcactttggttgatctttctccagatctgtttactgtggatagtgacagcataccgcttggggcgccgccaaacccaacttgccaagctccagaatgttcccacttcttgaggtctaatacagttattattctttttttatttcacttccaaatcaaagatcaatgatatttagcttttacgtaccaactgtaacattcttttttatcaccttgttatgcattgtaaaggatccttaaaacacactaatattatgagtaataataggttattcatatttcatatattagaatgagatcacttgagacatactgcaacaatatgtgagattatatttagatatatttgcggtaaaatttcgtattaatttgaatatgttatacatgactctacggctatttaatgtaaagattaatttgcttaaaaaggaattttttttttttt

SEQ ID NO: 115 - DNA, 4928 bp, Cannabis sativa
gggagatcccatgtttgatgagataagaaaggttggtactcaccaccccaatcagattggacagctttgattttgcaatttaactcattttcaacttgagttttgaagttgataaaggtaggaaaggcttcagattttgcttttagcaagaagacccatgtatacctagaatatgcatctataaaatgtatatagtacttgtaaccacttgatgaaagaaagggggatggaccccaaacatcagtgtgaataagctgtaaaggagcagtataagtagtttcagatcttaagaaaggaaatttgtgaattttgcctttgcagcaagcttcacaaaaatcaagaatacttttattactatctgaaatgttacaagtttgcatgattctttttacaactttagcagagggatgtcccaacctgctatgccacaaagagaaattagaacaactagatacattgtgaggactgtttgtgacattattgatagaatacaaagctgtgtctttatccagagaattgatagaatgagtttgatgagtgagatgcatttgggagggttgaatgacatatagaccttgattaagatgtccctgcagaaggacttccttggaagcctggtctttgacaaagcaatgattaggaaagaactcaaaatatgcattgttatcagtagaaaactttgaaacagaaatgagattcttggttatttttggaacatgaagaactcgattaagaaataatggtttagaagaataaggtgtggtgaaagatgtcttaccaacatttgaaatggaaattccagcaccattgcccatatgaacttgttcatttccaaagtagggatccttttgagtgaaattgtttacatcagcggtacagtgagatgttgcaccagaatcagggtaccaggcagggtcattaactgtatcagccgtggcaatattggcagactgtctgtcaaggtttgctgcaccaacacctggaaaatcaagattgaatcgctgataacagcgagaagcaatgtgaccaactttggagcaaagttgacagacaggacgactgtttggagctgatgcagaaggattgttcatagagaattgaggaggtgcacttctgccaaaaccagggggaggagtagcaggtgtgttggaaaaattacttcgaggattaatggcatatggattccaagatccacgaggaggtggagaggtattcgattggcgaccataaccagatcctcttcctcgattgggtctgttggtagcaagattgacagaatcaagctcttttgagtgactatccattcgatgttcttgagaaagaagtagagattcgatttcggcaacagtgtaaggaacatttcttaaatttacagagatgacaaaggtgtcataatcggagggaagacctttgaatatagcagctacatgttctttcgcagtcacagcatggccaactgagcgtaaccgatcaacaacagtctttatacgaaggagatagtcattgatagacagtgaagctttcttgatattctgcaactgagtaacaaattgatcgatcttggcagaagtttgagtaacaaagtagatttcgagagtgttccatacctgagcagatgtttcacagccaacaacacgagttaaaattccttcggacatagatgacagaagccaggaatagagaagttgatcttgaatttcccattgaacaaattgaggattgatgagacctgcttcttcatcacgatcggagaggaatttttgtggaggtgtgaaattgggggagatgaaattgagtagttgatggcctttgatggcagagacgatttgaggacgccatagcagaaagttttcattgtcgagcttgatagaaagtttgtgggagaaaacaacaggattatttgcaggagcaaccattgatgcagaagcgaagcttgaatcttagagagaaaaaaaatgaggctctgataccatgtgaggaataacagagagagagagagaatttgagctgaatgattttcagtattgagatgagtaataactcattgtatatatacaagcctaatacagttacaaagctaacaaataataacagaaaacagctgtacagtaactaacttagtcaaaggaaataacataaataacaaacttaagtaatagctctaacaattctaactttgagagagaagcagggaattcaggaagtgctccgctgaaattgttgaaagaaagacttaatgacttcaaggatactaactttccaaatattgacattggcatgggaccagaaaatttattaacactaagtgagagactctgtaaatttttaaaacctctcatttcatccaagattttgctagacaaaatttcaaaaaccattgagacgttgccttcgtaattattgcttgtcaagtgaaattcctccaaattgcaaagttttcccatggatgtaggtatttttcctcctaaagaattatgacttcaatggaggtcaaatttgccacatgatgacttgagataatgccacgcagtttagtttgagtaaggtggaggtgttcaagattgggaaaattataaaagcaattaggaatgagagagtctatattattgccagacaaatcaagatatttgagaagggtcatgttatttgggaaggtacaagggattggctctctaagctcaatagaattgaaactcaagtcaagtgtctcaagggacgtaaggttaatgtgagatggaaaatgaatatgactaagttcacaagaggacaaacgtatttcgatctcgcaaggaaggaattgtgttcattgcaaaaagccattgatcagatgctttactaagattaacactagataagtctagaaattccaaagaaaaaagatgtgagatccaatgaagattatcaacatataagccatcataactatttctaagcccgagagagagtaaacttgagagataccttaaactcacaagacaacccatgaattttggaatattaacgctcccccaatagtattgtgagctcaagtttaagttatgaagatgtgtgagattaagtatggagggattgatgttggcctgtaaaggaaccgtacctgagagagagctcagagacatgcatggccagtaagagcccagtccatttgcagcaatcctcttcttcagaaacattccatgacactggatacatgttgtggcagagtatgttggtaccaacatctccatatttgcatttgcatttgcaaagcaaacattcaacatcatcatcatcttaataataataataatactaataatcattgttgttgtaaagtgaatattcatggatactaatattggtagtaatattaattgatttgaatgataattaaatagagagatacattagttgtccttatatatataattaaggtggagagaccatacatattaactatctccctttgacctttcaaagtgttttactggccacgtacatattatttgaataccaaaacacataaagtctacaatcacatgcaattaattagaaattcaaatccatcaacattcaaaactttgaaataacagcttttctattctcatcttcctctatcaatagagaaaattagaaaacctaaaatcaatacatagatcacctctatcaatagattaaggtacgcttccgctattcatgttctttctcctctttgaatcatcaaaaggcttagatgtatcgttatacacttctaatacaatatgtaatatttaagatattcaaactctattaagtattcataattaattaataataagagttagtatagtatacttcgagctacctagaaaccgatcaacaacaaataagccgaatccttaccaattgacctcacaacctacaatataaaaaaatactacaaaattacaaatttctttatttagctacttactagctatataatttattactaactagttgctcattaactagttgctaatgagcaactagttagtaataaaatatatgaatatagatgaaaattattagtaacttattaagtagttgtaactaattatttattagctactaagaaaataaaaacacatgaataagattgaaaataaaaatattgataaaaaaaatataatttatttctaaactaattttttagaaattaatttataaacattaattttaatactttcatatctcattctcattcacaatatttaacaaaactattagttcaaaatattcaatacatacatatacaatacataaaataatctcctatatcacattctcattcacaatacatatacacactgtatatatttaacacaacacaaagtacatacatgtatattattaaagtttaaatttttaccatattaccgcaatccgaccaccaataccgactaaaatttggccaccacgcacaaccacaataacacaattttaataatatagaaaaaccctcaaaaaatttacaaaataaaatataaagcaatgcacattactaaaattagtagaaatttaatttataccttaatgaacgttgagattcaatattttctccactaaaaatggtggtcggaggtataaccaccataaccactacctctactttcggtttaccctaaaaaatgaggaaaaatgtgatcttttagcgtatatagttttaggtatggaaataaaagatttagaaaaaaaaaaataagttaaaatagtgaaaaaaatggtgaaatggaggtaatttttcgtagtagttggcagagagagggtttgagggtttttagattggctgattgaatgaggaagacaaatggctggatagggttataaagcccttatggcatcggttatttggaaataactaacgacataattattttcaaaaaactgacgccataagaggcatagaattccctttagcggcactacaa

SEQ ID NO: 116 - DNA, 995 bp, Cannabis sativa
tattttaaagtgtaaatatgataaaatttatgttaataatttaatattatctacaataaaataaaaacaaagaggaaatccctcaagaacccattaataacctattttgattttcgccgcattgtgcaccatccctacgcgcggctgtcttaattaagaaagtcaaatagtctaatgcttagtgttaagacttttaaaatgtcgtgcatgtttggccttttcacaccaaaattaatggccctacttattacgtaacataaatatccatccctattttatagcttcatatctctgctctcatccacaatttcttatatatttcttgatacactcttttggctataaatagccaaaaaagagcccttatttattcaacatatacacatatatatatacttcttttgcttaacaatctatatacagtatatactatatatatttatgtgcgtaatattgattagttccaatgactattattgttcttctactgcttccctttctctcactgcaacttctttctgccttccccactacaaatcagattcccaaggtacgtaaacgtaccatatatatatatatatgcatagattgaaatatatatatttaaacggcgggagaaaagaaattataacaatattgtaacaatattatgagtaaatatacatagtcactttaattcttaatttgcacactatatatctatacatcaatcatttattttttttaagcaataaatattattgcaccaaaagaaagcttttacaaccaccaattagccaaatctttataacctccttcagacacatctgcctatatatacacacactatctttataacattaactatgtaaatttttatctgatcatatcttatatttattaaattattatctgagtatatatagtgtgtacatatattactaaaaataaattaaataaagagtttatatatataaaatatacaactgatcatgataattaataacgtatggtac

SEQ ID NO: 117 - DNA, 5758 bp, Cannabis sativa
ctttcagttaatattgcgaggtacctttaatatcgcgagtcctgtaatattctgagtcactttaaatactgtaaattctctataataaagtctttctcgcgggggagggaaaatttattccaataagaggttaagattgtttaatggatagcgttaagtcttaatccaacgaaaccaattaaaataattgggcgagttattttttttattttcttaattagacgggtcgtgtttaaacattttcaattcaataaatacattcggtggaaatataatataatttgaccaaaccgaccaatatacacccttatctcgagtatgtactaacgaaaaaaaaattatatatgattattactaatttgtcccttctatttatttttcctcacaattcataatatgtattctcacttcgtcattgctcatatgtgaactttttaggttcgccagaaaattttattagcaaaataactttataaaacattttgttaataaaataactatgaatagttgcacaaacaatcaaaatttactgtgcgatcataaaacgatcatatatttttatttttgacaagaattattgatattttactttggttaaaaaatgaaagaaatgacacattttaaattcttttgagaaataggatgacacgtgtaattaattctaaattatttggagataagttgaggaatatatcttttttgtatccattaattagaaatatttttatattatattttattaaatatacttacttttatgagtgagttgtctaatatactttcactccttacttaagtctagcatataatttacattaacctaaggagtctaacgggacataatttatatgggtatatcttaaagaatataaaaatgaaggtaaaaataaaaacaagtaaagttaggtgggtataatgtaatttcctcaattcaattattaattgagtatttttctaaattccatttaaatgggcttacggttagattaaaaggcccaaagcccaagcccaatttcgaactcttatctccctcttccagtctttccatttgtttctctctctacacaattcagaatttacagagagagagagagagagagagagagaggtttagcaatggatgaagagaacatactgaaattcgtgacggaatatctgaagaagaaagggttcaagcaaaccgagcacgctttccaagaagaacttcaccaacaattgcctctacttcccaattcctcatcatcatctacttcactatttgatgccgatatcgccaagcagcttctctccttttccgagtactctttctctcattttcatttcatctatttttatatttttgtttatgtgttaggtgttttaaaggacatacagtagatttcttttgctgaaactggttccttgaatttgctacaatggtggtgtgattatatactcgtttgttttatttgaccttttttgtaagggttttggaaacttccgtggaattcgagctctgtacttaaatgtgagatggaattactgcttttttttgggaaagttaagagcattagcaaaaaaaaaaaaagtagggttttgtttacactactcgaaggggaacactgttttgttattgttttaagttgaaagtttgtgacttttttgaatttgggtacgacattatgactaggtagctagcttaactgaaaacacttgggtacaactaggccagcttaatttgaagaactatatagtgtgatccaatagtctatactataccaattaatatccttgttattcttgctaggttggatagtataaatgagtgtaagccttttgataaggacatgaatgagcaagggtattaattgatatagattgttggtcacactatataattctccaattaagctggcctagttgtgcttgagtgtattgttgggtatctggcttgagaggttgctgattgtaaaattatggggttgtgaataagttgggggtgattatgataagtagaatgaagaaaaagttagtttaaacctcgaatttccaagggttgctttataaaatgtctgtttactttgaaacaggttgttactatctatctttctagattaattcatctgtttttaggttctgtacatattgtagagtttgtttctttctttcatgtgcattttttttttcagatcggagattggtccagtacgatatcaggatggctacagcaaattgaggtcatggacttatagctccctagatttgtacagggtagataattctctgagttatatgtttgtttatttattcaatatcttaatatttttggttaaactgtttttaagtagcctcattaatgttgacagcatgaattgcttcgtgttctatatccggtgtttatccattgctatatggatctagtcgcaaagggtcatattcaagaaggtatgctttgatctcttctttatttttttcctgttgaagtacagatttagttggttatcccaacagtcacattttacaaaattaatgttttttactcttttcttgtattttaaaaactgttacatcattgcacaactagtctgatgatggatttcaaatttatgtaattatgttttgcatttcaagctcggtcatttttcaatagctttcgtgaagaccatgaaatgatgcacttacgagaccttcagaaattggagggagttctctctccatctcatttagaggtcaatagtcaaatacctttgctcttgcattcctactcaaatcttaaatggagtttctgaacttttttatgttttgtttgtctttttcttcctcaggagatggagtttgctcactctcttagacaaagcaaagtcaatataaagatttgtcaggtacaatcttggttcttgttaatggcatacttttcctttaatcttcttatcttgtcgtgtcatactgtaatgatttacggatctgctgtgcgggtagagttggagggctgctttgtaatttaattatgaccaagttatgaacaacctgtgaaatttattagtttttttgtgctgactagtgaagattaattagatcttgaaaaataaattaaattaaatgatattctttgcaataatcgtaaaatgtttttatgtactatattatctttttaggacaaacaacatactatactaaatttatacatgtgaatatatgtttgtgttaattataagttgaagtaaacgtgaaaatataaagtagtatcactcatcaacatttagtaaaaacacaatttagtaatcaaaacaaagaaataaagtaacatgcgaagtcaacaaaatataaatgaaataaaagagtgaaattatcacattttaataaattatgtttgtgtgaagggtaatttattaaatcgttacactaagcccaaactattcacaatcttctggaaggatgtcaaaactgttgcttatgattgcttgtaacaaacgtaatcgaacaaaaaaaactcatgatttgttgtcttctcagtattcctatgagcttcttctgcaatttctgcacaagtctcaatctaccactgtacttggcattatcaatgaacatatcaactttcaaggtatacttctcttcttttgcttcttatgtaacagtgcttgttttacttgtatgcaatgttttatgtatgaatgtgtatggtttgcagtttctcctggacagcccagctcaatctctgatgatgcagatgctgttacactgactggaaacggccaagatgctgtcagtcagattaatcagaaggaaatacattggggggtgagtgaacaaagttatctctttcaatcgggtttgtttttgctttttttgttttgttgctttgtgtgctgagtattgcacttgtgattcatagaggcatgttggtatgttgaatttaaaatggaatctgaatgccttttatatgttttccctatatgactgttttccatatatgtttgcaatactttgatcaaatgaattcaaataatttaaaatgtgtaaagatgaataagcatgtttatataaaaagggtgctataagaattcccaacaaagctatactaactgaaagtgtagcattttttagaaatgcatatcaattccaatccatcaaattttctttcttttgatgtaaactgtttatatatggagttaacaattttgataatatttctaattacgttcttttttgattgaattgagtgaataaaggaattaggaattcctattaactccaatgaataaagtaagtaataggaaatttaagtagttgccgtattttttatagttgctggaagattctttggaagaacgtttggaaaagactgggggtttgctttctgattctgaaaagccagaaggagaaactaaagagtccgagtgggaggaaaataaggtgctagaaatgctctttttttcttttactatccatatctatgtaacctcagtttagttataggatattaatttggcaatccactcttgtgatgcttaaaattaactcatgtgttcagaaaagatcagcagatggaggaaagcagggttcaatagttaaaaaggtgaaaaaagataaggcaacgggagcaacagggaaagccactcgccctgagacaaacattgtaactatggcaccaagagtcaaaccagagcttcctttgcctacaatgtattctctcatcttttccttctttctcttatgtaatatatacatctttctatctatctatctatgacctaggatgtgcttattattagaaattctgcatatttagtggggtaaagtgacattgaatccatgtgggacttcaattttttaatttgatgagttaatgtatggagaagctaccactgtttccgtaatcttttattttgttgcttcagtccagttgaggttgagcagtctatacttgatgacttaagaaatcgtgtacagctgagtggtgttgctcttccatctgttagtttttatacattcatcaatgcacataacgggtattgtcttcaatttttgttttcttttcagttcaacattttctttttctttacccctcactttcttatcttcctgtctttctttttctagtttaaactgttcaactatatcccatgacggttcattggttgctgctggattttcagattcttcgctaaaggtttatttttcttcttatttttgttctttttaatgaaaagctaaaggtttgttctttattacgcgggcaagtggcgtgtcaattgtttctgtcctttctactaaatttggtacgtattctgcagatttgggatatggaaaagcttgggcaacagtctgttggttgtaagtcaatcctctgtttctaatgcgttgaatattcctgtttcataaattaaagttaaaaaaaagacacgtgcttgtgttattattattattttagtttacattatgaatgctcacagtttaagtgctacatttcgttaaaaaatttctggcagcggtgtatagtatggtaatatctctttaggtttattactgatttgcactgtttctgtgttttgttcaaagcataatttcaaatactgctccgctatcagctgttttgcagggtgatgataatgcaactccagttgagtttggttcaaatggagtaaaaagaccatataccttatttcaggggcattcaggaccagtttattcagcttcttttagtcctatgggagattttatactttcctcttcagctgattcaacaagtacagtcatctactctctctctctctctctc

SEQ ID NO: 118 - DNA, 2681 bp, Cannabis sativa
cacgctcttcatccacaaactttaccatcaacagctagtcattcttcttccaagagtttggaagagagaaaaaagaaaaagacaagaaaacataaaatttgacatataatccaagcaatcgaatcatattaggctcagtttaaatgtttaaagtagattagaagtggcaaagcaggtgaggtacaaagaataacataaaaacactgggcggtacaaccaaaacttgaataaccaggacagattttacaaaagcaacttaaagaaaaaaggaacaaaaatatacaaaatcaaaccctcaggagagcctcaatggattcaaagaaaagtggtgccatttcagggtttggagtcttgattgcagacttcactccggggttcccgacgactgtggtgagttcgatcaagaaaggtactccttgagggagtttagcagagaagtagaaaacatcctggtttgcatgcttgcgttttgcaataaagaacatgttcgaagcagctagctggtctagagttgcttcgacagagctaatcaccgcgttagggaagtcccttgagacctcgtttgagtccggaagggatctccatgtctgaaattgggacaggaattattacatccaaaagacttaatttttgaatatctgaatctcagtatatgcaacaggtcacaaatcaaaactataaggtaatacaaagttcaatgggtaacatcttctaattttagacctttcaagacttgtccccaaactaatgtcaaataacaaaagtggcttaatttcaaatagcttttgacacatttacattgaaacatgcttagcaagaacaacttagcaaggaatggcatgacgtattcaccaaatacatagcaaataaataacataaaacagggtagcaatataatttttacctcgagaaagtttgcacgctccattctcccttcctcggtgaagaatacatgcaattggattttatcattgaaataccacacaggttgttgactgtttttcacagcaacctgaagaagtgagcttgggggaccttgagacatattttggaaaacaaccattggcaaaagagttctcacagatgacccaggttgcaatgggggaacctaacagaacacaaggtacagtgtaaaactaaagtcgagggatgaaaaaaaaaaaagaaaataacacaaacagtgccttaattattacctgcaagggtccagcagcagcaagaccaaaagtatttttgttgaactgaatcatgaagccatcaagaggagtctgtgtattgttctcaaacaataaattgtaaaatatttgaccatcccttcgggtcagttgagcactgatctgcaaaccttgacctgttgatgcaggcagtacaacaggtaatggagggctgcaattaacaaaagaaaatccagtaagccacatctaacaaatcaatctcagttgtcaaaccaaacacgtcttctgacaagcacaatggattttaaaaaattatcttatgattcatgctcaacttatgagaaaccaccaataatcagagctcatattttccactgcacttacccagcaggagaagcaggctcatcaacagggacaatggcactattatctaggcccattagatcaccaagcaaatctggtactggagcagctgcaggtgttggctgagtttgtgcagctggtataggactcgattgtcttgctgtagcatatggaacatttccagagctagttggtggagatgcagcagcagcactatcagtaacgtgagcaggagattcagaatatcctgcttcgcttccttcggcatattcatcatcttcggttcttgggattgtggtcttcacgcgtgttacaaatgcttctggtggtttatgatacacggaagataatgtagcaatgttggcaaggagttcatcgaggagagttggttcaagctggtttgaatcatcagtaatcactggcttctctgctaacacaacatcctttgcagcctgtcacaaaaaagtagctccataagacaacaaaaatggtatccctgaaatctactgttgcatgtactcacaacacaagacccgtatacaacctatctatcaagcgatctgaccaaccatccttaacatgaacaaaaaaatttccaacaaataaaaattccagaacggcacagggtgagatataagttgcagccttatagactgggtccaacaacaaaagaaaaattaaaattttgttaagttccatcatcaaatcaagtcgaagccaccccgaaatatatgacgaatatggcatatacatgaacctccactactgactgttaccaagacatactatctggagagaaatcagaagcaacaaagctactcctttcccagtaaagtgatcatacaaagagcaaaatgaaattattatcggaggagaaagaagagataaacatgtttttgctaaaccacacctcagggtcagttgataagagacgccaatatatgtacgcgcgatcccgcaaatcagggttatctgtctctacagttgcattattcaagacaacctgcaaacataaatcagtataaataaaagatgtattttttttaaaaaaaaatctaaaataattatcaaagctcatgttacaaagatagattctcaataagctctcttttattaattaccagaaaccaaattacaacagaa

SEQ ID NO: 119 - DNA, 3206 bp, Cannabis sativa
ccatattacaccttagaagaatgttctatagtacctttagcatttctcaaaataaaataaaactaacaccccaacgtatcctctatcttgtaaataataaatttctattctattctcatatacaaagccaaaacattgaaaataaaagagcaccaaacaatgccaattagccgaagggttttcttttacaacattagacctgcattccaaacttttgaatggacaattttttttggctattcttttggatggacaattgcaggctacaatttacagatcttgagatgagagagagagagagagaagcagaagggttttgattttggaatcttggaaggagtcccaaacaaacaagggatcttattcaagatactgtggaaatcttgctcaacttgcattcccagtcttggatatagaatcagcctcagcagcaacacaaaatactatgtcatgaaacgctttctttggatttctgtaatatcattctttacagctcttaatttgcctttgtattgtattcctacatcacagagaacttgtatcttagaaatgtcaaaactgatgatacttatcataacaccttaatactaaaatattcagcaaaaagattaatgctcaaatatacttatctaattcgtaacaatgttgtaaatgccaaatcaataatcttccaaatgattgtattgcatataaatataatcacttacagttaaacttttctggcaaggaatcgaatgttcttttcttcaagctttttgcatctcatgttacttcactagacaaagtacaacattcaaaatcctgctgaatccttcaattaggcacaatatgcatccatttccacaggttttaagcatgcctgcaggaataattatctctctcatagaaactttgagaaaccattcgcagtcatcaaaccaagcctcaataagctattcctaaagagtctagtttccgtcaggcgtctcttcttgttgccaatgtatatcctggtcagttggaatttgacaagatgggtatcattagaaacttctaaatcttttcatttaacatgtggacgttatatgtgataaagagaagaaaaccatgtctatatacaattaagaaaagaaaataaggaaaaattgaattgaagaatcaaggaaattatcaatagaagtaaaatttcgcattcttttacacaccacaagggaaaagaaccagataatgagagaggacggctgacaaaatcaactgctgggatactatatcaggcctaaattggaaaataaattcaagcaagggggaaataagccaagaagtcgtaacggaaagaagccaaaccatgtgtaagcagtaagcaaaccattctgaacaaacatcagacactagaccttaatcaaatatttaatttcaagatggcacatccagtcataaaaaaaaaaagccaatttctcagctaattacaaaacaaaggagcaaaggatgcacaaagcttctagtgggtgcttgcctaaaagcacaacaatgagcaaacgaaaaccatcacataaaaatttctgcacgagtttgttattgaaataattaattatattaataaaattttattctcatttagaaaaaaattaacttttcaagaatacaaatattaagtcaagaaacttgaaaaacgcataatgtggtaacttgaaagaaacaatggatttagcaatctagaaaataaaaagacaaaccattttttgtatgctgtctgataattgaagtgcttcatcccacatgttatgtttggtgagtcctttaatgaggtgaacaagagtacctagatgtggaactccaccacgtcttaacatatcagcgaacagttcaaatgccatgccaaccttacttgcatttgaaaggctctcaatcaaagaactgtacatgttgttgcttaaaggggttaatggtgttgatggtgaaatctcttcaaacaactccaaagccacttcgagatttccggccttcagaaaattatcaatcagaatactatataccgaaaatattggcgctgaatcagaatgacccatctcattcaaaagcccaagagagactaggaactctctgctataaccttcaataaccttttggtagcttgccatatgcttcggccaatatgtttgtttcatttcatccaaaagttcatgcgcctcgtgcaagcggcccacaacacagcaatgattaattaaaactttgtacgtgataaaatttggagcacaacccttcaagctcatctcttgcaagagttcgaggcacttgtcaattttaccagcttttccaaaaccatctatcattgcagtataagtcacaacatttgggtgacactttttttcctccatcattaacataagcttataggcttcatctagcttgcccactttacacaagccatcaatcatctctgtatagataacaacattgggggtgcatgagttttctagcattttagacaatactttcaacacaagatccaatcttttatccttaaacagcctatcaatcaaagaaccataagtgtatatggttggactatagccatgctctgacatctttgaaaatacattctgtgcttcatcaagctttccaaccttgcaaaatccatctatgagagcatcatacacaatttggttaggttcacaacctcctgcagacatagcacctaataaatcacgagcctctttgaccttatgagctttgcacaaaccatccaccagagctccatatgtgaaaacattcggtttttctgaactgcaatccccatttctgaaataaatatccaagtcagggatgtcaacattacctgtcattctttcataaattagacaagctttttcagtttcaccagctttacaatgtccatctatcaaagctgtatatgtgacaacatttggggcacacccttcttttgacatcatttgaaatagttcatctgcattggacaccttcttagctttaaggtatgcatgtataagagcagtaaaagtaaccacattcggggaacaaccatttagtatcatctcatcaaacaaattgtgagcctgttgaacaaggccagctttacaaaaactatcaatcataatagtatacgtatagacatcaggaacaacattgttctttttcatttcttcgaacaacgaaaaagctttttctatcctggtggagttgcacagaaaactaatcaccttatagta

SEQ ID NO: 120 - DNA, 6398 bp, Cannabis sativa
gtagtgtcaaaagttaagaacaaaaatactgattattcttttctataacatattccaatattcactcccagcaaacaagcattaccttaaagatcacataaaaaattaatattattgggaaactatattaatattaataaaaacttaggaaattttgatgtcctgaactgaacaataacataatcaaacaagaggtataacatagctgcaaaagcttaccacatttaaagaaggcagagtaagtatatattgtgtacataatcatatgtcttgataaataatcggtcagtagtggagaataatatctcataaattattttcattaaaacattatatgaacaatgataaatgaaacaacaaacttcccatccccaagaattaatgtctgagaaacttttcctttttgtattgttgctcaataaaacaacaattcacatgagttgagcaaaatcgaatcaaaaggactttgaattgtatagaaaggagaaaaaaaaaatctcttgtggaatgcttattgcaacaccgactataagattaactcggattatttccaaaaataaaaaggaaatgggaggaaaaatcatgctttctgacaatgcagaagataaggtaacaatataggcagagaaaaccatgtcaggaagctgttaatgaatacatgaccaagataaatattgaacatttacccaatccatcagtctagattggcaataacagcatcaaccacctcttgggtactactgtctccaccaagatctttcgttctgtatttgccatctgagatcacacgtttcacagctgtctcgagacgatctgcaaatgaagggaactgaagatgccgcagcatcatggctgatgacagtagcaaagccactggatttgccttcttttgctccagtaatttttcatttcccacgtttccagcagaagcaccttgctcaaaaacagcatgttcagctcccacgtttcctgtggttcagttaacaaacattatgatcaatacttagaaatagatagaacaatgaaatttcctttctgtgtgtgatgagttattatccatgtaacaagaatacaattatgcatgtgctggcatctgaaaggttcacacatcatgtgagacttaaaatggagaaccaattcaaattagttgttttgcggccaagatgtttggtttgtgttgcaatgcagttatagaaagcaatctgaatcagtatatatagcaaaaacagttacacgtgttagtgagttttgtgttaaaggagagtgaatatctagatggagcaattgttaccgagtagtacgattgttttacctctggtttagagattaaaactgaataatacaaacacatttcttttggtttgaagttaccagatctaggatctagaaaaaatcatcagaatcagttcaaggaagaaatgtagcaaaacatttgtgaggccaaacaagcaatggcagatactttgtcatgcaaagcaatggtgagagatggagtcacaacacatgagcgactctgggtgggagacagaggcgcaacacatgagcaactctggctggtcgagtgtgagaataggaacaaacctaaattcttggacttttagggatgaaaatacacattacactaaatcaaatcaatgcaggtgagatattggaagttgatgtggtctcctttgaatgtgatgctttttcggattccactggttacacacttacatcacgggagtttgattagaagttggccggaagtgaatgttttgatgtaacaaaaattttggccatcaaaggatggaaatttcttgcaaaaggctcttaattaacaaaaatctgtggaagaatataggcatcaatttgaagtaaaccacacatgctgcacggcagcacccttgaataatatttcagataaaattcttgaatgtgtgaataagttgaaagaggaattaaggtggcatttagttgggaggaatgaaaacataggaataaaaatgtgaatgagaataggaataggaatggaataaaatttaaaatacataaaaaaattgacaaaaaaattattaatttttttttctcatcatattaatttttttttctcatcatccattggaattttttctcatcatccattggaatggtttctcatcatccattggaatggtctttccttccatttcaaaatggaatagtcattccaacaaaatggtggaaagaccattctattgaaatgacattcaaatactttaatatgcaaccaaacaaaggaatagaatgaaattattttatttccattccatttcattacctccaaccaaacaccacctaagggaagaattaacattgtctgaaccagtgaggttgcttaaaattatggaagttgctcataagattgaaggggaaaaaatgagattgagactaagtataaagaagctttattttctatgacctctacgattttgaatcatggttcctatagagatactaagtctttgaatgttccaccaaataaaatgtgaagttgctcccattataggaggtgaccaatactgggtgagcacgttaggtacaagtgcaacccaaaaaaaatggatacaggatattaaccagaaaccagtattaatctttttttgaaatagagagaaaaaaaaattgtttctggtgagatgaaaaaattccaacagaccatagaagccagattaaacaatcggatgttatcatcaccaatgaaaatgagtaagactgaaagtacacagctttagtggaggattgtgaaggtgatgaagcagctgatgaattagcgaaaattaaggtgcaaggtagtgtgcatgatcaactagtattactgtctgtagatagtagaagctactcacaactttatttctttagaattggttaagaagttgagactggcgatgtgagaaacgagaatatgaaacattcatcggaaatgagttattggtgaggaatagggtacttgtaaaggtgtagctctaattcaagaggattttttacctttggcattggaaagtagaaactatctattcaatgatttgagattttagggaatgtttaatttaattcgcaaaatttcattgtgaagctcgggcttgggtgagaaaaagttgttaagccaagttggagaggttgactacaaggtggaattacctgcgacagctcagattcattccatttttcacgttttatagttgtatttcctttcttcaaccttgaggtcaaggttcaaataaggggggaactattgaaaggtttacctgagactaatattgtgatttgttttgtggctgagtgagatggttggttcacgttgttatgctgtgcagtcagtgattagtaaactatataaccaaaatctttataggtgctagggagttttggactaatttttttttatatagaagagtgcccatcttgaatgagctttgtataatagtttaatacattgttgtattgtataatagtttcatagattgagttgtattgtatgaattacgattagaactaatccagtgagatttatgtggtgccatcactccctaaattacagctaacaaggagtgatccaagatcttgaaaaaaaatggtaccacacaaatatatttctttattaaaaaaaaaatcagttaaaaggcagctatggtaggtgatatgcagcttttacggtagtgcttttgagctccaaaacttttcaaatgcatgacacataatttggaaaacatatcatttcttttcatataaaatattaaaattaagagcttattggatgcttggtttgtacctcctggcatgacaccagtgcctccggcgataccagctgcagtattagccactaggtttccataaaggttaggagtcacctgcaaaacatgaaatagtcgatttaaattaattgagcacaagaagagagaaaaaaaatggaagcaataaccaaatctcagtttgagagagagctgtcagacactcgcattttatacaaataacaacaacaataataatcaataataataataactctgttttactacattaaattaaaaatagttctgtgaaattcacataccatgacatcaaactgctcaggcctggaaacaagttgcatacagcaattgtcaacgattatctcattgtacttgatgctgggatattttgtggcaacctcccgacaagattctaaaaataaaccatctgcaagtttcataatgttggctttgtgcacagctgtcacagttttcctgttattcagataggcatactcgaaggcgtacttagcaatacgctctgagcagaactttgttatcacctagcaagttgactaaatgagaaacggaaacaatattgcaccaataaagaatgacgtcaatgattactcaaccctttgtttggaactcaaaagtttagggagggaaacaagtaaaaaaagtgttacaaaaaatttcattttcttttgtttggaatattacaaaaaatgagagaatatactttcacaaacagctagtgttaaatttgatgaatttttataaatttagaccaactgtcaataccagtaagataaacgattcaaaaaaacttattataagacttaagaaaaatgtttcccctaacttttctttaattttttccctcacaatatttttccgcgcttaaatctgagatccaaacataaacaatcgcaacaaaatatttttcattcaaagagaatagcaaaaataataagcatggagaagataaaatatacaacagaatctatgatacacagggatgtaaagtaagatatccagcgttgttaaaccatataatgctatgcaaatataaaagaacatcactcatgacagaatcccacatctcaagctagaacagatcacaggaagccaatgactggaaaagggagtatttggcattgtaactagagaaatgattctgtttttaaggatagaatcgtagcaattttttctctaagaaaaattaagaggtgttcagcactactgtcggcaaacaactttataaaacaaaactaaagagaacagattattagagaacaaacatgacttttcaatgttctttttaaaatgatatatataatcactttgccatgagtccataaatttcagtatactcattctatcatatatgactttctctatccgcactcacatttttctctttcctcattctgtcattactttcttgctcctcatctccctaatgactttaactgtacccactcttacgaatttccctctcttcaaatttccctataatcaatctctattatctcttcaaactccatataatctcatgactactctcactccccattctctcattttacttctcactgactttctcagttcaaatacatattattttcattcagtattccctctaaactctattgttagaaagcattagtcagacccctcttgattaagtgtaaacaagataagacatttacgttcacaatacaacaaccaaaagaaatcttaaacaggccctaattttctttgttgtctaaatatttcggggtactaaactaaattatcagagtcatgttcatcaacgtatttactttctagtcttcgagaattatgtttttctactagcaaagaaaagtttccataacccattctagtgtcattgcatctagctcattgtaaggtgtacgcttaataagtcgagacgtcaagtgtggtaactcaaccttagaaccaaaatctccaaagcctaatgaggttcaatatcaatgaaaagccttctacaactgctagtgattcatttgaggcagagactttcaagtttataatagaactgcgcaaccacgcaataattccaaatgttccgcacgctaaattgaactagctccattaaatcattcgatcatattaatatattaagttcattgttaattccagatttttcgatcacggaaaaaatgcacaacgagaactaataaaaataccataataattcataatgataatacgagcaaaatcatcattaccttgagactctcgacgacgccaggaacaacctcgtgctcaagcccagagtactctccttcagtgttctccctgatcaccacgatgtccacgttgtcgtggcgcgtcggtaaccccggaagattgaagcagttgacgagcgaagcgtacaaatcaagctccctcctcaattgtacgttgagcgagttcacaccacctcccacaggagtcttcaaccctcccttaagacacaccttgttcttccgaatcgactcgaggacctcctctgggacccgcttcatgtcgccgtggatctcgtaccgctcgaagtagagcggcgcgtgcatagcctccatgacctgctcaaccgcattggtcacaagcggtccgacaccatctccggggattagggtt

SEQ ID NO: 121 - DNA, 687 bp, Cannabis sativa
ccatatttaaaaacacaaaagggacaggacatgcagttttggcaaaataaaaatatattaaataggaacacatacaattacacaattgattgattgggtaaaaaagtagatgagtgagatgtgtttgcattcctctttaccgacgcacaggatccacacattatttatggtttctttcaaactatataataatatatataatacagtttgattattgatttgggaaaataaaaaggaaatacaatggacacctaggtatgtttgttttgtcaatattgattactcactatttcacacgtatcatcatttgaaacaaaaatttaatcgaattcgaaaagtagaaacattcaattcgatcgtgcttttttcttttcattctaaatgaattatttcttcgaagatttacagtttgcgaaaggcattccaatttccaattcgaatgggataagaaatgggagagtagttgaagtgttgttgttgatattattacaatgggaagtgtgattagtcacgctgccaatggtgttggaggtcttttagggagcgccattactgccccctttaagaccgttttcggtcattcatgcgagtaagtaaatgttctttcttttattttctatttaatgatttttgctataatggaagttatcaatgaatcagataattcaggatcaaaatacccataaa

SEQ ID NO: 122 - DNA, 1328 bp, Cannabis sativa
aagaattttttttcctttttccattcaattgtggtatgcctgtgctgtatcaatcatttactccaaattattccagatggaaggattcgaagagtttgaagctaggaggaggaagaagtttgacaagcaaattgattcaaatgtgatgataagctccaaagggctcgatgagggtgttgatctttgagagttagttactccttcaaattactgtaagtgcccgctaaccgttccaatgactttgctttttaatttcaagcaaaggtagcaattttacaatcttacaggtttgttctgttcaatagtttggtttagatgctctgctaattaacttaaattctctgaacagatcgaacaacagagattgaacagtccacagctatttaaaatgctagaaagcagaattacttatttatatctgttgattcatatgaacttttgatgtaatttggaagagagaatactgttatatatgattccttgtcatatgtgagataaactgcattgcattgtacatgttttcttttttcctttttctttggttcatgtttaagttgtatattgggaaaaaaaacttattgagacttatcaatgatgctatttttttcatggatatgtacaaagaaagagcttgaccgagtcaataataagtttctcttattttgattctacttcgggttcattccatggtgcctttatggaaaagttcaatacttttttgtttgtagaagttgaagaaaaacaataggggcgttccatgattattgattattgtcaagattacaataacactggtacactacaaatattcgtgaacaccctttaggttccaaaattgtcatagcgcattttttttttttttgagaaaaagatataattcattgaaataaattcgctgccacaaaaaaactcaaaaattgtggacaagtattcgtccaaacataatctcttaaattagtaatagaagttgtcagtgtgtaggcaacaccattcgtcgaacgcggaaatgcactgcaagaaccaccaccaacaacaactaataaaaaacagacatctaataaaatagactgaacaccaaaattcatgtgaaaattattaatccaatcaattgttacagtcgaatcactattaataatagagatatagaaactatattgatgcgcaagagacagacctaactgaatggcaagtaactctgccacattaacagagaaatcacctaatacaccagatgactatgccactggaacatcccttgtacccctaggttgttcttcctgggtgttggggatttccttggtatgcttcctgtctcttggttcttgaac

SEQ ID NO: 123 - DNA, 1312 bp, Cannabis sativa
gtatgcctttattttatgtgttagtaatttgtaaaatttatattagaccagataattattactaaatcataataccaaataatttaaactcacgcagaattcaaaagagacaaccacccaaaaccaaatcaagtaaattgaaaattttaaaaaacgaggaagaattcttccagcaagggatcttcttagagctaacccattattttttcttttcaaaatagtagataaatactactttaatttgattaaatctatatataaaaaaatacactccactattatttacatttaaataaatctattaatactttaatttttattataaataaataaattacaaattgcgcctcacgacacctgccaaagttcttcatatattgtccaaccaaatattcaatataattataatatttaaattattatctattcgaagattttgagatcaatcaacagcaaactcattaattatttatggaataggtcaaccttaattcaggaccgtccaaaattaattaacatattagtcatattttgatttaaaaataattgataaacaggaccgtccaaaattaataaaaccacatatattccataattaaaactatatatactgtaaaatattcaaaatttttataaaaatttacttatattcttaaataattagtgttagctagaaaaaaaaaaaactaaaaatcttcttgaatactaaaataaacaagaaatgtatcgaaacaatttaaagggggtgtaagttatttctgataattaattaagtataccttttaacaattatctttatatatatacatattaataaaataatagtctatatatgctatgccatggtgttttgcacgcagtatagcaattctcatatacatatacaataatagtaatataataaattcatagtcaaacaacttgagggtataatacaagtatatataaacatcatgttacgaaatgtgatacgtacacaaaaaactagctagctaagaataattatgactagtaatagtagtagtagtagtggtacaacatggttggtttggctaagtattgtgatatgttcattaagactaacacaatacaactcctgtgttgctgtgtttttgagcatcgattgcggtggctcacagaccataaaaacaacaaactccataacttgggtgccagatgatgactacatccgcaccggcgtctccagagagaccaaattcggaagcttagatggatccgttctcacaacatctttaagatctttcccaacactcgacaagaactgctacaacatcaacctcgacgaagatga

SEQ ID NO: 124 - DNA, 2531 bp, Cannabis sativa
  modified_base (1871)..(1875): a, c, t, g, unknown or other
atttgacacatccaattcacccaaaacttcacgtgtgacttagattactcaaaactatattttgggaccgaagagaaagttccaacacgttttataatacaagattaaagtaaacattctcttaatgtattttggtcttttaacttatgtcattaggttatacatatctcatatattagtctttactaattttattgtattaacgttaaccatctaaccaattccaatatatatataagaaaggtaaaagatgaatataacacaatatatgataatatatgttataagctaacatgaagaagaatatgattgctcactcataaatttgagtgtagattagtggggatcgccatagcttgaacaaggcataaatcttttttccaaaagtttattttccctatatctaaacactaagggaagtctagcaaataggtttaggaattatcacgccttaaggattttctataaaagtgtttttataaatagaaaacttcatgtcacaaaaagagcactttagacctctaaatatagtgttaatgatgatcacacttgaaaattaaatatcatacacccatgtctatatgggctcttaattaggtgtaaaatagattaaataggtggtttgggggttgcacaaaaattaggaccgaacaccaaacattcaagacctttttttgtccaacaactactttaggcaacatattgccttgtgtaatttcagcaacactaattttggagttttataaatctcacttccaccaaaccaaaaacaaatattttctaacaaattaatattaatccgattccaaacaaccatataaatataggttggaatctcacaataaatttgtgtaacaactctttttattacaattattttgtgatcaaccaaaaaaaattacaaataagtaactagttgtaactcgttttcatattacaaataataaatttaaaataaattatagaacatataatttatttactaaatattattattcacataataatatatatttgacacaatgtaatctatatattatattataaaataacattacatatttatatattttccttccattaaataatgtgtagggagaggtaaagttaggttttgtctggtatattttttctttaacaaacctatggtaacatagatataaataaaatccaaacaccttattattgaagcaattagaaatagatatagggtgggaagagctaggttttgcactaataaatgcttgttagaggttccaaaacaattaaagtcccataatttaaaacaattataagctaatatatgaactcatcaacatgtttatcacttttttaaattcaatttatgtcttaataagttgttaatactataaaattgagactttcagttaagcaaaatgtgaagttaaaaagtatattaatggtatgtgcactagaatactagattcaataatacaacatttttttaaaattgtgagtctcaaattaatcacatgatattagctacaaaaatactattacattattatatatagttaggggtgtttaatacaccacatccaatatttttaggtctatgtagatccgatctaatctaattatatatttaatgttagattttaccattcgatctaacttaatttcagtcatccaatcgattcaacatccaatgaatgtaattgaatcggttcttttcattggatgtatttcatatttatatatatatatatctattgatttaattcagtttatctaatattttagaccttgtatttattagatcggatcagatctatttaatattttagatccaatatctattagactaaattagattcatccaatacaaaaaaaaagagtaaaattttaannnnnattttcatatatacatatatttttttacgtatgacaatataaaatttaattactcattcaaactaaatgaaaatattaattaattcgattggatgttgaatgtattagatttttagacaccccatccaacatccgatccaatctaattggatatttaaaaataatattcaatttgatccgatcacaattggatatctaatgtttagcagtcgattataattagatcagccggttatcattagattggatcaatttttacacacccctatagagtattatagtgttatagtatattttatgtgcacatatcaatatcattcttaaaattagggtcagtcctgtactaagaaggcttgggcctccaaagtcctaagcctaaaattttgataataattataaaattaaacataattaaatataaattaatacattatgagctcgtttggtaaaccatataagggtcgtattgtattaaataataaataatactttgtttggataaaatattatattatattaattattacgactataaattttaatacaatgtgagtcgtattatttaatacataacaaatgaccatattagcttatattacaatatttacaaagggtctagtgtaatattccgaaaaataaaataatatttagatagg

SEQ ID NO: 125 - DNA, 5391 bp, Cannabis sativa
caatttttatttccaattccattacattacccttcacgagttgtgatatgtattgcgaaaagacccgttctacaaatgttggattacccgtatatactatttagtgaagtggttcgacccgtttcgatgctaaatgagattcttaatcttataacggctttccacccgtacatgtcgactcgacgtgtggcgtggagggaaattttgcccatactcatcaaaataatatataaaaaaaaaatagaaaatcgccaaaatcacgtgtactgcgttttcattttctttctagccaaacaggaaaacaagaaaaaaaagctagaaagtgaaagaaaataaggtgaagaaaaccaacaatgggagttccacagactatcgctactctaagcgagagagcatcatctataagagaatcgcttctaaagagccagaccataactgatagcatggtatccattctcggctccttcgaccaccgcctctctgctctagaaaccgccatgcgtcccactcaggttatatatatatatatatgtattttttttcctttttcattttcagagattcggtaggaaatcaaatactgcaatgtacataaaaatttcatctcttcctgattttttgatcggctaaggaaaatattcattttcgttaagtttttgcatttgataatcagccaaacgttggatcatggtttattttaataatttaattatgcttcttgtatgtgatttgatcaaacattgaatttcgtttttggtattatgtcttttaagattaggacgcattcgttgcggaaggcgcatgagaatattgataagacaattaaagcagcagagtctatactggcgcaatttgaactcactcgcaaggttagcgttaccgagagttttagaaatgtgtaatgtctcttttctttttccattttatgttttttgttcttaaacagctcgcattttcttttcaccatgtagtagcttttgaaccatatattattatcaatagcttgctattgtaaagttgacacattctgtatttagtatttgtagaatttagtattccgcattctaatttcacgatatcattctgttaatctaggtctccatcttgactctctttcaaatattatgatttagaggcatcctctgtttcttaaccatcagttatataatgcataatatctgtatgaaattatgctgcgtttaactgcagtgaattcattgttgagattttgtggattgagttaagagaataatactatttgctctttgttaagcttttagtggccaaaattttttattttgcaaacatttttggtttggaaatcttttccttatattaaattaaattttaggcagaggctaaaatactgagagggccacatgaggatcttgagagctaccttgaagcaattgcccagatgagaaacattgttcgcttttttagcggcaacaaaaattttaaaggcagtgatggtgttcttaatcataccagtaacttgcttttaaaagctatgtcaaagctggaagatgagttcagacagcttttgacaaattacaggtttgttcttctagtctcttattatggtacagctacagcctacaagtacaagtgttattttctccctttaattaagtagtttttgtgatatgcttgatccttgaataagattgttttcataaaaatgtatctcaatagacagaaaaagtatggttaaatttcaagaggtaacttctcatacttccctaacgtattttgaaaagtgattaacttgaggactatgatgatgcaatattttcagtggtaaacagtcatcatattcttttcataaaagcttttcccctcatgaaaaaactgacatgtgtaacaaattattttaggctgcaggagagaattcaaactttaatgtaatctactttaatttcaatatcattgccattttccttgaccacattgcagcccttgatttcttaatataaatgtaaaatttcactgacttctgaaatatttggcatatatacttgctttcatttgatcaaaggccttttcttatttttcactcgtatgtaatttagttacatttactgtagaatccaatattgagttcaataccgctgtgatcttctgttgtctatattttttttagagctacattatcttttttggtttcagcaagcctgtggaacctgatcgtctttttgattgccttcccaactctttaaaaccatcagcaacatcatccgggaataaaaaagatgctagtggcaaggatcactctgatcaccaaaacaaacgtttagaagctgcagtttatttaccaataactcttattccacccagggttctgccattgcttcatgatttggctcatcaaattgtcctggctggcagtccacaacagctactaagaacttacaggtgatttttttctttttgtccagagtgaaaattgtaaacttaaatcttccacttgtatcagggtgattatgcaatacatcttcagctaatttatacatggtcttgctttatatgcaactgattgcagtgggattgcacagaaaattttgattgtgatttatttttacttatatttctttagcttatactttaccatttccaacatcagggacactcgggcaccggctttggaactgactcttaagaaactgggtgtggagagacttggtaaagaggatgtccagaaaatgcaatgggaggttttggaggcaaagattggaaattggatacactacatgcggataacagtaagaatttgttaccacatctttagcttgattgatttgtagaattatatatttttggtgattcttatatagcttgaaacaggtcaaattgcttttctctggcgaaaggaaaatctgcgatcaaatttttgagggtgttgattctattagagatcaatgttttgctgaagttacagcaaatagtctggctgtacttctcagttttggagaggctattgccagaagcaaaaggtctcctgaaaaattatttgttcttctagacatgtatgagataatgagagaacttcagtcagaggtatggtatttttcccagtttgcatagattagacaattgtaataaattttttaaatatggctggctattcttttcatttttttcccaaataattccggaatgtgtcaaaagacattttctgcagaacttgattcataggcattggaatcctgttaaatgtgataggggagggtaaagtgctgataatggaaaaccaacataattgagtttactcgcatgcacatgcataagcagtttgctggcttgctgcctgatctcttctctaacaatttcatacttgcattctttataattgtttcttaagtcaaacaaatcaatgaaaaacttttaaggagttcaagatattgctctggtttcaatagatagatggtatggattgataaggctagttataaactacttcaacaatggttaatcacatgtcaaattatatggatatctatttgtttagcttgaaaaaatgatcacattcatatttttatatgttaatatgtggtatctttttcttggtgggggtgcagatcgaaacactctttggaagtaaagcttgctgtgaaatgcgtgaatcagctttgaatttaacaaagcggctagcccagacagcccaggaaacatttggagatttcgaagaagcagttgataaagatgccacaaagactactgttcttgatggaaccgttcatcctttgaccagctacgtgatcaattatgtaaagttcctatacgagtaagatgcaacttcttccctactttctattggcttcctttttggaggttgcagattttacattctaagcacctcttccatcagcttcttttctatattcttcataataccccacaaaattttattttctttattttatttcacacttttagattacatcatacataacttttttattttttctctatcatttaaatatcatattttaaaatatattttatttatacaaataaaaatttaaaaatattaaacaaaaagaaatagaaagaggcgagagaaattattataatattatttgaagcatgtagaaaagcatttttcatgatgaaaaatcaagttattttagttcacttgataaagttcttttttaacagcattctttcatattttaccttttgagctatttcaactcatttgatgtgtgtgctcaattgcttgctctagtattgtggcttgtttctttgtctaagcaccaaagtgtttgttggctttggtataggtaaaatgatttatttttagtgtatcatacacagtacttataattatttagtatattattttttggaaaattctttgttgtgtccctctttgtaggagcattttaggtttcggtatataaaaaaattataatccaatttttcattttatttgatgatatacatcataattataccacacatcctaccagcttttcaaaaaaattggaatagtttaggttaccgaaaatagagtaaatagtgagttgcacgtgtataaaaagaattaaaaaactaggactcgtgcaactcgttttttcaaccttgtttttaacaccgcaatttttctaaaatttgtagaatgcatactatatttataatatctatcatcacataaaaatatttgaattataattctccacataccggaaacaaaaatgtctctaccaacaataatcttgtcaattatttattaccatttatgtgttttcctggataatacctgaatgcttcaagaggtcacaacaagtgttcgtgaaaatttgacaaactataaaacagctaggaatattttgtcaaatatattcacaaactaggaatatatatattcttctcacaagaatttttctttttgcagctaccagtcaacactgaagcagctttaccaagacttcaatcatagtgatccggaagaacagctagcaactgtaaccacaaatattatgatggctctcctaaataatctggatggaaaatccaagcagtataaagatcctgcactgactcagttatttctgatgaacaacgttcattacatagtgagatctgtgaggaggtttgtatagatttcatttaaatattctatataattatacacatcctgtatgatagattccatgaacctataaatgtaatatacaggtcagatgcaaagaatttgctgggagatgactgggtgcagatacaccgaaggatagtgcagcagcatgcaaatcaatataagagggtttcttgggcaaaggtttttcattttatttttaatggtgcacatcagtatttattgtagattaaatagtaaataagttctcctgtttctcttttattcacctgtgccttctttacaaatgcacc

SEQ ID NO: 126 - DNA, 1617 bp, Cannabis sativa
ataggaagctacctcttaatataaactctttgctatgtaaaaaatactaactgatttggtattttgataaaactagtttacattgattagatggtattgggcaagcataatcctcttatggcccctccaaaggatggtttttgccttggtcattcaactagctccctaagatcaaaagtattcttttttgctaggataagatcaaagtattcctgtggaaaacctctcataattaaatatcaaccgtgtttaactcttcaacataagattcaaattagcaagatgtgtccactttgcgaaaatcaaagataagataaccttttgtgttctttgggattatcggaaactcaaagacatgaagcttgagtaacctgatcgtttagtttttatgtgccttcatgatgtattgtgaatttctcttgggcattagcaaagtgcactttataaaagagggtagaaagattgtaacgttgtgttgaaagatctaacacaaactcaaggtaccaaggaagcaagtcaagaaccacataaggttacccttgaagttgattgtaagtcaatgtagatgatagacttgaaccaacccactttaatgtaggatcgaccctcttggcttgactcctgaacttgtgtagccaaagcttggatgtgctacatattggttattatgtagatgggtcacctaaaagccatcaacaataaagtgaaagaactctcaatctttagagtagttttagatgatatatctagcatatgcaaaaaacttaattgatttatcatttgttcactatagtagaatggctaattttttgcttcactctcttgccaagtaggctcttttttttattcattgagtgctaaaatttggtgacccaatcttcctttgtgtttggccatagacttttttgctctttggctatttagaaacacaagctctttcatatactagtgccagattggggaaaatgaatattgaattattttaagaattaatttagaatatgtttaatcagagggaaaaaaagagagtataataatatgaaacatgttacagttgagcattccaatgccaaaacaatcaacatttgtcttatgtatatatgagggtcactttcatttaggttaggccttaagtccctttcatttcagtcattgccattcgcacatgcagtacttgtagggctatgatgggcttgcatgttttgttaagcccataccaagaatacaggcttagcaggacccaatttagatgttttggcccactattttctcccaagtttgtgttatgagtgctgctttcttgcctaggataatggatataatatgctcatactacacaagtcgcactactgttagtgagaggtgacactctaagagtgactagtattttcctataatatctgttaaattaaaatacaccaatagtgaagaacaccacgagagtatcctttaaacaaaatctaccaccttttatttagacctcaaaggtttataccattatgcaaaatgttatgtatacatataaaaaagcacttcaatctcaactttcatcacatacttgcttacacattagtccccttaagaaagtctttctctttttcaagaccaagatcaaat

SEQ ID NO: 127 - DNA, 4539 bp, Cannabis sativa
catggggagaggaaagtacaagagcaagcccacgggtcaccgcaatttctcgactcccgaagagatgcgtaagctcaccaaatgcccttttgctttctacctggttctcttgaatgtatcgatttgttttcatattttgttcctttcttgtttatactgaaacctgcatctgatttgttgtctggcttcattgctacggactttattcttaacttttcttgatttgtttgtgaagagaaggatgctgggttattattgcttgctaagatttgttattgatatttgaattgtattgatttgataaatctaatccttgaacattttgagtgttttgtgaagtttgaatttgagcagttaacagtaaaataaaacgtttttactttcgtgtttctggctttcatttttcatttattatattctttgaataaagatttgtaataattcttgagctcgagtccatgagaaagattgctgatatttgggagtatacgtatttctgatccattatatgaattgaaatacaagattgcttctttttctttctttctttctttttttttttttcctttttgagcaatcaaattcaaaattgttgacgtttgtcaacttggggaagctgatactgatttttttaggatgatctgggttgtattttatcttgaaggtgctttattgtaattattactttttgttttttggtggtgaaccatttttacatcaggatttgtgtttcgccttgtcggttttcttggttcacaacatgatttttctttttagagctcataatcgtgagataagctagtaaaagttaaccttttatttatgatttttgttgattttattcattaagaactactgtattttttgtgggaggtataagggacacaaagggggtgggggtgaaagacttagtggatgaagttttagtgttcttgtgtgatgatgggaggtgttttgggagatatgggtttaattgtaaattgtacatattcttgtatttctttataattggagagaaagtttagtccgtagtttggacaattattattctccatagcctatataatttgataaacagtgtgatccttttatggaaaggattttgggagttgacgaattggtttggttatgccgtatggatgttatcattagtttctacatacttgtcatctcctttttctgatatcacacactagaagagttactccattctcatcttatttactttccttggttatgtacctttcagtagtcgtttgctcttattttcattcctaccaaataatgagaactgatgtgtttgttctcccttgtgttaggcctgtttttttgtgggctgattatggctatttttttaaagcttttctaatagctattttcatacttttaaatgactctaatggactttagtttgggtcttttgaaacagatttttattataaaaaacaggaaaatatagccctaaaagccctaaccctctcatatggaatctctcatctctctccttctcagccaagtccctccctcctcagtcctcatttacctcgcaaatgtcttcagtcttctttatatgtttagaacttccaccattttcaattgaattttgtaccttttataaatttaatttatgcttttaagacttaactagtaattttcatgaatttgatgactttgatatggtaatatgtgttgtttgttatgaattctataatatttaatgaagtttttcttgttattgttgaggcggacgcctcaacacgccttgaggcatacaccttgtgggattaaggcaaaacgcctcggtacccgattctatgtttcaaaactttgctttgttatgtacctgtcagtagtcattttctctttttttcattcctactaaataatgagcactgatgtgtttgttcttccttctgtattctttaatatctatagtttttttcttagatttccttgtacttttattatgcgcatgtgatgcagtaaaagagttccaaagccaatgtgcatgagatgggggggagagttttcaatccattgtatctattatcttgttttttttttcttttgaaattcttatatacatgtcacaagcttgtactatcagacttcataatgctataaccatttgtttatcatataattgcagttgctggaacttctactcgccctcgcacgttcaaaaaggtctttactctctcttcaaccataaatgcaaatatatatatatatacatataatatacatgtctatgtatgttgtagttaatcttagttccacgatgcttattttgattaatctttttggcttaagcatgttattctgtttgatattattagcaagaagttgagtatgaggaagaacaagagtctgcagaagattccggcgaggagtctggagaagaatcagatggaaacaatgaggttcgcttggcttattgtcattgttgagagctatttcaatgtttttgactgttttatgcacggaactcatgatgaaattatatgttctgctgttcaataatgaaagcagaagcgtaaaggtactcaaggaattattgagattgaaaatcctaatttggtgaagccaaagaccttgaaagctagagatattgatgtaagttaacaactttcccactgcacattgtctgtggtgtacttgtatagaaatgtaatgctattgtattgtgcagattaccaaaacaactgaactttcaagacgtgaaaggtaaatttatcctcattttccttcctactcttgtcttgtatatttcttgatagcactatgaaaaaagtatatcttaatttggatataatatgtcaatttgtgggatttaagttggaaatatcaatataacctttcaatgagaaactatttcctttccttgtttggaaatttatgtcgtaaggaattttacgaacttgattcttgtgtctttctgcagagaagaattggaaaaacagagagctcatgaacgatatatgcgactacaggaacaagggaaaacagaacaagcaaggaaagacctaggtaatcgatgttaaatgtcttcggaaattctaagatctaactatatatagatgtgcatgtacacagtgcactcaagttattatttttaatatttacttggaatatacatactctgttcctaatataattatgttaatgatggtgtgaggcttctgactctttctgtacatatgcttacacattgacagtctaatgaacatgcttaagttttagagaatgtgaattgcagaaatgggatagttgtgctattactatattattatcctatttctaatgttttgcatgtgtcgcttttgcagagcgtttatcccttataagacaacaaagagcagacgctgcaaaaaagcgagaagaagaaaaagccggtaataattatcaagaacattgtagttttctctttgcttatttaaatattaagcatattggtattaatgaattggtgatttgcagcgaaagaacagaaaaagactgaagctcgcaaatgatcttgttgaaaaatcggttctgctgcggctgccttggaatgagacataattgtttcttacagatttgcttgccagttctcatatatatatctatgtcatctgttcgtactttttgcttgacagtttatgttatttttagcttgtaactttatatctgcaagtagttttattttgctttattttattttcccaagttatacattatcatatttgagacagtatagttttaacaacagaatctcattaagatgggtgtagttatttttactgcagtacttcttttcttatagttttccaccgttgcttgtttttaaatttaaatttgttcgtggcatttaatttctctagtttttgttatcaggtcctacaatttagtatgtgcatgtgtttctcgagtttcatttctgtgttgttttaaaaatgtcaactttttgtttttgtttaatatttgtcagattataagcttttgaatgatatgaatagacaggtacgaaaactagggtgttttggcgcatgtacaaacatttcaacaacaagatttctatgttagtttggtgcattgttacaaatagtttgtgaagtttaaacaagtactaagtaatgaaatattgtaagttgcaactcttgttatttaattgctgaaactacggaaatcttctcatgtaggaatatttgagaattctttcccctttaccaagtttttgtgccaatgttaatgtttgattttggcattatttgcagtaaatttacaatctaaactgttttctgcacaccgttcgaaacttgggtttgaattcacttttctggaatgttagcattattagtcattttctgccttttaattcaaatattcatttaaaagctaaaatcacctatttataaatcgttttccgtttaggtctcaaatcttagaatgacattaaaattatatttttcattcacagaaatttaaccttttcttttataaaattattaaattagtgtaaaaaaaatagtgactatattatagttatatattataatt

SEQ ID NO: 128 - DNA, 15523 bp, Cannabis sativa
tattctacttatccaaatacgtaatgtaaattctgtgcacttataaatgatgagacttaatgttaaggaatgttgtggagtggtgaaattaagagacatttgagagtggagatgagaacagtgattgacgtgatgacctaaaatcaaagttgaggttgggaagagaacaattaataataaaatccaagggcaaggaaggttatattaattgtaagtaaaatttgtgggatgtaatgttgtatatattttctaaagactaaagatgttataacagttaacaaccctgcatgcgctgccctgccttgccttggatttacataaactcattcaaggttttgctcgatctctcaattaaaagaaaagctctaacaatattaacatacataaatacgacttaccaccgcattctcttgtagaattagatgaagcagagcagagacagagccttccctcagtgtcggtgtcaaagccacacgtaccgcccgactgagtgcaccgtctgcagccaccttcggggagcatgtaagtgagcttgatgccgtaaacccagtcaagaggccctatccctctcaaaccatccgcgttcaccacactcgtgtagtgagtgcagtccaagatgttcatgctcatcgtcctcacagtgtcgtaccccgtgaagcaacacggcggggtagagtttgtcaagaaatggaacacccgaaacgcattgcaggcgccgtacagctcctcgcacgagtggcccgagaagttgaagcagaggtagctgtagtggttgagcactggggagtctacggagcagttgagaagcgcgaagactgtgtccgaggtgggaggtatgatggcagactgaatgtcggtcatcttgaagtcgtggtgaggctgcaggatggagcaggttgacatggcggggtcgtacactaccattgtttgcttatcgtagtctatggattctactttgtagtttccagagggagtcacgaagaaaagttcggttgtgctgttgcagttgagcatgtttcgaaactgtggcgccccgcagccgtcgtccactccaaacgggtactttatggccacactgccgcacgaggtgcggcatggggtgagtagggcgagtgctggaacaagttggaggagagtagttactagtattgctattgataagtatgccgccatggttggttggttgttgttatggattagaggaagtagtgaatagtgttttttaaagacaatttgctaaagtagggaccgaagagagctagcggatcagatgccggaaattagtcgtttactttacgacatttgatacttttaatttgaagaacgcgcgttacactactggcattggcacagaggctataatgatatttgagtgagtagtagctagtgggatccacaggtttgacaaagtgtgtatgaaatcaaatacgactgactagggactagcaaagcaagctagctattattattattattaagttcagatacagatgattgaccttttcttttttgtgtttgtttgtttgtttggttttttgaaggtgtttgttaacagtagcaaatataaaaaaaagacaatcaattcatgtccttgaagtatatattgcatattagctgtttcgcatgttggggaagcacgtcttttaatacacggcccagcccaggagcgctagctagctgctaattcattcaaattgtattgtagttatttagtcatggttacttttgcatgcccaagtactgttttctttacttaccaatggaccaatcaataataatcaattaatcaactactctattctatttcattaatttgttgtcgttcatcttcatcctccgttgttttacttctagtcaacagaaacacaagcataatttgaccccacatttatgttgttactaactactgtatatataatactaaaaccacaaccaaaccaactttgatatatcttacattacatgatgcatgcatattttattaatttataataatataggcatatataaacattaaatacaaactcaactagtagcagcagcagcagcagtagtagtatagttatgacatatatagtattaattaattagtagctagtgtcatctgatcacgatatcattcatgatcaatatatatatatatgttcaattaaactttagtgaagcgtagataatccttattggaagggaggtgaacggtgttaattcccccagggaacatggtgttggcctgttcagtagagacggtaggagaaacgacgacaggttcccctggtttccaattgacaggggtggccaccttatgctttgaagccttttggagggagtccaccacacgcaacacctcgtccatgttgcgccctgttgtggctgggtacaggaagctcagcttcaccttcttgtctggaccaactatgtgaagtgcacgagaagggacttggtttcctgaggagtccttctcttcagggtccaccatgttcaattgcttcatcagttctctgttgggatcggcaatgattgggtacctcactttagcaccaggctgcaaattaaaatattaatcaaaacaaacatatatatctattagagaatcccacatattatataggatatataagctagatccagatgagatcgagtattaattgtgtatatacagtgtaagcttcaatgtccttgatccactccttgtgagagttgaggtcatcacaggagagacccacaagcttcactcctctcttatcgaattcttgagcataggcagctatcttcccaagctccgtagtacacaccggcgtgaaatcacctatataattacaattacaataatattatatagaattaatgatatgatacaactaattaattaattaattacctggatgagagaaaataatggcccaaccatcaccgatatagtcgtgaagaatgatgttgccgtgggtggtttgggcttcaaggttggggatggtgtctccaatagtaaggcctggcatctttgtaagttaatttcattactgagttagtctactatataatataatatatatacataaagtgagaaaaatggatgaaggtgtgttgcattgcatgaaggcaacgtggtatttggcgtggcatactggactcagagtcttcttccacttgtcatctcatttactctctgtctagaatctattgtagatagatttttgtatgtactaatcaatgtttataatatataaagtattaaactaattgctcatcaacaatggggatgtagctcacatggtagagcgctcgctttgcatgcgagaggtacggggttcgataccccgcatctccatttttactttctttaataataatttcatgtaaacaaacaaaaaaaaaaaagaatcttattcacctgtaaataaatgtcgtttttttctttttcccgcgcaataactttgacagttgttttgtagggttttttttggtggagaaagaggagtagagagaagaagcaaagatggagatggcagctcaaatctctcagttgctgaatcagactctcagccccgattgcgaagtagtgcgtgtagctactgaagctctcgatgccctctcactccttccacccttccctttttctctcctctccatcaccatcggtacctacgtaacttattaccaggatctactactttcatttccaatttctttaattaattctttccttctttctttcgattcattaattctgtagaaggtgaaaatcaaggtcaaaaattggcggcagccacataccttaagaatttgacttggcggaagatcgatgagggagtaagtaaggagttcaaagaccagcttttgcgtgctttgctcctcgtcgaacaacctcttctcaaagttttgactgaagtggtatgctacgcttccacacttaatttcatttatcaatattcacagttattcgaattaaagaattaattttgtgtacttaactctgatttttatcaatgaaatgttgaatattaaaaaaaaaaaaggagttaattttgtgtctaagctattaagagtaatttgcatatgcctccataatgtagtttattggttcatgactataggagtcttttgaatatttaacattttgttgaatgatcagcaaacaaagctgccctggttgacgtgtagctcttgtttctctccgtgtcgtatttttcaggcttttgatttattgcctgaattacgtattagtgtaatgccgaactgttctcattaatgaaagttatcctttaattcagaaaaaaagaaaggaattaatctttgtattgttgttgttgttgttgttgttgttgccagttccatattgttgtatccgccgatgttgttaagcagaattcctggccagagcttgtgccagaccttcgttctgctatccagaatagtactcttattaccaattctgctgagtctaattggaacaccatcaatgcccttacagttcttcatgctcttctcaggcctttccaggtatttgcaatatcttttttttttttaactctatagtggacttatgagattaagtgataaaatttgcttattaaatttcatcgcagtatttcttagaccctaaacttgccaaggagcctgtaccgatgcagctggagcaaatctcaaaagaaatactcgttccattgttatctttatttcaccaatttgttgagaaggttgtacttgggcacctcttttctgttactactttgttcagtgaatccatgacaatatatttttttaattttgtaaacaggagatcaaagtaaatactacaagggatgggaccgaggagacagagaagacacttcttcttatatcaaaatgcatatattttgctgtgagtgacatttctgttactatttgtgtgaacatgttattgactcaaaagttaccttgcatgagttacaggaaaaagtgaaaaaaagaaaagaaaagaatggaaaacaaatatatgttgaaataagtaatatagctggttatcttatggattaagctataaccgtactcaaaattataatttagatgtttgttcgctgtgttggatctctttgttcgatctgatgggatgatagctattaaaattattggccgtggactgaaaccattgctgctttaaaagaccccacttccttgcactatttttattatatcttaatagcaaattctcggaactgtttctttcgtaggtgaggtcacatatgccatcttcattagctccacttctgccttcagtctgtcatgatctaattgacattcttggctctctgagctttgattataaggctactattgagagtaagtacttgatgaggttgaagactgggaagagaagtttgcaaatattttgtgccctggttacacgtcaccggaagtattccgataagtaatgcatgtgattagtgtatactttcattaatttaataattattgtgcttgttattaatattgttttcttttttttttctttctgttctaggttaatgcaacgcatgatagacagtgctttaaacatagtgaagcatagtaaaaatatcagtgtacgttgtcctcattgttttcaatttgcttttcaagtgactgacttgtttgcactcaccaagctctcttctttgtttgtatagcttgaaattgtcttaggtatatatgatgttgctgtccttgttgttactatagttagaaactccactgttgctgttttggcaattttttttgttagatgaatggcatttagagttttaataacatgatttttcgttgttttatactcgatctttattctatggcattccattatgaaaaatcttccactatactaatgttcatttttgttgctactcttttttttttgtaatagcttactactacattattttattgtttgtataattgttgctgttattattagtgtttttattaggtttacaaatgaagtttaagattgtctgattcttaattgatccttggcccataaattgtatttgagaagaaaatcctagtttatttctctaaatactagtggtcatattgctctaacgaaaaaaaatcttttgtacacagaagcttgaatttttacaagagcggattgtttcattagcttttgatgtgatttcacgtgtactggagacgggccctgtaagttatctcattattgtttcatccaaaaaaaaggttatctaattagttaaaccataccaaatattacccaaatttcaaatttgggtattgtataaaaatcatttaggtgttatagattgtgtcagtaaaacctataaaattaccattggatggtccgtttgtacaatgtgtgttttatgtaaggagctaaatgtcatttggaaacagggatggagattagtcgcaccccacttttcgttattgttagaaactgcaatctttccagcattagtaatgaatgaaaaggtaaatgttctgaagggaaaaaaaggattttttgtttgaaagtagttcaaaactttccaagtaattaatttcctgtaatgttttggaaaattaccgagtaggatatcactgagtgggaagaagatgcggatgagtttataagaaagaatcttccatctgacctggtatgattgttggtgctgattattatggaattaattcacatttgatcaatgtccatgtcaccgacttaccatgcctgttttgaatgcaggacgaagtttctggatggaaggatgatctgtttacagccagaaaaagtgcaataaatttacttggcgtgattgctatgtcaaaggttgctcttgatgtttttactcgaaacttttctagccatatacattagcttactattcactgggtgcctacagggtcctccagtaagaacttcttcaacttcatcaaagcgaaagaaaggtgaaaagaacaagggaaatagtcgacacagctctattggcgaattgttggttcttcccttcctttcaaagtttcccattccatctggaaataatgaaactggcaacttaaacaagtgagttgaaaaattattttttaatgttgctcaaatgactttgcttttcatttgatttattttcttctattctgggaggactgatggttaaaggaaataatcaattatcatacagcaggccttcattgttcttcgtgccaaaatattctcttagatgcatcagtttcacataatccgattttttttttgagaaaacgtaatccgattatttgtttatcttgagttgagtagtgtgcaagaattctataacttgctaacagtgaccttgaaaacaattcgacctgatctgtttgacaataccattcttctcatgagtggaccttgaagttcagtgacaccagtctttttctattacctggtcaaacttacattttctttactctcggatcatattttatttccctcttatgtgattatttccatgaccaaaatcatcattactactgcccgtgaaagttacattcaaggttttacatttcattcatattgctttacattttatcaagatgattctctcacaaatctactgcggctatcattgcagttattttggtgttttgatggggtacggtagtctgattgatgtaagaatttattatcctacccatttaatcaatcggggaatgtgttctattactagtatttgaagttatacatatgcagtttcttagggagcaagaaccgagacacattacaaatttggttcagatgcggctacttccattgtataggtcatcagtatgtctaccatacttaatggctcctgcaaattgggtacttggagagctagcctcctgtttgcctgaagtacgagtatttctcatcccataattctcttagctcacttgctaatatgtgtttcatttgcttcttcacattgtttatcacattttccttcctttgatatggcatcatagtttcatgaaactcagtaattgtctcaatcagtcttaaaaatgccattttcaggaaataagtgcagatgtatattcttcattacttcatgcattagctgtccttgatgatggggatacttcttgttatcctgtgagggtttctgctgctggggcaattgcagaacttcttgaagtgagtctgaaagtcaaatctttttgttggagcctctttacctatattagagttttatgattatcacatatgggtgttttgttttctggcttcagaatgaatatctgcctcctgattggcttcctcttcttcaagttgtgattggtagaattggtattgatgatgaagatagctctgtattgtttcaacttctcagttctgttgttgaagcgggaaatgaaaatgttgcaattcatatcccattcattgtttcatcattggctggtacaatttcgaagtgcatacctcctaatccggagaagccatggcctcaagtatgcatataattgtataagcagctagctgttgatttgtgattttgaataggcaggctggaattgaatcattagcacataaaaaaaaaagaaaaaaaaaattattaatgttttagccaagaagtatgggattggttagtacctcctataaaaaaaatattttatataacttcttgggcaccctcctatcataggctagctttgagagtgagctctacccaagtgattgtatcaccttccaactgcttaaaaatgaagatggaggaggtgaataaatggaaattatggcccttgttgggagaaaagctaagaaagaaagagaacctaaaattgcttggtattagttacatgcttaaacatcacatttaatggttccaagtgtgtcttctagatttcataaacaacataatttggcatcctgaaattctcacgtgtgctttaattctagtgtgatgttaatcactaagtcataggttgcatgtcttttttgggatgaataatgtcttaaatttgcaactgtaaacataaggaggacgttgataaatatgcattgaaagtgagaaaaactatttcttttccttctgttattttggctctcatgttaattatatgtgtagtgattttttcaaaaacttttcgagtgtgtttaaattgtggcaagtttgaattgtattgtatcagttaaggtgttgtacagttgatgaactgagtttttggtaatagatggttgaaaagggcattgcagccttagccgtgatagctcaatcttgggaaaactctctctctgaagaatctgaggactctagtgaaaagtgggcgtctggtcgagctgctgtgggcagatcattttcagctcttctgcaacaggcttggtttacacctgcaattccattggttggagatcaattgatttagcaatcttcacatttacttaactttacttttagatttcatattgattgcaactccctttatgatgttgatcagaaagacgacatagatgaggtttctactttatcttccataaatgatgcttcaacactactgcgatccatcatgctatcggttactgaaagcaatgcaatttcgaagcttaaattgccggagctattattactttgggctaatctgattgccgaatggaatttgtgggaggaatcagaggatatgtcagttttcgattgcattcaagaagttgttagtctacaaaacagatataagttaaaagagttttttgtaaggccaattccttctcccaaccagcatgttcctaaacgttcgataatagaaggcatcggtgcttttgtaagtgaggcaatttcacaatatccatctgcaatgtggagagcttgctcttgtgttcatatgttgctcacactcccaagagattcagttgaaatcgagggtgtgatgcagtcattggcagttgctttttctggggttgcattttctcggtttaatgagcttcagagtaaaccttgttcacaatggaagcccttgttgctctccttaacatcatgctatttgtgctgtcctgatcttgtagagagatcattgaacaaagatgtcaatggagctttagaaatctgggcatctgaattgtcgaaaatctgcagtagatcaaatgaagcttgcccgacaatggagtctgagataaggctgattggttagtatctaccactttcaggatttgtacattttcattttttttcctcggtgtcagttatgtggactcactaactgtttgttgtatggctctcagttatggcactggccaagataattgaaaggcacgtggaatcagggaaaccccgtgatagtttgttagaggaatgctttacttcattaatggaggcatccgttcggtttaaagaaattcaggaagaagaggctgaagaagatgaagacaatggagaggtcggaagtgatgaagaagaagatgatgacgatgatgatgaaactgacgatgatgacgatgaggttccacttgaaaatgacataatttcatctgctaaatttgtgtttactgtttgatagggtgtttgcattataattcatgcatcttatgctgctattgtctaattgtcatattctcttggtgatttgaactaggattccgaggctgaggaacttgaagaaactgaggaagagtttcttaataggtatgcaaaagtagctgttgctttggaagaaggtacagtcatcgaagaggaggaggatttggatgaccaagatggtgatgatgatgagattgaattgggtaggcatcttgttcttgtagatttttggtaaaaatgattgaaagtgtgaaatcaaatcaaattgaatatttattgacaactgcattattgcgttacaggttatttgaaggatgttgatctgcaaaaggttgtgctatcaatatttgagagatatcatcccattttgattcaaggacaaccgatgccgaccgagatatacacaagctttgttgactccttccctcaatttaatttattttttcaaaaattgtaagtgttgtgattatgatgcttgtgaaattagtttcaattattatgagtgtttagttacaagttttgataggatttttagtctgctttgaatatttaagcaaagtggtactggtaagatgggcctggggatgtaataaaatattaataaggatggagtttggtggggccggccacttgctctggctttaagagacaagaagaagcacgttgtgtgggtgtgggtgtgggtgtggagtctgtggactaagtacaaagcttgattgaagcataaagtagttgttattttattgcatgaaaatggaacccacttgcacttgatatgttacttttggtagccaattcatttcattgtagtagtatagtaatagtaactattgtttctgattcctcaatcaatcaatcaatatactgtattcatttttcttaattttggctcccatacattaatcgtaatctttgtgttcctattgcattgctattgttattcttatatgggcatttaattaatgatagtggaataataatgaggggagatataaaacatcatcctcatcaatcataataattcaaaaaggacagccaatttaaagcccaaacatgcagtgagtctctctctctctctctctctctctctctgcatgtggaaatgatgattaaccaattttcttttgttatcaaaacaataataataataatattctatggtatgaacgatggtagtgtataataatatataataatttgtcactgcatactgtcagtcttgcttggcatgtgggtgggatagaataaagaggagtataataattaagaaattatggagaagactatatagtaaattaaatattgagtaataatgacaacataaacatagatagagaaagaaaaaagcaaaggtaaggtaggggggatgcactgttacatttatttgcgtacaatttacaaaaatggagtttatatagagactcaaaacacacacacaaaaaaaaaaatactatcatcattaaataaaatattatatagtggatgtttaaattaatgtattaatcagtgattatatattttattttattgatttgattttttattattctagtcatattattgtataaatgagaggtttattctattacaataaactgttgagaaattctcagttttttttttctctcttcatcttcttctatatttttttttatctattttatattatttataagaattttataacaatattatcttttagtttagcatagtgtgaaggaaggaaggaggcttcggagttcaaggtatgtaggaaacattgaccttaattaaacacatatatatatttatgataaacaaaggtttccttttctttcttccaattaacctttacagactaatctactttattattaaaatgtaaagagtactatataaacaaggaagttcagttcatgtgcctattccaatttcaattatttggataatattaacatatataacatgttgcttcgaacctagtgaatgtcatcgaactcatgattataaacatcaaccaaccccacacaaaaaaaaaaaaactgaaaacatttttatgtattagtttactttggggttaattaggtaacatatattaatattatagaatagaatagaatagaatccgagagagactgcattgtagatatggttgtctctcttgcccaatctccttgctccgtaccactacaacatgtgattgtgacttgtgaccatatcacattcacatataaatatattcacatgcatctatacatacatatacttgtacttattatatatgtgttttgttggaattttctaggccaatcaatttgtagaaattttaaattaacacatcaatactattaaggattgaaataaatgagactccatattcaaatatactaatagaacattaccttcgaagggtggtaaacaacatatttatcatttctcctaacaatattatatggcctcatatcacacttaatagagtgaatatattataatatgtaatgagagtaattgatattatttggaaaatttggctgaatatgtatctattaaataaaattaattacttaaactaaagttaacgtgtattttttgtgtgccaacttttgagtatactcctaaattatccctttcatttaaaaagcccaatagattttaagttggacacatttgggtgtaggtctgacaccaatggttagttaatatttttatgtcctaaatttaactagaatatctcaacttatttagcctttacgaatcttagtcaaaatcacacagggaattaatttttttgactttttaaaaatcgagtataacacctcaaattattcctttcatttcaaaaagcccaataaagaaacccgcttctattctctctttccctctcgctctttctctctcgctttgtcagttttattctcacccaaccgaccaccacaaaacactccaaattcatcaatcgcactgctataccaccacccacgaccctccctttctttggttctctccggtgtgtggctgactacccacgaccaccactgttgaacggacattacgaacgatttgtggtttctttatcttttttgtttactttttggtaaaaaattgacttttggtgaaatttatgttttttgtgttttttttttgtatattgtctgagatagtagtgtaatttggaggttaggaatgaaagtctgatggtggtaagatggttgataaaggcacgatatggttcgataggtgcttaaaatttatgtcatagaagaaagagagagtgtgtgagattttttatataagagaggtaatttggccaaactacaaatatatcttttattttcgtttttttctttaataaattaaaattccaaagataaaactattttaataattgcttcatcggtttttttttttttgaaattttggttttattttcgatttttatacataatcgaaattaaaagtttttatatttatgcgggatacataaccgaaattaaaagtgtttatatttatgtcatcgccttaaatgacttcggttgcgatttttaataaaatccgaagataaactggcctaaaaaccgaagataaaggccctttctctagtagtgtggggagatatgaaaaatagacctacattgccaatagtgatttaatttagtttatgttgttatttttcctattattttatcaaaggaaaatttaactttctatgtatttattggattaaaattatttctctaaacctaagttaacccatatgggtagaatcgactaatgttttataaaacccaattctgcccctcccatttcaaacacttgaccctctctcttcctcccttttctctctcgctctctaaactcaccccaaggacttgacccataacccaccacccacaacctcggtctcttttctccacgactaccgcgaccacaaacccaacgacccacgtgcccaatgatcactggacccaacgacccacggacccaacgacttctccatcaactacgacttctccatcgaaaatattgtcaaaggaataaattatatgatttaacgtctgttatctttgagttgatgttagatttagcatcgaaaatggtcggaactgagttttgggtagaaaattgatttttctgccaggcccaatagtcgtacgatggtggcatgatgctttcatattgttaaaatgagtaaaagttgaagatgaaggtctgatggtggctcgatgctaccgataaatgtaggatatggttcgatggtagtttgatggtggtccgatagtgacataatgccttcctcacgagcttaatgaatggagtttaacatttataaatgtagaatatggttcgatagtggctaatggtggtccgataatagtatgatgctatcattttttaagtatacaaacataaaaaaacaagtatcattaggctaccatcggaccattattagacttccatcagagtaccgtcaatataaatgaaaatagaaagtatggatagtgaaattagtagagctgagaaatatattataagtattaattaaagtattctttttttctttttttaatttaataagtttgtgttaaaaaaatttaatatgtaagcatataaatttaaatttctcttaccgaatttccctattatatgtatggttggttggtaatgatggttaatggtacctacataacatatatgtgtagtgtagtgtagtgtatgtatgaatagggataggcataggagtaggccatatataggaaggataggagtgagaaaaggaaattaattaggaaaatgaattcacgtgtagcacatgtgggaaagttgaagctggtggagtggaatggaacacacaagcaataatattccatctattatatatatacatgtatcatgtatgtatgtattagtcttctcttctcatttttttttaataaataattacctcatctcacggatcttgcctctctctttcctattctcatgagcaaaagtagaaccacacacacaattaatgggtatatataagtctttttaattgtagatgagttatattataaacactactggagaga

SEQ ID NO: 129 - DNA, 3638 bp, Cannabis sativa
caatctcctattgttaattacaaagactcaaactattccatatctatttgagcaattttcccttttctaacacttacaattttatttttaataatgaatttcagttcttgaacacacctatcaattgtttgcattttgtaatttcaaaagcaatcatttttattgctgcagacttggtaaatcaaacccacaagcatggctgaaaagacttttttcttgaattttgatattttacatctcgagatccaccttagcagcttcttcattgagcacgtacctgtcctccattgcagccagtccttgagtttatcaagacatttcttgttgaactcacattaaaaaaaatatgatccacttgctccgggctatcaccacaaagaagacaagtatcttcggagcaaatcttatagttcactaacttgtctcttgtttggagaagattctggattgccagccaagttataaagctgtgttttggcacattatatctgctccacacctctcggctccatctcactttaatttgatcttctggcagaactttgtagcatttttggatactataaacccgatccataagcagctggaattgagggaagtatttattttttccttgattctcacaatctgtttccaataccaactacttatagttgaggcgttatagtcccaccaaatttgtttttcttcaggtagacactatgtatccacctcacccaaaggttttctttttttgatgctcacattttttttttgttctgactaaaaagttgttaataaaagtggtctttttttgtagtgacaatacatttccttgatgcaccctctacctattttagcatttagaagaaatttttagtccatttttttttttcatattcgtgtatgttatacttatgtaagatattttataaaatttgaaaaaattcagaatagtttagaatatagaaagcagtgttcaaacgatctattttacacacatataaaataaaatagtcacgcatatacaacatactgtttgaatcttattcttggtgtgctaaattttttcagtttttttaaaattttacagaatgtcttaataacgtacataaccatgagagaaaatttaactaagaattatttcgaagactaaaataaatagggatatatcagtggatcatttccaataatatatatttattcatatgattaatctacattaacaatatcttgaagatttatatgctgatcattaattaggataatcaaaataattattgggcacaaaaggaacctttatgtacagtgacagcctaccatgtttataattaaggactctaattaaatagctccaaccaagaggagacaacaataaagtaattaatgtttcttcatcaccacatgatgacagacaagagcaacttcgtatgaagctaggttgtctttaattgtaaaccatatatattgttatataacaatgatctcaacaagaccttaacattaatttttatcaagttatatattccacacaaaaaaagggagaagaaaaacaaaaacaataatggcagcctcatcattaatcaaaatctcaaagactgaaagtattgttgaggaacagttatccagattgacaacatcatcagaggcaacaacaacaacatcatcttcattatgcaatagattaagtgatcttaaggatttgcatgagagctttaattttttacttcagtttcagctacaaaccatacaagccctaaagaccaagaaaacccttgaacaagtactagatggatctcttgggctattggattcatgttccaccacaagggatattttatctatgataaaacaaacccttcaagatctccaatcatctttgagaagaaagagaggctttgattcatctgggttggaaaatgaagttaatttgtacatgttatccaagaaaaaattgctggccaaaatgatcaccaagtgtttgaagaatgttatgatgacaaaggcttattataaaaataattgtcatgatttattttctttagttgaggaagctacttgtgaagtgtttcgatcactactggctttcatttctccaccaaagacaagatcattatcatcaaggtctttagctttgaagttgtttcgatctagaaaagtggcatgtgaaggatatatatatgccactcaattagaaaaaattgatgcaacattgatgattctcaaggccaataataaagacatcaaaattgtacaagtgaaacaagtgttgaaggagttggagtctttagagtccactatccaagagttggataataatcttgaatgtatctttaggtgtttgctgaaaacaagggtttccctcctaaacctctacactcatgaatagtcaaatatgtatcacttcaaaactacttgtaatattcgataatttttattttttgttgtacaaataaatattaatatacatataaagattgaagacattttcttctccatattaaattaattttatagttcaatttccttattccctactttctaagtaactattataattagtttaaatctatctaacttaattttatagttttatttaggttaaatagcaacataagtactcaaaattttaagtttgtaagcggtataaactcaatgattattttagcgacataagtacctaacatttgtaaaactgtaattttcctcaaattttatcaataaagactccgttttgcatttcttaaaagaacatttagaagtaactaattctacatatttctatctagacctaataatctagaatttgagccttatatgtgccctgtttaagacaataacatagtctgtactgacgaaattataaaaaaattataattttataaacattgagtacttgtgctcctaaaaacactacatcaatttgagatattataggggtgacaaaagagtgtcgcctccaagaaacataattaattttttaatcgatacaacattatgggcgacatttgtcgtcccaaaagtattagacgcgacaagttactagtaggggcgacaaaagttgcaaaaattgcccctaataaatttaaaactatccactgcccaagggtgaaattttcctgcttacactatcaggggcgacaaaagtcgcccctaataccctatcacctaacacaatcaaagtattaagtcacccctaataccctcccacctaacacagtcaaattattaggggcgactttatcgcccctaatggtcgctcctaatagttttgcatttaaatctagatccccttcttcctcgacccattctcttccctttcccattttttttttatctaaaaaacctccattaacaaccctgatcccatgaccacgaacaagatgaagaggaagatgagggagcagccattaacgaccccaactccgagaccacgaacaagaagaagaggaagaggagagaacgaccattaacgactcgagaacaaggtttgtttttatttttagaaattttttcattttcatattcttatttttttctccatttcattctctaaaaatacaaagaaaaaaaaactatctcccaaatcggcatccacaccatccgtctgcaccactcaactctagcattcacccaacgtcggcctccactcaatctca

SEQ ID NO: 130 - DNA, 6179 bp, Cannabis sativa
ccaccgcttaaccctcctgcccctgatactggagacggcggcggtggaggaggagccgatgacggaactcctcttgctggtggcccgggcggtgcagaaggtggtggagtagatggtggcggagatggtggtggagtagatggtggcgacgatggtggtggggtaggtggcgatgatggtggtggtggcgacgatggtggtggcgtaggtggcgatgatggtggcgacgatggtggtggagtagatggtggtgacgatggtggtggcgtaggtggcgatgatggtggcgacgatggtggtggcgtagatggtggcggcgatggtggcgtagatggtggcggcgtaaatggtggtggtggcggcggagatggtggaggtgctgtatgaactggtaaggttagtagtactgaaaagttaacaaagagaaacaaggttagtagtaagggcctcatgacttattgtatatgacagttgagacaatgcgtatatatgtacacaaaatattattatgatttcaaggctcactaatgaggctcactcaataaaattaaaagtctatatatattatgtgtatcgatatatgtttatagaaatattagacggagatatctatagttggtaaaataaaactattagatgaataatcaagaaagtacatagtattaaacgctatggatatggacatttattacctatatatgatgtgaatatttaaatgaattattaagtacttgaaaatttcacaatagaaaagaaactaatgattattgcagattggaatgataataaaacattaagaagccggcaccggcttcatactaattatcttattcttatggttattatataatttttatacatgtcattgtataaaaaatgttcctttatactctacatcagagaaaattctcttctattgctcactatttttttccaatattaattatactcttggaaacaatagattagtaagtacactaatttttctactctgatttatattatattataattaattcattaattattacaaattatatacctacaatgtattttttgatatgcatgtgtcatatttattcatataatatggtggtgcagaacacatttgtttaatggtgctcactgctctatgcttttttcttctttcttttatgcttttcatatttcctgtccaagaatgtgaagagaaattatttattcaatttcaaaggcatacaatgtttattatgtaatgaatctaattgtctcatttcataaataaatgaatctagttaattgtcttattttgaattgcacaaggtatatgcttcccctctttgctcagagtctatttttgacatgtcaaaggtttttatatggggctccaaaatgattattgagaatataagatatcaaaagctttcttttttagaaactgagtatacttgcatgagttactatattctatttttttttttaaaaaaaatactttaccaattttttttttttttaattttaccttaaatttttacataacatcatacatcatcaattacttaattttttctctattaataaaaatatttagctaagaggtaaagcttagcttaatatggagatgcactattcatgagctaaaatattgaagtattatagctcatctattcatctattattggaagggtgttttcaaaagttttgagtatattttaattttgtagctattatacatatttattggaagtgctgagtatattcccctaataaaaagatgaaaacaaacatctacatttatatctataatctagatatatatcaattaattattgattaaggattgtaaaatgataaggggtagtttaagttgttaaacactacaaaaggtagtatgacgtagtcgttattagtatattttaatattggattctacttattttaatttaataaataatataaaaaaaaaatactagttaatcataagatactacatttgtgtggtgttggaaaacttagagcatctcccataaaagatgtaaaagttgtactatgtttggcacaaaaaatgacattatagtatatttgcatcaatttttaacattatactcaaatgcaaaagaaaaatttacaaaatagaccaaaattttgaaaaaaaaaaataaaataaaatacaaaaacacttcaacaccaaaaaaaaaaaaaatcattttactctttcaactttttatttataaaaatacatctttagtaaaaataataaactgtttttttagttgttttataatttatttatagtagcattaaagttatcatgaggttatttttctagttgtttcatagtttatttaaagttgatttataattgtcatgagtttaatttttgattattttagttgttttttactttttgttaagtaaaatatatttttataaattaaaatttttatgtggtaaaattataaataaaaaacagtattttttagaattttaatattgttaataaaatataaaagaaaataacttttttattaattttattgtataaagtaataaaaaaaataatatacctagagtatttatggtttgtatgataacaaatattgttataataaatttacattaccttttaacacgttattggaatacaattttttgataaatcagctgtagtttaattttgcatgactaatttacttttctattgaagatgctcttaaggttgcaaaataaaaatgctccatagaattattcttgaattggaatccaaaaaaagtgaatattttttaaaaacatattctacaaaattattttcattttataactttgtaattgagactcaaaatttaaaaaaaataatttccaaaaattttttaaacaatattttttcttaatcaatattttatacaccccaacccaaaccttagacctgaactccgacccccaccccacttaaataaaatgaaaaaacttaaaataaaaatgaaaattataaaacacacttttgttttttatttttaaaattaaaaaacaaaaatatttataaaacacatatttattttttaaaaacacaaattttacttttatttatataattaaaaaaataaaaaataaaaaaattaccaaacgacataaattaatttgtttttcaaaaaatcaattgttatatctgctacaaatcattccatatggcttcaactttcagtacttcttcaatcccatagaagaaagtccctataaagatatatattattgcttgataatttataaattaagctttcatttttttaacaacaaaagtaataataataataaaaaaacacttcatgctcgcaatcatataaaattagagtgagggatcctaaagatccacttttgtgtgtttgacttcccataggcaaaaatacaaagactaaccacaagaatcaaagatctgctcttccgggatatctagggaacggaataacatctctaatgttgtcaatgcctgtcgcaaacagaatcatcctctcaaagccgagaccgaaaccactgtgtttcactgtgccaaaacgacgcaagtcaaggtaccattcatatggctcggtagggagccccatctcttggatcctgcaacaattcatggaatgtgtcaccatcaaacttgatctacttggtttaagacgaaaaagatccacatactgttcctctttccatcagagagataatcccaacacgaaaaggttgcaataattttgaaactaaaaatgtgaaagacaacttctcgtacctgctttgaataacatcataacgctcctctctctggctgccgcctatcaattctcccacctgaaaatttaagacaagaattaactgatatacaggacagacactaacttaacaaaatgcctaaacaatgttcttgcggagctttatatagagcaaggaaaaaaacagcctacctttggcacaagaacatccatagcagcaactgttttacaatcatcattcaacctcatgtaaaatgcttttattccttttgggtaattataaacaataacaggcttcttgaacataacttctgtcaagtatctgcaaaatcaggtaccaggaaatcaactacctcaacaaataattaatgaaacaaaaggaaaatagttgtaataaaatttgcatacctttcatgttcagatgccaaatcaattccccactctaccttgttctcaaactgcttaccattcttcacagcctcttctaaaagctctactgcttttgtatatgttatccgttcaaagggggttgaagcaaccatttttaatcgagtgatgcaacctttatcaaatttgtcagccataaactccatatcatcacagcaattgtcaagtaaccactggcaaagaaatctcacatatgcctctgcgcagttcatatcatcctacacatacatatatggaaacttttaagtcttacttagcacagtgctatgtttcacatagacaaaactgcatcgacagcatagatcatcttatacacacatcatatgaaattatccatagccactaatatacaaaacagttttgaacacaagctaaaggaatacgaaagaaagaataagcaatgtcaaagagctaggacaaataacctaagtaaaagaagctattgctaagaagaggcaaagcatgctcaaaaaaacactacaaggcagatacaatatatgtccattgctttgtacaagaagttgttagatgcggatgtatgtgatggttctgaaagagcgacaagaattaataataccgtgtttctataatcaagacaaccaaatcaacattttcccacaattcaacccatgtataactcaatttctaaagaggtagctacatgaaaatattacaaggtaatgtgagaaaaatggtcaccaaataatatattagctctaactgaaaattgcattccagacaggaaaaaaaattgcatactaagtttcacatacctgaagatcagaaaatgctaattcaggctccaccatccaaaactctgccaaatgcctcgtggtgtgagaatgctcagcccgaaaagtaggtccaaacgtataaacgctactgagagcacatgcaaatgactcaacttgtaattgaccagatacagtcagaaaagcttgacgggcaaagaaatcttgtgtataatcaatctttccatcttttttgggaatacccggcttaagcttagatctctcctccaatttcgcataatcttccttggctttcttcagtagaaccacagaagcaccaatctcctgcttacttgctttagcagctttcagctgggagacagcatctcctttctccttgacaacaagcctggcggcttctaagtcggactccgatgggggaggattcttaataagctccttctccaatctttcagcttcattaatcaaagtagtaacttgaaacatctcaccagcaccctcacagtcactggtggttataattggtgtgtgcacataaagaaaactatgcttttgaaaaaatgtatgggtggcaaatgcaagggcatttcttatacgggcaattgcagaaatctggaaatatgtaccaaagattaaaattccagtcgaaacacaatgcaaaataattactttaattgaattcaacaacagaattagtccatttttctttctatcataaaccaatgagaatttttgtttaaatcatttcacataaacaagaattgatttaccataatttaagtaagtaggaaaatgtacataccgtattggtcctgggacgaagatgaacaaagtccctcaaaaactcaagcgtgagtcttgtcttaggtaatgggtacttggccgggtcgactggacccacgtgaactaccttctcgacccggagctccactttctgcttagtcccagccggaggaagtttcaaaacgccatccacagacacgcaagtcccagttgacacgagctggccaaggtcagccttgtccgcctccacaataacctggagattccctgggcaagacccatcgtttagctccaagaaggcaaatgcgtccttgtccgcctttcgaccggtcttgacccacccacctattcgtacacgttgcccagcaagtccggatccgccatcggatcgggaaataatggaacgaattaaaactcggtcagagaactcagctttcaaatcttcgtagctggggactccgtcgttcatggt

SEQ ID NO: 131 - DNA, 2266 bp, Cannabis sativa
tatggaaatcatttctgttaagtttctttaaaaagataaaaagaagaaaaccacttggttgttcttctttagtccactgttttctgttaaccataaatgaatgttggaaattttgttttaggcctgtaagctgaaattaggagatctgaaaggagcactattagacacagactttgcaatgcgcgatggagagaataatgtgaaagctctgtttcgccaaggtcaggttggtatcttccattaattactgaaggaagtttagttgagccactcatatatatagtctatgaaattttcccattcccctgttagtctattttattttgtgctcctttaattctttttttccctataaactatgtaaagcatatcttttgggccttgttattgaaatggttgattctaatggttaacattatattttcaaatcttaacaatttggccccctctttttcaggcttacatggcccttaatgacattgattctgcagttgaaagcttcaagaaggcaatagatttggagccaaatgatggttagtgaatgttttagtctgtcttttggtcattttttttgttagaaaatcgaacaacctaataactagaattttcaaactataattttgtgtgtactcaaattgagtgtgtcgaaatctgtttgaacaatcctggttactgtgtgtggaggtcttgcattgtccaaaatctttgtaatttagtttttgacttccaatttaatttctgagcatctaatagttgaccaggtcttctaatttcttgctatataaaataaagtacataatggcacaataaagtgatttctatcttcattacctaccttttagattaaattgttgaaacttgctaataccttctatctatttggtgattacagctggaataaaaaaagaactcgccattgctaagaagagggtatgtaacttcaaaccaaattttttgatttttaaatagctagaaagaattacttttcattgtaattacatgtaaaatgtggtgaactattacagattgctgataggcgcgatctggagagaaaagcatacagcaaaatgtttcaatagcattttagcaggaaaaccggtattcttataatgtctgttattttcatttcataattccgttttggtatgtagattccttatgttgtttttattatgcaggctgcccacaaattcagagaatgtatcagatttcatgaacttaatagttagagtcaagtggttcagtcttttttggctactacccaacattctggaggagattaaggtaataaattgttaagaatagtctacatctttgttctcgaatgatttagctgtggttttctttcaagcaattaggtctttgtttcttgttatggccatacttaccaatgctttttttggtttttttggtaggttttttttttttaatatgaatggagaacaaaccgctccccacaggatatatacaaactgtaaaaattctgaggcttgaaccaaatctgatagagttctagttcgtttttgttcatctcttcatgtgggaagtcttttctagcttagagaaacttgttaacttttactggattattataaatcaagaattttgtcatattccatttgggaaaggattttgggtatatagtgtgaaattttgattttatcttgtcttggctatttgttggaatctactatgttcatgttcctcgtaacgcccaaaagttttcatggcattctggtaccttctgatctcaggcccaccaacctttatgattggccttaatatgcttctttaactacttttatatgtataattttgtcaaacgtattccaacatagaatggtggccaacttaattttgtttttatacatgcttgtccaataaaactaacaaggtaaaaccagaaccattgccaaggcagtcttgcaatttgaagctgtttttgctgcattttctgaaaaagtatgtaacggcttaccattattgtcctgcctgtctcagttgagtgccattaaaatatacctttcaaatttataagagctggtaggtgaacgcaatgagaggccaaataaaactcttagcccaggcataaagaatctgaacagtgcccaatacatcaatcagtcaatatgactacactgtttttcctttctaccttttccgtagttgcttgacacacttgaaccttttttctttatgggtataatcaagttagagcgtacaggaacagaataaagcgcacacattttaatggaaaggaaaaaac

SEQ ID NO: 132 - DNA, 1985 bp, Cannabis sativa
  modified_base (932)..(932): a, c, t, g, unknown or other
  modified_base (963)..(963): a, c, t, g, unknown or other
  modified_base (990)..(990): a, c, t, g, unknown or other
  modified_base (1027)..(1027): a, c, t, g, unknown or other
  modified_base (1053)..(1053): a, c, t, g, unknown or other
aaaaaaaaaacaaatccatagaataacatttttgaaaaaagttcacatatatttttgtaaacttttgtcataaaaaccgtaaaccctaactaaaacttcttttcaatataaaatgaaaaaaggaaaagcattagcctagtacttggttgatttgatgtagttaaagaccaaattcccatcattgtaactgatatgagaagctggaagaaaatgaggatcagcaatgagatcatttccactaatgagatcattaacaagaatcattccaactgcaccggcaagagcggcctcttgacccttttcgattcgagcaatgtcgcctctaacgcaaactaagatcttctccttcaccttcttgggatcaagagtgttaggtttacataacaatctgaaattaaactatgttaattagcattagtgtacaaaaaaaagtgaatattatagacaacattatatataatgttaataaaacatatttagattttttatacttacgcttctgaagcattggctttggtcaacttagcattatctccacttatcaatggatacatctttggagatggtaatggtatggaagaaagactttgaccctatcatatacattggtagaatatgttaaaagagaattcaaaacatttattgaaagtacaacaatttttgtttaacattgttttaagggaattcaacactacaaaaaaatgttacattaagtgataattttttagtcaacataaaatttttgtgactaaatgtgacttttaatcacaacaaaaaaatatttgtgactaaaatatagtatttaaatacaagttgtcactaatttagttttagtcataataggtgttgcgactaaaaatacatttagtcacaacaaactgtaattttgtaactaatacttttcaccagtgactttttagtcacaacacagnagtgactttttagtcacaacacaggaatgantttttagtcacaacacaggaatgatantttagtcacaacacaggaatgataatttataattagnacaggaatgataatttataattagtnacaatttttttacttttagtcataagttttgttgtgactaaaagtaagatattttgtagtgcaaatttactaagctatgtttatgacctcgaaatatctcaaatttacttatatttaattgtaacaatttttttaaaaaaaattagtgaatgtgaggctctcttcactcaccttgaggtgctttccatttccaagagaaacgaaagcattgaattctcggtcaattgtgctagctccaacggttataatccatggcgccccattaccaacagacccttcagtcggtccagcattgccagcagaagcaacaaccacaataccattcttaatggcatgaaaagagccaattgaaatagcatcttcaaaaaactcggtaacagaaccgcctagagagaccgagagcacatcaactccatcagcaattgcagcctcaaaaccggccaaaatgtcagagtcaaagcacatttctccttcccagcataccttgtatgcagccacgcgtgccttgggagagccacccttggcagtgccattcccgttgttgaacacatttgccccgggaacaaagccgcctcccgcagtggataaagtgtgggtgccatgaccggcatggtctcggggtgtgtacatggttttgttgagtttaggggttattttacggttcacaagctggagaaacattgagtagcctttgttgaagtaccttgctcctataagcttcctgtaattatacataaaattttattattatgacaatttcacttattataagattatattaccaatccctttcaaaaagaaaaagttgaatatatattatattatcaaaatggtttaatagtaatgtcatgatataaaaaaaatcatgtatgatttctttgaaatgtgaaatttgttaggtttttttaggtaatttagttgtcaaaatattt

SEQ ID NO: 133 - DNA, 5701 bp, Cannabis sativa
tacacaaggtgccttgtgtcccaagtaaccacacaagcttcaaaggcccgtggcctcgcttttctttcgtcgaagaaatgcaaattttccattaatacaagaatcttatcctagaatttagtagttctgcattgatacaatagagagaaactaaaccgacaacaggaaaaaaatcgaaacaacaacagcagcaacaacgcattcctgttgatttttatgttacagctacataatgttagtacaccgatgaagggaaaacactgcagtcatcggcgaatccacaaactactactgtcaggaatcggtagaaaataaaacttaaataagaactacatactttcaaaaggtcacgaactccacacacaagcagcgctactaccgttggagagagatcttcttcctggctacaaaagattagtatcagaaaaccgaaaaaggggaatcggttcaaaaaatattaaacaaaaacctatcagtattacaagttctcgagttaaaaaaggcggccgattgatagccatcgacattaagaaaaataaaggtgctttcttttcccctttccttcctcgaacaccgagtcagcctagtaaaatatagtcatattatataccttgattgactagagttgcaaaacatgaatcccacaattgcaacacacaatgttttgaagaacacatacattttttggggaatatgaatccaaagtctgagattaagataaggctcacctcaataataccataaaagaaaatacagagaaaatatataatcgaaattcatgtactgataagagttaacggggcgttacaaatcttgcttttgaaatttgacaccaaagttaatggcgcgggagtaatttccataatcaaattacacttatagggataataattagcatatatatacttggttatggaagagtgaaagggtaagcagcaagccctttcttccgaattcagtaagcaaattaatgactggtctattttagaactcaaacatacataagccatgaaattgaataaatgcatataaaagcaataaaagaaatcaaatgaaaaatcatttatatgatcactaacctttccaaaaagcttgtatgcaaggtccatcattacccaaattacccttgatagactacagacaaaagaagcctttgcactttgctgccccgcagagacattttctcttcctttggtctatttcatcgtctggtactacaccgtaatcataagtcaattctgccatgggaggaatgtgtctgatcgcaaagaaagtaacatgaagatcaggctcgtttctgttttcacgcgaaactggttgccagatcaaattgggattacagctgtggttcataaaacgtgcaacattccccgaatattttgcacttataacaagaggaaatgggagtttcgaaggttcaacgggatcaccaggcataactccaagtggttgaggagtacgagtagcatcaaaaacgaattcatcgtctacatcaatcccgaacttatctatcttagtaggatcaacaacttgaccagcatattcacaaataaatgttccagctcggatggggtcaagtgtccttaaaccccaacctctgttcttagttttaaacacttccaaatgaatcttcaggccagcttgagatacgcggtttttgcaattagaagcacattgacaggaaggtccgcactcttgtactaaggccttttgagtcacaataagtccagttgaggtatatgggagaaaatctccgttcttttgaatacaagtacagttggaattagtcggtaaacatccaccgacgcaaagacatccagaagaaggaatggttaagttcattggattgggatacttgacagtagaaatgtaagtgaaatgagcaggacccttctcgccatctacatcattaaccaaagaaaccggtactttttcttcccccgaagtaagatcaggcaatacaacaccaacccgagaagtatctccacctttccattgttcaaccgatttccatatcctaaaagcttcaggctgattaggcagtctaacaaacttatacttgaaaacattgcaaccgctcttcccttctttctccacccacgattcttgtattttgtatacaccgtcgtagacatatattttaccagctacagtgttctgatccctcagaccccgaataactcttatctcattgcccttatgtgtagatttctccaaagcaagattacccctttccagcttctgatccatcattgccctatcttttctgttaacaccaccttgaccgctataaataataacatcgggatcatcagcataatcttcgtatccaccagaagaaacaatactcactgcaagaggctcttcctctgaagagtttttgacagttaaataatcaattccagccatacttggagcatgtaatccgagcaaacacaactccattcggaagtaaaaaatatccccaatttcaacaccaggaacagctccaatcctcttattagtatttgtccgaatacccttattcataaacagtgtaccagcccttagatcgggacgcttattccctcctggagtactaacatcttccatttgtgaaatttttctacgaagcaaatcataaaccagagtaatatagtcaacagagcttcggtcaccttcagtttgtctaaacacatcactatatgctgtttgaattttctcaactaacaaatctacagcagcatcagaagaggcaacattaatgtcctgtccctggccaccaccactaccccgttttctacctctacgctttggcctccccgactttgtaagtccttcttcggataaaaactcgccactctcattttgattatcagtaaactctccttcctcagcaggcgagctttgtgtctgagcacggcttctagtcatccttttagacgagccagcacttccattagcaacccccgtagctcgattcctagcagtcggtggagtcctgaacgaattaattggaactgcattcgatatcggtgcattgttaaagctctgatggtggacaccggacggggtagatgtatgttgttcgggtggtctttgagatgaatcttgtgaattgtaaaaaggataaaagggagttactccattaggaaaaggtccagttggagtagcacaaacaaaaggagcagcaccaccttgtggagttgaaaatgttgaaccatttggtgcatttggaaaaacaggtaaaagacatcttaaaggctttacattcaaaacccttgatttatcaaatgcaccagtaacaggagtagaagaatcttcaccaaaactctgatgatccattaatttaaacaccttccaaaaccccttttcttctaaattcttagcaacaacactcttcccttcttctacttctacttcttctctatcaaaataacacaaacctacatctaataataacacaacaacagcagcaatatcaagatcaaatcttcaataaaagccccaattgagttaaattttacatgcaacaacaagccatgaaaatgaaaaggaaaacacttaaatttgcatgtaatctgtaaatttaaacaaccaaaaacaaaaggggaagaaagctacctaaacatactatagatactgaaaagaacagagaaacctaagcttttgagctaagttgaggtaacaactatactcatttccaaaccaaaatcaaaagacccaacaaaacattaaccccaaaattgagtaaatttcttcacttttctcagaaaacaaaaagtgggtcagagaaatcactcaacaaatcgaacaacaaaacctcaaaaacccaaacgaatacgagatcagaaacaaaacccagaaactaaaaaacactaaaacccaaaaagactcaatctttactcttctctttaaagaaaacaaaccgataaaaatgggttttttctttcagatcaagagatcaaagcaataatatagactcaaaaaatggtgcgagtaaaaagtgaaacatagttataaggaaactcaaatcaaactcccatgatctttacatatacatacctgaaaatccaggattagagagatttagctgagattcgagaagaggtgtttttgggtctgaacctcaattttttttttcaaagtacaactaaagctaatgctaatgaacaatgtttttggtatgaattgttttatttatttatttatttatttaaaacaatttcaatttcgaacaagagagaaagatcaagtggttgtcggaccatggagtgttccatggaacacatgtcaacgtgttgtaaagtccaagctttgaaactgaactattttacttagcttatatattatcttatgaatttatgtactttagcttctcttttatctttcaaataaattatggattttttttttcaaaacaaaggtgcatttttattgagataaattatggattttattattttattttaaaaaaaataatctaataagaataatattatattatatagaaaaattactttatatactattttttaattttttttatttaaatttacagtttgtgatgctctagtaattgtgatttctcatgtggttacagtttgggttgcgccggcagtttcttcagtgatttttatgtggatttttatatggcttttggttgtgattaagttgctttgttagttactataggtgtttctatgtgaaattttgtaaaaaaaaaaaaaaaaaattgtaaagtataaaaatgaagaaaaaaatcctattatatatcctatgtatgcatttataagaataatataatttcatttatggattatatatgtactttagtttaaagtcttctcttttaccttctttctttgaccattcaaaaaaaaaaaaaaagccttctttttttattattattttttttttaaagtgtatttttattgagaaattatggatttattttttacaaaaaatctaatttcattaatttataagagtaatattagaagttatatacatttatttgacttttcatttataagaataatattagaagttatatacatttatatgggaaaaaatgaatagattagatatgggaagaaaatggcaaggttgttaagggtaagaattttatttttcaagataaaattaaaaaataattttaccctttaaaatatatctcatacaataattattttatattttatttaattagattcatataggataattgagttaattcaatttttcttttttaacaaagtaaataaaataaaatcattttgatttttttccaaaccattttagtaaaaaatataataataataataattttgattctttcatttttttcattaatttattctgattttatttacaattcaataatatatcattaatgggtaatattgtttaatatttaaaaaattactttataaatattaaattattaaagggaagattttcttattttaatggagaataaaaaaattaatattaggatatgaaaattcaaactttgacattgtttttatgagaaaataattacagtatttgatagagaagaattatgttagaatataggaagagatatgagggaaagatattttttaagaagtataaagaaattatatttggattatgaatatttggtagatgaatgaaagaaaattaaattattttacaattatatttataacctttcattattatagtattaatatag

SEQ ID NO: 134 - DNA, 6110 bp, Cannabis sativa
  modified_base (493)..(496): a, c, t, g, unknown or other
ttttatcgtgtcaaaaattcaatctctaattacaatgaaaaatactaaaaagtaccagttatacttattacttaataccacttataatgtcatattcttattcgaagtatcgggtcctacataatttaatgagtaatttacaatataaatataaaaatttaactttcaattgtaaataaatacataaatttaattttttacggcaacaatacgtaagttatatttttagaacttccataggtacttgattattaagtgtcaagtcaatgaccgtatgacactagtccaggtcattaaatttttgtttatttagagtaatttgcagtgtaaatacttaagttcaactctcagttgtaaataaatacctaaatttaattcttaacaataataatacttaagttatattttttttaacttctacgtatacctggccgttaagtgtgaagttattatcaacatgtcattttattattagtatatttaaattaatttnnnnataaaaataaaaatttaatgatatgaaccaatcaatgactaccacgactattaacttgatatttaaggaagatttcttaggtgaaatggaaaacagtatgtgagcctaaggtgatgggggagcttggatttcaagatttttaactttttaatcaagctcttttgactaagcaagtatggaggttatttatatatccaaattcattgcctgctcgaattttgaaacataaatattttccaagttgttctatccttgaggccactgaaaaatatagttattctcatatttggttgagtttgatttggggaatggagttgattaaatgcggtctttgaaggtccattggagatggaccacaagttaattagggctttcacatacctatggctcccttgtccgaggtcttttcagccaatcacaaggaggattaatgatgactgtcgggtgagtgaatttatcctttcatttgatacttgggatgtgggaagcttcaacatgtttttttattaatggatgtggacataattttgtccattccattagcgaggcgtgaggtagaagaaggttggtgctgatactatgatagagatggggtttataatgtcaagagtgactactttttggtgtggtcgctccaaggtgaggagggagtcgcaaattcatccaggttaactcgtcggtggaatggagtatagaatctctaatataccaccaaatgtggaagtgtttatttggcgcatgttccatttggctttacaagtagcaacacaacttatctcccgaaaagttcaggtactgctttgttgttcacgatgcggagaagaatctaaaactcttgaggatgctctatttttctgtgctagtttaattccagtgtggtatcagttaggggtgtggttggtgctccgttattgtgtatatgggccaatgcagaaaattctcccattcctctttgacatgttatcccgtgagacttttgaattgatgatgacaatcttttggtgactgtgacatgatagaaactcaatattatttggcaacaaacagtcaagattggatgttgtttcaaatttagccaataaccatctgttggagtttaaggagtatggtcggagaggcctgcacttaggattgggccttgcaaacccaattgtaaacagacctactcaatggatgacacctcctcctgaatcatttgctccaacgatggatgcttcagtggttttggggaggggctttgtcagataggggggagtgatacgggatgcaacaggtgtggtttggttggcgtggtcttcaggtatgttaggtgagttttctactaatgcggcgaagctgcttgccattcgcctaggcttgactttagcgcatcaatttggttttagtatctctattattaataataattttactgtagcaattggtttgattaataagcttcatattaattttagttttcagtctattctattagatatctattctttattagttgttgttggtggtggttcttgtagcactattttacgatcggcgaatagtgttgtccacacattgacaacctctgttactagtttaggaaattgtgtttagacagatacttgtcgacggttttttgagttcttctataacaacaaattcatattaataaattatatttttcttaaaaacaaataattattaacgtcaaaaattaaatttataataaaaactaaacccaaattttggaatttcccatataataaaatcatagtaccgtatttatagtaagagaagagaccaaatccgccaattttttcctgttcttcgattcgaatcactctcttgtcttcctcaactctcagctctctcctctgctctgctagggttttcaatttcattctccattgaacccttttttcattttcttcagcaatctagggttttctaatcaattacagtcaccaccaccatggatgaagaccccgaatacgagcaacaatacaacgaagatgacgatgatgaggaagaaatcactcaggaagatgcttgggctgttatctctgcttacttcgaagaaaaagggttggttcgccaacagcttgattctttcgatgagttcattcagaatactatgcaagaaattgttgatgaatcttctgatattgagattcgtcctgagtctcagcataaccctggtcaccagtctgattttgctgaggtgaaaaaatgatcaaagttttgatttttatttttgggagaaattattgtgttttgtgtttacttaattcgtggttttcttctttggtatgtgtgtgtagacaatctataaaattgggtttggtcagatttatctgagtaaacctatgatgactgagtctgatggagaaacggcgaccttgtttcccaaggctgctaggttgaggaacttaacatactctgcacctttgtatgttgatgttacaaaaagggttataaagaaaggacatgatggtgaagaagttactgagactcaagactttaccaaagtcttcattggaaaggtatttatttattgataattgttgaaatgattttagtgtttcacattatagtcaatgccaaactccaataggaatactctcaattttcattaatttcactcataatcagtttgtgaagatttacatctttataccaagctaggttaagaaaatactacaaatctgccaataagcccatagtgtaactttgactaacaaaaaactttgtttaccaagttcctcattgtaccagaatttagagtatagattttattggtaactgtggaatttcgtgtttcatgctcttgattgctttaccaacaagaaactttgtttactaggttcccattatgcttcggtcgagttattgtacattgtaccaaaattcagagaaggatttgacagaacttggggagtgtccatatgatcaaggtggatattttattatcaatggtagtgagaaggttctaattgctcaagagaagatgagtaccaatcatgtgtatgtgttcaaaaagaggcagcctaacaagtatgcctatgtggccgaagttcggtctatggctgagtctcaaaacagaccacctagtaccatgtttgtgcggatgctttcacgagctagctctaaaggggtaataagacatctattccactttgttcttcccagttattaatgtgcttgcggcacttgtaaatttttcttttcatcttttatctgcatatgctattgtagggatcatcggggcagtacatacgagctactcttccgtatattcgagctgaaataccaattattattgtcttccgtgctttggggtttgttgctgacaaagacatattggagcatatatgttatgactttgccgatactacaatgatggagttgttgcgtccttcactggaggaagcatttgtgattcaaaatcaacaggtacacctgttaccatacactggaagaagcatttgcaattcaaaattatttgttacctaaatattttcttttctccaatggtaaattttgtttgctgctcgtcttacatggttgaatttcacttgacattcaggttgcactggattatatcggaaaaagaggagcaactgttggagtcaccaaggaaaagagaattaagtatgtattttcttggaacttcttttgatgtccgatgattctttgctatactcttgtattcataggattaactgtgataccttattgcaggtatgcaaaagagatacttcaaaaggaaatgcttccccatgttggcactggggaattttgtgagacaaaaaaagcttactatttcgggtaggatttcttcagcccccctgcatttctttgtttcatacacattatataatttttaatgtttgatatatttgtttgtgcttgtgctagctatatcattcatcggcttttactgtgtgcacttgggcggagggcagaagatgacagagatcattatggcaataagaggctggaccttgctggtcctttactcgggggattgtttagaatggtttgtttctaatattctttctctcagtttttctatttttctttctccttaaaatctttggtgatccttaaatccatcattacatcattgaccttctgctgtttgactgcagctattcaggaagctaacaagggatgtgagaggatatgtgcagaaggttcctacttccttgtgccaatcttgatctgatttttctgttcaatttgttataatgccttttatatttggatttcttaccttcatatattatgcccgacccagtgtgtcgataatgggaaggatgttaatcttcaatttgccatcaaagccaaaactattaccagtggtcttaaatattcactggctactggaaattggggccaagcaaatgcagctggtacaagagctggagtgtcacaggtcagtaatcctaattctatttccttccaatagtgtgtcgtttcttctctctcaatttgaaccaaatgattactaggatcctgccttgaattgaatatgctgacataagcttaattagacattcttttaaacttacattacattttttttattatttttatattatttttctgcaggtgttaaatcgtttgacatatgcctccacattgtcacacttgcgaagattaaattctcccattggtcgtgaaggtaatttacttttatcttgaactcttctaaggacttgggagtagtagatatttttctgttcgatacattgacggtattcttcatgtttatctttaatttcttgaaatagtcttgttgtgacttgtttgcgtatgccgctgttatttgttcttttcactttgacaatcaaagttcccattcttaggaaaattggccaagcctcgtcagttgcataattctcaatggggaatgatgtgtcctgctgaaacaccagaaggacaagtaagcatatgtttctattaaactttattctacttgcatttattggaaccatataatttgttaggtggcactctaatttgttttctttctataaatcaggcatgtggactggtgaagaatcttgcattgatggtgtacatcactgtaggatcagctgcatatcctatattggaatttttggaagagtgggggacagaaaattttgaggtgtgctccttctcttatgtttgctagatgttttatttctttttttgttttcccagtttgacaattctaaattctaattgtgtcttgtatgtaggaaatttcccctgctgttattccccaagctaccaaaatttttgttaatggttgttgggttggtatacatcgtgatcctgacatgttggtgaaaacattacgacgtctgaggcgacgggtcagtttaattatttttattattttgaatgagacattatgacaaaagcaatcatacatttttttgacaagtcatgaaatttatgaacttcaggagttgactagaaactgtattaagttaatgttaatcagaacaaacttaacaacaatctcaccaacttaagagttggacagaattttatgaatctcaggaagaatagtttgttctgattaaaatggtgacagcatacttcaaaaatagccttacataacccaagaggagtaggttta

SEQ ID NO: 135 - DNA, 2126 bp, Cannabis sativa
aaggaacagcagcatggacagcagcaaaccaagacggtgagaatttttcagtatgctctcgccatattcccagaggaacatttgctgccatgcccaataatccgatcacaagtacttttgctggtaagggttgagggcggaggttcttcgcgaatgcagtctttgatatagctgctcgggcagcaacaattgctggtgggcaggtaaatttcatgcctgcaggaggctttaaaacctttgcaacaagtggaaggacaccactgactgctcggtaagacttagcaattggacaattcccagattgcagccactcatttcccaaggactcatgttttgaatttccaccctgaatttagaaaataaatacattaagtgggaacacaactttatatacataaagagaccaaataacaggcaatttgacagaggaccatagttcaaactattataacaaatttccaatatatatatttacctgtgaagactctttgttggatgatttcttctgattcttccatttgtcagaaaaagaatcaaagaagccaaatgggcctccagctccaaaggatgaaagactgattgtagcagcctttgcagccaaaggattaaactgcgctggggctcgctgtggttcaactttcttcagaggcacatatgatcctccagaaagagggactacaccatcattcccatggaagagcctaaatgccatatcaaaattagggccatcttcaaaaattggacctttatttcccctaacctggcaaagagacagatatatattattcgtactttgtatttcaattaggtttaacatggttggcaagcaacgattcaagcaaagtgccatcctaggttgcacatgcttacatcaaattgataaaatttgacttctttttgttactgtaagattgacaatctgcagaggcagttttaagtataatttatgccttgagtgtgagacccagataagatgacaagtacatttcatagataaaagcccagttacaacctatatatacaaaagatacagataaactacttacaggctgtgggaacatcattgatggggaaaatgaaaaacttgtaggctcattgatgtttctcagaaacggacatctaagtatgtcttgctgagaaggcaccgactccccattaagatctctgaaaatattattcattctttatctgaccaaagttcacctgcaaagggagaaaacaaataaaaattagctatggtgttccaataacacataacaagcttttatatgactgaaagaaaaattcaaaatcaaaatctcaaaattacaagttgaattatattctttgaaccttaaccaacaaaactatatgagatccttggcaagaaatatgaaatttatggtcggcaacatatctcaacatcaaatgttagcttcttagagaaaaatccgatataaaaacaactagagagtcgatttgcaaaatgggtcataaagtaaacaaacccataaccagtcctgaaaattctttcattttatattttatatgttttaattgagaaacatattaccaaattgaatagtgaacctaggctaccaaagtcaaaccagcataaagaaagccatggattcaaaattatgagtagctcaatcaacaaactgaattttttttttaacgagtgttaaatttcacttgcataatggagaaaaatttggaagagaaacacatatcaaaagacttaaatttcatacaacaactcaaattcaaagaaaacaatccaaccctagtctttgttttttgacaaaaaaaacccagttcatctttaacagtacagaaaagggtcaaaataattgaaccacgaggaccaaaattcaacatcaaacctcgtcaaaagcaacaatgaaatggcataaaactatacaatgttttctgatctataagcaaaattaccgatcaaaaagaacatacatcaattactcaaaacaataaatgatttagacatggttgatcgtagcgataatacctttgataatggatttgcagaaaccgtaaaagggaacgatggaagaaaaaaaattgggattatggagagagaaaggaaagagtgtttggtgaaaaatcaaggaagaagaagatgaagaata

SEQ ID NO: 136 - DNA, 4030 bp, Cannabis sativa
ggctgcagttgcggggaagcaggctgtcaagagatacgttccgatatagtgaaagtttataaagctagaaattagaatgtgtttggatggtgggaaaacttcttggggaaaatgggcttatgggttgttttagttgttttttttttcttacaggttaatccattgcattgggtataaatttaatagtttagtgttcaatggtttgtgctcaaatttgtcgatttttcattttgtgaggctgatatgatactggctgtgaaatttggttctgaggtatttagctgtaagagagtatcctttcaatggaaaagaaaaaggtttattaaattcttagtgagagtatgtttagtttctgtcatgatttctcaactaagactacaaaaatgctcacttatggaaataaaactgacaaatattgtcgtgtttctgttatgtaaatgcagaaagggacttgtaaaaatgactattaggtcactcactaattagtttttttttttgttagaaattatacatgtattaaaagcttagatgctgtactctttcagcaaaaataaaaaagaaaagaaatttactctgtaatctcaacgtgatgacgagtcttacaaaaactggcctagcgtagatacaagacaggttgtcaagtcaagttgattcgggggtgaacaagtgaccaattttggggtcagccacttgtggttagctgaccgatcttaatcaatttgattttgggggttggccatttgagattttagatcatcttgttgggtagagttgtcttgtgagtgatgtactgggtgttctcattattcatttatctttgtgttggattttatctgatatggaagatatgatctgggattgatgcttttgtttaactttgttgttaggttggaaacatatttaaatagattgctaaggggtgcctgacatgaggtgtcaagccattgtagtttaatatcggtattacatatttcaattcaataaataaaattgaaaactgcttaaggaagattggtaatcgtatcatactaaaaggtgatcatagatgacttgaaaggatcatattgttaaggaaaagaatacaacctttgtaaaggtgaaattttacaaattgtatcgaaatgcaaatttaaagctaatacctctccccttacaaaggtggaatttgtaaaatatggtactcaaaactgtgacatgggcccctaggggggtcatttcccctgtcaaggaatgccatgaaacttctaacgcgctccctagtttaacgttttatggaaagcgacctgtacacaatccaaaataataattagtaataatacagataactttagaagattgatatgatcattacatttgccaagcaaaataagcacaaaacgattgatagtatgcaagtttatcaccagatgctttggactgatggcgtagtaaacttgaattcaaccatttgggttgcagaaatttatcattaaaaacataatgaaataatggaattctttgtagagtgaaaacatacggaagttgatgtcttcagaagctctctgatggccattgttgcataacaagacgccgggagagtaaaactaagcttgagagctgtttgggcgtcttggaatttaggttcaattagcattccaacttctctcttgccacccacctctttgtcgtctgcttgaagttttatgtcattctcagaggggttcaatctttctgagcaatcaaattcatttatccctttgctttcattgactccaagctcttccacaggttttgagcgtttagatttagcaacaacgtctaaatctgtttctgctagaggtatgttgccatcggtgtatttcagtaattccctatgataacaaacgaaagcagcagttatataccccacaagaaatgacttcaaaaagccaaagacaaaaggggaaaagaaagtgtaaaaattagaagcataccattcgtaatcgactggtttttgaaaaacacgcctgtaactaccagtcatactagtaattgagaattctctgaattatgatggaaaccttttattagaagaaaatgaaggcaagtttgatagcaggggttaagaaagaagaaaaaaggtggtagtgaagtgatcaagtaaactgtaaacgtacttgacattgtgtacactctctgttaaactgattgtgtcctgaatttgatagtaaaaccaaaaattagaagactcccctttcttttttagccaaaacaatattaacccaggaacttggagtaagcaaagatagattataaaccaacaacaaaattagaaagatataaaatcaccttcattgccagatcatgataaacttgggcaatgtcatttgttggaaaaattactcttgaactaccaaaagcattgaaacaacagatcaggaaagaaccataacatatacacaaaaatatgagcgagatgcaggctgataattttatacccaggtaatggaagaacaacatcatcaatggtataatttccattaaggatatcttctgcagtaacagcctgagaaaagaaaaacaatcatacttctcaagtttttacataggcaatcaccttcggcaatttaatttcaataaccgccaaaataacaaatacaattaatcgtcaatcagagccttacaacaaattgaattagaggcaatctggtaaataagcagcacaaaaaagcttacagcaaacaaagggcacaaacctttacaggatttttcttttcttcgggaagaacagtgtcagagatttcatctagttcgtgagcttcaagtgtatcattagggtcttcttcttcacactcagcattaccaatttctttcgccttctcaatatcatgttctttacaatatactaagtctcccaccacaacatggtcagttcctgcaacacgatgaagaatggtgagatagttacacacaggctacaacaagcacctaaatacccagataatgtcttctgagatagaaaaaacaaatataagaattaccatgtttttgcacccttgtactagctgcgtgattccacaaatagctttggtaactatggacatacctaaataacacagtgataataatatgatcaattttccagtttaaaattgcattcgactaccatttctgaggaccacaaatattctctcttaggtcaagtcaacttaatgcccagcaaaatctcccaaaaaaaatctacgaagtaaaaagggagagggagagagaacaaaagagcaacttacatcattctcaaagttctcggtattgctttcagagcctgcaggtggttcccaggacatttcttcaaacactgcaactgtatgagaaaggaaggaatgtgtgtgtctttactctttagaacttatgggagctctaaacattcgccaagttttataaaatgaaattaaaaatgcagaaaatattgctgaaaaacttactactgccctctcagcaaccaggtatcgaggtaactgtctcagagtcccatcgatgtcattagtttccttatagtattgacgtgccatcgcaattgtatttctttgtaattaaatgtcaagatgaagacaacacataaaagcttttcaaaaacaagaatttcctaaagcagcttggaaatcctagaagatttaaaagaaaaatattatttagccagagttaaatgaagaaactagaagaggatatctccttctcttggatcaagaatcatgtttacagctgcttcccactctcccctgagtagcttagacccaataagataagttggcacagaaccacttccgaagcgctgaaattattcaaattcatgtcagttagtttacagtgcattgattaacttactagctagacttgcacacgaaattggtgagaataatactttgatgtccaaagtcgtcttatcatggtaataaattaataaaaacacacatcttctaagcagcatattcattaaagagaaaagaaaagaaaatgagctgagacgagaagcctcaaagatacacagatacaaacaggagagagagagagagag

SEQ ID NO: 137 - DNA, 4510 bp, Cannabis sativa
taacttcactatcgaaaatgcctacctccggcacatattatcagttcgtcttggcactgctgcagcaaccttagcccagcaatatccgtattcagcaatagctgctctcaacttggcatcctcttctgcggtccacttatcccagttcaaagaagggtctaaagaattcacaaatctgacatcaaaattcaacattttacaatcagtaaaatatacatgcatgattagtaaaaaaaaattgtccaacttaaaaagtttaatagtacctttctctacattgcacctctgttcgacctggcacaaatagagctgttttcttccaatttctaggtccaaacaacaactgagccactacaagtcgtttgtcttcatctgcagtccacctacctactttttccctggttggatgaagagactttttccacctagatgtacaatgtcgatgggtcaaaatcaaaggaatatgataattaattttcaattagtttcgcttcatggaaaccaaatatgataattaatttataaaagagcaaagctaacttacctattggagcattgggtaccagtccatccttctaaaacagaagctacagattgccaatcactctcaccaaatatttcaacagcagaacgaagtttagcatcatcatccttggtccaatctcttttcaatatggaaacattcaaactcctctgataacgtgccaagcattgaaaaggagtcctgtttgttcttaatgatgcagcaatgtcaatccagttactgatccccttctcctggacaaataacaaaagatatttatcctcttcggcagtccatggattacgattgatcaaaggatcttcaaagttcaaccacctgcagatttcaattaaagaattaagctgaagaaacttacacaatgatccacattgcatgattttttagtgcaaataatagaatgaaagcatcacagacgtctgtgatgataacatcacagacgtactcatcacagatgttttgagtaaagtacaggtcattatcagtcccacctgtataacctaggctgctgtagcatttttaatcaaatccaacaattgtaaacttgtttgtgatggtatcgtcatagacgtctgcaaagcttgcttcgtggaaggacagatgctttggggagaaaccaacacaaaaacactagtcaaggaccgcaaatatttgagacaacagcaatatgaaaatggatctaaatggtaattgatatagcacacaaaccaacgtatgctgctcggctagtcctatgtctaattggctaaagatgttttagtaattttagtttaagagttcaatttagaagcaaaaaaagttggtctaaatctcaaaagatggtcctcgaattagtccatggatctttaagtcttactgatgttctatattactagtcattgaaattttatttttcggggatcagtactatttagttttgccaagagtctccaagttttttcagaataacaaatttgtaaaggttctctagaaatctagtactgtttttgaatttgtgggttgtaagtgtaaacaactcggattgtgtgatgagaaaaagtacaacaaacggcacaaacaagtgtgagccacaaggaccaaagtccgtaaccatagctaacaattgtttgggagtctgggacagaatataatacgaacacatccccaaattatcaaacacagaaaggtaaatcaaacagtaaagaaaccttccaacaaaatccataatgtccagtcgatgggagaaccccaaacatttcattgctcagtcatactattaattaccttagcacttatcaagagcactagagaaagggaaagcataaaccaatttaccatagctaaatttgataaactcaatagtaaaattaaattctttgactgcagaattaggattggtcttttagtggtgagcaattactgtctttaagtcaacattttcaaatctcaatgcacataacagaacaatgttgaaatctcacataataagagtgcataccttgcttcacattctgcaccagaccgtcctactagatgcatagaagccaaatactcccaattaaccttgggcagaaaagctctaatattttctgaagtgatgtcgagattctttattgatgctaaaatgttatcaagatcattggagacatcatgatattctccattcccgccactattaaaggaaaagtgaaatagatcaagtaagtctcaagcaaaaaggattgactataatgcaatagaatcagtaaaaaaaaaggagatgaaatacctaaatcgatccaccataacttgaaccatcttttcttgaaattgttgctgaattcccttttcaagattttgtgtctcattctctgaccattttttacgttctaatgacaatgggaactttgttaaagccattttgtaatttgaaacgtgagaattctcttccggaccataatacatagcagggatccttttatcatgaacctgcaaaaaataatgtttctcaagattacaataaatccaccaaatgataaagtggagttgaatttgacaataaaaacttgcactttgataattagtctaataactttgtggaatactgacacaattttattttatgccttgcaatgaccatatgctggacgagagaaggaacagcgatgaacacataaaagacagacattactgattataagaaatgggagacaaacagaaatacatgaagatagtaaaatgccaaaagactgaaaaaaacaacagctataggatatgttgataaagaagcccactaggaaggcagaaactagatcaagaaacttatatgaaagaaatctaaagataaagaaaaccagttcatgcaataactgatgcacatgaaacaaaatcacctgcaattagatatactacattaacatttgtcctgtagtctttaaatcatcccatgtagcacattggaatcttattagtcaatgccaatgatttcagatatgtattaaaagcttgactttataggcacttcaaagacctttgtaaaacaaagaatgggcaaccaacctttgaatccttacaaggccatggcttcttccgtgaaatcaactgaacacgagaatctttcaattgggatagagcacgtccagttcttcttttgcaattaacctgaaagtctctgaggattttaaagcgttccttcaacttcttgttctcctcaatttttttttcaatctgaatcagcttactccttaaaatcttttgaaaagacctattttttttaatggaatccataaaaacccttgcggatttcgggaagcttgagtagttggactgcgatgttgatgtgttcgagttatttctgtgatgccatgtaatgtcagcagaaggctgcatttccaaatgaccacccgactgagaggcagtgcctccagtatactcagaatctgaaatgctgcaggcatcatttccatgaacaatcaaatcagttgaagagcctttctctaaggatacacgaggatcatgaacctgctcttgtgtctcaaaagaagtctctctgctacttttgaaagcatctgaaattttcacaagaaaaatcaagaaactgaaagtttaatttaagacaataaattttcaaaaatgaagtgaagcaagaaaaccattcgggattcatccatcaaacaacacacacacaaaaatgtatcaagaacaaaaattgagcatttgtaagtaataaaagaaaaccaaaacgtctggagaaatacaatttgcagaatcaatatcaaaacaaaactttgattcaagagctcgtcagcaacaacaacattcataataaaacgaattattttcaaattcctaaatgtttttactagttcacacaaaaatatccaaatgcaaatcacacaatcatacaaacagctcaattcaatccagctcaactcaactcaactcaaaccatttcgaattgaagttaaaagaaagttcagacattgaaattactcacataaacactatcgcatactcacattagtccaaaataaaatgaatatacgaatacaaattaccacaatcataagccgcaaaccgcttctgtatagcacgaagagtttcaaaatcatcaccctcgtcatcatcagacataatagccggtggcaaaacacaaagaggtttcagcgagagaggttcaaaggtagagaaccggttctttatgttccgaaccaactctaggtcatcttcatcatcatcgtcttcgtcttcttcgtcttcaactttagatattgattctccggcagtgggagtagcagaggaattattaagatcgtcaggattagtaccggtgatcatacaagcacgttttagggcttccatatcttcatcgaaagcatcgtcgtcttcgtcttcttcgctactggacatgtctcgttcttcttcctcttcttctgaacccattttttttttctctgtgttttttttttttatgagtttcgtatttatagtaagaaaaaaaaaaaaaaaaaa

SEQ ID NO: 138 - DNA, 2919 bp, Cannabis sativa
agccacgtcctcgccaccaagcttggtgcacgacttactgaagtcaggaagaacggcacctgcccctggttgagacccgacggcaagacccaagtgacagtggagtacttcaatgaggatggagctatggttcccatccgtgtccacaccgttctcatctccacccagcacgatgagactgtcacaaatgacgagattgctgctgaccttaaggaacatgtcatcaagccagtcatccccgagaagtaccttgatgagaagacaatcttccacttgaacccttcaggccgctttgtcattggtggtccacacggtgatgctggtcttactggccgtaagatcatcatcgatacctatggtggttggggagctcacggtggtggtgctttctctggaaaggaccctactaaggtggacagaagtggagcctacattgtcaggcaggcggccaagagtattgttgccagcgggcttgctcgtaggtgcattgtgcaggtctcttacgccattggtgtcccagaacctttgtccgtctttgttgacacttacaagactggaaagattccagacaaggagatcctcgaaatcgttaaggagaactttgacttcaggcctggaatgatcaccatcaacctagacttgaagagaggcggcaatggcaggttcctgaagaccgctgcctacggacacttcggaagggatgatgccgacttcacctgggaggttgtgaagcccctcaagtgggagaagccacagtcttaaactctttgagccacaaactcagctgttgagttgtcttgaatattttggtattgaattttaataattgtgtgtttgatttgctgctgctgctgccgcgctcctcttagttatgcaatagctttaatatgttctaatatcatcatactgaagtgaagatgctctgttttttttttttgaagtttatattttattttattgtaatgtttgttaccatatatcagtgtctctgaattgaacagaattttccaagttgatggcactggtggtagtagtagtagctgttgtaatagtagtagtagcaaatttgcagaactatactgaaatggcaacactgaaatattatctcgtgatgtttttctttattgaaaacgacatttatttgaatgattattacatctctctgtctatatatatataatatatacacagcacattatggtaaaaatgtttagtaccaggactcattagacatggtattttctttcttttgactgacatttatttacttatattgacaaattcttataactgataaactttcatttatgcctattaaaagaaagtggcacaagagacaacattctgtcagttggataaatcatcataatatttcagccagctagtgtcgtttagtacagctttttctcagagataagaagctcagagagtttgtttgttaacgtgttacgagaagagtaccacagatgccatagtcttaatttgcgaactttagatatatattcagaagatgaagtagatgtgtgaattgatgatatgctaccaaaacaataaatatgtgttgagtcaatacttgtctaaatgagagtccttatatttgatatttgtaatattttaatgcacattttatcattatactatgatctattagtctcatctatattgtaagaataaatcaagaggcgaaccacattaacttatatgtaagtcatatatatacatttgattgtttttatgagatttatttatattgatgtgtgtatattgagtacctgagatgtctcgtaccattgctttgctgtaaaggtagagagaaattgacaagatttgtaaggtggttgaggaaaattccagaggtggacataatgtcttcttttctactggtcaagttcttggaatttttgtgcaaggatgagggagtgacatggtggagaagggctttgccctttgggtcctatatgttggttggtttggtgtctgatctaatgttctcttctcttgcattggttgaagctgaggggtgcttctttgctagtatatgatatttttggacaaataaatgtgctcatggcactagcaaacaagctaggcggccttcagaacatgtgagaatattgtcattttctaatgatgtacttgtttctactcactcatttatgtgatgattgaaagtttcctgactaatcaatgattgagggtgaacagtgtaattattaatttgttgagcatgtgtcaaaatgaggagcaacttggtaaagcaatttcgacactattttctcttacacgctctccttagtcttaccatgctacactctttgccgacaaattggtgatcacacgaagaattaccaatgaagagtttagattactaaaaacacggtcctttgtgcccaagtagctagaaaataagcgcctagactaaagtctctaccaatccaaaatataggaaaatatacagaaataaaagtatgaagaacattattagtaagcataactagattcctctaggctctagtttggacaaactccaccatggagaaaagaatcctgcataaagtttaaacaatcagagaaaagaactatatcaagctagttctgagaggcaacggatatagcatttgttgtgaatcaatcaatgatttacgatgaaaaaacagtagatcaacaaacacacactcaagaacaaaactatcaaagaataacaagaaccagataataaattaaagcagtaactcaagaaaaatataacactaagatttaacgagttcgaaccatgtgcaatactctacatcttgattagaacaacaatagtcatatctttattgatattgttttcaagtatacaagaatctttcaaactttcacagagattacaagacgaactttctctctattgttttaactctctctctctctctc

SEQ ID NO: 139 - DNA, 3260 bp, Cannabis sativa
acactgttgttatttggcaaaagaaatctaacaactgggcttgtgcaacacaaattatctatatgactatacaatggtagattacatcttcttatcttagtacagaagaaaatgttgagagaacaaacataaatatggcaaaataagcttatttcgaaatgacccaaagattgataggagtttcctattatttttggtacgaacagtagcaaaatagagccaaacaacagttatattgatattagaatgataaagagaacaaatttgctcgatattcgagagacccagctctgtcgcaagagctagctactactctcatatataagacccttttttatttaacctaaggcctaatgcacagctctatcaaaaagagattgatcctactctgaattttcttgtacatctccaaatatcagctcaaagcaatcatagtcattatcttatcttgaatagaatagagtttgacattcactattaaaccaacaattattgaaactgtttggtttgttgtatttgggtatactcaaacatatgatgtttcattttgattaacgatataattgtcatccttcgaacaatttaagcttccctaaagaatttaacaatattggacactgtaaacggcataagtattcaaagttttgaatttgtaagcgcatacacctaatgattttttttatggtgtaagtactcaatgtttgtaaaattgtagttttcgtctagttctgtcaatacagactctgttagtatatttgtagccaaacttagtttttaaattagttgaaaaaagatttggaagtaatttatacatcacgttttcatccagattaagacaataatacaatttgtactaacgaaaactacaattttactaaaattgagtctatgccgtttacaaactcgaaaattttgagtagttatgccaaaaatttccttaacaataattaaaaaaacatcattagataaaatgagaagatgttaactttattgattcaattcaaacatgaaaaaagtataatcatttggattttattattcttttttttttcctcttaaaatctaaggtccaaacaaggccttaaggaagaagaatttctagtaaaagacatagacaaattggaaactcctagtttgaatattcattcaactgaaataatgtccaatcaaatataagaaaagaaaaaggaaaagaagttcatactatgctatctgaactagtaaattgggaaaaattattcatattagataatatggtttacatgaaaaatgcataaaataaattttcttggtccttattagagacaattcatactgaacagattgtacaacattatctaaatgtaaagtacaaatatatagatatagatataagaatccatataacaatcagctgaccttttctacttctctaatgcaaactttcttgcatacttgagcaaatcattgtcctggacaatgcctatcatccatcgacgataaactggtcatcttgattttctgcctcgaccctagcatcgtcatgaaccaagctgttcacatggtgcaaattctgcatcatttgtgaaaggtaatgattgctggcgctcgtatgatcagagagtgcagccggatgagtagtccactgagacactatcccgagtaattgactggtaaggctttgctgctcatgaagaattcgagtctgcatttgccccatttcggctcggtgttgactcaacatctcatcaatccttgtcttccattccaatctcctcctattcatcctctcctcccattccctttcatgtatcaactcctcttctcttcttctcctttccctctcttcactctccttttccataacttccaactcttgaatcctctgcatacgcaacttctcccaacatttctccttctcatccttcttcttttccctctcaatccatctttgttcccattctcgctcacgttccatcctaagactctccctcctttgcctttcccgttccctttccacttcccgatgctcaaacctattctcggtttccctcaacttccccaactggcttcccaaaagcccccaagtcttcctccccatcatccctttcaacacctttttcttccttttctttttactcatcaaattgttaccattttgctccatttcttcatacacaaaaccatcatcaccatcctcccgaacccgactattcccattataattatcctctccctcttcaccatcatactcaaaacccaaactcatcaccccattctcaatccctcctccaaaatccccatcaccagaatgacccatttgcccaaaccccacaagcccaacaaaacctccaccattctcaccttctccattcacaacacccattaaatcattaccaccattactagacataacaaccccaacatcaccaaaaacctctttatatctcaagaaatttgaccaatgtgaaagcccctcaacccaatcaaactcctcttcaccaccacttgaattattattattattattattacactcaagtggttgtttcttaatcttctgcttaaccaacaaatactgatgcctcatattctgaaccttagtactaacatctttccaagaccattgccatggatgagcaataggatcttgaacattatgaattgagttcacataacaagcaataggcttaaatttcttctccctagttttcatcttagctaaactcccatcacagaccatttcaccatacttatcaatcaaagttctctcctcagcctcagtccatttttttcttctaccgggcatcattgaaaatcacttaaataaaaataaaaattcaatctttatcttttttttctcttaagaatcaatgacccaattgaattgcatcgaaaattttcctaaaaactcaaatacccaattgcttaaacaccaaaaagatactaaatttaaaatacccagatgaagaaaagtttcagaattgatcagaaaaagcaataattgaaagggttcttacctagaaccggagaattttgagaataacccagaaatggaaattgatgagaaaagggattgatctgaaacaagtgaagtatagaagaagtggattaagagtgaaagttccagagtagagtagttagaagttggagaatgaactttagttaacagtttttttttttttttttggtttttggattggagtggaaaattagtgaagaaaataggataaaggaagacgacaagaggacttgggtagttttgtcattttgttccaaag

SEQ ID NO: 140 - DNA, 9104 bp, Cannabis sativa
cccgacccggccccagaccccaaccccgaccaagacctggacctgaacctcggacccagctccgaaccccgacctagacctaaaccccaaacctcaaaccccaatccggacccgaaccctgaacctcgaaccctaagcgtgaccctaacccagaatcggaccccgactaggcctcggaccccgaacctcaacctagaccccgaccaggccctgaacccatgacccctacccggaccctgaccccgaccccgacccgtgccaggcctcgatttggacccacacccaaacccagtgccaaaccccgaccatggaccctaactcccaccccaaccttagaccctatacctcgacccagccccaaaaccctgaaccccatactcagatctcgaatcggaccccaactcagaccccgaacaagccccaaactaggaacccaaaccctagaactcaaaccccgacactaccccagaccccgaagcagccccaaaacccttaaccccaaatctagaccccggactatgccccgaaccacaaaccctgacctcagacttcaaacctcaacccaacccccattttcagacggttggcctcgaaccccggaccttgaatttgggtagtggtcgaagttagggtcgagtttatggtaaagataatacaattatacacaagttattaatacaagtcaatatcaaatatagtatttattaaataatattaatataattcaacataataatatacaacacgacgtaccaaacgagtcaatttattatttatttttctttttttaaaataaaattagtgatataattccatataaaaaataataaataaatataaataatcaaactcatttataatcaatagctaaaaagaactattataccacaacatttgatttaaaaatatataatctgcaagcccaccacaaaatgttctaccctacatattatggtataatatggttattgctatccgtttttctgaataggtgatgtgtgtactcttaaggtcccaaaatcaaccaaggcgggctcattcacaggcccaattaagccagtgagtcagcccacgacggagtccgaccacagctccgaattagttgtaggccaactctaacctaatggaaggacaactcatccaaagaagaaaatacttaatggaacatatccaaacgccctcataaggttgacaagtaaaaaaaattaggcttccaaaattgagaaactttaaaggaaaagtaaaattgaagtccatgaggtccatgccattggaaccaaaacctccgagaattgaaagtaaattaactttataaaaaaaatccatcttagaatcaatgggttgaaataagcacattgaagactgtgggcttaggcctttggaaccgaagccttacaatccaggagtagataacttataaaaacctaaaaaatagatctaggtgcaagattgaaatccaaaggcctcgacagttggaatttggacctcaagatatctagaagtcctagcaagaaattcatgaaaagtcacaatacttaatgaattcaatcaaatgtatattcagagtaattaaagagttatttcagtcgtctaaggactatcaaaagattgagaaattaattacataataaaaagctccactgttagggcataactactatctctgcaataacaaaaagggggacccaaacaaaaaaaaaaaaaaaaacaaaagaaccgataaagtaaacggctagactcaaagttagagatctgcatcaacatttgaatttgaacttgcaaggtaagttagaacggaagccaaaagtgatgaatttggttcttgggcaggacaatcaattttttgttcttcagccaaaatggcagagcattgatctagagacccttcctccgcttctccttcaatagcaagctcctcttactcccaagcgataagtttaacacagacttcttcttctttggcgctgaatgccttcagggatatgtcctggtcagcctgccaaagtgtgaaaatggtggacgtgaaagcctcctataattgggcaacccttatattttccatcttgactttatcatcatcagtcaccttcaactttttcttgagctcatcatctgtcttcactaattgatcttgatttgtagtgaccatgcagagctcttggtccagagtctaaatttgatctttcctcttttcaagttttgtcgtggacattgccactttctcctctgcattcgtcagtttctccaccgcatatttgcacttacgctcaaaggcaataagacggcaataatcttggttgtaattgagcttaaaatcaccgacctccatggctagcttagcattcacctttagaaactccttaatgaattcaactgctgctcagacggcagattcaacttaggccttcacttttctatccaaagtctcttggaagctctattttaggttcttatttttggtagcaactttctccagctctactttagcttactctaagtcagtcatgactacaatcttcttgccatcagctgcatcacattcatcctgaatgctttccatctccaaggccattttggctgtcgcgttcgcacaatgttcaacaagaataacattttgaaatgacaaatagaaagaaatcagtaaaaaattggcatacaattatcaatagtgtaataagtgttgcaaaaccaggacacttaccccaatggcttgatgtcggggtgtgtgagacaagagcataatatcttaattggtagccatggcccatatttctgtcctaagttggcttatggaggtagaaacttgattgaggagatatgcggtgaatggagccaagtcgttgcctagtttaacttggaacccttctgtagtagcggatcagtcaactattttaggatcgggaggagcatccggatccctggagtttacctcattaatctgccccaaggaaatctgacgtgatgaatggacatcttctgttccagactcttacattcgtaaaatcaataagctcctctcctagtttaaaactcagtccttgtcatcctgttgtattagcttaattggaagagaaggagcgattaaagcatccttgggtcaagactctgtctccttggccctttgcttaggctcttttgactttggcccttttggttctcttggcttgctctcctcctttttctcttctcttcgcatggttaccaaagtattcaaagcctccaccttttccttcttgcttgcattgccaacacccaatgctagcctttacaaaggaagacaagcatatatgtatcatcatcatcattgttcggagcaacactcttctctaaaaaaacaactatgggagctgtcttcgtgactatttttggagtcggaggatccctcaaaggaacctattggaaagggatggcaggttgtgccagaagtgcaatgttcttattgaccataacatcttctatgttcacaggagatgttgtctcttgggcctttgacttgacactcgatgccctggagctcgaaagcttccctttacgctcttttgggtcatctcccaaagcactggtccaactctcaacattcatcatgaaggtgtccaaaaggtccctcttgtatgtataaggacggactgcaaaagagaaacaaaaaaaaagtcaactcaaacataacaaaaaacacacagtaagtcaaaaaaataaaaagcaagaggctctagtctgggttcaaccctcaatgttgacatttttatactctaagctccccaacgcaaactacaaaatttccttatggcttacaaagttatcgtaattgaaaaatcttggataatgtgtaagggtgaaagggtctactcaaatattttgtgaagacttgggggtaaatgttatccgtgtttccgaataggttatacatatacccttaaggtcccaaatcagctaaggtgggcccattcatatgcccaattaagccagcggatcagcccacgacggagcctgaccacgggtccaaatttaactataggctagctctaacctctataaggttggaccctttttggtcccagaaaagcaactcattcagacaatgaaagacttaataaaacatatctggacgacctcacagggtagtccagaataggcaatcgaagaggtatccgagtgttgtcctaaatggcaccattctaacattgaatcccacatagtcaagggcttgtcccctatgtcagacttgggaaaggcacatagcacaaaaaactatacatacatttttttccaacatccagtacccgaacatttactgtacaccatcactggcgtatgcccacttgtcagtaccatcaaatgatattactccatacagatgacagttatcttacaaactaggcctcacctaaccatcccaatgttaatataataatatattttatcccattagtgggtttaattttactcatgaaaatcctaacgagtttgaatttacccaataacctgactctagcctataaataggactttaccccttcatacaaatggttacgatttaaatctaggctaagggttgcaaacttttggaggaccacttgtctataatactccatactcaaagagcttcaataatattgacttgtgaattaaagttcattaacgtcccaaccacgtaaaaatttgtcttctttactttaaaatcatcttttcttagcttaattttttattaattcgatttttaaaaatctcgataaataattacgatgatgaagcccgtgcaaaaaaattatgatgacaatacaaaaaactaaaaatttacttatttttatttttaattatttatttacatgttattttcaaaatatttaaaaaaaaaaattgggggttcatgacagccttcgacacctagctccgtcattaagtaacgaagcaaatactctttttttatttttatttttttaacaatactatacccctacttaaaaatattttattttaaataaatatttctttacggaacaaacataaattagaaatgtctcaaaaaaaaaaattaattaactaactaagccaattccattgcagttacagctacataatctacttttttatttattattaatattaattaaacgtgtggctataaatattatcacaaagtcaaaacaaggtgatcatttggttacgaagcccaaagtagatacttgttagttaagattcagaattgagcaagtgatcagggcttgtttataaccttagctcaactcaaactcatcaaactcgagtctcaacacatagaaaatttcagaagattcagttagaataaaaacattatcctaatcggatggaaatgtggtaggaataataatgaaagattaatggtggtgatgagaagtgacaacaaatggggttagttagtttgaacctaagctttcagtgtcttgtctcttagcaatctgttagtgttcattttggttcgtttgtctgctgtttgtgtcgattgaatgttccgttgttcctgtccacttctgacttctcaaaccctcaccttctctttggtcgttttcctttctatattatcacacctatctattattatttttattttctttttctgctttttgtgtaccaacttttcccagacaaaagaaaaataaaaatctgttgctcaagataaggttcaaaaattcaaaatattgacaataatgtgaatgaataaaatcaaaataaaattttcaacgctataaactagagttttcataaatctcgtgaaactaactagcccagttgaagttttgatgctcctactcctagatttggtaactcccatatccttgagtagcaaataaagaaacaaggtttattactttaaaattatgaaaaggtcaaggccaaaaaaaaaaagagcatgtataaagtatctgcacacgtaaatttcgatgaaatagaagggcatatctcgtgactcacatgaggcgtgaaacctttttactctttctttacttggaataaagcatgctataaacttcttattactagagaagatagaatgtgatgatgattaattgtaaaattaagttaaatattgtgtatatggataacacaaaaggcatactaaattttagaatgttaaattgaaagttgattgtatcacacaaaattacatgaagaccaaaaagaaaaatgacaaacacaaaagaacaaacatgttagtacattgtagctacaagtgattgatacaagtccacaaaaaagattgagaaaaaagaatattattctctttctttagcccgttttataatacggcgtacgtatagtttctcaagtaaaaacaattgcatgtgagtggggtatgaatctagattttagaagggaagggaacaactaatctcaattccagcctaataatttgggtcaacaaccgaggccacgcccttttccatgtggattgccggcttcagaccacgcaaacccttacccaaaactactaataagagtttaactcttctttcttcaattcacaattaacaaacaataaactatacaaatcaataatttcaataataagacaagctatagactaatatgatatctatttttctacatacccctctcactctcacccttcccaataattatgttccacaacaacaaaatttaattaaagagtgcaaaacactcgaaccaatttttccccttctctaatctaagttggaaacccaatgcaaaaatggtgctcttttcaagttgcgagatcggaaaggaaatctcgactcaaaccataacaattaacaaattagcaacattgctaatagcaaactatcaatttagtaaaagattagcaacgttgttaatttgtttattagaataaacatggtcgattttgtctccatatgaattttggtggtgtgtaagagaatatacatacataatcacaaactaattgtattagtgaacctctccttatcttctcatgatccccatcctttttttttaaaagggtacgttgttgactagtaatactctacagaattatctttatctgtggtttcgtcgacagggacaaaatcagagtacttaaccggtcgagggacgtaaggaggtgacgtacatctcaacaaagcccaattgaccccatgaaagaaggggtggtgcttaatagccgtggcccccatggtggaacccatcctcctcgtagggtccttaaccaacagctgcgtaatcaagtccttagctgggccaggtatactcggctccttggggaactccaaggctcgagccacgatgttagccaaggttaactcatggtcgaaacccttaaaaggcgtcaccccataaaacagctcaaatatgaagatcccaagtgtccaccaatcgacggcgctgccgtgaccttcgccggatactatctccggcgcaaggtactcgtgggtcccgacgaacgacatcgaccgaacgtccatcggctccgccacgatctccggcggtccgccgtgaccgagcttcttttttcgcttgcgcttcggccggaagcacgaaacggcggggacgatgcagtttgggagaatgcacgatgacgtggcgaaaggtggtgggtcaatgacgtaatcgccggacgagtgggcggtgaccggaggagtgtcgcggtggtggtcggagatgagctgggctgttgaggtggagttatcgttttttaaggagagatcgaaatccgtgagcatgatgtgaccgtctgttcgtactagcacgttttcgggcttgagatctcggtagattattcccatgatgtggagatattccagtgcaaccactacttccgaagcgtaaaaccttcaccaatcaaaaattaaagaattcaattaagtcaaattaatttcaattaaatgtcattaaaggagcgtctcagtgtgaaaaaaagttagcccatttacgattaaataatgtaaatagcgaggtggatcccacactgagtttagttggcccaattagagggagcggtagtaagcagaactaagtaatgggaattgatttttatttaattactttagtcaaagaaataattaattttaaagaaattgaaaattcatcgggtacgacagggtccaccgtgttgaaatgcacataatcacgtaaagggcagctgtttttttttttttggtttggtaatgtacgtaaaaaaacaattatgagagaatgtaaaatgcataggaaaaaaatggaaacaacaacccaagaatcccgcaaaaggaaattgtctacgtaaacttaaaatatatcactccatatatataacataataagatcacaattagttttgacttcattttcatgtgaatagtcgtttttttttaattaaaatttatttaaggatgattaaaaagaatttgttaacactaattttgagctagcaatgaatatacatgtaatattccagtgcacgtgagacccaccaaaagcaatgtgggctcgcaataaaatacagtctatatcacaattaatccctctgaccccatttaacaaaactacaacgatcgatacatacttctacttcacatactataattatattccgataaagaagaaatatatatcataaatatttattctcaacatgcagaataaatcaattaccaataatgcatttaaaaaaaatcaatattaataataaaagtttggattatacagtgttatatattatatgaatttttatagttgccaactaattattaatgatttaataatgatttttatttgggtctaaatttggaatagtgtcaaattagcaatgctggctccatgaatcagacagtgagaactaaaatagtaagaaactttatataaaaaaacaaaaagagtaaattgtacgaaccggacagcggcttcgctgaagcgtttctccggttgacgctggcggaggacgtggaggtcgccgccggggcaaaactccgtgagaaggcaagaccaccggacggagtcgagcgtagcgtaaagcgtcgggagaaaaggatgatccaacatttccagtatttccctttccaccctcgcgcggctctctttgtttcggctcgcgagctctttcttgtccatcaccttggctgcaaacatggacccgttcccgcctttaa

SEQ ID NO: 141 - DNA, 5753 bp, Cannabis sativa
ctctctctctctctctctctaaaactatatatagctttgtgtaggtgtatcaattataattgtcaacaacaataagttaggtaaagtagttagcttagggaaatgttcctcaattagtgaccaatcacaatggtcattaagtgaggactttgctatagagacgggactaaagtggacttgattcttcaactagcacttgaggatgtttagcaagtttaaactcacacatttggtcatcatgtctgttggattctcctttgttccaatcttcttcacaaacactttcttttctgttatatttctgataaagtgtagctttatatctatgtgtttagacctatcatgaaaaattggatttctcattaagtacaatgcactttggttgtcacaatgcactgttaggtcatctaatttaaacctcaattccttggtgaaacccttgagctagatatttttttatggcttctgtagtagtcatatatcctacctaaattgatgacagtgcaaccaccttctaaaggttagatatccagctaacacgtccacctaagacagtaaatgcataccatgttattgatctcattgtgtctatcttttctacatagtcagaattaacaaattcatttactttaatttctatttccagcttgttgttgtagacaagaccaacatctactataccctttaggtacctcactcatttaactgcaaaccaatgctctttccctgggttaaatatgaatctgctaactatgctcaaggcataagccaaatctggcctagttcacgccgtacagtacattaggctacctacacatgatgcataaggtactgaatccatgtatctcttttcttcttctgttttaggtgcttgggcatgtgtcaatttgaagtgttgtgttagaggggtgctgacaggctttgcttcactcatacagaacttgtcaataactttatgtatgtaattcctttgggacagtgatatcttctctgatctctctctctctcttttgatatttatccctagaattttcttagcctctccaaagttttttatttcaaattttgtgctcaattgtactttcaatttatctattgcatatcttttctttcttgtgatgagtgtcattaacatataatgataactagattggttcattattatagtacacagatgatcataatcacttcttgtatattcaatatagatcataaactcatggaatctcaagtttcactgcttaggggcttggttgagcccataaagagattactgcaagaggcatatctaattttgtttgctatttttgtatccatttggttcttccatgtaggtttgctctttaagtttgccatggagaaatgatgtccttatatccatttgctccatttctagatcaaattgagttactttggtcattataattctaatataggtttgcttgacaactgaagagaaaatattattaaaatttataccctctctttgattgaaacctttggccactagtctatccttataccttatttcttcactcggtaatccttcattgtgcttgaagatccatttggagcctatgatatgttgtctaggtggccttagaactaccttccaggtcttattctttctcaatgatgtcatttcatcatctatggcttttatcttcttgtctttgatgtttatagcttcctcataggtttgtggcttagtgcttttaatctcctctactaaagccaaagcaaatgcagtgcagtttgcaaaacctactctgtcttctttccctgcctcttacaagctaatagtattgtgtaggggtgttcgcagtgcgggtgctgcaatttttgaccattttttcaaaccaacccgcacatacagtttttctaatttcacaaactgcactcgcatcgcaaaactaaaaaatcataaaaactgcacccagggccggccttgagttgaaatggactataggaaaaaaaaaattgggcccttactataaagataaataatatttttaaaaattatttaaaaaaaaatatgcatattttttaaaaggcaatttttttatttgggtccctaaaatgagtgggccctaagcgcgggcctagccagcctatgcccagggccggccctgaccgcaccgtaaaaaataatgcagtgaggtgcgatttttgcagtttctacagtttttgcagtttggactatcaccaaataattaaactatcagaaatactacaaaccttgagcaacacttgtcaaaagtaccataaggcttgaaaataaatatgaaaaaaaaaattaagtttcaacaatacaataattaatgagctttgggttggacattcatatattagacctaaataaatataaaattagtatttttataatgtgcggtgcggtgcaattaaatcacatattaacaattcaaaaacgcaaattgcaccacactgcgcagtttaggaaaaattcaaaccgcaatcgcatcgcaaagaatttcaaaccacatttttttgcagttcgggcagtttgaatggtttaagcggtttgatgaacacccctagtattgtgtgctagttgttgcatattcttcttcctcttttgtttcatcttctacttgagtacaattctgtgtatccactagagcaagactttcttgatttcccctgtccattatttgcaagtgaatccctttttcaatttgacctttctaattgtcacatgtgcctacgactttaatggccatttcttgttcgttgaagatcacatccctactgatgatacacttcttgtatctatcttctaaacaccataacttatacctttttacatgttctgggtatccaagaaataagcattctagtgctcgttgttcaagtttaccttgtcttatgtgtgcaaaagttgtgcatccaaagaccctaaggtgttcaattattggtatgtgaccctccaacactcttgtgaacttttaaacttcaagacagtagagtgatacctattaatgaagtagcaagttattttcagtgcctcaccctagaatttcttttctagactactcttccattagggttttattcatcctttctggaagcctattttgttgtagatttttcacaatagccttgtgtctatcaatcccttgatcttgatacttggtgagttcatttgaacagaactctaatccattatcagtcctaagcttctttattttctacctatttggattctataaggtttttccatctaacaaatgtgttaaaagcgtgattcttaattttaagtagaaaaactcaaacattcctagtatagtcatctactatactcataaagtagttggcccctcctagtgtttttgttctagagctcacccatagatcagagtgtatgtagtctagctttccttgagttatatgtttaccttgtgtgaattttacctcgcaatattttccataaacacattcatcacagaaatcaagtttgccacccaattttcctttgagaactccctctttccctctcactcacttgtccaagtctcaaatgccataaccttgtgctgtcaatatctggtttcttaaccaccatatcattttccccaatgatgattttaccctttggaaaatagattccatttatcagctcacctttcataaccactagagatccctttagaacctttagtgaactgtcactcttgatggtaaaacctttttctgtacgttccccaattgagagcaaatttcttttcagttcaaatacatacctgacatcttggatggttctcacttgatcatcacagttccaataccagaaacattgcaggctttgttgtctcctagtagaactacaccaccatcaatcttcttgaaactactgaacaactcccttcttggtgtcatatagattgagcaccctgagtcaagtatccaagaatcatcatattcttgactggaaaccactaagacatctgctgattcatagccatcagagggtacaccagcatctcctatttcctttcctttgtctctttgaatcttggctttcaatgccttgcattcatccctgtcatgtccttccttcttacaataatagcattgtttgtctatctttgattttgatcttggtttgtgagtgtggtttgaacccttgtactgatttcctttgtgatttgtcatgtgatagccacctttgtcatctctgaaatttgatctaccacgaacaaagaaaccctctccatggccatcagtcttctcatcatttctttgttgtatttcctttgaattcagtgcagctttgacttttgtcatggtcaaatattccttcacatatagaattgtatccacaaaattttcataatattttggcaatgaactcaataacataataccttgatcctcatcttcaatcttgacttctatgttgttgagatccaagataatcttgttaaatttatcgaagtgatttctgagattcttcgattcatccattctcaatgtgtaaattttcttcttcaaataaaatttattggctaaggactttttcagataaatcgaagccaatttcttccatagcctactgtagtttcctcacttgaaacttctctgagcacttcatctcctaagctcagaaatatggcactgtgtgcttttgtctgaatctatttgagtttcttcttgttttctccaagagttgtaagctcttctcgatcgattgcttaagattccttaatgtataatgaatgctttcattttgatcctccacagactaaaatcgttagtaccactgaacttgtccacttcaaaacgtgtggaagctattgctaatcaaatctcgatctttcttgaagtcttgattcggttcttaattactcttgtctgagctttgactccaagtgttatgatttattcctccatcaaaaacaatgaaacactagacaatgcaatgtgaattagaacaggtgcaatgccaacatgaatatagtgaactgaatttcacacaaatgcataaaacataaaatagaacaccaaaaacttaacgagattcaaacaagatgatgaagattacatcacctgcctactctcttgccagaacaaaccctagctttagaatctttattgagctatgaatattacaattaattctcacttgtggctatagtgatcggatacacattatgccattacaaccctccatctctttttctttctctctcaaaatagctcactcattctaaataggtagctatataggtgtaccggttataactgtcaataacaaacagttcggcaaagtagttagcttagggaaatgttcctcaattatcacaacagtatcatattcatgttgtgttctttatttttgctctcagctttcactcatttcccatgttttaaattatgttcaagtgaaaagaattattatttctactttaatttttgttaattaagatatacaatcattgacttctttaagaatataattggggaaaaaaaaaactaaaagtctgttatatgtgatattaaaatccttcacgcattccactttgaataactaatggatgttctttttttattattattactcaattcgttgtatagtatatgtgacacgtttgcaacccttttcatccttgcaaaatgaacatgttcttgaatatgttttagagcacattcgttgtatacgcatgtccttcaattttaatgataataattgactattttcacgttcttgcaaaacgaaaaataaaatgaacaga

SEQ ID NO: 142 - DNA, 1840 bp, Cannabis sativa
cttctacttcatgaaaattcatgaaaattaggtactcttaaatgcccaaactgtgatacaaaagtaactgattaatgtttacgtaaaattatatattttattcctaactttagttttcaatcatgaatacaagtgagacttatcaataaacttaagtgggggtcagtctaagacaagtgacctctatctctttttcgaaaaaaaaaaaaaaaaaactgaaacttagcttcttttttgaaaggtttgcgttttacattgccctacaaaagactaaagctacttttagtctctctttgtgctcttaatggatctttcataaagagaatgcttgcgtttgattagataagatagtgcatgacattaataatttcaatttatgagagaaaataagttatcaaaatgaccaaaaaataccttatcatgaaattgaattttctaaacctacaagtaatgacgataaaattatgttgagcacatcattctatataatattgttgataaatttgataggcatatcactactacatcagaatttttacaagacaccaagataaagacttgtaatatgatcacttacttatcatcactttttactaatttacttgcatgtatgatttaaaaacagtgtaaaggtaaaaacctccgcatcctcatttttgagaagtctcccctcatgtaaattttttggacacttcacagccaaatcctctgatatgaaacctgttccatctgtatgaatgagtgctttaccatctctagacataggattaccatgttcatcctgcattttttaacaaaacatataaatgagaatatgcattaattaaaaaaaaactatgaattcaattggaaagaagaattaatggcttactgcacactgaacatctggaactattttgacatttacagaagagaggtcaatatttaatgtgtatgtttttgacaaaataagagaaaacctgaatttgccaaaaggaagttcaaattagccttgaaaagtgcataaaagaagctttttacaagaaactattgaaatcaacatacctagccatataattggccacactagacactttgtgtgcatgcataaatagctttcttgcttcggaaattgttttgttagataaacagtaacgtgtcttttgatcaattcgtgcatctgaatggatgcgaacaaagaaacacttcacgggtgatgaatttggatttttcctcttctcttgatttccaccatctttgaaaactgtcaaaggtcaacaatacagattaaaatgccacatacaaagaaaatactgtcttgaataaagatttttctttgtgataaaaaaaatatgctgaataaagtgagaataactagccagatttagctgcctaaggtaaaagcaatagctgattttctaccccactgtgatttcctaaacgaaactaaattgggatatatggatccaaaaaaaaattggcatatatggatgaagcctagtagtacaaggatgtatgttaacatctcttggtgcatcctagaatggtcaagagcacaagatctttagaagcctaagagactctttgaataatctacacgagaaggacaatatatttgagaaacatgccaatatagactaaacaagtgtcatagacattctttttcaagaaaaatgattatagcaagggagtatgtgattttcgtaattgtatataaaagatttaaaaaaaataaaccatatggtctaaacacttttatcactgtgatttttaatcatgtataacagacattaagtaaactaacaagctgactatgtacatgatcccccaccctaaaaataaatgaacacaaaagtagtga

SEQ ID NO: 143 - DNA, 1639 bp, Cannabis sativa
tatgatttttttgaaccaagtcaatttttttttatataccaaacatgataaattaattttttaattttatttttcacagtttttatttttcttatctttcttttcctatcaaaatctaatttctaaacataggctagctaagataatttataaatttatttgagtattgacgtgtcactgcaaaaaaaatctttagtcacaattaaatttgtaacaaaaagtaaaaataatgactaattataaattattatatattcatacgtacgttgtgactaattgatcagtagctaaaagtattagtcacaaaaatcacaatttgttgtgactaaaagtaaattagtgacaacttatatttaaatatgttttggtcacaagtaattttttgttgtgattgttagaagtcatatttaattagaaaaattttatgttgtgactaaaaaattcactactataagtaactgtttgttttagtgtatggtttcttcttagtttttcattcatgattgtgttttaattaataaaaaaaaatctttaacaaaaaatagaccaaaatgtttaaaatatcgatctatataatggttttgaggcatatggggctttggtcttttcactacatgttcatgaatgtatagtgaaagttcaacaaatatgggggatttgtgtaattatcctaaaaattgtgaaagtttcaaactaagacaacagaagtgtcgcaaaaggttcactaagccaccttgataatttgtagtactgtgaatcaataatgtcaaacgtgggatactaatataatatatactatgcactatataaccctaaaagagttttttcaaaaagagaatataatttggctaacctagaaaatgccaaaacccagctgccatatatctagaatgagtgatgagaattcctatatgggatgcaatcatcttttgttgttattatcttttatattattttctaacttctgttctgaatgtattaactatttttattatttaatagaagactacgtgcgtatgcatgttgttaaatttagttgtatatactttgtacatagatatatatcttggcagacatacgtatatgtttatgatgaacaaatacacatattatacactaaaaaacaaaaattagtttacttaattttattcatatgttgtgatcaacataaattaatttattcacaataaattataatttttgtaattaatatttttagttacattttattgtgagtaaaagtaaattttttgatagagatatatataatatatgaaagaatattcaatatataatattcctctcttggactttcttatatatcattcttctttatctaaacaaagaactccgtcatatttacaattaaattataattaataaatggttagcaaccaaagccgccaataaataattggatcctaataactcaaataaaatgtatgacttttccataatgtacactagttatctatgggcacgtgttatatattattttgtttgctataaaatgatgaactctagctctttaatctctcatcatcattcaccacaatcacaaaacacatccattaattaatcatctctcatatatcgatccatatatatttattattattttccaataacaattttctca

SEQ ID NO: 144 - DNA, 5556 bp, Cannabis sativa
ttgccagagccctgccacttttatatcctgtcacagacacatgcatagagaaacagtaaaatgatataaaaagaatagaatgagaaaccttagatgttggattttctgaaattttgaagaaaatggattagaagtgagaatgatttgtagacattttaagctcaaggcttgtataactcgaataaaggaattgattatacatgttaatggtttgccgaagtagttgaattttattgttcaagagatgtattcacccaaacttactgtggaaaatgttttgctgtgttgcagaattgacaattggaagcgtgaacatattctgcagttcctgcaagagaaggttaagcctacttcggcatcttgagtggtcttattctcaatcctttattagctcacatgataggaaagtttccaattcaaattggaacttgaacactgatatttgttaacaggggaatgattttatttaatgaactgactgcagatatttctatatttgatagttcttattggtatcgttcgccatgttattgtattttcagcttgttgcaagatgaaattagattgataaatggttttagctcaaggagagaagctactccattttgtaagatccatcaaatacttttttcttttatttcggctaaatgcagaaaagcaaattttggatatgaatcgatcatgatgatgggtggggatgggaacaattttttgtgcgggtatcatcattcatttatttattttagatattattcagtataattataagtttaatgttaaatgtaattcagcacaaaagcttaccatctctgcatctgtagaggcaaggaagaaaagaaaatgtacaataagaacgtggtaaaattttatgcccaagatcagaaacagttagtcaaatgttcagaaataatcaaccaataacaatgatgatcgcgcatgcaaacaattgaaataaagccatcaaaacatgacagataacagtgagaataatgcaaaaaggtttattccggcggttcaagcatgtgtagcgcaatacaatttttcaagtcccaattccctttctccctctttgaacttgcaaaacttccatttgaactggtggaaagagatacactagtatatatagaccaagttcgagtagttgccgcataaaacttaaccaaaagttggttggtgatttcgagaagtaaatccaacatagaacattgtctatgttcgagtgtcataggagcaaattgtcaatcggagcaaagaagccaaaatcaaatcttagtggaacaaatccaaccaagaacgtacttgtctcaattcttacaaatgcctcttggacaattttgattatgaaaacaaaaataataataaaaaaaaaatcggacatttttaatttttttttggtccgaacttgagattatatatgagtacaagtgtacaactgtgtccatgataacagataaaacacacaattcaacaactctcatccacataaggaaacgacaatatatggattagcgattgcattgtcgtatcatttcttcttcaagaaaagaaaatggcaatgacattgagctcagccatgctcgtcgtatcccaatcccaattccaccaccacttccttccctcgtctccctccttcgagctcactgagtctaccccaattcgaacctctaatttcctcctgtctttcccaagttccaacccagtgctgaaatggaggatcccacgcccactacggtcctcatatctcaagctttattcgtcgtccggaaaacagacagtggaagttgcctcaccgatcgtggaaccagcggacgaagttgtcaggaaattctacggcggaatcaacggccgtgatctaccctccgtggccgacctcatttctgataactgcgtttacgaggacctcatcttttcccgccccttcgttggtcgaaaggtactttatttcatcatccctagactaaacttgaattgattttaactaattttgttcataatgttcaggatatccttgatttctttgaaagtttcaccaatttgattgacaaggacctccagttcgttatcgataaaataactactcaggattcttcagctgttggtgtcacatggcatttaggtatactgaactgaattatatatatatgtatataccggtaacactctttgatatggaaatgattacctgcagagtggaagggaaagccttttccatttagtagaggctgcagcttttaccaactggaggtcatcaatggcaagagactgataacgtaagagtttcacagtctttcaataccaaattttacagcgtggaaaaacatcttttaagtgattgtctctatgaaagttttgtggttcatggttggtaaatgcaaattatttaagaaaatgagttgtggtgattggaaataggtatggaagagacagtgttgaacctgcaatcaagcctgggaaagctgctttagtaagtacattattattattattattattattattattattactcttcttaagtacctataaggctaaacacacttatattcactactcaagctcattaatttttatttatttttaatttctaatttacaggtgattatcagaggagtgacttggttactgcaacaatttccccagttagcagaccgtttatgaataagttttctatattaaacttggctggtgtatataaattataattatacttatctttgtattctcaaacactgattaactaacttgaagcttgactcatacatcttcaatggtaattaaaaatatggcacttcaattaaacgtggaaaggtaaaacctcaacttcaaaaccaaacagagtactctaacctgttattttgagtctcctattataatttggaagactagggatttcatcaaaaacaatagtgcttggatcgttgggaagcattctaaagtagagatttggaactgttctttatcttgttctgatggctccatcattagtccttcagattgcaacccatacattaaagattcgattgcagctgatgatttggtgagcgatactggttacgagtgggatagagattatgttaactgtctttttatccctaacgtcagtttctctattctcttggctgacttgactctcttaccagagaaggataaactggtgtggatgtcctcctctagtagggagttctctctgaagcaggctttttgggacctaaacaaaaatagatttcaccttgagaaaaccagtgctctgattaggaaaacggatcttcatgattgtttaaaactttttgtggaaattgtttaaggattgtctcccttttcgctctaggctctcagttatttttaacaaccattgtagtgattgtgctctttttccagctttgaggggagtgacaatgcaaagcacttcttgtctgtcttaatgtccagttaccaaaagcttgtggttttctagtagatggggaactttcattgatgaaatccgtttccattataatgtagaggttgtacagtggatccaaaatccacatgactctcagggagtttacattttgatggataaaaaagagttcgtcctgttcgatgctattctttatcaaacaactctggtttataaggaacgagaattaccataaaggtggtaaatggcctgttcatgagattaaaaggaagatttatgagggattcaattggcactctaaggtgttggtgatagggggctctattcattaagaggcgcatcaaattcaggataatcattgggggctacctagacctagtagagtttaggttaatgttgattttgttaataagaattgtgttggggcggttgggattgtcgtctggaatggctgggatggtattctcgccctgtatgtcactaaagtctcgggtacctcagctcttcagggagagttggaagctgtcagaatcggtctggaggtgctttttaagatgggaatttcagaggcttgcatgtttactgattgtcgaagtgttgctgccacggttcaaaagctttctcctcctcattggaagtttttcgtttttttagtattttagagtcattttatgttgttagttgctctgtacagtgggtgcctagaaatttaaataatgtggtacctgtgttagctaagtgaggttaaaccaaggcttgtaagggttttttgagtttctgagaggtgagtttccacgtgctcaccaatattttatcgtcttttaaataaaggtttggaggtgttttcagccaaaaataaataaataaataaataaaaaataaaataaacttgagtaaataaacgttcttggcaaatactgtacatccattaataaagtataccaaaaagttttcgactttcatatcacaaaaagaaagcacttaaaaacattattttgtggaccaatttagattgttcttggaatatggtatataaataaacgaaacagagtgttcactcgtgggcagaataacgtaagttaaattgtcctattttcatataggataaatatataatagtgttactatatagacactcatatataatgttgagtttgaagataactggatatcgaaattcaaagtagtaagttgagtttgaagatgttataataccaactgggaatcaaagcatacattatttaattttttttttcacagaacttgcaattaatgctatcctattggtacaatcaattcaaacacaacagtgttccgtaaatcaagtagtattcctgtaattaataatcaagaactcaaactcacatagtcacaaaccttgccaaaaggcctagcgggtgccagtaagccacctcagctataaccggccaagaaaaaggccttgcctttctttttctcctcttcttcctattctactaacccttcccacaaaaacaaagaaaagtaacagagaatgttacacatattacacactgtcacacatcaaagaagaaaaaaaaggtcttttctcttttttctttttcttttctaattttttattctattttagtaattctagacttgggcgccctcaaatgtttgtccaaactgccaattagatggtgccacgttgttgctggtgataacccttccatcactaagagtgatttggaaggaaagactctgaccattgaggtaagagttactttgccaattctgaccccagttcctcgacatggcttgccaccctgtcttggaacctttgattgagaccgcatgaacatcccctgcacccccgacgttggtgatcaaaaccaagttgaagtaagagtgtccattcactgtgaatctaattccacctttctttacacatggcaccctgcaaccaaagaaaaaaaaaataatcagctgaatgttacaactttcttcatatcatttacacgaaacagaatgttactaataagtattaacaaacaaaatattaatatgttattaccttctgaaagagactggaacaattccagctttgtactgagcaatctgtaagaaagcaggctcggccaaatcaaagtgctgaagaggagggttgccccagccaccattgtcgttggacaaag

SEQ ID NO: 145 - DNA, 3444 bp, Cannabis sativa
cctgatcccactgccgccgccgctgccgccgagaaaaagaaaccaacaagtcttctcgatcacgaggaggaagaggacgacagccatggaatcaggtttttggggtcttcaagtcatcggggtttgtctcatgcaagcgcttgtgaatgtgaggatgggatctttaggttttccagtacggaggtgaatgggggtcgggttgcttcgaagaatttgactaagaaaagaagggttttgggtcgtcagttgaagaaaggagttgggtttgagagatctgatggattggagcagaggaggagtgtgaggaggtttggtgtttgcttaaagagaaggaagactaccaaaaaagtagctggaaagaacgaaacctgttcttcctctaatggttagatgcccttttctctgcttccatccttgtttggtttgagagtaaatttttgtttagagagtaaaattgaagtctgaagtattttactgaataattgattagtttcttttatcaattgaaattaataaacccaaaatgttttgtttttcgactagagatcggttcaaattttataataatttgaagctttttgagaaaaagaggaagaagcacaagttaaagtacttaaatatgttgatgtttatgtgatatgtttataggttttgtcgttgggctggttcatggttaagcttactaccggtattgaatttgctaaaggataatttgtatagctttatcaaatcaaaagtgcttaagctcaaaataactcaataaggatacaattttctcagagagaaattatgtatgagtaatgaactttcctgaatgcatgtatgtgtactttcagtcttggggtacttggtattggtatttctaacaagttacttctgaatttgttagtttaaacttttcattttttgtttcttgttgtgtttgtttcttcagatacctccttatttggatggggacttggggttgggataatgtacatgatgtcagctggcaaaggcgagttcagtaaactaaatacagcaatgagtgagacggcaaaggttgtcgaagagttaaaaacagagatttataaaaggaaagtttctccaattcttgatgttacatgtaatgcatgtgaggtcatttcaaaccacaatgattttcacgcagaccttaacaagtcaaggagaaatgaacaacttggttctagtaacatcaacaacttcagtcctgtgataattgatggtgaatgtggaagtagtgctcttacagaagagcctgggcaaggggtgcaggaaatggatcaactggaaaaggagcttgaatctgaactacaaaaactgccatggtgcactatagaagcttctgacatagagtgttcagtagatttggtcaaggtgagcttttgggtacccttctatgctcaatttcttttaccttcattgattacataatacattttaaagctttttcttcaacattactagtgccatgctgtcatcttcaccaacaatttaaactagccatgtaacttaaatgagctattaatgctgtgtgcttctatgtggattcttgacacgtggatttttttaattttatttttcttgttgtgatctgatagaaactacagttttcagaatgaagcctttatctttcacaactaataaataataataaataaaataacccctttagtttttaggaaaatgtgaatgtggtgaacagagcaggagtagcattaatagcttaccaatgaaatgaaaagaaatggcttatgcttttgttaattcatgtctttcagacatttgtgtttccaacttagaacatcatgtcattttgatgttagaaattttgtacagaccgaagtttcagctcaacggttccctgctgaacaagagagacaagattatggaattctgccagtagagcttgatcaaaaactttgtcatttgctcattgaacgacaggaaaaccaaatagaggagctggaatctgaattgcatgtggcccaaagcaaacttcatgagaaagaggctgagctccaaacactgaaggactgtgttaagcgccttacacagttctctatttcatctttctcaggcaggacttttctcaaaaggctctgttgtgtttttttttttttgggtgctataaatattatatatatatattaattgctgcagctatggaacttaatctgacataaagacttctttattaccctttttttttctcttcttcccagatgatgaaaccgaggtagaagatgaacaagagcaggcccttgattggaattacaagaaggttggatctgagttaaaagaacctggagttgggatgaaaagacctcttgattcaaatatcatgaaatatgacgttatttcataagtgggcacaaaggtaatcacaaattctattctattgagaaataatagattccaggcatattctattgtctggtgtgggtccatttagagtttcaagtctgtgcagcaatgttaggccaacaacaaaaaaaaaaatgaaaaagaaagggtcttgaagtctcatatttcttcttgcattctgcaccagcaatattatattacagtttacggattactttatttaatggcctagtgtctagagctaaaaccctgttaacaaagtgatcctaaattgacttggcaatgtggcccttgcccggatcttggtttaatataattatgccagaaaggcagaaaggaaggctgaaatctaagttgacttttttgtttccttgttgggtcatagaatacagctcagtagcctagcccacttaaacactatcaaataactatatattattactcagaaactatctatctgtttggatttgaattttagcagggtaagtgttcagtaataaattcatatagtgctctggtggttgaatgtgcccttggagttgggacagatgagacttgagagggaaaggtggtgcctaccaagtgggtcaggggttttctttctttcccaaatctataaaaatggtggggatgatgaccccactgacccagatgtatgattttttgctggaaattataaacctgtaattgttccttttttgttgtattatattgatagaagaagcacaaaaactctttttggaatagtgcagtatcgccataatctgatatgataaagatggcacatacatatgtaatgtttttggcaaaccccaatcatcaatgtaaattatggagctatatttgttggggaaattccgcaaaggatttggtttgaattttcgtaatatcttatataggtttaggttctatatacataaagttatttagagacaaaataaaaaatgtagatgaagatgatgaggctgacgaagtagtccaaatgtataggaaaaactactgtaaagtaaggtctaggaagttagtacctagtagtgatttgactagtgtgacccttcaattatgaggtcggcaatc

SEQ ID NO: 146 - DNA, 2758 bp, Cannabis sativa
cctcacacaaaacttcaacaatcgtagcaggagtcaccacctcgacctcatcatcatcctaaacttggccctcagaaagcccactaaattttgggtcagggtgtaggtcgggtccccatcagcctaggataatgtatttaggattacggtaagagcagattttaaaagtaagacgttgcttagcccataattcttcaagttactcgatgtaataagtctcgaagcagaccttgccacatcaagaaggttgtcgaatctctacaaggtagccacagagtccctgctaagtacaagaatatctttggtcgttgaaagaaaaagatcaagtatgagaccacgtcaaaagtaatggaacacagcgagaagggtaaatgaaataataatcatactaggagcattggatttgcaaaggatgtcagcgagcatctttctcaaccatgaaaaatttataatcttggaagcggagtttagtagacatcctagagacacccttaactttgtttgagccacacttatttaggttataggtcccgagtaccacaatgttatggctaatattgtaaacaatgtggaattcctcagctataggaaaacgggtgttcacctccttaaaggtaatcacaaaacacattaggatggcatagctagttgggggaactgaagtggagcgatgctgaaataggcaaggactttgacgaagaatggatgaagaggcaaggtggaactggccctcatgatatgctcgctaaaggctactctgcccttgcgaggctgagtggcccactaatccgacttagccaggaacacccgcaatttcccatcaaaaggaatgttgtaggtttctaacacactacaaatcttctcaatggtcatggaactcgcaatgtccccatacgcaaacgaagtctcagtgctaggaaaaggcagaataattctttgaggaagagccatacctacagacacgcaaaagtgatgataagcacaagtctcacatactttttgttttttccaagattcctacatgcctgagctttgatcctaggaagtccaggaagaagtaaaggaaaagtgggtgcaactttgggcctttcatcaaaagtggggtcataaacctcaagagatgaaggaagagtaggttctagaggaaaagtgctctccatgtacaatagctaactctgaatttggtcaagcgatatcctaagccaaaacaagtataggtaagaatcgacaatcatgtcatcttgttatccactcaagactgaatggatctaagtttgaatcctctaccagcactctttgcagttaataatgcgctctaggtaagccctcctcttagacaacaacgtaacgtacttctcacagggattctcttgaggacccctagagtttgaagatgatatgccaataatttcgaccttaaaaggtgctttggcaggctctcccatagaaataaagtagagtagactatgtcaatgagacacaacgatacaacaccctcacctaagagaaaaaagagacatactaagttcactaaataagatgcatggtgaagcatgtcctaaggagaatacagacaactcaccaatgataaggaaaatagaggcgacattcaaggaatcacaccaaaagaatttgtaagcacaatgcaggaacatcgataacaaaggaaaagatggcaaactccttacctcaaagtgatgatgaaatctttcataaaacgatgaattctgctaatggcgagtaaagtgcatgtcataagaaacaaataacgcacatgaagaaatagttatggatgtggtcatagccaaacggcaccacaaagtgacccacttggcacccacaagtgagccactagacacccgcgagtgagccactcagcacccacgagtaacccactcagcaaaggccactcgatacgcaccccaaaaacagggaattgacaaaacaaaggagaataaattaaaattgaaagatgactttgccaagaatcgaactcgccatctcttgatggaatcaggtaaagttctccactaagctagaaaggtttatgtgaaatggatggaaagctcatgaggacctccttatatactaggcacttttttaaagtgtgtgccgagggtggggtttacaactcaacaagatgcaacaaggtgagacaccaactctttcagtcaacaagaacacttaaaagaattctcatggactaggggcaagtgttaatcccaataattaacaaggctaaccctcgagattagtcaacattaattcaaaagattagagggattagctttcaaagttagtcataagcgacccactcaatctgtgtgccatcaggctactcagtatgcatgctcaaggagccactcatcatgcatgcccaagcagcctctcgatagccaggttgtgtgcagcctcttggcagtctggttccgtgcagcctctcgacatgcacactcgcgtccctctcagcatgcgcactcgcatgcctctcgacatgcatgctcgggtacgtctcagcatgcgcctcaagacgtgctcacgagaaactcaacattgtgacacatttggtcattgtaacaagtcgacgcatctcttagtgggacaatcaccacttaatgaattgtaaggaaaggaatcaaaaggacaacgcatgtgggtacaaccatgctacctgcaaagcctggacatggagagacgaccagtagtggaagcgcctcacctgcaaggcctaacatcccgacaaagagtacgttgcagc

SEQ ID NO: 147 - DNA, 2419 bp, Cannabis sativa
taaaatttctcacttcgactagtagagtggttgtatggctaggagagctttgtcatgttattcctttcttcctttaaggccgcatacttatcaagtttcagggctcatctcttattaagaaaaaatctatgatacactgatacatggagaaagaacttcctaaaattaattaaaatcaacaaaaactaatataaaaatttagcaagaactttgcatcttctttcatgtaaataaataaataaataaattgaacccccattaaattgtcttggcaagtattgtgtgtaaagagtttcttgatcctaattaaggtaatcagcacagtaatgcgttatattatctgtcacatttacacacaacatgttcataaatatttttaacttcattatggagatttctgagtgtgtttttttctcagttttcttttctttgttcagacaaaatctttacaaagatatgaggtaataatatatagactaacccgaataagagtgtttgctttgaagctttttatctcaagctaaacactttattttagtatattttctttctttttttccctcctaactgttttacctgtctattactatattgaatcaagactaagttgtatcatcttatgcctcgtaaagcattccaacttcgattcgctgtgtcaatggcactcccaaagcagggagagcagacctgcagttactatgcaagacttcataaaacgcgagcatgattctgtcaaaccaaccacagttattcccgacatgaaatctagtctttcctcgaacatgaaccacccctgctttgctcgcttcttccaaatcagaaatttgttcttgaatttcaagtgtctcggttgatagatgacatgagttgtttcggatgtgttcttgtaagctaattataacttgcctaacaaagtcatctccctcaaggtccagaggatctgcatagccatactgaatcacacatccatagacgcctttatagtcaagtttgttgacaacgattctctcgtgtggagctaccttgggaaccaatgagtatcgaagagtagtgaatatggtaactttgtgaagtgatttcatgttcttgatgtaatgtccaagaataggagtgaggccatcttgaatgttggtgtaaaagaagcataatcccggtaccctttggacactgggatccgatattagttgtcctaatctctccaaggttattttgtaagtcaattcgtatgcaacctttctttgtcttccataaaaccaaccaaacataatgaaggcgaggataagagaaatggcgaatggaatccaaccaccttcgggaatcttagtgaagactgcactcacataaactccttccatgacaaaaaacactgagaagtacagaacaacaagataagatggtgttctccaaatgatgatcatgactaatgtcagtagtatggttgtgatgagcatgactagaatgacaacaacacctgaaaataacatcacaacaagtgttaatacaagttcccatttagcctaaagtaataagctttcggttagtttaccataccaaaggcatttccaatgtcttttccatctccaaatataagtatgacagcaacacaaagaatcatgaggatgtaattcacttcgggggagtaaacttcgccttctttgctaggcgatgtatgcactacctttacccgagggaaataatcaagcaccacagattgcttgattacagaaaaagtggctgatatcagtgactgactagcaactattgcagccgatgtggaaatcgcaaagattggccagtatatctttttcggtataaacttgtaaaacccatcatcatgatcattcgggaacttgattaagtatgctgtttgcccagcatatgtcagaactagagatgggtaaattgtgaacaaaaaggccatctattgtgcaggaaaagaaagaaaaaacatgtatcagaaagctatgtattaaaatgtatggaaagtttgaaaaatatatatgatttacaggtaaacctgaattgatttcctattgaaatgaccaagatctgcaaacagtgcttcagaacctgatgtgatcatgttaaattaatatgttttcacattatctatggttgcacaataaaaggctcaagaagaacaattacctgtgatacaaaggacagtgcccccaagcaacaaccagccttcctttccatttctcgaaaagaaatggaagatgtaatgtggtgacacagccttaaatatgcctggataataccttatgatgctatagatacctaccatgggggtacaaaaggtccatgcagccataataggcgaaaaaaggaaactcactcgagatgtaccaaacttttgcaagagaaatagaactactagaaccgctgcagaaagtccttccaccgcagctggaacatt

SEQ ID NO: 148 - DNA, 1570 bp, Cannabis sativa
caatattatgcaaaatattacaatgcaataagcaataatcaatattatttattaaatctgtaagaacagatgtatctttgtgactcgtacccttagcatttgtctttatttatttatttcattcaataaaaacaaaaataaaaagaacaaataagtacatattaattgcaaaggctaggcaagtacctgaattacagtctcctgctgaaggcgaggggcattggacatcatcctacacttgagtcgatccccagactgtcaaaattggagacaaatacttatcattcattaataatgaatttaaaaataaaattgaaattgaaattataagcaaatgtagaatagaagacatgccttactaaaccaatgtagctgaaaaggaaacgatgatgcttgtttaatcttcaatctaataataaaattaaacaaaaagatttcttttcaggcacatatattcattatatcttagttaacaaaacaacatacaaattgaaaattagaaagaaagaataaggagaatagagaatgacgttaccccggagcagagaaaggcggagatcggtaatgagaaggattagtttggagaaagttagcggagcggagagcatgtttggttctctggccaagatataatcaaatgaatgaaaataaataaataaatattttggaaagttgaagagagaaatgctggtttcaatgtctgccacgtgaacggacccaaagagaaagactgagcaagtgagatttgagagtgatgatatcacgtttttctcaactcttctattctggtctttcaatatataatgactatatataaataaatatcgtctactcctaatgtaaatataacacataaaataaatatttaaatttaaattttctatccttttctttttttaatcttgtttagtagcaaaaaaaaaaaaattaaataatataatcttgaatataaatttatgagaatttaactagggaatagtaataattatgatatatttgtaatctttattttatgctcgttgagattagataataataaaaatagtttttgttttaaaaaattaaagttctaattctattgaaaataggtgtactgactattgcatttaatttttatcttatttgaataagtagtgatatatacaattaaagaaaaaaaccgtaaatgtatacacattaaagaaaaaatatctatgcccttcttctttacttttcttttttttttttctctttttattttttaaaggtactcgttaatattcagttattcacactgtaatagaaacttaagtagtgttattttttctctttattctgctctaatatttttctcaatttttaatcacattaaatattaattaattcaataactaataaaaaacttttttaaagaaaaaaaccttccacgtttttaaattattattattatttttttttatcacgaagaaactttattaatcaactcaactcaatacaacaaaatgaacttctacaaagagaagcaacaaaaatatcacgttttgctttttttgtttttggctttttggttttttgtttttctttttttttt

SEQ ID NO: 149 - DNA, 2786 bp, Cannabis sativa
tggcagccttaccaatattccagctctcatcatcaggggatgatgatgaatgtaaaactatggtttagcaagtcaacaaagagagtaatatgcattgaagcagaagaagattttgtagattttctcttctcctttctcaccattcctttaggctctgtcctcaagctattaaaagaaaagaattcattgctaggaagcatagataacctgtacaaaagtgtacaagaaagtagtgatatatcccctaaatgtaaggagatgcttcttagtcctaaggttgaaagaatgtttggttgtgaaagcctattgttgcttgaagtgaatgaagaggtgactcaaacagagtttgcttacaacaaatgctatgcttgttgtttgcaaaacaaaactacatgctgttgttgtcacattcaatatcagagacttaaactaatgaaccccaaatgtccaggcatgactgaaaagggtggtggttttgtaagatcacaagggtgttttttgatcactgataatcttgtagtggaactcctttcaccagcatctggcttgggcagacttgagattccctttactgatttggaggagatgccaatagcagttggaaaagcagaggtatagatagttcactataataattctttgttattaattacataattcaaagtcacattttgaccaccaataggctagaatttaaccctctcatattttgtgcaggctctagctattttcaaagcagctatgacaactcgaaatgttctgagtcaagtttttagctcaatggtgatgaacaagaacaagcttaataatttgtatttaaatgattattagggaatgtgattatctggactgttagaaatatgagtaatgaataatgtaacaaagaataattttcaaaatttcttgacaagtgatcgagcatttccagcatatatctttaacttcatcatcttttatttgaaaatcaatctaacttcataatgatcttttatttgaaaatcaatatataacagtgcttcgcatccatgtatacttgactttaatcttcaatagccaatactattaatttttccatttatgtgttggaaagtttatgaatattttaagaaaaatatgtaagtgtcctagtgtgtgtggggtggaaagagtctcccatggggatatgaactctcattttacaaaggtataaagagtgtaattttggcatttggatttgagtcccaaggggtatctagttttgtgcgaatgggtgaggacacacacttgacccaccacacgcccattgggttggttggtgtggtgtggcactatattatttttatttattaatttaattaaaaaacgtatttaattacttagtcgtatcagttaacgagacttaacgattattcaatccattcgcttatataatgctatattataactgatgggaagaaaacatcttttcttatcagaaaaaaaatagttttcataaatactaaaactccatctgcggcatcaaaattattttagtgtattcgacggtgctctacagtgcagtggggttccgatacagtgcgacgactgggctgttttatcctgaggacgaccggcaaatttcgactgcttacacactcttggacaataccgcgaacgtcttaaagagagcaacttaatccgcgattcaactcaaaaaattttcattcggtaatatcattcctcttttattttgctagcagcttcatgtgtgtatcattaaacaacaaataagtttaaatactattttgtagggccactatatttctaataccatacaaagtgaccaaccttcgatcagaacagagcataaacatcataatccaaccaaattctgtggttgtcgcttgacatagaatttgattggctaaactttaactttaaccttgatttttctttcctgaaacagtttaactttgagttttggatttttgaaaaagaattttttttttaagaagctatatataaaagctttttttttttttaatgcagttaatagcttaaagtccactaagctaacctctcactttttcccatccctcccttatcactaagctaacctttttttttttgatgaaatatcaacttcattaaattaacattctgagtacaaaacatccagaatagcaactggagcattagacacagaaatattacgaccagataagtaccgtgacattctagcaacaacatgtgctagacggtttgctgatcgtttaacaaaacaaatttttattaaaggcatagaaagcaaaagggaatgacagtcttgagctagatttccaaagatggaacaaagaggcagagagctacgaatagcttgaatagagactagactgtctgattccagaaccacttgttgccaaccattgcgtttgatccaacttagggcctctttgatacccatgatctcaacaacttcaggagaaaaggcaccattagcgcagtgagctgtagcgtcaataagagaccctgagttgtttctggcaaccattccataaccatattggttttcactagcaaatatcgcagcatcaacattgaccttgattgtattagtttctggtttagtccatagctcagctccatcatcagaactaccaaagtagatatgagaaagagaggtgttatcctgagctttacgccagtgatcaagagcaatgcgggctgaagatagaacatttgcaacagtaagaaccttatctttccacacaattgagtttcttgctttccataaggaccacgtcaccatagccaacgaacagacccga

SEQ ID NO: 150 - DNA, 3262 bp, Cannabis sativa
aatagagacattgaattttgaagaattggaggaaaaaagtctccctccatctctcctttcctttccctctctctttccaaacaaggaattttatcattttatctctcccttgacccttctccctccaaccctctcgtctctaacagtgtaagacttgagaggtaaaggatggataagaagaaaaacaaatgaagaaataatggttacctggttttaaaatatttcaagacaaggtatgatgatgatgatgttccatttaacatgaaccgaaaatatatacatcaccattaaatcaaacagacaatcttttgggaaattatattcaggttttaaaagaccaaccatgtcaattttttttttttttgaaaatgaaccatgtcaatttttaagtgttgtattagcctacaaatttctgtagaacaacatgctcaggcagaagtctttatagaagaaattgtatggggctaaaccaactcaagaaacaaagcttcttgtttgtttgtcaggcctacttcactcaaagttagtgagctgttatctacattgaaagcacgccttgggtatgaccttacctattcgtcgaaaaaggagaagaaaataaatagattatccatataatgcatgagtttgtcatagcacatgagaactggtgaaagttcagcttaatatgacagctgctgataagagaagaaaacttaccactctgtatgttccaggcttcatttccccatcaatgtctatgaagtcaaatagaagctaaaaataatacaaatttccagttagttgggcgataagagaatgaaattaaacctaaaacatatttctgacatttacctgaagcttgttggacttgagaaaacgtcgaccgaggcgacttccatttggcattcgaacaagaagagtcactgcattctcatcttctaatgctggttcagacggaagagaagctttcttactcttagtagctaaatttctctcatgttcctgtaacataagacacgaataaatatatatttttttagcattttattgagaaataataaaatagaatagattgggttgggttgggttgcaaattcaacatcacagaatagaacatacacttcataagaatatctcaacctaaaatcacaccgaactttgagggagcagtaacaatcaatgttcaacatagtaattttatgagacaactttcagatgtcaagttatattggaaaacaattctgatcagtacattaaagcatattagtaaaatcaaataccatgtaaagtacttataggacattcttcattttgtttcagtacatgacatttctaaggtaaggtattttctatgtcacttgttgttcaccgctgtagtactaatgtggggattcaacaccacttaatcaaggtgaatgcaaaatattcagcaattttgaccaaatgcacacaaaatcttgagttaagatatctcctcccatgtgtcatttatactcaggatttcagtaccattcacgctcttttgctcatatgttatttcaactaaacaatcaactatgaacaaaccttataacacctgtgaaccaaaatactataggagaaatataaaggaacctcattatcgaaattgcaaatcaattgatcagaaacttgggcaaaaattctagtgttgagcaataattggtttaacctcttaaaacacataaaacgtgagggaaacataactacttcaaaaaaaatacatattaatcaggtgcacaaacgatttctcatcaaacactggaataaattttgaacaaaaaccaaaagataccacttcactgtgaattttcttatgggattcttcttctttctctttgtcaagtaacaatgatgcatgatattccatgtcctgccatgccaaagaaatatttaattcattcccaacggtcaatagtattgcaatacaaataaaaaaaaagagcaggcagctaaaacctgttgctctttaagtaatcggcttgctgagagagaaggtgatatagggctgtgtacaggaagattgggaatcacatttctttctggatgactttgcacttgaggtgcatccaatgactgttttgaagccccttcagaaattccaccataaatcgcactctcaagcattagtgcttcatcaatctctttggaagaaatgtcgccccacttcatttccagaaaacagtcgatcaatttcttttttatgtgtatcatttcaaaatgttgtcagcaaacaatattacctctgcaaagtgaaaagcaccatcactgtgcggaggaagattactagcactgctgttagattttctcctaattagttgctcttcttctgcattcttagctaaattttggtttgatgagcttcctacctgtaagacaaataccttttcattataacaaacatatctttatctttatgggggaaatcaggagcttttattttgttacagtgcagaagctccttcccctctagaaaataggatttgaattgaacataacttaacctacatgaccaaccacccagcccccaaccctactctcctcctttttcaaaaacctaatttatgtgtagaagtatgcctgtattttaaaacaatgagtttcttgtacaaatcagagtagaaatgccaaatttgtgttaatgcatcagaccatttttcttgtaaacatgtatgtctaagcagcaataaaataagattttttttttcctttttcaaatgcaccataagcaagagtatcacaccttccatctatgagttccaagctcttgatcgtaatctttcatttgcccctcacgcactgcttgctcttgctcagctgtctaaattcctaattttagaagaaaacaagaacaaaaataatataatctaaactactgaatataagaactacaaacctccaaagacaatgagagggctcgagcaatgtcctcatccgcagaggaatttttcttacaaaattgaataaaaaaaaacattgtttcagcacaagaacaagaaaaataaagttaggacagggaagatagtatagaatgggagtataatttctaatccagatactcacttcaaattcttgctttgatgcctgaattgcagcttcaagcatttcatcctccacatggttgtccacttgtgaggtgttatattctgttggcatatgatcattgccaaggttaggactgagtcctgaatgctgaatctgatcatgcctactatagaagtccccaggaatactagtgaaaggcactggcactggcactggc

SEQ ID NO: 151 - DNA, 541 bp, Cannabis sativa
ttgggtttatgctcctccgaaccgcggggatagggcagatttttgggaaaatctttctatagaggtggcttctgtggttgagccttggattatgatgggagatttgaatttgatcctggatcaaaacaaaaagtttgggggtaacctcctctcagggtctgaaagccacatttttagagattttatggatgtgtcgggaggcatcgatcttggtagtgtgggaggcttttatacttggtcaaatgggcgtgattttggtagtatgattcgagagcgactggatagagtggttggggattcctcgtggattatggcgtatcccaaggctggggtcaaaaccttgacaattaaggactcggatcatgccccgattgtcttagaccttctgatggatagagagcgctatgcaatgccgtttcgcttcttggatgcttggactcgggatcctgggtgtagagagattattcgacagacgtgggaaattgaagttaggggttttaagagttaccaacttgtggctcgccttgcgggatctaggagg

SEQ ID NO: 152 - DNA, 4729 bp, Cannabis sativa
tctttaacaatgctctgactcgtacagaaggtaaacttatcaaagttaactactcgccttgatgctctaacatatagattacaactttataaaagtacaacaagcgtcttattggtattgataaaaaaaaagagattgtcatttgcaaagaaaagatgagaaatggttcgcccgaatctgtcgcatttaattcccttgatggatcctttgcatcatttctttttgatccaatgagataaaccttcatcacaaatcaagaaaatataagaagagagaggatcaccttgtcttaatcatctagggaaggagacaaatgttgccttaatccaaatatgattttatactagtaactttttatataaaacattttttttgttgcttaaagggtttttaggtcaaacttgtataattttgtaagattctgttataaagtaatattttcacaaagttccaatgagcgctttgtttggtgttggagttggacgcaccactccaggcccacccaacggcatatcgaatagattagagaagaataggaagtgggcgccaatcaatggttttcagcattttccgtaaaagctttagccgaaacgcaccatccatgttttcttctccctctctcacttgaaacaggccatcttcctccgttgtctccgtcaccgtccgccgccgcagccgctcactgtctagttatcaccccacgaatttgacatggcgaatgcagctttctgtattagccaagtctttcacttctccagtttcccaagaaactcactccaaagaaatggtctacggagcttcactcttcttctaccattctcctcttccacttcctcttctaagcttgaccaaaagaaatggaggcagcctattgtttcatcgctggagcttggaggtgtcaagattgcccgacagggtaatcttatctcattttctttcttttattttctcttatcaatttttctattggctaaacgatacatctcaagtaaaaacagttaagtcccgcgtaactcaaatgaacaatagtcttttttttttcgaacattttgaattaataaggaattagactataactctctaattagtatttttgtggaacttttaaggttgttaaaaatccactcaactattgagattgtttgaggggcatgatttggttgatatcagggaagcatcatttggaacttaaccaatcatagaatttgtaaatttgaatgaaattggataaaaattcttaaatctaacaattttaatagttctggaagaatttagtttagggagcagtttatgtctaattttagagagtaaaaatcttaattagcctaaataatacctaccaactgtttggtgaaatgtgtcttagagaattctccgttgttgatgatgacaattttgcatttattttttgagaatggcattttaatgtcttagtaccatatgctacattggatactaactagttatgttcattaggacaaaagtacataaaagagagggatagagaaaaaatcataaccctcatcccaaaaaccaagaaaacaatttatctgaaaggaaaatgagagcatatcaacaactaaatttgcttttgtctttctgcattacgccaggttaactttatctatacttgaggctttttgtctttctatataaatatatgtatgtatatatgtatttttcatttatgtgtaattagttgattatctgtatttggaatcgtagatgttgtgagggatgatcctacaaataatgttccggatacaattttctccaagcttggaatgcaactccacagaagagataaacatcctattgggattctgaagaatgcgatttatgattactttgacactaattactccaacaagttcgataagtttgatgacttatgtccattggttactgtaaaacaggtacactcaagaatgagtgcacagttagttagaggtcaatcctttcatgggtactccaattagcggtttcgcctctgtctgcagatatgtgtacatatttatattggcaatatgctgatgcaacatatacaatttacagttattttgtttctctgacatttattaatattctagtctttttgtctactttaatttttgctagaagactccatttgacctggctgttgtttgtttgtattcaatctttttcattaatattatttgaggataagttgtgttaagtatttcccagcattgatttttttatgtatttaatttatgtatttttattactttattatgaaactattcaggttgttgtggttggtttggacatgagagaatgtttttaggcatttctagtatggaatttactttggaaagctcaagtatagatttgtatttgtaattaagtattttattttatacaaactgtgtaacaaaattctactccttgcagaactttgatgatgtacttgttcctgccgatcatgtgagccgaagttataatgacacatattatgttgactcacaaactgttttgaggtgccatacaagtgctcatcaggcggagttgctaagaaatggacacacacattttcttgtaactggagatgtttatcgtagggactccattgactcaactcattaccccgtttttcatcaggtttttaactaatcaccgatcagggtttggtgctgtctagcttctactttatatgtgggtgtatgtggtttattaaatgaagcatgaggaacaggttatatgcaaagtttggctttagcccttgtgtgacatgatcgcggttcttgtgtggtattaaataaaatgtgattgagaaaacaaattgtttaaattactgtccttagtctcataatagacgagtatcatgattatttaatgtcaggaaactaagataatattaaccatttatgagaacttgaaatgcgtgtagttgatgcaacagatgccaggggaaaattttcacctgcatgaacttataggtcactgtataaattcttgttagaaatgtgctatgctagaagattgttggttggttggaaataataaacttttttaatatggggtaagatcactgtttagggtaggctgaaacctaaggtactttcttgggtttatgttttatagtaagttaaatatttttttctttcttccttgatttaagtaattctctctcggtcacttcttttcttttcttggacaatttctggccccctgatttgctgttatgtttgtactccttttgaatatataaatctaaatgtacctatattttcgttttgtttttcatttcttattgaaaaataaataagcaaatacaaaagtgtagagaatgttttattcttggggaaaggaattgatgagcttcatcttcaagtatttttgagatgattttcatgttcaattgattatgcctccattgagaagatagaatcccttatttgtttgccattttcttcatcaaagagtggtataaaattaaatgttaaaaattgcatgaaatatgaaaagttcaccatcaaaattctcattataaggaaaggaactttgcacataagatatcttgtcctgaaaaatgtgtatattttactattaaaaagaaaagacgctatcaatatacttcactacacagtactaagctctttctggctttgtattacattgactgcgatctaccccatcaattttcttattttgtttgatagaattcattattaccagatggaaggtgttcgagtgttttccccaaatgattgggatacatctgggactgatgccacatcttacgctgctaaagacttaaaggagtgtcttgagggtttggcacgtcacttatttggtacatttttctttggaaattacacatatagtatctgttatttatagtcttatcaccattgattttctttaattatcattaaccatgttgagaatgctcttttgtgaaccccgatattgttaaattttcaggtgctgttgaaatgcggtggattgacacatattttccattcacgagtccatcatttgagcttgagatctttttccaggtatgctactaactcctatattttctacaaagtgatagtatagcacacttcagtaattctttctttgaccttttcctctttgcttcgtcgtagcaatttttattgcaggtcagtctacttttttcatattgctcctgattttttatgcatcgacttttcatttctggttcaaatgagataaaattattcaacaccatgtaattcttttataattctatgtatttagcaaaaatgtttgcaagtgtgcaatcaaataagaatcacattgtatgaatcgtgcaacttttgaaaatgaggacaaccataatattggtggtactggccataaggtaacattttttatgaattatgtatatataacttttttaaaaaaatttaatgactgcattacctggaacaatatactattcattttgtataattatgtgatcaaaaaacaaaactgtaaaaaccaaacaaagtgctgtgaaaatatatgcatgtgtttgtatattagataaaatctctaatattcaagtattcgctatctcacatataacaatttacaagaataatgcccaaggaaaaagtaattatttggcaattgtttgtttatgtcacacacctcttcttgaagctggattatgagccttttggcctcacttaattaagacatttaatgctgttggttgttcttgaggtcattgtacttattttaagcaaat

SEQ ID NO: 153 - DNA, 3874 bp, Cannabis sativa
tgggcttgggggtaattctggcgaagggggtggcattggatttggtggaggaatggggaaagggattggtggtgggggaggttttggtggcggcggtggcttcggtggaggtgttggtggcggttttggaggtggtggaggcggcggaggcggcggaggctttgttggtggcaagaactagtgcagctgaagctaacattagtatcagtactagaaagtttttttgttttttatgtggtctactaatacaaaagctgaaatgaagtatctaatattgttggcttagtagtagtaatctcagctttgttatcttcttctgttttaacgttagtgttatgatgctatgctaatgtgttattaacaaaaatgaactctacatataatatgtcataacagcaatttgaatcaaaaaattatgcaaaaaccgtttgtgcgctgtttattaacgagcgactctgtttttctctgcttttcattcatagacgggctgtacgcatacaatgttgtttgattgatccatacaaatatatataccattttctaacctgtagctgtaagcctgtaaatgagtgtgtttgtgaattgtgagtaagtatacatatgtgcacagattctctttccatattgtctcagtcgttttttaggtactctgctgaaactcatgtcattaagcagaattccattcttacgtacttgtttgtgagagagggtagtattaattacgatccacttcacatctcgattatggtaatgcttcccatgatgatgatatgtcactcacagcttcttctactgtcaaatatagtcccttggatccaaatgaatccattatctttgaacagtggagcttctccattacacttgccgcagggttcaccaaaaccatctacaaagtccaaatcaaagctacatttaatatatatacttaaataagcaaactactcgtattcaagtgtcaatctcaatcttacctggagagattttttggctagagtcattttaagttctgatacaagttcaagaccattggtatctatatctgttacagctgaaaaatgtacaagcaaaaatgaattaatggtaagattcggttgtataactaacaggttaataacaaaaatataattacattaccagtcatatcaatgattaaacatttcaaaggtaactcattgtctcttagaatcctttcttcttcatctcgaatccatcttaatatcctagaagaaataaaacgagtcaaatgtcaaatacaatttcaaaatttaccatatacgcgaaaagaaaaactttgtagtttgtagacagcaaattctatatgatgaataatcacaagtgtaagagagtatattactatagttggaaaagttggaaggaagggaagagattactattactaagtactaacctctcttggaggtaagttgagttaagaaagtagatgggagattcaattcccaaaatgaggaaggaaggaactcttttggtatctgtgtaacgataaagactgttgtagatatgagttcctggtatgtttcccaaaaccatagtgtttggccttgccaagtgtaaaattactttgaacactgaagctccaatctacaaatcccaagacagaacagttagatatcaacgaaagtaatgaaaattttcgtttgataactactatattttaaagagagtaagacaatgtagtattattacagcaacaagaaggccagtctgtacagagacgaatagaacaccaaaaaatgaacaagaacaagccaagaaatcaagcttgtcaagcctccaaagattgaccatagccttaacatcgatcagtccaacaacagccgttatgataattgcagctaatgtcacatctggtgtgtgaataaacagttgcatgagaaatagcatagtcacaagcacaactattcctgtcatggtatttgagagttgtgttcttcctcctacatcgtaatttaccgcagaccgcgagaatgaacctaatataattgtcaagatttttgagttaaaaagacccacattgataatgtgtggtaatttaatatcatatataatatgcatgatacatgatctatacacactcccaattgattttgagacagaacctaatagttattaccatacatctcatcctattttactttttcaaccatacttccacattctaacatcaaatttgataatggatatgattaaaaaactttgagtacatatcttcacatttatatatatatatatatagaattatattgtattatcacctgttgttacaaagcatgaacagcaagcaccagctatattcataagcccaagtgccaacatttctctattcccatcaatttgatagttttgcaatgaagcaaatgttcttccaactgcaattccttcctattgattgaatccaatccaaacagccaacaaaatagaaagtttaaagtttataccactaagatcaaaaataatatttgtgaaaatctcaatatataattaatgaatcttggccatttaatctcatcaaattaacataccaaacaacagaccctcatttggaaccagtactcccaaatgattgaacatattatctaatattatgtattaatatataaaaacattataattataggaataaaagagtggaacgtactgcaagagataatatgccggctaaaatgcctatttcgatagcacgacccatgtatggatcaattttgaagtacaataagtttgctgaaggagggttgataccatttggaagcttaccaatctgcttatgacaataattaaccaataaactaaatggggttaaaattttatcactatttatagtatatttaatacaagtatacaagtatctgcataaatataattaagtgtatatttaagatcttgttgagttagttcagtcattttatcagtaacgtggtgagcaaggttaaatattaattggaggagtataacatattcttacttgccttaggaacatgtttgaatttcgtttggaggataaatgccacgagagttgaaaaaacaacagaagccaatggtgcagctgctgaaacccagaagaactttggccattttgagctctggtatttataaatatataagatattcaaatgtataataaagtatttacacttgctctgagcaataatatgaatataaatagtaactacaccattacttacaattcgttttgctcctagtagaaatgtcaggaaacagaaacccattatgatgatttggccagaccactgaaaaatcataaacatttttattattaggcccaaaaaaagaaaataattaggaaacaattaatattattaagtaataaagaaattgaagcacctcatttctatatttgaagagagtggagattacaggaagtagttgcatctcattagtggagcgagttaacccaagcaatccttgaagctgctggagtgacacaaggatggctactccagccataaatccaatcagtgttgcctttgatagaaaatcaagaatgaagcctaacctaaaacagtcatcacctcaacacaataaataactctcttatatattcattttttttaataatatttatttcagttcaaaatatatatatatatatataaaaaaaaaaatacatttatcttattttaccaaaatacaatttctaaatataatattattacctaaaaaggccgaaagaagcttgaaacaagccagcaaaaaaggtagctgtgaatgcaagtctgagatggagatgtggttcactaaccatttggcttatcattgtccccatcaccaatgttgccgtcgacgttggacctaccgctaaatgtcttgaactccctagaatcgaatatatcaccgg

SEQ ID NO: 154 - DNA, 1038 bp, Cannabis sativa
ccgaaaataatgcactttaaataatggttaaaaaacataatcctaattgaaaaaaaaaaaagaaaaaaccgttttagtaagattactgtagaactaaatgagtggtacaaataaaatttgaataacaaattaagaaggaaatacatgagatattcatctatttacttagtaaaagaataaaattgtgcagctatacaaacaaaatttgactcaaaagaagaacattaatcaaattaataaacctcacatttaggagaattattattagcaatccaaactccattattatctgcagaacccacaaatcgaacatccaaatgctcacaaaacaccttcatataggcatgcctagtccaccaagaactcgacttgaacgtcgcaaacacagccaatctcacgttcaaactcaacaacccatgctctctttcccgccgcatctcatccaccacccaccctccaatcaaatcctccttattctccttgctcaccactctcaacctcattgtgccacgtgtctccgtctccaagaatatcgggtcaacctccgaagacgacaacgacctctccctgaagaaaacgtaacccttgatttcatggaagttaattttcagctttttgtttgggttctctaccgtcaagttggcctgtattgtggccgagaaattagtcttcgataagttgaggtcgttcacctcaagtctgtccacgtggaaggtggggatttgaggacgtaggatgatccatgttatgatggtggagacgcaaatcaggagaattataagtattaatgtgacgaaaaagcccttgatgaaagaggaggagccgccgctgttggtgttggcggcgtaagggtatgtttggttggtgtaataatggggtggcggaggttgagtgtagggattatatggatggtggtggtagccattattgttggaataggattgggggtaccccatcaccggagggtacccgggtacaaccgaagccggtggttgatgttgatcggacggtggtggtggtggtgggtttggctcggct

SEQ ID NO: 155 - DNA, 4336 bp, Cannabis sativa
tccacacctcaatcggcatccccactgttgataggatgttatctgatgggtcgttcttctcaggcaacgacggtatcaagtaaaagctttctgaagccatttatgctctccatctaacccctctttctcttgtgtatgctccagtacgggtgaggacgaatcagtaagcttttcctcaccaggctgtaataaatcatcttcaccattaaactcggttctttttacaaagaacattgttggttgagtattgtgattcaactcgtccacacccaccatttcttatggagaaaaaagatgatcaaaatgtcgatcgatgccattctgcaacttgtctctctcaggtacccgatgaacatgcaaatagtcttctatgtgactgactaattgatgccatgatggagaataacacaagatcgagtgctcttggaacaattattaaatgaaaattctactaatagtagcagaaaatagggagagctttgtattattagttgatattacaacaaatgagagttacatagcaagatcccttgacatttgagaggcctaggctctccatgatgcaattaataaattacagcaaaagagaggtagttcctagaacaatattaaatgcaaatgctactaatagtaacaacaaatagagaaagcattgtattttaatgatgttacaacaaaaaagaattatagagcaagtccctacacattcgagaggcctatactctccgtgatgcaattaaattgttgtgatatttctctttttactactttacccaatactgtcattactaatactgttactcttccaaatagttctaccattagagttcttaaatctggtgacattactttttcaactgaattaactatctacaatgtcttatatgttcctgatttccaattcaatctttttagtgttccaagctatcttcttaccaccactaacaccattgtgttcactcataattcttgcatacttcagggtacacagaacaagaagattgggacagctaaacgcattggcaacttatattttctacttcaatctgccaatactcctaatcatagtaattcatcctattactctaataaatcatgtaacagtgtccactcatgacactctagacttggacatccttccttgtccacataaaagattatcaataaacaactacattttgagcatattgttttttcccatgttttatttgtcatttagctaaacaaaggagattcccatttaattctcaaaatcatattgtagaatcttgctttgatttaatccatcttgacatatggggtccctttcatgatcatagtattgagggttatagatattttttaaccattatggatgatcacagcagacatacttgggtttacatgttacaatccaaatttgatgtgcaacatttaattccagaattctataaccatgtctccacacaattctctaaaaatataaaagttgtaagatgtgataatgcaaaggacctcaatatcatatctttttatgttcaaaaaagtattcaagtgtataactcatgtgttaaaagacctcaatagaactcaattgttgagagaaaatattaacgcatgttaaatgtggctcgcgccttggtttttcaatcttccatagccttggtttattggccacatcttataaacactgcagtctacttgatcaatcaaacacctactcccttattacagcttttaacaccatttcaattgttgtacaataaaccttcagcagtgaccattaaagaaattttaattgtcttgcatatgctttattactagccactacaagacacaaatgctctcctcgaggacatgcctgcatattcattagttatcccaatggcatgaaagcttacacacttctcgatctttccacaaataaaatatttcactctccagatgttgtgttttatgagcagatttttccacttaaggggtctttaaatttccaacaattggatgctttacttcctgcctcaatgtcacctgctcaaaccaccaaactctcggccatttctcattctccaacacaccctgtcactacttctaaaccaatacaactacttctaaaccaatacataaccctgctggccttattcataaactagtgatgtctcctactgcacctacaccagcaaaggcccttgctgaccctaaaccagcacaggcccctgctgcaataataccccctaaggtcattcagcatcctcaaattaccaaagcaggtcgacaaacatccacacatagtcaccttaaagactacatttgtcagtcttctactgctcaccccttggttaaatatctcaagtatgaaaggttgagtgtttctcttagaaatgctatattacatgcctacactgaattcgaaccaactacattcaaacaggcatcaaaattcactcaatggttaaaagccatggacatagaactctttgcccttaagaaaaataaaacctgctcagtagtctccataccacctggctgtcaaccaattggtaataagtgggtatataaaatcaaatacaatgaacattaaggtgaagttgatagatacaaggaatgcctagttgctaaagggtattcacaacaacatggcattgattgtgttgaaacctttgcccgtgttggctgttgcaaaattcaatactcttaaacttttcttagctttggttgctatcaacaactggacacttcaccaaatggacatagatattgtttttttacatgggaccttaatgaaaaggtatacgtgacgtgacacttcccaaaggatatgtacatgagggggagctacccccaaccctgtatgcctattacacaaaagtctttatggccttaagcaacctctcgacagcattattatacgcatatatgtttatatacactaaagactagtagttggaaagtaaaacgaatttgttgttactgcataactagataaaggtcaggtggcataaaagaatgacatcaattggccaagggatatagttttacttttcatttttatgtctacatatatttatctcgctatctagaaaataaagatgagaaaacaaagtagaatattaccagtgtcccaactttctgttattgtagccaattccattaatgtcattaaattggtggtagtcttcaaactcgaattcagtgagcttgttgagcctaccaagatctagaggaatgctaccttcaaatctattgtcagaaagaaacctagaatacgaaacaaaattgctccagtgacctataaattacagaacaaagtaaagatcaaagatacagtagataactcacaaatatttcagtgactgtatcatgcctatttcaacaggaattgttccattgaagttgttatccctcaaatcaaacagctctaattccctgagctccccaatttccttagggattgatccagaaaagtgattcttgctaagcacccttaaatgaaaacacaagaataaaataatttcattaatatttaaaatatattagcacctctaaaggtggcacaagaaacctaattagatattcatcaactaatagaatcaactccagaaaatcaaaaggttgtaccttacatagatggagagacccaactaaattgaaaaagaaaatctaatagacccactctacaattaaggaacaataatgcagaaatggttttaactcaaaatattttatatcatacaaaatatttattttatatttttgttatacatattttatttttttagtacatttagtatttaaaagcacttttgtttattacatcaatgtgtacttctactaccttttatttattgccacaattcacatataattcttttgagggtttttttttgtttatttgttttactaaacggcaccgaaataaaaaaatttacgaattaatcattaattaaaatttcatagctattaaatacaaaataacattaaaaacatttttcaaatataatatacataaagtggatacagcttagaattaaaaataattattaattttaaaatacgggatcaagacatgcacactatacactaataatgtatataaatcccattaaaaatataatgtattagttactttgttaaaagatgtatagtaaaataattcaaatttatgatagagtgatagagtatactgttatttgaaaaataaaaataaaaagtttttctgaaaaataataagtgaagtcaagtgcaacacgggatagtccaaactaaaagatattgcataaataacattaaaattagaagttataatgaaaggaccaaaacattattaattatttgatgaaaaaaatatatatccaga

SEQ ID NO: 156 - DNA, 7123 bp, Cannabis sativa
tctactgttagtgagcaccaaatcctcctcaacaaggtattttctcttcatcaacgtgctcaatcagaaatttatgatcgttttgccaaatttaagagaagatcatcaactgtcagtaacaaatgcacatttgtagatttaggaatttcactgttctaatcgattttctaagcggaatctgcgaaattaatcagcgattttcgtcttttatttctcattctcgatattgagtcgatcttttatcagcagttctttgatttggatcttatcattgaaagaattaatgaaccttttcatgtaattcggctgtgaaattttttcttcattttccttttgtagaaataagagagtcgaaattccaagtaaatgggaagtaatatcgaattttaaacatgcatgtgataattgtaaggagctttacagaataaatatagtttacttcgttaatttattgttctgtttaaaattctgagttaagaagcagttttttgatgaaagtaaagaactaggtatcaattctcttcgcttttcggaataatatttgtcgagtgcagttcttcgcttcattgaacattatctgctttgattttacatatattaaactttgttcctaatttttttcctatcatcaattcagtgatcgaagaaaagagtgtgattatggatccatattcaatgaagtctgtgtttgatttaccacttccattccaatcgacttttagtttcaggtaatgttcgtgatcttacacattagacaaagaggaattgttcagttttgatataggttagaattccaaaagatgtatttttcatgttagaaactatgtggtgcatgcagatatttcaactctttgcagaatgaatgcttccctgtctgtttccactccgatataaacatggttgtttcggcaccaactggaagtggtaaaacagtactcttcgagctctgcatcttgagggttctctctcggtttatctctgaggggacgaagtttgttcatgtaaagggaactcttaagactgtaagtctgataggaaatgatgccaattacaaggggctagacatctttgtagcaatccagaaatgtttttctgtttgaaaagtgttattaccctgatccaggcaggcactgatgcctaattaaatccgatggaagctctcctttgaaaagaggataaaagattcatgttctttgacatggtgtataatttgtgttaaggttgcgtcaaattctaccttactacttattgcttctaccttctttactttcatatgcagatctacatagccccatctaaggctttagttcaagagaaacttcgtcattggactcaaaagtttggatcatggggtataaattgtctagagttgacaggagataatgaatcttacagcataaagaatatacaagaagcagacatcatcctaaccactcctgaagtgagggcgaattttcttctaacagccatttcgaaaaagttttcatatattgttttgatttagatgatactcttgggggctggctaaatggttattttaccctttgtaattagaaatttgatgcggtaactcggcatggcataaaagatggtggattgagcttttttggtgatatatcacttctacttattgatgaagttcatctgctaaatgatccacgtggagcagctttggaggcaatcgtcagtagaatgaaaatgcttgcacggaatcctctgttgaagtcgagttccttgtctcatgttcgttttgtagcagtgtctgccacaattccaaatattgaggaccttggtaagattgaatttatgataattcttgtgaggcaacaaagcattcaagaatttacactcacagtttgcataaataattgcagccgaatggcttgaggttcccatccaaggagttaaaaggtacttttaaaatgttatgggatatatatatacacaaatacaatacacatacaatcatacgtgtggatgtatgcatataaatataaatttatctcctctgtggatgtatgctagtgtccttttattctgttttgcttttcggcatgtcttcacaggtttggagaagaaatgaggcccgtgaagttgactactaaagtgttaggtatgcacgccatccattgttcttaatatttagaagttagtagcccctgatgcattttaagaggatccagtactgatgcattgtatcccatatcgcattgttattagtaaacgtgctagagtactgaatcgattaaacttgtcattgtcattgatctatatcccaataactcttcctgcaggatatacccctgccaaaaatgattttctatttgagaaagtaagtgtttatgttcaggacaatccaaaaagaaaaaaaaacctggataatacacaaaatgaactactattgctctgatatcgactatgtatgaaacttccatgcagttattattaagttaaatgactactaaccctttgcttttgttccattgttcagcgccttcaaaattatatatggggtacgtagagtagagcacattcaactaattgaaaatttcgaccaaaaaaaaaaagaaagaaagaaattttgaagattatattttcaaatgaaatgtatgcctatgttttttcctttctttcttgtgagttatgtgtgttattactaatataccatgaacaaatttgcttaaaactgatttacagatattctcatgaattattcaaaagggaaatctgctttaatattttgttcaactagaaaaggcgcacaagaagccgcacagcgactgactcagtcagcaatgacctctggttattcaaacccatttgtcaaggacagagaacagcaggaaaggttgagggaagcttcactgtcatgcagtgacaaacaaatgcagtcctatattgtgtacggtggtaagcgttggattattaaaattcgtcttacttctaggcttttagttgttccttgagtcgtcactaactaccataacaaaatttctccaatgtttgcagttggttatcacaatggtggactttgccacaaggatcgtattctggttgaaaatctttttctcaagggtgacattcaagtactctgcacaacaaatactcttgctcatggagttaatttaccagcacacacagttgtgataaaatcaacacagcatttgtatgtcatttctcctatcattgtatcaagatttggaaaagccttttcttcttcagtaatttaacagaataactgtaacccagcaacaaagaaaaaggcttatacatggaatacgatcgatccacagtactacaggtttgtcagctgtgctatctttctactatatttatattgttttattatattaagggcctttttatcgaaccataatggtaatctaattacatttattgctagattctagttttttttttcagttggcagtctacttgattgaatggtattgatgagagtaaatgaggaactactgcattcagactttctatttattacctattactgggattatattttttttaacagttacatctttaatcatgtatcgaatgagatcaatatgatggcgaatttacagcttctaggatatttagtagtcagtacacacacggtagcctctttgtttatttatacagtgttaagggaattcagttactaagtctgttattttctgttaagttggttatcaactgtttttagctttcggttgttagtctttttttcagttgtaacagattcttgtttaagctttactcatctttgatgagtatatattgtactgatctttcccagtaatcaactatctttgactctcctttttcaatctttctctgcatcttttctctctgttttctctttgttctttgttctttgtttactgttatgctcttcatctgaggtgtaatggctaggagattcaactctcctaacatacagttatctgtaatgtttctgcaaagagagattcttgttaaatcaacaatttagatggaaaagagcgtaacaaaatatagtggatgacatattgctactactacatctagcccattaaacaatcagaaagaaggaaaaacaattgtacttcatacaacagtcttatcctatatgaaaattctattcaggatttagttttggcatcatgcagatgtgtggaagggcaggccggccaccctttgatgatacaggaatggttgtaataatgacaagaagagacacggtattttataatcttctatcatcattcgttgtgcatgtaattacgtgacaatactcttaacccttttgcttgttttagctgttggactgttggttaaagatggtaccagtgctgattttttctcttgaacttttccacaatcttaggttcacttgtacgagaatctcttgaacggatgtgaaatggtggaatcacagtatgtaacataataattatctttaactttcacaatgcaatggagcttgggactaatttggttatgaattgtttgcttacgttagattgctttcgtgtgtaacggagcacctaactgcggagatagttcaactgactgtcactgacattacaagggcaattgaatggatgaaatgttcatacttgtatgtgaggatgaaaaaggcacgtagttttgggtacccatttttggatatcgtttgtattttcgttctcatctagttagctctgaactattgatgcataatcagaaccctggtaattatgctgtcaaacaagggatttcaagagaccgtgtagaaaagcacgtgcaaggtactgttataattcacagatggaagtaagaaagagtacccatttacgttttctttcaataacaatgttatgcttgtcagatatttgtgttcagaaagtaagcgagttatcaaaatatcaattgatatggactgatggagatggtttcctcttgaaaccactaggtatgtcaatgacagcaattaacagttttatgaggtcattggtaataaatgtcattatcactttctaataattttccattttctgtctttagagcctggaaggctgatgacaaggtactacttgaaattcgatacaatgaaacttttaatgcagatcccagtaaactgcactctggaagacgctcttcatgttatctgccgagctgaggaaatttcatgtaatctgctcaaagtgcatatgttgtatttctttccgttatttgaattgccagtctgaaaagtgtggtatctatccactgaaaaattaagggatacagctcagacgcaacgagaaaaagcttctgaatgacattaacactgataaagagggccgacttcgctttcatgtcctcattgataatggaaaacgaaaaaagcgtattcagacgagagaggagaagatatttgttcttgttaatgactgcttgactggtgatcctttgattcacgatttatccctaacgcaggtttttatttctatgataattttagtctaattgttgtgttgcatataataatggtcagagcttagcttcactgatgaatccatttgttgctgtgctgtaggatgtcaattcaatatgcttaaatggatgtagaatcgcgaagtgcatgaaagaatatttcatttacaaaaagaactacaaaggagcattgaattcagcccttattgcaaagtcattgcatcagaaactctgggatgatagtccttatcttctgaaacaattacctgggattgggatggtgacagccaaagtaagatccatgacttcttgatttctatcagaatatcatgcttctttatcggctcacggacccatctctcttaataggcactacattcgatggaaattaaatcatttgatgcacttgctggagctgacccccggaggatagagattgtcaccggtcgaaagtttccatttggaaaccatatcaaggactctttactatcactacctccgaaagttgacatgaaggttgaggaaaccgagtgccagattcgagggaagtcgaagctggtgataacactgacaaggatatcagaacctttccagtcggtgaaacgacattatgctgatatggtatgtttttgtatagtttagcttcagtatcttttccagaattgttgatgtgatgtctatcaagtgttatttagcctaaaaatgaagatccgttatgcagattgttggttctgaagaagataacgtaattgtcttgcatgagaaaataaggtgactattattatattcattcttgcatttttttgagatattcatgcaagcagagtatcaaggggttttttccctagggggtgctgggaaagtagatgatagcaagcgttttaactaataactatgcctgattcttcctgtggttttctttttgttcatcgatcataattatataattatgctaactccatctgaattattgctgcagagtggaagagttttccaggtgagcaaattatgaaatctcaactcttttgctgccatataaacttgttaacttattaatcataatcatgattcctataacacgagtcttagagttctagaccatgacaagaaagagaaaagccctgacatgaaaattttctctacagaagaaatttctttgactattactactctcattgagatggctgttttcattgcagtccctatagcgcggtaattctcctgccaaacccacagcaaggaaagctcactgttaaggctgatcttatttttgaagaatacagtaaagctcttttcaattttatgtttagttttcgtgactataatataagacgcacatacaggcggatcctcaatcattcaatggtttcattcatgcagttggcattgatgttcaccataaacttgtattgacaaaagtgagcaatataaacttgaacaacaaaagggaaaaaataaagtcttcttttgctctagctcaggaagtatatgtgattgaagatgatgatgagcacgaaatgccatctcaagccccaacaaaaaatcttcccaagtcagccaaatctaaaataatagacgattctgtgtaagtatttctcaacaaacatatgttcaaaaatataattattttatcttctgattctttattatattaggcatatttgaactttcatttatatatatatat

SEQ ID NO: 157 - DNA, 1956 bp, Cannabis sativa
tgagtctctaaagctgaacatggtgctacaataactagtgaataatgcagagctagttctggagaagctgatgaaccatgttgaatagactcatgagatagaaaacatgttgcactagttgagatgaaattatgggagtcatatatatggtactgaatggtgagttctggtggtagccatagatgaatgagctgagagcttagcaacaagatcctgaatagatggtgacacaatgctaggttttctataaggaaattgatttggattaaaaatcacatctctagagaaatataacatccctgtagagtttagacacctgtaccatttatggtttaggctatagcctaagaagatgcaaggactagatctaaattgaagcttgtgtttgttataaggtcttatgttggaaaaatatcttcacccaaaggttttgaacaaggtatagtttggttttttgtgaaataagaccttgaaggatatttcttgttaatcactagagtggaaatcctattatggatgtaaacaactatcctaaaaataagcttcatcccaaaaatttaaaggtagggaggattcaccaagtacagtgagtccattttcaactgtttcctctcagccaggccattttgttcatgtgtggctaggaaagcatgcctatggacaactcctaggttgctaaggaacccccacaaaccttaagtttggtgcttagttagaattcatgttttgctttccacatttgaaaaactttaaaatcgttagatttttgttttaacatgtatatccaagtaaacctggaataaacatcaacaaagtggttacaacacttgtatccattgtaagacaaggtgtgggaaagaccctataaatctaaaacaataagttgtaaaggagttatatatttagtaagagaagctttggcaaaaggaaatttgtatatctttcccaaacaaaaatcagaacaaacaggtggaaagacagagttattactaatagaaatattatagtctttaagaacagtgtgtacaacttatttagaaggatgtcccagccaattgtgccaaatatcaaactcagagaggctttttttttgcaactatgacattgtactgtgctgatgtcctgactggaagaacctgaatgcatcatattagcacttattggaaatgtggaaagtttattattaaacatatttagagttgacagagagggttcctcagcatgaacttgcagatcagaggcatcaaaagcatacaaaccattcatgtgtgtccccttagtagagtagcatgagtagcctgatccttgacaagaaaaatatcaacatgcaattgaaaatagacttgattatctttaccaaactcagaaacacttattatttgttatattaggcacatgaagtaaattattctgaatgaaaggttgattagaaacactaaaagcaataagagaatgccatatatgcttaataggaaaacctgttccatcttccataaacatctaattagggacattgtatttagaactagaggcaatgttggaagcacctcgtgtgaagtggtttgtagcatcagaattggggtacaaattggtgtccatgcaaaagggtttgtcatcacattggcttgaacctatgaaaagttattgcgactaggaggaatagatttacttgtaatgttcttcttaaacctatacaagtagcttaatccagtgtgtccaaatttaacacacacgacattgaggcctagaattttgagtggtgaatctgccacctcgagcagagtttaaatgtaaatgactaagtgttaggattcttacctcaagcaccatagcctcgaaatctcctctactgctttaagattgaagtgctagaccttttgtaggaagaaaaaagagtaagcatgaaatttggtctatcatagtttaggatattagcttctagatctggttcttgat

SEQ ID NO: 158 - DNA, 1127 bp, Cannabis sativa
aaaaggtcgatattgaccttactaaaactatttagtttgtttgttggtgtagggcaatttcgtaaaaagactaaaatcctacaattattatcccacataattttatttttactttacataattttaattttatctctataaaatttatatttgttattattatcccacgtatttttatttttgtcttattataactcttttaataattgtttttttttgctaaaactaagaattatggtgggctctaccactgtgtatagatatcattatctacatccaaaaagatgagcgacttcatattgctcctaaaatgaaatgtatataaagatctcctaattaattatacatattcaattttttgcaaaataataataataataatttttcaccaaccacacacaaattcacatcccatggtaagagcatctctaataaataatgtaaaatttatattaaatttgactcaaaagttagaaatatttagttcaaatttttacaattgtagtctaatgcattaagttaacttataacatctccaacaaagtgctattaatatagtgggatatgcattttttaatcaatatttataaaattcaactccactagtaatatataatatagtttaaattggcacatactaaaaattaaactaaatttagtgtaaatatagcataagctataaatttacaatgcaataaaatcatatttttatttattatttggctgctcaataatattattgattaacttttacatttaactattaatatatttaataaattttaacttttaataaaaatttaaatttttgtaacttttttttttcattagaaatttcttaacttaacataaaaagagttaattatttgttttcaaaaaaggtataatttataatgtattacaattgatattttttttatatagaaagtattattaaaatttaattggctagtaacctatatgttttctcttacataaatttcatttttataggaactatcaatttcacctttatcattgtaatatcaaattcacattcaccattaaaactatcaaactctctcacaacatattatttttatcaggtatcatatcttctttcccaaaatcttttaatttggtgtatt

SEQ ID NO: 159 - DNA, 3829 bp, Cannabis sativa
gcggaagcgattggctgccattagagttctcatagctaaagagtttgcttcacttcctaaggatattgatccctatttccagaccttagactctgaaggttagttttcctgatatgatttgcatgtggtgtgttgttctagtcgtcgtcgattacaataaattatatgggaactgggtttactttgggacttgattttaattctgtcagaagaattagctacgtgggaaattgttgaaattttgttcgattattctcagcttagcttacaacacatggaaaacaaaggagatacggtgaaggtcacctttagttttaaacattatttgtaattcattttgaagttcgaggattgatgtttaaaccagtatgagctgctttcctcgttgagtttggggattttatattgtataatgaagtttctatgaatgaacacaaggaggtttactatttcggccactagggaagaaatctaccattcaatcttattatgatttgataattgtattaaatatgggtctattctacactgtcaggaataagttacttagaggccaaaaaaatatatgaaatccttctcaagtgcacccccgaaagccggaatatatttggtcggctatcaggcgctgctgtaagacagttatctcttccctctctttagcgcataaccatgtgttctcatgctactgtacaagtaatcgttttgttcttttggcagggggcatgggaagcaattgtgcgttcttttgaaaaggattacatttatcttggtgaggcagctcaaataatggtccaaaatgtgaattatgagatgtaaggatctacattttgcatctgctttgtgatgagatggatcaatcatggaagtttcctttgtgttcagtttgtattgattccactttttgttgtgaagcccatatcagaaaaaacatgtgcaaaagatacagcaccaattagcagaacttgagcgcaaggaggctgatatcaaaagaaatgcagctctatcagcatctaagtatgtagaggcttgtcaagagcttggtttgcaggttttcatggagaatccctaaactggtcgttttgctgagttggtttggttttcttttctcataagtgtttttacaattggaatgtttttattgttcaggggaaaaatgtgaggtgtgaacttctagagactgcgaaatcacttccaggaacatttagcagcattttggaagtgttaaacagtgattcagtgataaaggctatggaatactattctaactttgttagagatatccacacagaaaaggatgtaaggcacacattgttagttataaatctcatgattgctttatattatctcacaatttgttataggtaggtttcttttgttatctgcggatactgatgaaggatactttaaactaattcatgtgtttgggaatgtactttcagaaatctgtggctgtcttgttgaacttgaaggacgtacgtgaacatccaccatctctgaatgtctctgtagcctctgagattgctgactcaatgaacatcctatcaagctgtgatgaattaaataaagacactggtgttaatgtggataatattgattgggatatttctgttgatagttctcaaattgattgggatattggtattgtagaggaaactgatgatactggtaatggtttaggcccttatgaaatggtaaatgccagtgacattccgcaggtttctttgccaaatgaagcaatggaatccattcaagtcccattagatgaagatgttaatccagccccagagattactgtgtcagatatatcttgggatattagtgttgaaactcctcaagtggacgtaattgatgatgttagtttgccaaatgttgggtcagaaagtcacacatatgaaaatttaaatcaagcaactgaaaccaaggaagaaaggagtcagcttttggagacagagtacaggaataagattcttgatgatctgaatgaggtacatggttcttcattgtacttttatctgtatgctctttttatcctaatttactttctctctcgtactctggctaaaataatgatgatatgttctctgaagtgtttgtacagtagtacatttattcattcgccatttgatttttgttttctaatcttatcaggtcaaatcattcttacatcagcggttagttgaattaaagagtgaagaaaccttatctttacaacatcaagtacaggctgttgctccttttgtacttcaacagtatgcccctgacgccattgaaacaatgttatcagatgtttcatcagccatttctttgctcacaaacaggaaaacacgagatttgatcatgattctcaattccaaaaggtataagccggttttggtttttctttttaattttgtattttttcggtatgtttcaggaatgtatccttttccacctgcagttacgcatggtgatttggtaatcatgtattttaggaagctatgctttaattcttagatcttagtgagatataatacttttattgcttcttgacacatatggtgatgatcatcatttcagatttctagacagactagtgagtacactggaggagaagaagcatcatgaggtgaagttaaaagagggtttaaaagatatggctacaaaacgcatggagttgcaaaattcactatcttccacctggccgaaacaggtaatagtttgttgtaactatgttcttggcaaatgatgtatgtttaaagtttcttaaatgaagataaagctacttttgtgtaaatataaacgatgagataatttgattgactgccttagaaaatgggagtgtatctaaatattactggtggtgttgtgttaattgcaggaagcagctcttacaaaaactagggagctgaagaagctatgtgagaacacactttcgtcgatgtttgatggaagacctgttcatattattggggagataaatactctcttaactagtagccttggtgtgtagctataggaatggtaataacaatgaaatgaacaagtggcattttgtcacgttctatacccaacacttggtgtaatgctcaaatcggcttagtgaatatgggatactgtgttttgattaacgtatatagagatgttttgagactttgatcctttgattttattgtgaaatctaaaatttatcattactactgttggttgaatttataaagagttactatttaaactcaagacatagcaacttcaacttaatatttaaactctgttttcggcactaaattatttataatttttcaaaaattagtaaaatgtcttaacaaaaatttgctgttataattaggaaatttgaatttctatgtttcgtgtggtactaattcaaaaaaaaaaatctcaaacaatacatcacaattttatgcaaatcattaccattgttccaacaaataccccaactatgttttcctctgtttctctctaacttaatcccttcatcgtctcctatctattatttgaaattgattttaagaaacaaactaccaatgagtgaatttaatgcaccccacaaaatttaagttttcaaaatcaaaaagttatctccaaataagattccagccctaatatttgagttgtgacttgtgagtatatcattattcctgcaacgatgttcctccatagatacattgggagattcatcaccaaaagaaccatcttcgtttggtgctagaattcacaattggctcatcttttttcctactctccattcctaccttcaaggattccaatctcttcctgcaaagaaatcagatttttcagtatggcactaaacttttgaggttttaaaacaatt

SEQ ID NO: 160 - DNA, 8525 bp, Cannabis sativa
agcttttagatatcttaagtaagaaacagagtgacaataataaacaaatgagaaaagtaattgaaaagcattaataaatatgtacatatgaccaatcaaacatccttttatgcacttcccaaacctcgtcagcacctccaactccaagatgctgctttccagctcctatttccattcatattacatatatatttacacacacaaacaaggaaagctaataactatgccaaaacccaaatcaccccaccttcttaatctttctcttagagctaatgtcacatgaggggcataatcacggtgatatggacattatgggaggtggtgacaagcctgctatgagtggcggcaacatgcccccaatgggcggcgacctgagaaacacaacagaggtgatgatgcactcgagcctttactggggaaaagatgctgtaatcttgttctctgattggccaaaacagaatcttggcatgtatatgcttgcgttcttcttaatctttctcatagctttagctactgaggttttgtcagtctctccaactctaaaaactggcaccagccccatcaaggcaggtgctattcaagccagtgtctatgctataaggattggttttgcttatcttgtcatgctctctgtcatgtccttcaacataggcatattcatagcagctgtggctggacactcactgggattcttcctcgtcaaagctcgttcgcatgcccagaccaaccaagctgcttccaaagtttgaattatatatatacataactactttctatgttgtgtgtttacatgttgattttcatcttgagtgtgtgtgaataactctagtgtttgatgtgtgattgccctcccagataaaataataataaatgggatcttagggtgaggtttgtaataaagtcttctaaatgcggcctttgttcttagttatgatttaggttgttgactaaaagtctaggtctgcatttaaaggcaagtgtgctgatttctgtatatgacattatagttttgaacttctaaatttatgtgttggcttgcagttaatttatgatctgctgagtgcagtgagcaattaacagagcataatttagattgctgattggtatagtcccacaatgagatctgtgtaaagctcatacttgtcatcaataactagaatttgagcagtcataactgaagccattatccttaaaatttttttgttgtagtattggtatgataattagaacctggacaggtgaacgatagagactagaaacaatattgtaaaagagttacacgtgagacatttgtgtgttaccaggtaaacttgggagtaaacaggacagcatgattgattaagtgacagtgatgtattgcataatggaggtttttctttaggactgaagagccctatggcagggatgtggggggtctaccgttacatggacaggcgtggtaagacaacaagcagaatgtgaaccacattctggaacggaatccagaatcaaaatattccttcaacttttcccctttgtgttttggtggctttcttatgtgggtgttggtaagagaagattatatgagaaattatgtgccagacagaggtgttctataagttgattaagattacactaggccaactttctatattagaatatcgttggtgtgtttcttcagctataaaactaaaggactataggaataaggtggagctcttatctctcacaacaagcagccaagtgtctttagttgcaatgttgcttattctaaaacaaaatgataggggttcataaagtccagcatcaattatggtaatgctttgtgacaatgcagagaacttacaggaccactgaaactggaaagaatatcatacagatcattatgggatagcttagaaagatgctaatggatatggaattttatctatttggcccatacttgttaattacagattcaaatcattttgtatgttcgatgccacttagcttctttcatgaacaacatacctctgtaacttctgattcagcgttcttcattcaatcacagaatttccagcgaaactgttcttcccactcggtgaaaaataatactgcagccaaattttgcaaattagcatttccaggactagttagatacaatgacaatcagtataagctagctagaggtagcccaagcacaaaaggaatttaaattcagaaaaaatatataataaatagaaaaggtataaaattatagcagcagcaaaagtagcaagagtttagtacttaaagaatatagtctatattgacatgtttgtagttagatcaagtaaaagaaaaatattgatgtaaaaagtcttaaaataattaaataccttaaagatcagatgggcaggagcattgtggtactcaaggtgttattatactaccaccagaataagacaagccatcatttcgaccaagattctgaaattttaagttggctgtaaaagtataaatttgctctgtgtagactgtaaaaggctgtgtcctggttccttctttaagcttctcttttctataaaatttctcatgtttccagcactatcccatgcaccagttgcagaatataagcctgctagaacaacataattagcagaattatctggatccacttgaaagagatgcttagctgctacttctccaagacgcgtatttccataggtgttacatgccccgagaattgaaccccaaagggatgcattcggcttaacattcatcttgcatataagatgaaaagcttcttctaaccagcctccgcgtgcaaaagtatctatcaaacaagctatatgttcttctcggggtaagatgccatgcttgctaaccatatcattaaaacattcccatccttcaccagtcaaaccagtatgactgcaagcacagagaagggacaagaatgtaacatcattcggcttcaatccctcacattccatcttcttatatagttcaattgctttatgtccgaaaccatgtttaccatatccagcaatcaatgatgtccatgaaattatgtttttctcctccatctcatcgaaagcactagtagcatcttcaatcgctccgttttttgcatacatgtcgacgagagcatttcccatagccacatcattataagcttgatgtttaaaaataagagcatggagctgtcttcctaggttcaatgagggtatgttagcacatatattaagcatagagcataatgcaacttgatcgaaaaccaggtgcatacgagtcatttctttcaagacatccagggcaactctaccgtggttactttcttgtgcatatccactaatcagggcagtgcaagctataatatccttttctgacatactcatgtataatttaaaagaattttctatacttccacatttcccataagcattaattagtgagccacttagagagttacatgagccatagcctagttggatggtgagagcatgcacttgactaaccttcacaagaaaactgcctccagctaaggctttcaaaacacttcccaatgtaaagcaatcagggtgttctcctgttcaaattgaccgccgttattacatttcaaacaagaacatgaatttaatatcctaaaacttattataacattgtatgtacatatattatttatatacatcctgtcaacatatgattgactgagaatcaaattacagagctggcaaatgcatgctagttcaaaaatgtagaaccaaagaaaaaagagagaggcaaagtctttaagcatagctgtttaggaactttaacaaaagaaatcttaaattaccttctcttatcaatgaacaaaacactctaaacgaatcctcagagtaaccctgaacagcatacccaccaattatcgcattccaggaaaccaagtccctcttagtcattctctcaaacacagagcaagcatcttccatctttccgcacttggaatgaaaatcaatcaatgcactttgcacaaacaaattctcaacatacctactcttctgaatacacccttgtatctgaaaaccagtctccaaatatctcagactcgtacaagccctcaaggtgctgccatatccaaactgattaagtttaacaccacctctacacatttccaaaaacaccatcaaagcatctctaaaacacccattttgggtgtacccagaaaccatagaagtccaagatacaatattcttatcttccattctgtcaaaaatacaacgagcggccagaactcgaccaattttagcatagaagataacaagttttgtgtttaaatgaacatttgaatcaaacccacttgttaaaactcggttgtgaacgagaagaccaggtgtaattgttcttctgtcgatacagtgttgcaatatattcatatatagagagtaatcagaacttgaatgcgataaaagtcgatgactccaacatggaacttgcataatgtaaagagtgtttatttcattcgaagttcaaagtttataatgatacaattttaaaattttgctctaaacttttggggaaagactggaactttgctctggaaaatcttggaattttggggtggccggacgaggaaactggtggggtcgcagagagagaaattaataagggggcaaagggtttattgtgcgaaattgagaaagaaaggaataagtttgggtggaggagaagcactgtatttgggtttgggagtgattgttgaggaagatgaagaagactcatttttaacctttaaacaaacaaagctgtgtaagtaacatatatatataccctatattttttattactttcatggcacaaatcgttttttttaattccaaaaaaaaaaaaaataggatgtggtattattcttttagcatttgttaagtaatctacaaaatttactattgcagattcgttgaagataaacgttggccgtctttcatagctttttcagagcaaaattccaatctttccccaaatggttcaaccctaatttataatgcgagggtttctactgaaggaagttacagtatcatcatgtacagaactttgtaagtatgccgtatcgacttactattacatccgtgtacttgatcctcgtcgtcagaagtaacttatactgtgtttttttatttttacagaacgaagatccgtttgcgctcgtttgccgactcgtttcgtaattcaagagcacaagaacatgtatgactgtctatttccaatttttgtatgtttaaaagttttagttttgaatgttatggagaaatcaaaccatggaatgatttttttattttttttttaaatcgttgatattgaaatgatgaatgtcctggcagggatggagtggtcaggcaaaggaagcattgttatgtcgagattttaccacctcaaaacgtaatcttttgcatttttcttttttggttttagctggtgaatttggtagtaatagtagtattagattagtataacgcttaccttcatattgtgtttgatgctaagaacttgtttgatgaatttgctagtaataaattgctggtctgtaacccatgaaagaatgattgggaagcctgaaaatatatttaattccatacataaatacaataatcttctaagagtttctacatcctctttaaactcatgctattatgctctgtggtgtggagcagattcaatcacaaaacccttgcaaatgcaaatcgttgatgcgctacgcttgggtgaaagaagcaaagcttccagtctgcttttaagtcttcatcatggaaatttctctaaaagggctaatgattttgtttacatccttagctactgtgcaagatcacctgatccacttgtaagctcctgtttgcagtcattcggttttctttccttgaagccgagctttatttgatttctttttttctttttaaattaatctattatgtcatctctggaatgaaaaattcaagaagaaatgtctctggatcaaatctaccatgccaattctgttggatgttaaaagtcacccatttactttgtttgctgtagtttgtcctggagacttggaaagtgatggatgaaaatgatatcaagccggataccattacatccttgctaatgttgcgtgctctctgcaaaggcggttacctggatgaggttaattaattccatgagatacatattcacacacacacacaacatataaaagaagaagattatataattgtgaagtgttttattgctatgcttaatgacttcaacatatcttatcattttacttttctttctttctgtttggtggttatatatgttgaatcatcaattataatccctgcactataagaatgaaactttataatgttcttcaattatatacttttaagtacaatgaaggaactgatgttatgttttcctgctgtacatgttcaggcattaaatttgataaattttctcggagaaagtcttggcatttacccgcttccatgtatttataatagttttttgggtgcctgtgctgaaacacaaagtataggtcatgctaatcaatgtttggatctaatggatcgtagaatggtagggaaaaatgaagttacttactcagagcttcttaaggtgagcaaaattgactgctactctcatctttttttttttttcaaattcttcaggtaatgttgttgtgatgacttgtcagatcacaatctttgccttttgatttcagttagcagtttcgcaaaagaacttgtctgtggtccaagagatatggaaggagtgtttcagaaactacagtctcaacatttactctctcaaaagatttatttggtcctttactagactgggagatctgaaatctgcttacgatgctttgcagcagatggtggttttagccatcaggggtagtacctcactttacagtactgaaggaaagctttgtttttccagattagacattcccatcccttcaaaacatgaccgggaacaattttatttgacgaagttggacagtgatactaataaagaccagtctatttttagtgtcaaagttagagagactgctcatattcaaggaagaatgtttcatacatgtgagagtaagcctgttatgaaagctctcaggtgctcttacaatgatgtcattagtgcgtgtgcgtatttaaacaataatgggcttgcagagccattattagcacaggtatcaattttatttttgggcttgtagaatatatatttatatatattatattctttaattttgtgcaacatgaacatgctggatgtctcacaaagtgtgatgatacagtcaaattcacttttatcatgcttctttttctttttgttcaactttatttagagcttcgtctatattgaagttattatgtttcatcttgttagatgcaagtattgggtttggaaccatcaatccatacatacgatggttttattagagcagttgtttctgagaggggtttcagtgctggcatggaagtggtaatttctataacttttcttcatggaattatcttttttctgagtttttgaaaactatataataatttttttttttttgaagattatggtattcaagatagaaatagatttcaacttggtatgttatgttgtgtgatttgcagttaaaaattatgcaacacaaaaatttgaaagcttccgaccggactgttgcaaccctttcagtgagttgcagtaaagcgctagaattggatttagctgaggctctgcttcaccgactatctatatgtccatatccacacccattcaatgttttttttgctgcatgtgacacactggtaagttgaatttttgtaatatctgtgaatttggaatgaatacacatttttgtcataaaaaaaagaagtcccctgctcacgtatatttcactcacaattgcagtatttttcttcttattttttggctatccatctaaaattgttgcttatatatggcaggaccaacctgagcgtgctgtgcgggtattggccaagatgagaaatctgaaacttctgccagatattaggacatatgagcttctgttttctttgtttggtaacgtgaatgccccttatgaaaagggcaatatgctgtcacatttagatgttgctaaaagaataaatgctatagaaatggatatggcaaaaaatggtgtccagcacagtcatttatcaatgaagaacttggtaagtttaggttccatatttaaataatcctgaaaatcagtacctatttttatatgtatatacatttgttttttcacaaattctatttctattccattcaattttggctcctgctatcattattttctaatcatatgacctttaattgaatgcctcatttatttattaaatctaccttccagttgaaagcccttggagcagaggaaatgataaaagaacttatccattatttccacgtcgcagaaagtcttttcagtcgtagcaaaatttatcttggaacacccatttgcaatacggtgttgcattatcttgttgaagctaaggaagtaggtacttcaaaccgtgttttctcttctattcccttcattatgaagtcaactaatattgttctat

SEQ ID NO: 161 - DNA, 6043 bp, Cannabis sativa
aaaataaaaaataatccaacaattcagtaatcaaaatacaaaattgtactgcaaaataaagtttaaaatcaaatatagttacattggaaaccaatccagctgaagtctatgatagagtattgctgtgtgaccatctacctcctccactaagctaccatactggaagctgcagtcccacctggaccgataaaagaacatattggaaaacaaaacacaagatatatcataaagtaactacttagtactaattaggaattgcagctatacaagaacaactaaatactagaaattcagtatgtacgcaagtccaaaggttcaaggttataaagatgaccttaagtgcctgacactttgattcacaatcgatattaaaacaagtcacagcattatggtaaaccatctaattatgcacattttcacaaaccatgctggcaacaagtagatctaactttctaaataatttaattagatttgaaacatttttaattaaatcaaacagtacgtataaaaaaagtaatgagctggaagaagaataagcaatgcatagaataaatgagagacataaccttctctatgacttaattttaataaatcaaccaaatcatattaatagatagcaattacaagggacggaattttgaaaagttctaactgaaacaggaaaacacctactcaaaccgagttccatccatgctcattacaagctcaaatatttgttcacaggaagcctctaccacaccaacggccttcattgctctgctacagctccttggctacatatatatatatatatatatatatctgttaaggatggttgtaatctaaaaaaagtccaatgcacacaaaatcttatgaagaaagaaaaaaaaaagggaagaaacacatacaaggtattcaacctcaagaagctcctcaaaaattcgaagccctgacaatattgagacacatacgatagtcacatcatcaagtgtctagttcataaagattgcattacttgaactagatagttgcagaatctaatatgatataaagggtagatgagggaaaaggtattcaccattttggcattgaagaagacgccaaagctttctagaaaatgcctgattgttaatattctgatttgacaaatctgaatctatctcccttgtccaatcaaaaatggactctggagggcctgcaatttacaaaaaataaataaaataagaatgaaatttaatactacaagtgttaaaattagaaaaagataaataaatttagaccatttccaattgttgttcttcgtaataaatttggatgagcagcatcatcttcgtcttcttgagcactgaacctaaagaaagtcgaaaaatgttttaactcatcatgatgtcaaaaatgacaggcatttttacaattaaaaccatacaatgaagcataaaactaagaagtaaatgaaacaactttcaaagaaacatggtaggagtcactgagcaacttgggatgtcttatcttattatagatgtttactccaaaagattcttaattaagaaatatttaagccaatacaaagaagtgattctcagactccaaagtcacttatatgctgggaccagaaaagtatataatcagttaaggggggaggacaatgaacaggttcagcaattcaatagcccagaaaatgttaaaaataagaagttccgatcttcatttcacaattacaacagtttgcttggttggtcttttaaaaaatatagaatagctatttgtctctcttcaattttgttaagtgctactaaattgactctctcttctccctctcacaacttttcactctcccttacaaaatttctttcaccattttgtctttccactttctctcctccctctgcacatttcttatatctcttattgttgtattctcttcatttccttaaacttaattatgtattaatacaagaattaagtttttgctgtccaaagaatatttataccattttattccacagctaatctaaaaatttcaacagaagtcaatttttctttattgtcaatctattctcattattgttacttttgccattccccaattggagccacagcttaagcttgtgaataagaaacctcatgataaaacttcggataacttttcctatgaatttgtttgaagtgcaatggggttttaaaaactgtaattatagtttttgtttctccttgcattattttcctgtctttcctttctttattttcccaaaggaagatagcttatcaattatatatttttaaaaggggtttcaattttataacaaaaaatgctgaaggtgcatccaagtggggccaactataccaccagggtagatcccattaccaaacataattcacaaattatagtcggttaaatgtgaattttttaattatacattttaactgatatcatgtagtttaaaagagatgttgcaatatggcgtgataacctgatatatcttacacacaaaaggaaaagaaaagttcctacataccagcataaccagacataaagtgcaaataaagccgacacttactgactttcgtgatcagacgatgaagcagttctcccattgtccattccagatttgtattcaaaagaagtatacctgttaccatttgaaacttctgaaccctgatgctgcataaactagtacacaatcagaccaaactggatcacagaatcgaacccagcaggaaatatgcattacaagaacatacatataaagacaaagaagagaatagggaatcaaacaaacacctacaaaaggaataagttactaactaatatctttactctggaccaacacaaagaaggcaaatgttggtgttaggcaaatgaggataaagtaaggctcaaatgggaaaggtctcaagaaaacatacctgatcaattacaagttcaattttttccttccagatcagtgcctcttggatattaaacgctgccatctggaataagatcagaataataaagaaaataaaaaaccaatagcacttggaagttggtattttagagaactaataccatgcataaaaccaatagcataaaattaaaaaacatacaaggttattttgagaaacaaccttctactgatgcaaacaactgaggaaataaagcacagcaagttaacagtagggaacattttctagtattaagattatttgaaattgtgcatgtcaacaatgtaaaaaagagttggagttcgaagtgaatttgcaaaataataattatacaagaaatctctggtcatggtatttagtttaggccttttctattttgggggaatattttctctattacacttcagtttgtaatttctgcagatatttctacaggacatcagtttcttgtgaaataaatgttaaatctaaaattttaaccgaaatcagctcccaatttcatcacaactctatactactgtaaactttatatatactttttcaaaaagagaaaaaaaaagcagtaaaaaggtccatggacaattcaagccaggtgcaagaccattcaattacaggtcgaattcagcattaatccaaaagatcaacataaacatgtgcatgcccaaatgacaagattgtttaactatagtgcagttaaatatatagttgtcgattaaatattcctaattatacagagcgtaggaaatttcaatatcttgactgagaagaaatcacataccgtaatccgatggtatttttccttcttgttgtatacagacagaacataaaccatctgcacccaaaaataatcaatatcaaacaaatgaaacaaaatacgcagtaaaatcacataatatctaagagtaacactaccatacaaaacttaaagcaagacaatatcaaactttaagaatattgtaagatgtaggcttggatattttgagaatattttactaggctcactaataccatataagtagccattactcaatgcataaatggagtaaaagatgactaatgacaacttacagtcatatgaactgtgtaggacacaaatatgcaacacccaatctatgcccttaagaagtaagtagcccaggaaaaggtttgcaatgtgcaaataaggtacatgaagaatagtggcttaatgttggacatatatacatgaaacaacaactattgtttcaagaagaatctcactttttcttttactccaaacaagagaataaaaaaaattggaaatcattttttgtttctttttctcaaattccaaagagagggcatgtatacaatgcatcaataaatcacaagggtcccaatttactaataagatgtgattagcctgttagctgtccaattagtgttccacaacatttgagaatcgtgttaaacattgatatatttctgctgagaacctcggtatattctacttcaatgacaaagattgaatatactcaacaagctaattgtcaagacaaaaagttaaaaagaaacccagagttggcagctccaaaatactatatgaataacaccgtaaaaacactagaatttcaacaagaacaatgcaaatcaacaatctaacaatcaaatgttactttcttgtttgacaaataaaccatcacagctatttgtgatccaaatcacgcaaattaaatagaataaaagtcaaagatgaaaagaaacgtaaatttatatccagaaccaagatgaacaatacatgaaaagagaacagaaaactcacatgtccatggtgggtcttcagccctcgatcctccactctacagttgccatcaattaacattgtctttattggaacctaataaaaattaaaatacaaaaagaccttttagtgtgaatgaagctcatttgattcttcctatccaaaactaaactttagtgtctctccctttaaaaaagtgagttcataagaataattgctttgaaataaaagataaacctgattatcctgaggcttcctcttgtagtaggcaagaagccgagactcaagaacaaaatagcgcatgtgaatgaaagaacggccgatcttccttcgtccatagcgaaccatccagccttcatagatcactttagacgacatcgtttacgactcgaaaatccacagtccacaaacaagaaaacgagatattcccgctaactcggaagctctgggatcgcagcctcagcttctagcgagatcagcaccccaaaacctatgtgacctgatcagtcatcgtctaaaccagagaatccaagattgggcaaatcgagacctagaattggaactcactgcattgccttggaattcctgaagatctagttcatcaaattccgcggcattgacaatttgacagtcagaaaaaggagaaagcaaataaagaagatgttaatggcggaagtgattgaaacgcggagatcggtgtagaagacgattacaacgacaacaaaatgtaggtaaacgacgtcgttgcaggtgagaaagagtcagcggtacgatagagaagagagagattctagtgagtgacggctgaaggtggggaggagatccccacgtacgtaagaaaggcctgtgtcctcgaaaggagcacaacacgtggcggatttggattggttggtgaaggttgaaagtgtcttggcgccgtgacgctttcccaaatttttaaaagattggaatacttgtgtttgtggagtctgaggcaacgatagtacccggagtgagttagagagagaaagagagaaatgataattagtaaaaaaaaaattgtaaattttcctattattttttttattgagatcaaatttattgaatgacgtaagtacccttgccattctattatgtattttgtgtgctttccaatttgtatggggtcattttcgttatggatgttgtgtgactgtgaggtcatgtttttggccggctgttatagcgggattttctttcgaaaagatgaagaaaaagaaggagcagctgaacctgacacgtattttagaaagataatgaaaactcataaacgataaaactttacttgcagtatatcaatgcttaataaagaaactttgccaatgtgacacatcagtctttttctttttcaaccaaaaataa

SEQ ID NO: 162 - DNA, 1746 bp, Cannabis sativa
tttatgtactaaaacatgatcccttgactttatatctaccaaatcatgtccctcgaactttgacatgaactaaagtatgtcccttgaatttttatccatgttagattttttttactaaaattggaaaaaactccttaaatctaataatctcaatagtttatgagacatttttaacgatcagggggcataatttaatacatgttaaaattcagggggcaaaaatccaattaataattttttttatcaaacaaaattaatattttttatttatatcctattttaaagtagaaatttttttttgcaccctaaggttaagagctggttcggccactgttagtacctaatagcaatgttatattgtaaaattgtaaagtgtaatattactagtacttcatttaaaaaaaatataaaaacaactctaattaatcatagtgatatattaactaacttttcatttccactacacacatgttatgtcagactcagtgggagtgtctgcatgtacattgtacgaccatgaaacacaagtatcaattcctaatctccagatttacaaacccttttaaatactaattaaaactcatcatattattggtatttgagctcttacaattattattatattttacttaaacattcaattaatctaacacagtagtaacattataatacgtaatggtaatgcattaaaataaaattaaaagtaaaaatagaaaaggtcaaatgcatggaatagcacgtggaagcgtgattaaaaagcagaaaatgtgaaaatttaaataaattaaataaataaataaaacgacaaaaattaaagtaggtagaaagagccaccattccaacgacacggcgcgccaccatgcgctactccggctatcatgcgccgccgcctacaatgctccccctcttccaaggctatttatggaatttaaactttaaaactatttctaaccttgggcttaaacaaagtcgattaagttaagtacaatagtaaattccatttctaaccttgggtttcactctttaattacaatattaaccccttcacttcactagccggagtgaaaatcaccattttatattatataaaaaaagaaaaagaatgaccacagtaaaggtcagatccagtaaaacgcaccgttttaatcgccggaatcatcgtcgccgccgaatatggagatgcgattgtaaagaaggaaaagaataatgacgagaaacaaggcgacgccgactggtgaaccgctaacacggtggatcgaatcgggttctccggttgagaaaatggagtttacgaaggatccgcggtcggaggagaggaactgaatggtgagaaggagaattatagggaggaggaggaggccgatagggcttaggagctcggagaaggcctcggtcagtgcttcgccttggtcgcccagtaggaatggcacaacgatgaccagcaccaccacaaccgccagtagtataccgtgcggtgctcctccgccgccttggtgtcgttcttggttcatcattcttgtttttgagtgtcgtttaggctatgtttggtgtcgtttttagctttttagttttgttagagttgaaagaggtggctagagtttcgatgaagatgaagaagtaaagaaggtttgaaattgaaagtgaatcatcaagattttggtcgctcttattaaattttggaaatgagacgcgttctttttaaaaaataaaattaatttcttggaaagatacaaaagaaattgtttg

SEQ ID NO: 163 - DNA, 915 bp, Cannabis sativa
  modified_base (556)..(561): a, c, t, g, unknown or other
ataatgacccaaaatttgaaccaacctgcttcaagaagtcttggtctgttttgagatacccagctttaacaccttcctctttctcatcacaattcttcatcatttcaagaacattgttatgcaaattctctgccacaaactccgcagccttcttaccaccatgtccatcgtaaactccaaaaaagaatctctacccaaaatccaaaacaactaaaaacatcaaaaaagaagaaaaataacaaagacccaattgagtaaaaggaacaagaatgaatgaattcatagtttttactttgttggggttgtcttgtaagcaagaagctatcttgtgagtgtcttccatgaactttttcttgcctttacgtgagaaaacaccaacaccaacttccccaaaagaaactccatcgttccggggcgtagtagaattctccattcgaatctctcccaagacatttggtatctcaatgctggggggtcttttacgcttcaaacagatatttggggtcgtggccatgatgctgtgctgtgctctgaattttgagagagagagagagannnnnngagagagagagagagagtgtgtaaataacgggaagaaaatgagtgagaatactgatttgtattgtagtgaagtgaagattgaataattgaaagaatggtagactaaaatttgaagtctgaaagtggagctttgctttataatgaaagagccgttagcaatgaatttaccggtcacagagtttgaatattggaatattcaacctggtggagtggagccaatttttaggatctaataattccaattctccatacaaacgacgtcgtttatgggcttatctcatgtccttaagatgtacaagagtaaataaagcaatccatatatcattgaactttaaattaaggaattattacata

SEQ ID NO: 164 - DNA, 5768 bp, Cannabis sativa
tttttccttatgtcaaggtaatcccatagtcctaaaaatttatctagtgattgatgagataattattcacttcatataagtaacacttttggtttttgcagaatctatttcctttgcaaaaacattgtgggaaaaagagtgtcaaaggtttagatgaggtcccgggagtgaaatttcccgatctaccttcacttgatggctacttgaatcactggggaactcataacatcactcaaaacaagacactctatacttggataaacgaagaaggagcagtggttggccaaaggacttacaaagaactgcatgacaatgcttcttgtattgctcaaaacctcttgacaagtaaaaagctagttatcaagcctggtgatagggttctcctagtctatgtcccgggtttggacttcatcgatgccttctttggatgcttaagagccaaagtgttacccgtgccagttcttcctcctgatcctatgcaaagaggtggacaagcacttcaaaagattgagaatattgctaaatcgtgtgaggcggtggcaatcctatcaacgcttggttatcactcagcagttcgagcaggtttggtgaaaagtctcattctgatggcagggaaaagcgggaaatgcaaagctcagtggcctaatcttccatggctacacacaaatacttggattaagaattccaagaatttgcccgtagaaggtaaagttgatcgttctgaaccagaagcaaatgatgtatgctttctgcaattcacatcaggatcaacaggtgatgctaaaggagttgtgataactcatggaggtctcattcacaacgtgaagttgatgcgaaaacgatacaaaagcacttccaagacagttttagtaagttggcttccacaataccacgatatggggctcattggaggattatttacggccctagtaagtggcggttgtgcaattttgttctccccaatggcattcatcaaaaatccactaatgtggctccaaatcttaagcaagtatcaagctactcacagtgctggtccaaactttgcctttgagctggtggttcgaagactggagtctaacaaggaacgggtgtatgacctttcttctatgatttttcttatggttgctgctgaaccagtgaggcaaaagactctgaaaaaatttattgagctcacacatccttttggtctgtctcaagaagtgatggcacctggttatggattggcagaaaattgtgtctttgttagttgtgctttcggagaaggaaacatcttggtggattgggaaggaagagtatgttgtggttatgcagttcccaatgatgcagacgtcgatattagaattgttgacccggaaatgaatgaagagattgaagccactggaaaggaaggtgagatttggattagtagtccaagtgctggaattggatattggggtagggaagaattaagccaacaaacttttagaaatgagctccaaaatcatcctggacgtatatacactagaacaggcgacctgggacgagtaatcgatgggaaattattcatcactggaagaattaaagatctcatcattgtagctggaagaaatatttactcagctgatgtagagaagacagttgagagttcatccgaacttctacgtccaggttgttgtgctgtgattggtgttcctgaggaaactttatcaaccaaagggatttctattccggacagctctgaccatgttggtttggttataattgctgaggttaaagatggaaaacctgttagcaaggatgttgttgataacattaaattgcgtgttgcagaagaacatggagtcaatgttgcttctgttaagcttatcaagcctagaaccataagcaaaacgacatcaggaaagatcaagagattcgagtgcctcaaacagtttactgatgggacattgaatgcagtaccggatccaattatttcaaaaaaggtctttaaacgatccttcactaccggttcatgcagagatggaacgaccccccgccctcaactagtgagttctcctataccgagtcctatactcaacaatagagaaatcgcagagtttttaaaaggagtagtctctgaacaaactggtatatccatcaaagacatctctgtcactgagaacctagtctcttatggaattgactcaattggtgttgttagagctgcacaaaaactttcagatttcctcggtgttccagtaggagcagtagatattttctcagcctcttgcattgcagagctggcgagtttttcagagaatctactgctcaagtcacaacctgaacaaatgagcaatcagtctcatgtttcagagcaggagattgattattatgctgaaactttcatggaagtttctatgtctcaccagttaaaaatctggtttctccaaaatctagctcttgtttatgttgcttttcttcttgtctttcctgcctatttgtcactttccacttttatgtggtctgtctcagctatcagtccattgacaggaggaattctctggttagactatttaatccctttgactcttgctcctctttcttggatcttttgcatcctttccacttgcctttgcatttctcttttcggaaattctttcttaagaccaaactatgccatgagtccgaaactttccatttggtcagttgattttgttaagtggtgggcactgtacaaggcccaagaagtttcttccaagattctggcagaacatcttagaggtacagtgttcctaacatactggttcgaaatgtttggagctaggattggatcatcagttttgctcgacacagttgacatcaccgatccatccttggtttcaattggagatggagctgtaattgcagaaggtgctttgattcaaagtcacgaagtaaagaatggaactttaagctttcaacctattagaattggccgaaattcgtgtattggaccttatgctgttatccagaaggacagtgttgtgggggacgagctcgatgtcttagctttgcaaaaaactggaaccaagcatgtaatcaaatctgccaagggtgataatcttcccgaggtaagttcattcaagttctaagctaatcatacaaaaaaaatctagtttttacttgaaagacattaaaattgtcattattatgatttttttcaggaaccattgctggcaaatgccatttaccatttgatgggaatatacttagttggcttgatcagttctttctcagcagccatgttgtacttcatctacatttcgctatctaaggcatctccttccccacaagaatatgcatttatgtgcagctttggagcatttcattggataccttacgccatcactgcatacgccaccatgtttacatctctctcattcaacttctacgaattttcgctcatcacagccattgtttacttagctcatggccttatactcagcttgtgcacttctgctttgactcatttcttatcttcaacgaaaaacacaaaggaggatcatttcaggtcatggctttgtaggcgtatcagaatttcgtgtcaccttagatttgccaagctcttatctggaacagaagctttctgtgtatacttgcgccttttaggtgcaaagattgggaagtattgctctatcagggctatcaacccagtttctgacccgaaaatgatttctgttggtgatggcgttcatcttggtgacttcagccggatcatatctggattttactcctccaacgggtttactagtgggagaattgagatgcaggctaattctgtcgttgggagtcaaagcgtagttcttcctggttcggtaattcagaatgatgttattcttggagcactttcggttgctcctatgaactcggtgcttcaaaggggcggtgtttatgttggttctcgaaatccaatcatgattaagaacaccatgcactctttggacgaaagaattgaagagatggacttaaaatacaagaaaatagttggaaatcttgctgctaacttggctgcaacaactctcaaagtgaaatcgagatatttccatcgaattggtgttagtggaaaagggttcttgaagatttatgacaacatcaaagattggccagaccacaaaatcttcagcctgggaaaaagctaccctgttatagttagacacagtaatagcttgagtgcagacgatgatgctagaattgatgcccgtggtgcagccataagaatacttcaagaacaaaccagtagtagtgatcatgatcactctcctctccttgatctcacattaaaaacaggcaatgcattctatgcccgaacgatagcagatttcgctacatggttagtatgtggtcttcctgcaagagaagaatatgtcaagcgagctcctcatgttcgcgatgcagtttggagttccctacgcaatgcagactcatttactcagctacattactactcaaacatctgcaggctgtttcggttctcagatggaaaggaaatgtatgtgaagttcaagttgaggccttatgatgaaactatcaatgaagattctggtaaagttgagcctattgggattcttccacccgacacaggtgcaattcctagagacgaaaaagacactcgcccattacttttccttgcagaagatttctgcaaccgtgtgaacaaagcaaatggagttagttatgtctttcagttacaattcagaccagttccaaatgatgaagccaaaagagatgttgcacttgattgtacaaagccatgggatgagactgaattcccatacattgacattggtgagattaacataactgagaatttatcagcagaagaatcagaaaagttacactttcacccttttctaaaatgtcctgagattgatgtcattcatgcctcatcatgtacccaaagtgcttcaattgatcacggccgttcattgatatacgaaatctgtcagcatttaagaaatggacaaccaatcccagaagcctggaaaatcttccttgaccaatctgatgtcaaagtagatctttcaggctgtcccatggcaacaacacaagctaagaaagatgaaaaaccagtgacactccaaagaaatcggtatcaaacactttgggcaactttattccaacctttactccaaacagtctttcctattttcctcttgtcattagtgatctttgctccattgaaatatgttcttcacttgaaaaaagctcatgaactctcacttcaatggctactcccattgttttgggtatgttcaggttacatagctgcattatcttgtgttgtagccaaatgggttttagtaggaaagaagaaagaaggcgaaacggtactcatttgggggaaagaggttttcatggacacaacatggcaagcattgagaacactagttggggattatttcatggaaatgacaactgggtctgttatgttcttgatatggatgaagctaatgggctcgaatatcgagttggatgaaggtgcttatgtggacagcatgggagctatgttgaatcctgaaatggtggagattgaaagaggtggttgtgtgggaagagaagctttgttgtttggacatatctatgaaggtgatggagggaaagttaagtttggaaagattaaggttggtgaaggtggttttgttgggagtagagctgtggttatgcctggggtgatagttgagagtggtgggaatctaagtgctctttctcttgccatgaaagaagaagtgattaagtcaaggtgatatctaagtacttattgataaagatca

SEQ ID NO: 165 - DNA, 2319 bp, Cannabis sativa
tatatatatattgtctattacaagtataatttcatgtgacaaaacttataattataataaggttgaacaatacatgcatgtccatcacttttttatttgacatttatagatatagatataaatatatattggtgaagaattaaaaaataaaaatggtgataataattaatgaatttagttgcgcctatatatgaagtcctcattggtatataagtccaatgggcgcccatgagtatgttgtattggcctagcattagtatccgaaccctgccaaaattattaccataattacaatattaattatatatatatatatattacaaaatcaaaataaaaaaattgaacaaaaataaaaaattaaaaaatggtatataaagtaatcctttatttttcttaataaataatagaattataatcaactaaagtaataatttactatccaatcaggacatcgagacactaccgaaattaaaattagaaagaagacaagtgaaataatcaacacataagatatggttagaatttattattttgcactttaattttaattgaaaagacaattaaattaagaaatattaaagaatattttaagatgtcaaacacgtaagaagtaaataaataaataatataaaaaactgttaactaattataaaatgttatatcagtagggtgttatatactttacagtgttaaatatcctttttattttttttaataataacctaagttcaaattaaaaaatacttttacttttgttatatttctaatgatttataattttatataagaagaaaaaaccaagaggatttgtttagctaaaaacccaacaaaaccccatgtttataaacgactttgatgcaaatttaaaatagtcttactaattaattaaggtttaataatacacataacatgagagtttagtattgagttaaaaaattataaattaatatgagtcttaattattaattaataacttacatcattgacagcaacatggagcaagcttacttgtcctcttgcaacagtccttacctgaattaacaattttaatgatattatcataaataaataattaagaaagtatgtgaaaaattaattaaaacaactataataattaaattaaaactaattaattaagaactaagtattactaattacctctcttacaacgagccaaataacattttgagtgcaaggaggaacagtgagcgaaccaacgtatttataataacgacggctcccaaatttgattagggttggatcaaccctcccaacaaatctttcttgatatgttcgattcaaaaccgcatgcatcaaatggccctccatctaaaaaaaattaaattaaattaataatatttaagcgtgtatttaacattactcttaatatttttattatcaacttactgatgttaaaaatgaatcagcaactccgatctgatacataattccaataacagcgagttgtccagttaggctttggtgaaccaagtgaagctcgagatcatatcttcttccatttatagtgtgttcggagggtgaatgccaatgaatttgttgcaagaaatattgagttctatttagttctacaaatccagctgtgtttgaagtccatttcaactgtcaactgcacccacacaacaacaataataataataataaagtcactttgaatcttttgatcatgatgcttaacatttataataaagagttcctttattagaatttaagagacataataatggaaagtttgactacttatgtgttacatataaatacaatataaggttagaaaatgacatatatagcttgcctaatatatccacgtcactttcttttactttccttgtcacttatatatggtattatattttctttttttttaaaaaaaaaaaaaaattgaataaatttttgtgtcaaaaaattcaattaattgcatgcaaacttactttattttctaatacacatgcaactagtaactattttgaatgtttgtttgagaactatataaatgtaactataatatatactgttatatttagagggtcgatttgaaattaaaatagactttaagaaaaaaatcaattgtatttttaaaaattagtatttaaaagatatttgttatttgagcccgagtgaattttaagagcgggtctaagccgccttagttgcgagctctatatatgtaaagactaactaatcgacaaattaagctgatattagactaagacagattagacttgcgcttagaatttactcggattttaaaattaatagtgactaaccatcatatcatgacctctgtttcgaagggttgca

SEQ ID NO: 166 - DNA, 2216 bp, Cannabis sativa
  modified_base (1734)..(1737): a, c, t, g, unknown or other
cacacacacacacacaactatacatataatacatagatatttgaataaccaggcaaaaatggtttcaaagattttaatttatatttattttcgctggcttatgactgatatttcatttgcagagtgtttgtagcgagcagaagttgaatgcattggctgctagttttatacaatcaccagttggagagaatgtcgattggaagctctcagcaacaatttctccttgccatgttacggtaattcctttgtcttacataagagggtgggagagagggagggggaggagagagagattgacgttcactagttagtttctatttagagctttattttatagtttggctcttctcttcagccaatatattatcttcttattttctaaattgttgtcttttttttttttttgcatcacttgaaatgtggagcatactaaatttttgtgtgttttcagattttgatggaaagttatgatagatttttagagttcattaagagaagtaaggcagtcagtcctactgttgcattggaaactgcgactgctttgcaggtaatgccattattttgcatcaaattggagtaagtggtaatgatgctcaccctgtttgtttatcttcacacagatgaaaattgagagtgtaacacgcagggcacaagaacaatttcaaatggtattagaggaacaaagcaggtaaccatgttattttcaactgtgtttgtgtgttttatgtgtataattctttaatcattctcatgtaatttgaacgtctggtctttccagtcatgggttattactatgcaaagcatattttcatgcataataataaggggaaaaaagaaaaaaaaaatggaaaatgtgttgatgcataaattattatcaagacagaagtctaattttaccatagatctaattaccattatggtggaaacagttagtgtcagtaattctcttttgttgaactgtggtgagtgtgtaacgaggaagggtctgtcttgtttgggttcaaaccaaggagttgggacatgatgaggctttcttcctcatcaataaagtttcgtttgatatagaaagtgttaagaaaagtgctaagctttctgcgtatgtatacttggtttgagtttgtagcattgatctttctttacttagcagtaatttcttttgcttcccccacccttctcccaaatatttcagatttgctcttgatatcgattttgatgccccaaaagttagagtccctatcagaatattgggctcttcaaaatgcgattatcattttctgttggactttggtcatttcacagtgtacaccacggtatgtgtttgtaatgtgtaataacttagtctgtttcaagttgattttgcatcatccagaattgagtaatttaatgctgcaggagagtcagtctgatgaacagaggaaaagtgtttactctcggttttttatatctgggcgagatattgctgcttttttcacagattgtggatccgactgtcagaactgtagtttagttgtgccaagttatgactcgaatcaagttatacctcctacaccagaaaaagttgacaatttttattctcttatagataggtgtggtatggcagtacttgttgatcaggtgagcttttcccttttcttgtattttttaaattaaatttaaagttactattgtagttggttgtgagactgttatgctcactttactgaagacttattacttctctctctctctctctcnnnntctctctctctctctcttttaaataaagatcaaagttccccatccaagttacccatcaacacgcatttctgttcaagtgccgaacctcggggtgcacttttcaccatcaagatatcgtcgacttatggaattactagacatattttatggtacaatggacacgtgtagtcagcctgccggtaatgattttcaatctgaatttacctcatggagttctgcggaccttgcttctgatgctaaaatcttagtctggaaggtttgtcctttatttatataattttgtaacagaaaaattgctgacagtttgttgttgtgtcggcatctaattggtagtcctctgttgaatggatctagggaattggaaattctgtggctacttggcaaccttgtttccttgtactatcagaattgtatctttatgttttggagtctgaaaagtctcccacttaccagcggtactcaaggtttgcatttatcct

SEQ ID NO: 167 - DNA, 786 bp, Cannabis sativa
gagagagagagagagagagaccaggttgtgatactcagccaacttagccatggttgtactctctcctcccggaataataagggaggaaacattttgaagttgttctggcttccttatctccacgcccttaactccaatccttctaagcactgccccccaaacaaaaaacaaacccacatataagcacaagacagaaccacttgtgaaaatatacacacacaattaaggagagagatggaaaagtgacctgcaatatgttcgttaaaagaaccctgtaaagcgagaacacccacgatactcatctttctgtttctgtgaagagaaaaggaagcggctttgagttgagtggagcggagttaatgggcacactactacgttcgattctgttaattgagtatcaaaacaacaaatacatatgacttatgtgggaggctggccgccagacaaaaatatactaaaatcttaaaatataacaaatttttatatataaatatattttttttatgaggaaattaagaatggtgtaaattttaaaaatagttgttcaaagggtggaggtaaagtaggaccaaggccaagtggtgatgatctctgtaagtagttgctttcagtggaagttttgtacttttttcttctatagttattcttggtagggatattatgttgggttggaaattgaggggttcattaacattagcatgttgtatgtatgttatattgtatgattcaactattacatgtaatggtgtaataaattttagaaatggaaaaaaatactctccacaa

SEQ ID NO: 168 - DNA, 1595 bp, Cannabis sativa
aaaaaaaaacaaaaaatttcatacaaataggaaaaaatgattttattttttattctccacatttaattttttacctacattttcttttcccaccaaaatacaacttccaaactttggtaatattatttctcttttattgtcaatatacagtgaatgagtcatgatcacacgtatatgtcagattgttctgcagaactacatggttattagggtaccatggaaaagaaaaagtaaatgcgtgcacatatgaaacgaacacaacttgatcaaaacttcgtgtgaacaacagaattatacgtacgagtaacaccacgattttactactttaaatagtttcaaggaaaattacaatactagtgacattcttagcataaaaaagaaaataaaatggaccatctagccgaaaggtacaaaaatatttccataatgttctctgcattctaattcatcttgtctattagctcattgatgtgatcctcacgattgccagattctcctccgtccttgtagactttctttatcccttttaaacccccttgtggcttgttgagcataaaggggtatagaaaatgagcaacctccttaaaatgaggaccaacattagcaatttcatgcacaagatcttctatgcaaagaattccatgttgcccaagtgcctgccaaataagaagatatggtgaaagttagaaattgtgttttaatgtagatgatccaacatatatttataaatattaagcaattgaatacctgctcaataacattgttatccgtaagaggtaccctctgcttggctacgtttccaaagcctttcttgtgaatcagttccttcacattcttgaggttaggataccttcaaaggtgcaaaaagtatcattgaaacagtaaacagagattgcagcatagtttaacatcaaaaataatacaaccaaatagcaatgaagaagtctagtcacatacccataagtaacatagggttccaccctttgtaatttttcaattactgaagcattcactttcacaaagacagcactgaacactttcctcaacctcaggttgtaaagggtcttcctaactgctggatgcatgtcatttgttctagacaaagacaaatgatataaacagaagacaacagtcaatagaaagccagacaagaaattcatacaaatatgttgaaaacctacccttgtatgcggatgatgaaaaggagcttcgactttggagtcgccaactctggcctctttttctttaacctgtgtctcatcctgacaaggtccacctcctaaatagaaatagcatgtaagaatattactcaataagccaatcaagcaagaaaagtcatttcatgatctaggtcatcaacaattctaatgtattgtagctgttataggtcattctatttccatgatccatttttggggaaaaaacccacctacagcttggtacacagcaaaagacacacctaaaatataatttgcatccctctggttatcactcgtgcagtagaaatagatggttcaaaactgattaaaaagaaaaatgatgcttaaagtacataagtgtagctgtttttggatataaagagctaactgaatcag

SEQ ID NO: 169 - DNA, 5141 bp, Cannabis sativa
  modified_base (3731)..(3737): a, c, t, g, unknown or other
aagtgggtttggttgggttttagttgctgaatcatttattcaattttctttgtgtgtgtattatgtatttatgtatgtatatgtatgtaatatgtgtgtgtgtgtgcctgttgggataattttgttgtgccagtaaaattgagggttcacaggccaccgcaaaattgacagctgagcttctccggtcggtgatttcgcagcaaagagtgccttactctaatcaagctggagctttggttgatgcaattaaggctgttggagagcaactcattgctgcaaaccctattggtatacttgtttgcttcttttactcaagttttttttgttgattactttaaatgccacttggggctagctcaagtggttgggtgtgtgtgtgtgtgagagagagagagagaggagttgaaatctccattgaatcaaaagaaaaaagaaaggaagtttacttcaatggctgttttgcttaatataattcacttgtcattatgttggtgtaaggatgtagattaatgtctcctgtttgtgtttaaggttttagaatataaatgaattagcgttttccttgttttgttagatgttaagagagctcttatagctttggaaagaaaagaaaataaacgatactttaatggttcatttgcttttgtatctttgtcatgattatgttggcatagggttgtagagcaaagtctcttgtttgtgtttttggttttaaagaataatacatgatttagtttttctaattgataacggaatagtttttctaattgttcgtggaaggtttacttgtatcttttatagtttaagtgttgtgttttgattgctttgaatctgctgttctactctcacccaatggaatagcttaaagatgctatcatcttgctaaatcagaactgaaattgtgtaattctatcatgaggctccttgcataacttttttgtaccaatttgaatgataaatcttcatgcattcaaggaaaaaaacactgaagcctttctatctatgcttctcaattatgtgttttgttgtgcttgttttagtatgttttatgctaaaactcatgtaaccacggttttcctccgccacaagtgagggttttcaatatataatgggtagggcccagtctaagacaattagagcttccctttcttcataaatggactgtggcactcaaaggttttggaagtggaattccctcccctggtcctcactctcgtttaagaagagataataatattttttagaagctttagatgattaaacatattgtgctagtggaaaggagcagaggcaaaaagtatcctgtgtacgaagcttctttgtttgaactattagcaagtttatatacacggagtcaatcattatgttgcacaagtaaataaaattacttctgttgttttcatgagatcagctttaaacttttcttattgaattggaaagctgtgtctgttctattgatgtcagctcaactttgtttgtatttgtctgttacacttacatatttgttttcactttacaatgtttcatgtctatgtatgttctcacttaacaatgtttcgtgtatattattgcagagcttgctgtgggtaatattgtgaggcgtgttttgcacattattagggaagaggatctttctcttacaacagcagccatggctggattgaatttatcatctgtaagtgacgatgacgatgatgctgaatatgaagagaatccagtcctatcagctgctgctgttgctgctgcttcaagaagtacactgcgccctccttccttgcaaacccttcttgaggatttacctgatgctgcggctattcatcgcacttcgtcatctggaggtgattctgaagggaaaagcaaatgtaagattcttctattctgggtggttggagtcctttcatctatataacgtttagttttttggttaatgcctgatctacgtgttgaattttcattataaagtttctattttataaaataaaactggccagctatttttttttaaagtcagttgacaaagacttcaaacgcagtgagagtaagcaagaaacatctattaatattttactagatttatgaatttcgtggccttttatagatgtaagcatttaatttctatacagctgctgacaagagctcaagaagccggaggctaaagcacgatgtcattgaagcagttaatgagcttatacaagatatcaacacttgtcatgagctgattgcagagcaagcagtagagcacattcaccagaagtacttctcttttccttattcttgataatttaagcttggttttacaattgtcttgtactgtatttttcatactcatatagtcttgatgattcatgaatggtactgaacccaaaaggagtgaacaagggatcaaccattctcttattatgaagagggtgataataaatatagatcaatacgaatagggtttctcacttgtatttccttaggttaagctgtacagtttatttgtagtatggccaccaaagtaggcaatatatagaagcataatgattatttcagaagaaaggcatttcaattttatttcctctaccctaaattacccacagatgctctatcttgtgataggaatcactattgtctgaatcttaaacactagtagactggcttgatgtgtgtatcttcaatcttaatgattctaattttttccttgtcttatttaccttaactatgatgctaattgttgaatttccagtgaggtaatattaactttaggcagttcaagaacagtactggaatttctttgcgctgcgaaggagaagaagagatcttttcgggtatatgttgcagaaggagctccaaggttagtaaaaaggctagctatttaatttaagcaaagaatctgaccatttttttgtaatacctattggtgataccgtatcgttgttatttcttgcaaatttagatatcaggggcatcttctggcaaaagatttggtctctagaggtttgcaaaccacactaataactgattcagctgttttcgccatgatatcccgtgtgaacatggtgagacaacaatgattagcaccttctttttttcggtaaaaaaatgtgaaatcctgaaatgttttgattgaccttcattttttaatgtaaaggtcatagttggtgctcatgctgtcatggccaatggtggggtaatagcacctgttggattgaatatggttgcccttgcagctcaaaggcatgctgttccttttgtggtgcttgctggtagtcacaaggtaattatactattttttctgaatcctttgcaatgtaactagacaaaataatacaatgaacgactacaatggaaaactttcagtttattaattgaactttaaagtaaatatatatttttgtgatttttttggggtgttgggtctatttcatgatttgcacttttgttgtagaattgtagttttgacttcttttcttcttttgtttgttggcagttgtgccctctctatccacacaatcctgaggtgttgctaaatgagttgagatccccttctgaactgcttgattttggagaattctcagattgcatggactttggaaatgggactggttcccctcttctacatgttgttaatccaacatttgattacgtaccaccaaagcttgttagtttgtttatcacggacacgtaagttaatctgatttcaagtaatccttttgtatagaatggtgtactctctctctctctctctnnnnnnntctctctctctctctcccctttttctttattaccttttctcaatcagtaaaggtttggtttcttataaaaaagaatgtagtacggtaatatgcataacttagtggtgttacacttctcctcacaaggaggatgtccaagtttgaaactcttcctcaaaaggggcaagagccttttatagaattatgaaatcagacttctttctctttattgatatttttagtttaacataatctcttttgtgttaattaattactagaccattctaaattcttcttcttcacagaggaggacataatccatcatacatgtaccggctcatagcagattattattctgctgatgatttggtagtgcaacgaagacctgttatcggtagctgagtttttctcctattttgtcttatacaagtaagtgaatcgttaaattttatcttcacgctaatgcaaatttgtggcagtacactggtattttgcaattgactatcttgttatctatttaaaatcagtattctgtacataaaagaatagcttggtatcgagttactaccccaaaactatagccacccaatacatatcccaaattccatctgttttcacttctataattgaagattctaataatattctctccgatcatatgaccaaaggatggcaattatgttttttctgtccttttttttcctttcattatttctatttttagtggatatttcacccactattgctcgtattatgtcactatattagtacgagaagagggtgtctcttaaggcacacttgaccttcatatcggtacaagtatttacgataacattttttcatgaaacaccctataagcctcagatttactctatcaccctcccaattattttgaaaaagctttaaggtgaaaccattaaacaccggttatttaacaaactcccgactactgcaaggattttaagaatggctttagctggtaaactgagaatttcctcacattttattattatgcactttgtagagaaggttataatgaattgtccatttttctttcttttgcttactaaattagtagtctttactttactgtttctgggaaagtatattggacttacattacagcatgatctaattctcaggtgagatgaagaagcaacttctgataaggaacagatcggagaacatcaaggtactttcatccatctcagtttacaattgccaatgttctggaacatcttggaaaaaatggagttcgggaggttagaatacaagtctgcaacttcaccgccacaaagaagacagaacacttttgtgttcgtggcgatttaggaagcttagctgtgtactgatagatagatagataggttgaagcggagtggaagatactttggcaatttggagagtgttttttttttttttttt

SEQ ID NO: 170 - DNA, 8376 bp, Cannabis sativa
gtaaaataatttccaacatgtaaaaggtacattaaacacatgtattgtgttcaactgtgaataccaacacacaaaaaagttactggctatgttgactcagactttgctgcaaatataaacactagaagaagctgtacaaaacaatttcttctctttaaaaacttctatcaaatttctgagagcaattttatttaggtgtaatagagtaatatcgttcggtgcagaatgactcgtacaaagactattttatcttgggaactcacacaccaatccaccacatgtgcgcgaggactcatagtttgggccctaagggtcacccagttttttgcgcataagtgatgactcacacactgatccaccacacgcgcattgtcgagttgagctggcaggtgagctgtcacttaattatattttataacgtcaaatgaagcagtaaaaccaaccagtcaatgatccgcttttttctgcgcatgggtgatgactcacagtttgggccctaagagtactatttagtactattttaaaaaatatattacagaatgacaaaattaccctcataagtctatctagaagcatttttaagcgcatgacattgaacaacaaacaacataccagttcagggctctaatgtgactgtctcctctttcacttcctttctccgttccttctttaaaatacaaacaaagacgtctcttattatttatttttcttttctctccgaattttcttcgataaattataaaattaatcaaaataacatatttcattttaataatatgtaatatttgttacttacaaattacaaattacactttttcttttttcttttttaatctaaaacatttgtattgcctttctttcttgctttgtttcctggttcggatccccttagcttacgcattttgcattttgatttcgggatctgaaaattttcccggaaaattgtacatttcaattttcctggaaaaccaaaaactgactccatttcggatccgagagaatggacaacggtgatatagaaagtaattccgacgacaatctccgcgcgccgataggtcggaagtaccgtcctgttgtcgataatgatagcgccgttctcgagatgtcttcaatggatccttctggatcttcttcttcttcttccgctttgcctgtcgttcaccaggctccatttaagtatgttcgttatgcgcactctttcttcattttttcccctcttgatgtatactacgatagaaatgaatgagactttggatttgaatgatgcattatagtgatgttgctgttacatgagtatttctgtttgtttccctagaaatttgattggaaagaaatgagcaatgagatgaatagttacttttgatattgaattaggtggattgcgtatttgagttcgtttaggtttattaatggcaaggtttttgattgtttatcgtgaagtaaagagaaattagtcatgaatttgacaatttgctttgcttgtgatgttgattttggtttaactgagctcattaagctgtttaaagtttgttaatcaaattattaagcaatgcaaaagttaaatagtcttatgtttctgtttctcgaaactgatgctttgaaatactactactacgttaacttgaattttgtaactctctgataaatgagttacaagcttagaatgttccttttttaaattgcttacattattaaaccacgggtttcattttcaatttgcttgttgcattttagaaaatatatgaacatttactatttttatcccatacaaaattcttctctggagaactaactgagcaaggtgtgagaagtggaaaagataaatttggttgaatatgttccaatatgttttgttaattccccatggcaggaaagtaaatgcgacctcgcaggaaaatatcgatgaggttgtagatgaggaagccaatcgacctcaaagggactccaaattggaattgtttggttttgattctcttgttaacattcttggccttaagaggtatgatgttcattttcattattctttccttgttctatgcgaccttgcttcaattattctgtatatgtgtacacatgaaagacatgcatataaataggtatgtactgtactactgttagtgtacaactaatattgtattattgtaacatagtttttgtgctgtttcagtatgacagaggagcaatctgtagagccttccagtcctagagatggtgaaaatatttctattactcagggtcgaccaaaggtatgcatcgcaatgctactacttttttttgcataaattaaccacttcttggtcacaactatggatttaaaagccgatggcaagtctgttgtatggtgcctcctactatttttttttaaggaaaaaaatcaaaataatacctactgctatgctttgtctggctcaataatgtgatagtcatcagtagaatttagaagatgccaattgaaacgttaaaagaaaattagagaaaagaataacaactgaaagaatggaaggatgccagttctcaaattttttcacatactcgtacttaattttcttagttaggtaatataaatatcaatacatgtcaccatggttttcctccgccataagtgaggtttcgcaataaatttgggagggggtcagtctaaagacaagtgacatctttctctttttcaataaaattaaataaataaataaatatcaatacataaacaaattgaaaatctagctcattatgctacatgtatctaggttagaaattttcaaagactagctaatgacaacacctcatcatttgacattctttatggttttctatgtatctgatgtggatatatcttgcagacttctgagctcaagttgggtactttgatgggtgtatttgttccttgcctgcaaaacatattgggaattatctactatatccgattttcttggtaactttcttctttcctgctgtcttttagattcttatgcagctaattgatttcattagcctctgagaagggtgtgttacaaactgaatcagttggtgttattattctattacatgttttgttatcgtgtttttcaagtagtaattctaaagtctccatcacgtagttattgattattcttagtttatgttgattgcaggattgttggtatggccggaatatgggagtctttattggtagtagcattttgtggttcatgtacctttctgactggaatttctttgagtgcaattgcaactaacggtgctatgaaggtataagcaacaattatacaattctccttgttgaatttttatccactttcctagaaaattccataacaggttacatgacaaaattccagtctctttacctacccgacaaagaaacctattatgaaccaataatgcaacacccagtccaactttattccataaccttttcaaatgacttgcatcttcttcaaaaaatcctctatttctttccagccataaaacccagagaatagccactattgctgtctaccaaagcatttgtttgtttttccttcatttcatctgaaacattaaagcttccacactttgtgctggaatacaccaccttaaactcaacaccttcaggagtttgtactgagaaaggttttacattttctttttgtaaccaaaggaattgataatgatggtttgctggtaattactttgattctagggtggggggccgtattatcttattggtcgagcccttggtccagaagttggagttagcattggactatgtttctttctcggaaatgcagttgctggatctctgtgagtttgttttttgttcacaactcctttcttatatatatggctcttgcacatgaggctgatagagtgcccttttttgagttcctattctataatttatgtctgatttaacatactatgattatagtagtaagcttatgatttcatttgcatgtgattttagctatgttttgggtgctgtagaaacttttttgaaagctgtaccagctgctggaatttttagaggtaagggttagcatatgctttttacagcaaaagaactttatttcattacacatttctttatgatttatatatagatcaattatttgatttgcaatttctctttttttttccgttaatgtggctgtttccttggtatgtacattttgatgaaggcaactttgcttttgcactagtttccctgttatgaccatgagtctattgtttcattttatattgttgggcttgttatggaaagagatattttatttcctttttgctgtaatctaatggttctaccttaacattgtatcccctaaatgctgcattctttcaacgttgtcagctttagcatggtaagtctttgacgctgaagatattttatgtgctagtttatgttctgtgtttgtatgccattgaaatctcaacagttggtttgattctataaacgtattttattgttcaaatttgcattcttttacatgttaattttgatttgtttacttcatcaatgcagagactatcacgagagtaaatggcacagtagttccagaaccaatacaaagtccaagttcgcatgacttgcaaatttatgggattgttgtgactattcttctttgcttcattgtgtttggtggtgtgaaaatgatcaaccgtgttgcacctgcttttctcatacctgttctattttcactgttctgcatattcattgggatagctgtggcaaagaaggatcatccttcacgtgagcagtttcttttcttcctattttgatttattatatatgtatggaagtggtttttcggcttatttatgtatgtgcatagaagatataaatctgtgtaacatgtaagtgggggcattgatattaaccaacattgaattgtatgacaatctttgttgacgtgtaaaggaattacagaagaaacggtgtggtatcttcataaagataaacagaattatagcaccaaaagaacaatttgtgctattgaattgtaaaagcattcctttttgaagtattcatctagttttgctctaatatagtttttctttctctcactttgtagtacttctcttttttgtgcccttaaataaatttcagaaatatgtgtgtgtgtgtgtgcgcgcgtatgtattgcattagtcaactcgatgatacgtcaccagatggaaattgatttaaattttcctttaataacattttggaggtactgaatatgtatatatgtgttggatcgttcttgtatgtgctctgttcccttgtttccagaccctcgaggcactctgggaatgtttattgatttagcagaggtcttgtcattttattatttatttattctctatttggtggacagtggaggaattaaaattattttttttttgtgtgcgctgcagctggaataacgggtttgagtctgacatcatttaaagaaaactggggtcccgattatcagaatactaataatgctgggattcctgatcctgatggagatgtgtcgtggaatttcaagtaagccttgacattttttttcccttttcaaattgctgtaacttgctcagatttttattgttatgtgggtttttgaaacaaatatagtgcttattacaccagatagataatcagtgtggatattagttattgaaagttcgtgtttaaagattaaaaaataattcacagataattggagaacattagatcctaaagtcttctaccattacattttcaagttgatgctaagtagaacttttactgttgttgttgttggtgttgctgtcatttgagttggtgaacttcttctaaatagtatttctctaaacataccttagtggcccatttttttatttatctttcttaaattcttcttgtcaaaacttacctttgctcactttctaattgtgcttttcctttaattttcagtgctatggttggtctctttttccctgctgtaacaggaattatggcaggttctaatcgatcagcctcactaaaagacactcagcgttcaattcctattggaacacttgctgcaactctcacaactactgcaatgtatgttgtttctgtcttattatttggtgcacttgcgacaagagagaagcttttgactgacaggtaatggattagttttgttgctttgacttttctttttcttttatatattctttctttcctttgtcttagtaggcttttcagtttcaagattttttcgattgtttcatttgttatttgttcaactttgatttgtctatcttctagtaatcaagtggcaactcttgatctttatcttttattgctgagattgcttacagtaagtggttaggagtgatgtctataaatattgtaatctgtagaaagtatagaaggcgtttacttttgtgctactgtgatcttaatatttctattcaatataagtaaaaacatattgtttagcagtggttagttttttatttctccttttgattttgtttgtatctttcctttccttttttgaggttaattatcatctttcttgctatttttaattattaatcacagtagttttgttcttaatatacatacacacactcgcgcgcgcgcacacacatatattattaggctatagtcactgcttgatgtattagcatatatggataagctaatgagtttaaaatgatcttctggtcattcattaatgtatggttagttattggctgctggcacttgtctgttatgcatgaaatacttattgttatatggtgagttttcaaaaaacattagcatgatttttatttaagaactgaattcttttatgcaggctgcttacagctacagttgcctggcctttcccagccattatttacattggaattattctttcgactttaggtgctgcacttcagagcctaacaggtgccccccgcctgcttgcagcaattgccaatgacgatattttacctgtgcttaattacttcaaagttgtagaagggaaagagccttatattgctactctctttactgcatttctctgcattgggtgtgtcgtaattgggaatctggatctcatcacgccgaccattactatgtttttcttgctgtgctatgctggtgtgaacctatcttgcttccttttggatctgttagatgctcccagctggcgccctcggtggaaatttcaccactggagtctctctcttcttggagcttttctttgtattggtaagcttgcatctccttactgtacttgtacatgttctgacattatatgggattttggtgtaggaataaactaatacaagaacagcagcaattaacttatgttactgtaattaacctgtcattgtagattgtatattctgtatcacaatagattctgatacataatgattggaagtatttatacgttttcattagatgcttttcatgcggtgtcatcactcaggaatattacgttatcatcactttagtttgagtgcatgcttgtgtgtgcgttgatggacactgtctctgtaaactttgattgtcttcagtttatgttacttacctcctgtttctgttttctttgcagttattatgttcttgatatcttggtcattcaccgtagtgtctcttgcccttgctagccttatatattattatgtgagcattaaaggtaaggctggggattggggtgatggtttcaagagtgcttacttccaattagctctccgcagtcttcgatcacttggaggtaagatttttaatcttcttcaccagcatttggttttacctggttacgtgctgttatgcagtgtcgtgttttttaagctatttgttgtatgtcgttaggtttacttgatcactagtagatattcatagtttagctagtggtctatggtggatatttctattaccattgcctgcccattccagtatgttatatgggtatcgttctgttatatttggctatgtagtgatttgccaatgtcttttctgctcttgatgcttaaattatgaaattttatttcagccaaccaagtgcacccaaagaactggtacccaatccctctgatattctgtcgtccatgggggaagctgccagaaaatgttccgtgccatccaaaacttgccgactttgcaaactgcatgaagaaaaagggtagaggaatgtccatttttgtgtctatattagatggagactatcacgaatgtgctgaagatgcaaaagaggccactaagcagctagctacctatattgactacaagcgttgtgaaggtgtagctgagatagttgtagcccctaacatgtcggaaggcttccgtggcattgtccagactatgggccttggaaatctcaagccgaatattgtggtgatgcggtacccagaaatatggcgtcgtgagaacttaactgaaatccctgctactttcgttggaatcat

SEQ ID NO: 171 - DNA, 1494 bp, Cannabis sativa
aaaatcagctaacaggataggatagggggagaactaaacaattcccccagcctgtgttttgttgttcctctctcttgtacaataatatcagaggaaaaaaatatatatttattttagaaaattaatttgtttacgtaataaaacatttttttaaagagttttttattagctgaaaaagaaaagaaaatttgtgatatcgtcacgcgacggtgagattgtaaatgacgagcgaataagaagaagacaaatttttgatagagataggtgggacccagattgtgtcctttgcctgttgctgaaactctcagttaataaataccaaaaaggacaaaagcccaacggtcccgaaaattaagggaagatagctgcctttttatgacaaaaaagtccctcaactatttgcttttttgactttatgccctcacttcttgctttactttcattactaatcatttatattagcttaattaatcactctcttctacccaacaaatttccaaacgccaataatatagtaaattcgtaataagtaagagattaaaatgtcaaatttactatgtaatgaagttttcttatttttctctgtcctactttttcttgttcttattcttattcttctttatgctttttatttacctctgttctagaaagataatgttatatgctttttttttattattattatttttttcaatcacaatatttttttttgacactacaaaaatggataatggcctctgcaacaattatagttagcttacttccttgtacttataactataaacattagttggcattaacttgagaaacatcagtagaagtcaagagaagaaattaatacatataatcaactaatcatgatctatgtaaataaatagatcatacactgattattttgatcatttccttgtacctataaacactgtacaaaatattatcgagtcatgaagagttataaagttgtatttggtttcacaattcattactcatcctcatatgattattgaacagctcacttctcttgcaagacaacaaaagtttggctcctagcaaagaatcaattaaaatattaaaaatctatgagaaaataaaaatattaaaatatatagatatatattatgtaattgtgacccttatgaagtagttagtcgataattaaagcactaatatattaagtttgatttggtgtgtatgagtgggttttacacataaaaaaaaggctaaaaagcattcatatgcagctcatcgtctctccttgatttggtcccatatgggcgactttatttatgaatgaagtgattggcatggtatcttttggtgccttaaagaaactcatatacactatagccacatttacaagccaagagtagttgtctgtcttgcctcatcatcacacaatgccacaaagacatctaccatgtgactagaggtcttggctcatataaatttcagtctcaatgcttcataattgcacaccacaaccgaaaaaaagtc

SEQ ID NO: 172 - DNA, 1269 bp, Cannabis sativa
ataaaaatatatgaacacaaacacgcaaaaatgatgagcaaaattagtaaaatattaatataccttattgagtttaagacgactatccaaaatattccccccagatgagaaaagaaaatcttcagccattttatatagcaaatgttcataacctctttcatccgcaactaaaaattctctttctccaaaatccacataagtagatatgggttcgacttctgcatttaaaaaaaatcatgaattttcccattttctcttaattcattattgacttcattaaaattaaaactgaaaaactgacctgccatctcaaagtcatgtaagataaaatcaatagcaagctcaatcggagttttgggcgttctggacgaaagaaaaggccaaatcaaattggaaagataaagaaaaagtaagagaatttttaaaaaaaaaaagtaaatgataaaataaatgaaaatatatacacatacgaaggcggttcggttgcattggagaggtcgctaccacaaaattccgcctcctgtattctaagctggcgaatagctgagtcgaccgcttttttgtacgagtcggcagcgagtccactcggaaaaatcttcccgctgtaacaataaataatatatttaaatcgattaattaactaatagaatataaattaccaaagattcagaagaaccattaatacgaaaaattccaaaaatgcatggtaccaaaaatcattaaaacctacatttaatgcctgcctcatcacatgagcaatttactcagctggaaccagattaattaatgaaataagaagaagaaaaggaaaaacaaagtgaccggaaaaattcgcatacggacctccgatcgtagatgttataacgagcattactgtaatcggaaaagcaagttctgagaccagattcgttagcgagttcccaaactggatttgattctttaccaccgactccagcgatccaacccgctccaagctctaccgacactccaccgaaatcctctttccgtattctcccgccgattcggtccgacgcttctagtatcaatatatcctctattccgttctcggccaacaacttggcggccgataaacctttcatcaatatacgtaaatcgatctcaggtcaaattcaaaacaagaaaaatttgaaattttgaggttaagaataaaaaaatctcaccggagacaccagcgccgatgatgattacggaggagcgagaaggtgaatccatgaatggaggaaagaagagagagaaagtagagagaga

SEQ ID NO: 173 - DNA, 1479 bp, Cannabis sativa
attaattaaaattggtcacaggtgtttttcacttccgagggaaaaggatggggtttacaaacactggaggacttgccagaaggcacgtttgtgtgtgagtatgttggagaaatactgacttgcacagagttatacaagaggaacatgcatgacaaaagtagaaaagacacatatcttgctctgcttgatgccgactgggatgccagtggagcattgaaaaatgaaaaagctctgtgtttggacgcaacacattatggaaatattgctaggtttattaaccacaggtagttctttcatgaagtttcttcctgttattttaatcatgcaattgcctgtgatgtatagttgctaggtttactatccaagtcttgcgcttttaattatccattaatgttttctatttctttttgtatctgaatattgctagatgttttgatgcaaacttgattgagatcccggttgaagtggagacccctgaccatcgctactaccgtgtatgtaatatcctattatgccttctgttgggactcagttcattagtctgttttattcactatatgaaatgatttgttctgttgggcagctggctttcttcactgcgagaaatgttaatgccatggaagagctaacttgggtatgtaaatgtcatttctgtttgctctagttatttggtgcttaaaaaaatacataatttcactatcttttcttcttgagattgcacttaattagaataaagtacactaattcgtccatgtttaaccctgtccatttaactgcaggattatgggattgactttgatgacctcgatcatcctattaagccattcgagtgtcgatgtagcagtaaattctgtagaaacatgaaacgtccaatcagtaagtatcattttcatgctcacttcaaactcctattatgcaactcgaaattgaaaaacacgcactttctcaatttgctgacattttcttatgcttttatagtttttagttatcattattgtgatttttgagatatcttctgcctttaccaactcaattgctgtatttaagagacaagtatttccaaattttggataccgtggaagttgttgtagttaatatgccaattttcaaataacgaacttaaatgtcgtttaccaattatatttccaatataccaattgggaatataattggtaaatgacatttaggctatgtcttgttggaaaggagagttggatgaaccgataaataaagaaggatagagaatatgatggatggagaggatagtagtgttctttgtttggtattctgggtggagttgaaaggacggagagaaaaataattgttaaaattaacatgtgatcatttatatataattacatattattttttaaaaggataaatttgacaaatatgttttgtctttattttttgggttcccccatttgaaaggattttgtgtgtttggagggagaagtttccctccatctctcctctccc

SEQ ID NO: 174 - DNA, 4701 bp, Cannabis sativa
aaaaaaaaaaaaaaaaccaatactaataaatcaaattttcctataaaaaacctaaataaatattataattttaaataaaaattaggaatacactactactactactacctgtgttgtatagcccatagggcaccatatcatttgcacaatttattgttatattcttgaagctgttggagttgaaggaattcgcagtctcctgtgtcgctttatactcgtagtagaaggcaggagggaggcttgtgcaaagcaaagtgaagaaacagggttttggagagagagagaatgacggacaaagtgcgaatagaagaagttcagtccaccaccaagaagcagcgtatagccactcatacccacatcaaaggcctcggtcttgaggttcttctctctgtacatttatacacttgccatggaagttgttattttcatatgatcttcccctcgttgctgtattcttagtgttttttttttctttcaagaaagatatttagggtatagggttttagagtttgtttggagtatttttttttttttttgtggtttctcattgttgtaaactttatcagttacagggttgtagagtgatgcttttgatgttgttgaagaaaaaaagatggtgttagttctgtgtttgttgtttaaggtgtattgatattgtaagatgattatattagttttcaattttccgtatagaataatttctttgacttgaaaacgttaaaaaaatttatttggtgccatttcacaattgattgcattagaaaatgttttttaaatttcaaaatctttggtcaagctgatcttctgcttaaacagaatggtatctgaaatgatttctttttctgttgtacaacggattccaaacgaagcccctgatagtaaatgtggctattgttggtgtttgtttatcagggtaatggaaatgcaattccttgggctgctggttttgtgggtcagagagatgcgcgggaagcatccggtcttgttgtcgatatgatacgtcagaaaaagatggcagggcgggctcttctaatggctggaccccctggtactggtaagactgcactggctcttggtatatcccaggagcttgggagcaaggtaataaattgatagtttgtgattcataccttatttgaattatttttttctactgattgaaattagttgattttaaatggtcagtgatttgtttcaattttaggttccattctgcccaatggttgggtcagaagtatactcatcagaagtaaagaaaactgaggttttaatggaaaattttcgaagagctattggtctacgtataaaggagaataaagaagtttatgaaggagaggcaagtattggctgtcttgtgcttatttgatttcgtctttggcttgttttatggttactgatgtattagtagtctcatttcaggtaacagaactctcaccagaagaaactgagagtgtgacaggtggctatggtaagagcattagccatgtaattattggactaaaaactgttaaaggaaccaagcaactaaaattggaccctactatttatgatgcactgatcaaggaaaaggtaatgttttttctcccaagcatatttagccaggaagtttattttgattctgtttattgagatcttcctgtacaatttgcaggtagctgttggtgatgttatatacattgaagcaaatagtggagcggtaaaacgggttggtagatgtgatgcttttgctacagaatttgaccttgaagcagaagagtatgttccacttcctaaaggagaggttcacaaaaagaaggaaatagtccaggtttgttttttgtggactgaacttttggacatgtttccttatgtcatttggaagatgctagtcttaaactttgggcacttcctgtttggtgctgattttggatattgtgactccttgagtttgttcagaaagcttaatagttgcatctgcacatttgcttgtttcagattttatcaaaaagaaagttatgtgaaaaatgtaaaaggcttttaccaatttactcagtcatgtactctagaccctaaaacttattttttcactaatgaggaatttgtttgaatcccaccctgactaagggtgggattgattggtggtgggtggtttataaattgctaggattccacatcaaccaagtatggggtaccctcctcccacagctaatattttagaagtcttcctaagtggttataatagaattaagtagaaattttctatattatcatcagaagacaaacataagaactggaaacacaaaaagaaaatttgccacctcgacaaataaattcaaactcctttaatggatattatgaatttatgtattttggcattgaactgctctagggtttttcttaagctctaaattcactctttaaatgaagattacgataaggaatatgctatccaaacaataattatttgatttgcctctccttgttgaaaaatcatataaaagtgtcatcttgaaaatctgtgtgtgaaaccttaaattttcactaacctacaatcagtataatgagatttttgtgatcagcctaatgtcaaatgagtcttggaacctgaccattgactttatttggtttggaactttaccatcacaactctctggaaatacttctctttgaggttctagaatggtttagcataaagagttctcatatgtttatcatagttctgggtctttaactgctcctttttgtctcatattttcttacttttttaaaagatatatttgtttcctaccctcttatgtatttttccatttacaggatgttaccctacatgatcttgatgctgcaaatgcacgaccacaaggtgggcaagatatattatcattgatgggtcagatgatgaagcctaggaaaactgaaatcactgacaaattacgacaagaaataaataaggtatgaatcaagagggtgttaagtgttgacttcaatgccttatttcttataggtaccaaaagtttaaagctagtaggtaggatgggaatgctttatttgtggagaagtaccagaaacctcaattttaaaatattgttgaatttgatctaattcatcatccaatattcttgaagggcccttatgatttatttgtgaacttattcaatgacaactttttcccattttaatttattattttcatggcaactttatatatctaatggtcagatacttcctcgcaataacaattttaaccacatctatttgtgagtgaccttgtaccttttttcacacttattcaatgacatggtttatggtaaccttatctatttttttccttgttgagagtgggaatgtgggtagtgctgcagcggggagtgggggaaaggaggttctgatttagatctactgagaaatattgttacaactgctgcagctcaagaagagtttatgaagccaatgctctagttttttagttttccttttgcaatttgagctttgaactttgtctttgtcctaatgaattacattgcgtaatagtatagtgagtatttgcatttatattttaatgatcctcccaatctggcaggttgttaaccgatatattgatgaaggtgtagcagagcttgtccctggagttctgttcattgatgaggtactgttacttttaactttttgtttgttgttattgccttatgtatatttgaaatttatacatgcatccttaatcaaaattaacaggtccacatgttggatatggagtgtttttcttacttaaatcgtgccttggagagctcattatctcccattgttatatttgctacaaacagagggatttgcaacgtgaggtacgtgcactaaaatataatacttctagtgatcttcaactcttaaattgatattacatgtgttaaatactgtgttgaaactattggattgaccctctatttttataattattgaagcagtatgcttttaactttataaactaggttttttttttgatcggctataacttgggctacagtcattgattgatattattactcttaattgagtaaaaaacgtaaaaaactatgcatggtagtatagtgtagacacttggtagttggtaatttgtgcatattgactataagttgaatactttattttaatgcaaggacatcttctacgattggaacttttgtttattaatgacttggattgttattttgaaaacagtaatttttattctcgataatctaagattatgtatattaaatgacgtagtaatgttcacaacttaactttatatatagcatatgtataaatatttatatttagtgtcatcctgtagattaactctgttcttaaagaattaaagagtataattttgttatgcagaggtacagatatggctagtcctcatggaatacctgttgatttgttggataggctagtgattatccggacacaaacttatggtcctgatgagatgattaaggtataagctaactttttgtgctttttctgtctactccgcttctccccacccaaattaatgaaaggaaaagatgcaaatattttgttttccacttctgagaacgttacgaccagacactgataaatatcccgatgattgcttggactagattttagcgattcgtgcacaagtagaggaactggttattgatgaggagagtttggcttaccttggggagattggacagagaacttctttaaggtcctggctta

SEQ ID NO: 175 - DNA, 7122 bp, Cannabis sativa
ccggcgaccgccaccactactttccacgtgtacacatctcttgcttaagaggttgagaaaaaaaaaagagaaattaaattataaagaaagaaagaaaagaaaaagaaaagtgcattttgtggggaatgtttcttttggaagataataattattaatatatatatatataaaaatgtaaaatatcagaattaatagagagagtgtagtttgaattcaacacaacattgtttgtggagaaagcaaaggcatatatacatgatatgatgagatttggttttatttatatatattatttagttaatatcttcactcaactaataactataccctcttctcttcttaatttcgttatcaaagtccactctttcatttcatatatatatatatatcatatataatatatgcatgtatgtatgttatggtcacaactcacaacagctagctagctcttcaaacctggcttaattattatctaagccgttattaatataattacatattatatatcaccgactttataatagaatcataaataataacactgtatatattgtgagtactgtttaatttcactgttgaaacacagtgttttaatttgtgtggatgtgaaccacaccacaccattgacctttttattttatttaagagaggttcctacttctgcctacttcatattattctcaattaattcaatttagaatcgtgattttttagaattctaataataaaatataaatatttttgtaaattgaagcaataattgtacatattcaaatagaaaaataacacatgattttcattttttttgtggtttgttatggggaagttttatggaatggttggagttaatagtgagtttattgtgagtcaaaagtgaaatgtaggattggtaaactacctatatatatgtgtgtttaaattgacatttaatattataaatggctgttgaattttgtctctacatatttgattttcttaagtaaaaaaattttgaaaaatttttaaaaatacttttttttatgttttatttataattttacggtctaaatttttaattataaaaatactcttgtaaaattttaaaactataaaaatatataaaaatatactttgttcaacaaaaagtaaaaaaactaaaaaataaggtaaaatcaacttcacaacaaatataaatcaactataaaataaacaaaaaaaatctcataacaatataactataatacaactataataaactataaaatgactaaaaaaaacagttcattattttaactgaatatgtatttttgtaaataaaaaaattcaaaaagaaaaaaataattttttttttgtattgatatatttttgtaatttttttaaatttttggtttattatataaatttttttaaaatttagttttttgggttaagatcttgtcaaaagaaaaaaaaaatgccccataaggtcggtcaattaggactattaagttatggtcattcaaactctttttttttttttgaacaaaaataaatatataaaaaaaaaaattacagactagttagacctgttagaaaaagtgatactctgttttgttgatcaatattgaccatttccatgaaattatgaatacatttgattagataacaaacttttttaataaggtagtcaatcttttactatttattcctctttttatttattttattttctaaattaatgcccccttctctatgaatttcattacataaacaacaaacaaagcaaaaaataattattcttatggatatttatagcactaaaatgggtttaatctttattaaatgtttcacaaaaatctttagttgtagatcacaacgatcgatgtagtgttttagtgtatattttataagaatattactttctttaattaagtttatcactttctttagacacttttaattctttttgtttttgaaaaaaaaaacatgactttttgaaatattcagtgccaatccaaaacaaaaatagtatgagaaaggacacaatgggatagtataagaatatttattattgtttgttgttttgtaggaccaaaagggtaactttcccaaaggtatggggcattattggtgtgacaatgaaaaaaagaggaggaaataataaatagagctttttattataaaaaatattctacataaagattttaatttatttttatttagttgcaaatttaaataacttctaaattagaaaataataaatccattttagagtaattgatgaaaattttacattttctattgtagtgtcattttacaaaataatttaattacaaaaagagttattatattatattagcattatatggtgcacaatactacatgtatagtgacttcaaaaatttaagttactataattttttttaatataattaagctcaaaaaatttcttacggaagatataaatataattaataatactacaactattagaaaaaaaaatcataacataattcttacatattctacttttaaaataaatgaaacaatattattagactcctagtactactaaggtgtcattttgtgaaactcaattgatacttataacaatatgacacgttgagtgctctttttaatatttttaatttatatatcactaatattaattaggagaattttcaataattttaagttttatttacaattttactatttaaatttgtatttacaaaaatgtatttataaaattataaaaatataaaaatatattttttctagtaaaaagtaaaaaaataactaaaaaacaacaaaaaaatcaatcttataaccattactataaattaaatataaataaattataaaacaattaaaaaataataaaaatcaatctcaccatataattataaataaaatataaaaaaaaaacaatttattatttttactaaaaatatatttttataaataaaaatctttaaaaaattaaaaaaaaatcatattaacttatttttttaataatttatttaaaaattttagtttattatataaattcttctttaaattaaatcaatctaaatataaccaaacaacccttaaatgttattcctctaataaatattttaggaaagtgttatggataaagttgggtgagtggtacattgagttaggcaaagaaaaaaaggaaagaagatgaagaagaagaagtaagtaagccgagacctaagctaaagcttcattcaccacactcaactcaacagctcacctcaccatctgttttgtacatgtgtatatctatatatctatatgtgtatatacacatacacatattttagctttggtttccatatttttcttaaacttgtttgatagtgcttcatttccaagcaatcaatgacgaaagaaagaaacaaatcaatatatattttaaaaagtaattatttttatttttaaaattttaatttttatttaaaacccaaaaaagaaaagaagagaaagaaaagaatccatagctgtcgtttctgtatatttggggtagcttacgaagccgtgtgggtagtgtcatgggtgggtttggctcatgatctcctgccccattctccccaaacccgtttccatttttctcattttaagtattgggttttcttaaagtttgtatctttaatggtgggtatcgcctaagtttttttctgttcaagacgatttgaaggattcattaagcttttttctttcgtgatctgattgcacagacctgtttcagataaaggatattgatgaaatttgccttctattatctcagatttttctgattattcatgttggttgtcaattattgaggttagtctctttctctttcttttttcctttttggggtttctgcaaaaatttattttttcttttcttttaattggagggtgaaagtactgagctttatttttggaaagatgggttttgcttggttttgtttttgaaggaatcttttacttggaacagagtaaaagtttgattcttggcttaattttgagaataaggagaagaattaaggagttgtaagaatctagaggaaaagattgttgttttgttgaggttcaataaattagctttgtgtatgaactgaatttgagaggttttttaaggaagaggattaagtatatgagagggtggtcataagtgaacaaagtgaggaaaaggagagagagaagtctaagggaaaaaggcataaaagtgggaattttactatttaaaaaaagaggggagaagaaagtgtagagaataaccttacagggagaagatcataacccagaagtagaattggcaagtaaggattgattctaaagtcttaacagcacatcttttatatactctgtacattcctcttaactttttcttagttttaactcattgtataactgggttgcgttgctcatagtttattaagctttgaacaagtgtatgttgtaaaacttatgttgttgtaattatttttcttgtgatttaatcttaaatgggtgttgattgattttggtgatttgtagggaaaatggcaactttggttgatccccctaatggagttaggcaacaaggaaagcattactactcaatgtggcaaactttgtttgagattgacaccaagtatgttcctatcaaaccaatagggagaggtgcctatggcgtggtgtgctcgtcgatcaatagggaaacgaacgagaaagttgcaattaagaagatcaacaacgtgtttgagaaccgcgtagatgccctgaggactctgagggagttgaagcttcttaggcatattcgacatgagaatgtgattgctttaaaggatgttatgatgcctattcatagagcaactttcaaagatgtttatctggtttatgagctcatggatactgacctccatcaaattattaagtcctcacaaccgctttctagtgatcactgcaaatactttttatttcaggtacaagattgaataccaagtttatactatatatatgcctgtgtgttttacagttcttttaagtactgtttccagtggattgatgcaattttcagtgccattacttatgaatgtttcactgttgtgcagttgcttcgtgggctcaagtatcttcactctgcaaacattcttcaccgagacttgaagcccgggaacctccttgtcaatgctaattgtgacctaaagatatgcgattttggtctagcgagaaccagtagaggaaatggccaattcatgacagaatatgttgtgactcgctggtatcgtgcacccgagctacttctctgttgtgacaactatggaacatccattgatgtctggtctgtaggatgcatatttgctgaaatccttggtagaaaaccaatctttcccggaactgaatgcctcaaccagcttaaactaatcatcaatgttcttggcagccagcgtgaaacagatatcgagtttattgataatccaaaggccagaaagttcataaaatccctgccttattctagggggacacatttttccaggctatatccccatgctgatccattagcaatagatttgctagagagaatgcttgtgtttgatccaacaaagaggatcactgttacagaagcacttcaacacccttacatgtcaggactatacgattcgagacgaaaccctcctgcccaggtaccaatcagccttgatatagatgagaatttgatggaaccaatgataagggaaatgatgtggagtgaaatgcttcattaccatcctgaagctgcttctgtcaatagtatcaatatatgagtaaaaaaaatgcttctctttcattaaaaaaaaaaaaaaccttttctttttcttgacttaaattgagagcttttggaaccagcagtaccctagtactatctatctactatattatttttctatgaagaactactactgatgctacttgttcagcatttgaatttttaacaccatgattctacattcaaagatttggtttttaacaactactttggtagtttgagatctttgcattgcatagcaaccatggttatcttgtaaggtgtaaatataattatgctagttacttataattatgagactatatctatatatgactttgttattctactctgttatgtagttttattttgaggctttattatttcccttgaagaagaaccaaaggagtgtaataaatttggttttttttgttcttttgtttgttttgtttttattgttgttgttattttggtacgataaatgatatgagtatctatccacaaattaaacccattaattaattaatttttatacatagtgcttgacaatgagtgagttctaatttaagtaaatgtgattggtttaaaaaatatttgggtgtaattattaatttgtgggtgctcatattttgactcttagtatttgtaaattgtaatgatgtgtggatttttctttggtttgggtttgagaactattgtaatgaaacttcaaaattggatagtgatattgtaaaacatgcttttatgatattgagtaaaatttatattacacccttgagagtatcgtttccatatatttttttatcaatatcacaagacatttttagtctaatatttgtttacgattatatatattgtaattatttataaattttaaataatttataatactaaaaataaatattcgatattataaaatattcaaaaaaaaaaatttaaaatttacagttagttcttaaaaattataacacacgttatcattaaaaaaattaaatgaaaattttttaggtttattataaatttttaatttatatattacataatattataagaaacttgattaattttgacaagccccactgaatggtagctgaggtgtaccacactggataagaaggaacaaatataatggataataaagatcccatgtgaatattcttcaatctctctctctctctcatagtacttattttgtactcttatcataaaaagaacataaaaagatgtccttttcttttccatgttaataatttgcaaattgttgtcttcaatcctcattgattaggccttgttatccatggacaacaacatggcatatgttgactgggccttgggtgggctaaaattgggcctagataccatacccactaacttttctttctctaaaagaagaaattattt

SEQ ID NO: 176 - DNA, 5224 bp, Cannabis sativa
ttaagagagaaattacccttttggtatttcaggagcaagaaaccaaagtcataaagaagagaatgaaaaacagaacaagaataacaagagcaatatgcagaggacctgttgctgtaaagcatctattgagctcttcatcatgttatcacccaagtaatgacagggactcacttcttaacaaaaaaccagccactacttgacttcattcaaaaataggtttttatgttataacaatatcattacacatttggagttctggttttttggttgttgggggaatttttgtctactggttctctcttttctgttttctgttatttttttattttgtatgggtcttggtcatgtagccaggaatactcttgagtcatttcctttgtctatattaggtagaaaaacaaaagatatcagatttataaatattgtatttgtctttgtacatgtaatggggattgacttttatatttacagtacaatggctcttactatattagtcacactaataattctaaaacaaaggaacttttggtcaatcatcaacaatttatgcaatgagaattaaagaaattctctcttatacataaaatgcacaatgttaaaaactacatatactagttatatatgataatcagattagatcttgtctgtacctaagagaaaccataaaaaaatgtacttgagaagaaaatcacggatgtagcaagcgattcatatttatataactaccacttcaaatttcacaaaccattacaaacttactctagaaaatcaaaagttcaagacccttatcactatgatagagttcaactaccaaaccattaagttcgacaaatacattcatagaaagtaaactacctacattaatacttattacctcctagtcagatgggaaggttgaagaaatgaacttctcgtcctccaagaaaatctgcaaattcttagatttcattaagaaagccactgcctcttcattgaaatccagcagaaatgccaacttgagcagctcagacagtgtatctatatgttccccatgctcccacaacacaccctctgatattacttgagagaaatatgtagcgcgctcaatgagatttccaggccctttagactcgtcaatcttttgagtgaagattttagagctatctttgtcccatctcaccattcgactggctttcacattcaaagttttcccagaagaaagagacagattatagcttacattgatgggttcaactgtctcaaaaacagttgcattgagaaggccttccacagctttatgtctttctttttcatccattttgagagaaggatgagctagaaacccaagtatgagctttatcaaacctttcccaatcaaagcatccttcgaaaccacctgctcattttcagcatcttttgttatagaaacctcttctttcttaacagattcagagattgtgcgaacaccgatcttttggaaaacttcgagcaacttagtgcgaggaagaacaggcatgcttggctgaggataccaaacgaaaatgggttgagcagagcattgttcaaaaagatccttcagctgaagatcatcagctacaaaaacatcatgcttgtttagcagcacaatgtcattgcagcctgaattggcagtaggaactttctccagctcatcaagaaaggatttttcttctttcgatgatgaatgtctaatgatgtaactccaaaatttccagcactgatcatgtgacaatgagtgtcccgagttctcccaaaccttccaaagcttgcagtagtcctcaatactaggactgtttttgacttggaaagcacttgagaagaagaaaagattgtgatcatagtatttgtccaggatggtcagctgtaagctgaatagctcactcttgtcagaaattacacaatcttctggactaacccaaactcccttatgactaccatttgggatccatatctttctgtcctcacttttgggctcccatttgaatttactcaagtaatcatagatccttacaatttttgacaactcagtatgggaaccaagttggctggcaattaactgacatccattctccacttcaacaatcactcctatggccttgagctcttctttataggaagcgatttccgaaccataaaacttctcatcaataaacggtccatctgtgcagtttaggcattcaccccatttggaatcaaacaagatgcacttgttaggaggcctataaccatcatttgtctttaaccaatctcgagaaagttcttttgagaaattctcaggaaaagtgtaatctttcttctgcatcaaaagacggatacacttcagcaatgaaagtgcatttgaaggagtgataaggttgatatcatgaaagcgaagaccaccagctacgaagttgaccccatccttgaaatctaacactactcccatactcttcagctctttcttatattcatggatgcctttgccatagccattatcactatcatcaatgagaggaagacgcgaaataggaaagatggactcccattcagaaccaaatagaatgcaatcttttggagacctgtaataatcacaatggcatgtcctcaaccacttgacctcacggatacaagttttgagatcagcaggaaacttatgagtactttcttgtagcttcctatagcatgagagaagggacaacacaatctgtttggttatggatctatttgaagctcgctctttgaaaaagttagcaaatactttagtagctccttcaaagtccaccaccactccaattagttttaactcctctttataattgtacaggctcttctcataaaaatttgggtccatcactggtataccatcgacaacctgaagaaggcaaccccattcggggtcatataggatgcattcaccagatgacttgtaaccagcttttgtcttcaaacattttgtaccttgtaatgctccaacaatctttcgaactgagcgttgagatacagagcgcatgcattgcagtatcaacagtagagaatcagaggaaaggtaattcaagtgtgaagatgacttgaggtagtcaactacaagctggtgatttccactgaaagcaaccacaacacccagcaatccaagttctgttttaaaaatgcgaatttcttcaccatagtattgctcatcaataaaaggaatgtcactgattttcagtgcagtattccagtcattgtcaaacagaacagattcacatggagacctgtcaccattagatgtgcgtaaccatctctttcccttgatgctgttgataaattcctctggagaaagacatttggacctcaaaaaccttatgaatttgagaatcgaaatgacattgcttctagtcaatgtgccataatccgccagggacatgagatgttcaccaatgaatttacaagcttcttcatactcagacatgacaccaactgttttcaatgcttccttatactcctttattttattcccatagtagttaacatcaaccaaaggaatgtcaacaagcacagattcattctgcataatacttccccatgaatgcgatgagttgctaagaaagaaagattgaggaggtggtctggagccaggagatccattcagggtgattctcagccagcttccttccattatgctcgacaagaaattgttggggaagtgggaccttttacttctccagtaatctatccaatccaacagaaggaaagcattttgctttgttagtgttccagacacagcagggatccgagcattgggtggaggtatatgaggaacatcactggcatcagcatgatctttaaggaattgaaggagcacattttcaggtgtactcagtttacagtgactgccaggactcaaatagtcactacttaactcaacatagtcttctcgtctccataagcttgaaacaaacaaccctgcccatttgcttccattggcagggacaagaactccacttctttgagtaataacatggccgtagctgtcaacaactggcatactgctacacaaatcaataacttgctgcttcgagagataatcctttgacttggagtgatacaagaagtgggcataggatataacaagtctcccctccttaaaatgcgacttgcataggagatcggaataactgttaacgtcaactgcaccaacctttacattgccttgaagccatttcaacagtgtcactgctctggagcttgaccgtatagcatccattgttatttttggaaggaaaaagcaattgcttacagacccgaactccttgttccactcaatcaaccaagagtcttgattaggaagaagtgataggtaaaccttacttttaccatcccaggttacagattcactgatgctgaacatagagatattcccactatgatcttcatactttataaggggtatattattgatgtttgtgcactgaaatttggtactccaattatcagcaataaacattagaagctccaaataaacagggtcagagactctatcgacaagactagaaccctcgatgcattttgcataccattcattatcaacttgttgaacttccaaaaaattgagaatgtcatcaaattcttcccggtcaaatgaagaactcaatatgtatttcccatgagaagagagcttatgcaagctcaccccttgttgtcgagccttgtccaaaatactccagaaagcaggcattagccttccaacatcacatggtttgtggaaaaacttctgcttcaccaccatttcacttgggacaatctcctcttcaagtagctttgctttaatggcatccctcaccacattgagctcttggtagttagaagccttaacaggtaaaaatctgaacttatcaggcaaattccacacaggtgcatcttcactagtcttcaccatagacttaaatgcgtctatgaatgcaataggcacacattcaagaattcctttgttccaaatgttgtccaaaagaattgtctcccttgaggatgctaagagaaaatcagcctggataatgaacggaaagttggttaccatttctgtaggaaggaaagagtaaacaccaggcgagtgtgttccccttcgaagacgttcaccaaatgggaatgccagcgtgatagaccactcctccatctctgctctcttctcaactctgtacttgggttgaatagcaaacttctgcttccacatatagaacatgcattccttttcagttccattctcttctgcaga

SEQ ID NO: 177 - DNA, 5153 bp, Cannabis sativa
tttgtttgtttcagtatgttttcttcccaagagatgaaaagttcagatttatctgagaggaggccagtttggaaaggtcgtagaaatgagaatggtttagagaatttcagagttgaggttccaattaggagtgccccaactagtcctttctcaagtcctgcacttagtccccaaagaccaagttttgatatgacaaaatactaccgttcaatgattcctaaaccaaatcaagtttggtcagcaccagagatgccattcacagatatgatgacaggtcctcctcctgcatactatgatggttctccatatggttctccaacaaatagtccaccaggaagaagtataagccaaatgtgtaaaagcccaaatggatcttcatcccctttattccaaggaagattgtcctttgacaccatttcattacgtagggaaactattgctcctcctgaggttcatcgtttacctcttcctcctgtagctgcaacccctactcctccaccctcttcttcccatcatgttccacaagtcaattctaaacaagaacctgttttgatgcaatgtcaatggcaaaagggaaagatcattggtcgtggaacatttggaagtgtttatgttgctagcaatcggtatgtatataaatatatatatatatatttatgatcttccttgatatatgttgtgatagtggcatgatgaattgatgatgatgatgatgactcagttatttttctcatgtgagtagtgaaactggagcattatgtgccatgaaagaagttgaactatttcctgatgatccaaaatctgcagagtctataaagcagttggagcaggtaattttccaaatctgaataatatctctttagtttgtatcattatgtagtttacattattttcttactctatttttttttttttaggaaatcaaagtactcagtcagctaaagcatcaaaatattgtccagtattatggtagtgaaacagtaagtaaatatcacaatttcatgtttagttatcacaatttcatgccaagaacaaattatgatataacttttgaaattgcaggttaaagatcgattttatatatatttggagtatgttcatcctggttcaataaataagtatgtaagagaacattgtggagccattacagagtctgttgttcgcaatttcactaggcatattctctctggattagcttacttacatagcaaaaagaccattcacaggtaagaccacatgattgatctgattaactgattttatcttggattactctcaactttttaatcactctttaatatatgtaatagggacattaagggggctaacttgctggttgactcatctggtgttgttaagcttgctgattttggaatggctaaacatgtgagtaatgattgctgttaacattatatattatcatattaatgaatcagcttattaaccttgcttaattttcttgcacagcttaatggacatgtagtggatctttctatgaaaggaagtccatattggatggctccagaggtatcattttattgctttggcatttcttttaggctcttcttttctcttttgattctgtgatgacatgaaattacttcctttcttgcagctcatgcatgcagtgatgcaaaaagataacaacgccgatcttgctttcgctattgacatttggagtttgggttgcaccataatcgaaatgctcactggaaaacctccatggagtgaatatgaaggagtaagtgaataaagcactcacaataatactcatggatttattcacttgtgttaaccatgccacccttttatgcaggctgcagcaatgtttaaagttttgaaagattccccacctatacccgaaacactatcatcagagggcaaggatttcttgcaatgctgctttaggagaaatcctgcagatagaccaactgcagccatgttactcgaacatcgatttttaaagaattcacagcagttagatgtctccccttgcaaacaagcatttaatgggattaacatagcggtaagagggtgaaaaattctaaccatgcccttgtgtttgcttaataaatttttagttgggtatatcatagtttctttttctttttctccttattgtgtaaaacaggataaaactactcatagtccaacaaaaacaacaactgaagacaaacatggtcaatcaacatattctctaagcactaataacggagaaaaatttgcctcagagaggtaagagtgtgcaatgatttactacacatggctccaacctcatctttcaagactacttcttcatcagtttcattgacatacatgacttccagctccagctttgtcttcacaagatattgttttgctccagtgagactggacaccaaactcgttgttgggatacttccaagctgaccgtggcgcccaagcacagccgttcacctcgctctaccctcgaggctcttccaagcttatctcctccacagtcacctcgcacagcagcctattggcccttgcatcaagcagcagcagcagcagaagctaagctgaaaagagtggcgttttcagttgacatgtagagaggaaattcctacttcatgtaattttgttttggtatatagtttggtcacaaatttgagttatgtaaactctgctgaacacaaaagaaaatatcatgaagttgtgtgtaatttagaaatcagttttttttttttttggttgctcacttatctagaaattccaatttttggttttgttttttgatcatatttttcaccaacatgtataataaaatttgagtcaaaagtggatatgtaggtattgttagtaaattccatgttttttttttcttaatttatatcattcaactttctttcatttttgcacgatgccatcacaagtagtgaagaagacacctatgttattatatataaatatatatttaattatctatatatttttttccattactattgttaactattttaatactcgttttgccaactaaattaaaaaattaagattttccattaataaatttatagcttaggaggttgtctttattctccaggtttattgaacataagtgcaacttggttagggttgcactttattattgtgattcaatttttgctactgcacttagtcttgtctctaagacatagttatgagtattttaattttgtctacatgattttgggtgttttagtcttctgtgtgacattattttgttttgttttattgttagttcttctttcttctttcatggatcgtcatcaaatcgctgttagtggttgagagtagcaagttctctgcgacggaaaagattattagtagtgcagttatgtaccttgcacagcatttaagggctcaagctacgagattgaacgaacatgctacaacagtttctactattgtgtcttttaagtggtagatgacactaaatataaatgtttttaaagttaattgtgatgttccaaactttttcatatgatttttttttgtgtttttttttgtgttttttatcaaacgatctagaaatcaaacagctcattatttaacttgtttttctaatttttattttaatcgtgtctctaacaaagaaaatatttcaattagattttagactattatttttattttaactattgctattaataaaattgcataattgattaaaaaaaaagtgtgttttaaatttggcaatacggtgcgttttgcaatttataaaaaaaatacgaccacagtgggagtcgaacccacgaccttctgatccgaagtcagacgcgctaatccactgcgctatgcggtcttgtgtgtgtattgcatattctttattatatatacataattttaaatacaaacaaataaaaccaaattaagaataattatacttctaaaaaccttgttttgttaattaaataaaccacatggcgttattaaaaacaagaacctaataacctaacgataaaccgacatgtgaggaaagcgacacaacattaaacacaacacagaaaaaaaaaaaaaaaacaaaaggataacgaaaaaaatggctacgtgtctcgagaatatccttaaattaaactaatgaacctactaaaaagctcatcatgttagattaattaaagcaagtgtttaattaggtagttaaacatcgtcatggcaataccaacacatcacacacattaaaaaaaatgtgatctgaatattcagtttgcctaaaactaccaaaaaatacatgtcctttactccatttttgtaattgtatgcaagtgcttttccacctcagaacgcaataatatatatttatatattttaattaattaaacagataaatggcctcatcattttttttcttcttcattttgtgtagtgatggggtttttatcaactttgtactttgtagttgtacattgcatattttgatatatagtagtggtccaaccgtccaagcaatttttcctttaagtgcctttcttctaaatatatttgacagttggtgaatgatcatttggaatcgaaccaacggttgtgattatagccaatcaaactatactattaccaattcctcccttagaaaaaaaggaaatatgacatgcttaaatgtaaagtgaggaaactattttccaccttaactcaattaagtggtaagaagatctcagttcaaattatgtgtcccatttgccaaaaaagtgaggaaactattttccatgcgggcagaggcttttggctagtattaggtcaattattgctgctaattttagcagctagtttgattaaattttgtaaaggttcagtaagggcaagtgtggggaggaggttatgttgtgctaaggattatggaaggctcgaaatgagttggtttgaaaccaaaagtatactacggtagatggtgttcttatctcatctatgagttgtcttgtgcaatatttgaagtcatcccaaaatagaggtttagaagcttctttttcaggttttgaacctggtgatggagaagaattttgtgttaagctacaggagaatacaatcaaggtaacaatgttgatgccgccatattttgttagcgagcaacatttggttatgacatactcgcttcagactcttaagttgaattagtgatggctaagtcagccaattttgttggtataggcgctccagat

SEQ ID NO: 178 - DNA, 4218 bp, Cannabis sativa
tatttgtatatttatatatatatacttagcttttatagtgtattgggttatcttgagctttatcatgtgtctaaacatggttttcagttggatatggatatggaaatggattgtattgcttttaaattttcagtatgctatattgattttggtagtagagctcagctactgaagatttgtcaaaatcacatatacttagactgaaaagactatagatcttgttttgttattatcactaagacacttaagattttgaattcatattatagaatcttcattgtagaagaaaagactgaatctttatacatagtgttattctcttaaattttaaatattggatgcttcttttactttcctctaattcaatgtgtaacctttcaaattatggaaaaaacttaaactttatgtatccttaatttcaggaacctacgaagacgaaacatccccagcttcactatgaatcgaaattgtatatgcttttacaaggaggaagtaagatctctttatctatttcattacatgtttttttcagtggtcagatagttttatttagtttttgggagtggaatttgtgagctaggcttcttaaatgaacaatgtttgttattcgagttcggataataataaaattagtttgatattatcttggattattttgtttttttaatatacttttattttcttcttttgaagctggagttcctcatatcaaatggtttggagttgaaggagagtacaatgttatggttattgaccttcttggaccaagtttagaagatttatttaattattgcaataggaaattgacattgaagactgtattgatgctcgccgatcaattggtatgttattgagatcgcttttgttaagaattgctatcgattattgaagtctcaagctaatatgattcctcttcgttatgtaactttgcttttcagatcaacagagttgaatacatgcattcaagaggttttcttcatcgtgacataaagcctgacaacttcctaatgggtttaggacgcaaagccaatcaggtaatctggtcttccgagtatagcgatttatctcacattcattcatttatgactctcaattgtaatggtttggtaaactaaagtaaattctttaacagaggacattcaaaatgtataaattgtttccctgagatattgtttcttctcgtttcatgtagaatcactgtatttagattttctgtatattacaattgtccgagttattcttcttcaggtatacatcattgattatggccttgcaaagaagtatagggatcttcagactcataagcacataccttacaggtatatttcgatatgttaggccatggttggatagtgtgttagtgcttatgtatgtcttaaggttgacaaatccaacactgagacttctttttcttttatgtggtttcgattttctttagttttctttcttcccctacaatttgatggggttatttattttaaaaagtaactatcggaacagttttctttataaaattagagagaaagagtgaggtttgatcctaacagttatttcttctttaccgttcggtgttcttaggtttatggttcaacatctgttgtaatagctaaccattttccccccctttttttttctcatctttcagagagaacaagaacctcacaggcacagctcgctatgcaagtgtcaatactcaccttggaatcggttagtatgtatatactatcaccgtatcacgtgtgaacgaccgctatttaagttttcaggaattaccttttattcaattttttgttgttaatgttttgcagaacaaagcagaagggatgatttggaatctcttggttatgtacttatgtattttctgagaggaaggtaggaaactactctatcctcaccacatacatatatatattttcgatatttgatacccatcgagtacaatttattcatcatcatttgttatttactttatttccctttttcttcatcagccttccttggcagggattaaaagctggcacaaaaaaacaaaaatatgataagattagcgaaaagaaggtgtcaactcccatcgaggtattgcaacttatgccatgttttatcttagttgacatagcttttggcaacgttactcgttgaaaatatataattatatagctctgggaatgtactacaggtgctgtgcaagtcatatccatcagagtttgtgtcttattttcactactgtcgttcattgcggtttgaagataaaccggattattcatatttgaagagactcttcagagacctatttattcgggaaggtaatccatcgaattcatctaacctgttcttatagtttgtgaatatttatataaatctgttgtttacctaaactgttacaactgcaggttatcaatttgattatgtgtttgactggaccgtattgaagtatccccagattggtgccagctctaaaggacgggttagtattgaaccttgttgagttttgtttcgtaggaacgtttacttattaagttcttgtttatgttttagcatgtcagtggaaaacccggtttgcacgctggaccatctgtagaaagaccagaaagaacctcaggtttgctctgtttgaattcaaatgttcgggcattagattcttttaccgtcggtggacttagttgataaggtatttgatattattgactatttttttctttttctttttttaatagttgggaaagagatccgagaaagattctcgggtgcagttgaagtattttccaggagacatgtctcgggttctagtccgcgaaatgatcaaccaaagtacaggactcatgaagaagtaccttcatcgaaagatgtggtaataaaacttttgttcatggtttcattattttcaacttttttaagattgttggtcaaatcttctaatggaaagctcttggtttaatttcttcttccagcgccctgattcagaaagagcacgtagttcttctcgatatggaagcacatcaagaaaagctgtaatctcaagtagcaaaccgagctcttcagccgaccacagtgatggtcgaaatggtcgtgtagtctcaagtagtggtcgcccttcaaccacacaaaggattctgctatcacgcagcggaggagctggaagaggcacccgagatgatcctctccgaagctttgaactcctttccatcagaaagtaatattattcgggccgaaagggagtctctgttgttatctactactaaaagaacaatttctttgctcatctcatggatacatatttaccaccccttctatatgtgatgaactacttgatttttttcttttttctctttttaactatcaaattcatggtaaatggggggttgttgtgtcttctaatcgccgccacggttacatacaacggaaaataccatgtcgtatatcgattctcccccatgcattttcattctcacttttttctcaatgtgaaaaaaaaaagctcttggctttggtaatgggtgtcttgatatgtatccatccccctttgtagcagagaatttcctttttttttttctgttgtatgagaattattttgttgacttgaaataatgacttatcttcattatacttccatcttttgaattgagaccaaccatggttgagtacttgagttgattatgtatgtacttgttttaagctatttatgtattttttttctttttgcaaaacttgtaccctggtgtgtgatcttcccggtcggtcctcgaaaaattatgcgtatggagagctacttatgactgaacgcagaggcccgaaactcggttcaccggttaattcgtccggcctaaacccggtgcagccctagagctacttccccggtgaagcaagtattgtagtatggtagggttgtacttagccattccaacgcctaaaatggaaagatttcgaaacttgtattagaaaaacgtccttaatttactgagagtttttttcactgcaaacaccattctaaggttactgatagttttactcatttgtttcataattatcttttgctcaaaagtttcaaccatacacttgtgtagctaacaaatttctagtgttaacaataccccttccttttgatttagatttctaactactgaaatggacaagacattctagtgggaaaataaaattgggaaaaagggatttaagtggcaagaattatcatttcattctagtataataataatatatata

SEQ ID NO: 179 - DNA, 6744 bp, Cannabis sativa
tacaatcgaggtacgaagtgtatgtagcataacaatcagttgtactcgaagtacgagcaaaccctaccaacactagtattagaaaaatacttagtgcatatgatatagagaacgtacttcaattaagaacgttcttgattcatctgttaagacttgtatataggtgtatgggcgcctagctgcaggtcaatgatatgtttatatattttatgcttttcttactgagcctgtcgactcgcagatatgattttatgtgtaagtaaagcaaaggtgaaagctgagcaacaatgagtttgaagctcgctggcgattgttcagattcttgcatcactgcctttgaatagtctattcttcttggatcaaaatcttcccagaatttaataattgcacttctaaattcttatcgtttttttggcctaacagacttgaggatgccatcaaagaattctaagtcatgttcttctttctgactagaggtaatgattcctcctcgactatcttgaaagtctcactctttctgctatttacagagttccatccgagcttgatatggattctagaaagaaacctttgttcattttgagccaaaatcaacgtataaggcccttgatgtgtgtagttatattggcctgaattgctcctgtccaattccaaaccctccgcagaaataaaattaccctttcaactccatgggtggactgaattcaggacctatcattggtaaacaagaatcccagcaatgagtatcactaacatgccttcccttaaacaaagtgttgggataaaaaggttgctcttcattaaatgtgacatctgaagagacaataaggcgacgagtcaaagggttgtaacatttgtagccttttttttgtggaagaataccaaggaaaatacacttttgagaacgaggatcaagtttggtatgattaggtcctaaaacatgaacataggcagtacaaccaaatgttttcaatggaatatcggagagtaggtaagtatgaggataaatcttaagaagagaaaaaattggagtttgatattgtaagacacgagatggcattctattgattgaatacgttgctgtcaaaatagcttctccccaaaaagtcttaggaacagtggaagtaaacatgagagccttagcaacttctaacaaatccagattttttctttcagtaatctcattttgttggggagtgtactaacacatgaacgttggtggacaatgccaatagagataagataatctcctacgattgaattaaaatattttgtaccattatcagtgagcaaaacttggagattagcttgaaattgatttttaatcatggaatgaaactttttgaaagtggcagcagcattagatttatctttcggaagaaatacccaagttaaacgagtatgatcatctataaatgatataaaccagcgagtattagagatatttttaacacaggatggcccccacatgtcactatgaatgagagtgaaaggacgagatgccttataagggtgagaacgaaaagtaccacacgtgaacagtattcaccgatgatatggaggtcaagggccagggttttgttgatcggaaactgagcaatctccctgtgccaatggtgagaatagaagaccacttcaaagtgattttctaaaattgaacctcaagagtttcaaaccctaattttttttttttggtaagaggagctgaaaaaattgagattttttcccaatctttgagcttctaaagctctgataccatgtacaaatactcttgaatgttgtttttatcattattggaaaagcctttaaataggttgagtacaaaattacatctcaactatgaaccactaactaatgcaacaaatactaattatttctacagttaacttgttctagcttgtaattccttttcagattcaaaacacagtaggatttcttaattgttctctattctactataattttctatttgagtattgctaggatcgtatcataatgcatctatctatcttctaagtaagattttaaaatttcctttctcttccagtggcttaaagaaaaatattactgcgtatgtaaatgtataattggatttcatttcaattatgatgttaatagatgcaatttaaagagacaatacttaaatatgaggtgtaaatttcttctactactttgggatgtagatggacagaaaggcaaagagttaatattccatgtatcacctcttctggaacaatgggggaagcacactctggaaaactactagcaacaccaagccaagcacagcaatgctgaggacgtccttccgcaccaaacatagtgttcctaaagacctgtcaacaattaaatttaagtcaaaaaagtgttttgaaaacatcataacaattcagattttagtttaaagaattggccttcataatcataaagaatgaagaaaatgacttcatatacaaagagctcaaactcactgctgttaggtgctgatggtagaagtacaactttttaagactgccatgccttgataattgagactctaattcatcaacacatctgcattgaaagtttcacattaatgctattattagtcctcactcatctataggatatgcaatttggaggccaaacatttaaataacattcacaaaacacattaaaaacaaagagcactagcatcaatacatatgatggcataagattgggtttatgatgacataagacaaagagtctcgcaacaaagtcaaatattagattgggtttgtgatgacataagatgagaaactataagattgggttttgatggtgctaacataatttagggtttgttatagtttgcatgaaattactagataaatatttatgtgactgagtgtgtatatgaaaatgaatacctgtatttattaagtttttttttttttttttgaaactaggatccccacctactcctacaatatttggggaccaaaacactatagcaattgatatgtagggactcagagggactcaacctctgaccttgtgggaacaaaccacatgcctgatcatttgagctacccctctttaggtatatctgtgtatattacatttttatacttaagagcaaatagtacctagaccaattgtatgcagaatttccctccgacaataatccttccttccctgtggagactgtagctttctccaaatgtcttatgttaattgatgaccgcgaggatgtgactatcatcaatattgataaccagtcttttcggaaatcctattcaataaagaagcattatttgtgcatcttgtgaactggaatggtgagaaatgctaaagctagaagaaagctatttttttttttgggacaaaacaagaaagttgtattcacaaaaatagaatttagtgagcacagatttcttacagataagtcacatgtgattgcagatatatgttcaccctgtaattttggaatattttcaaggtgatgaacgatcctctgaaatagtcctttcaagcttgcatccaaatcaagagccaccattcctggagtaccgagcaaaaaccgaattctacccgcacatgaagaaagatatgataatgcataacctcgaattgctgcatataattaggaaaacaattttttttaaaaaaaaaaaaagggcaaggcaaaacaaaacaaaacaaaatgacccaaagaatcttttatgcaggaaatacattcaagatagcatgagtagtcagtaaaagtaacatccgcaaaaaacaaacctgcaatatatttgcgcactaaacagcatagccggtccattccatctaataaaaacccaatagttggatcacttaattcctgcaaccattaccatagcagtgtttgtcaggctcagattgagtaaattcaagaaaatcaaaacaaaccaaaaaagcgttaagaaaattctgagaaagctgattgacagatctggccattatgggaatggtagctattttttttcttaaatcaaaacaccagagcctattattattaaaaataatacaagaggaatggaagtacgaaatacttacacccaacaataaaccatcaaaacaagcaaccagacagaaaccagacagacaaccaatatataaccaatatataaatatatatatatatatattcctagaacacagaaactaagaacttaaggtataaaagcatacttacgatctcaactggtgtcattcgaccagttttagattttgatgacgcaattcccacatgttggaaaaaccagataacctcatactgagcaaaagccaaggcagagaacaccatctgtacgatattttacataaatgatatatcttgagaattttttcaactaaccttggattttaaaattttaacttaaaatagacaagagaagcttgatcggtttacctgtatattaggagccaataaactaggctgatcagtgaagaaaagcaccattctcccaatctcttgcttcagtaaaattctcctttcacgatgaatgccatcacatgaaagtagcgcttgttcatgcacttcactgcattcaacacctaattaattacttgattattgtgataggtgtcacaatgaaatgttatttcacagaaggcatatcaatgatgtttcccaactatctatattaatagttcaattacacaacaaaactatattttgtttatgacgtttgaaagttctgaataaatcatacaagacaacttagcaaaaactctagtaatgttatgtattaaaattgtgggtgatcagtgcgtatggaacataagatatgtacgtatatatatagggaacttcttagggtgttcctatttccggtacctagagaaattatatcacaattttttttataatgacatatattgtagttataacaaacgtatcgtcagttttcgaaaaattctgaataattcacgattaagttctaaaatagctagttgcataagtgacagtttgaatcatattctcgctacgacctagtagatcattcataaaatttcaaaaagaagcaagatgcatactaatactataaccatcatgttcgcagttaaataaaaagattataatttctttaaatatcaaaaatattaaatgctccaatagtagcaaaagtgatacctcctctacccaaaaatttcctacgtatatatacatataaacgaagtcaaaattttgtataacctatcaaaatgttatgttttaattttatgtaagtccaaagtccctctcaaaactcaaaaagaaaacgaagaagaacacacactgtatggaagaacccaaaaacaaaattgggcaacagcaaagcagagaagatgaaaattgtgtgacatgaattacatcacgagaacagtcagcttcttctagttcctactccctcttttgcaaatattccaattataattgatgttagacacaagtgttttaagaagaaataaagggtcagacctaatcattctttcaacctgctttgcaacgctatattccaaatctgcttctttttgcttggttcgtccggatttcgccatcctctttgattccaaaattctgggtagaacatagagctgatattcctcatgcaaaagtatatactgcatattttaaagtcaacaaaacagtcaacttcttcattttgataacaaaatgtttcattcagcaaatataaatagcaagtctcacctcatccctaaataatgttagaactagattttcttttagtaccacctgaaataatcaataaaaatgaaagaggtgagaaaaacaagcaatacaatattccattgaataaattaataaatgtttttaatgttatactcttcaacaggatcattctatttcacctcttacaaccaaaaataatttgcaataaagatacttgatagcatggtgattacattcatgcaaaagttctacccttgagcatggatgcataccattggcacaccgacaagttttacaaatcactattgtattttttttttcgaaataaaacagccctgtattacaaatcacacatgcatattgacaaaatagttattccatatggaagatgatttgaataaaaagcaaaatccactgggatttggctttccttatctacgtgtataagatggctaaaaacaaagaacaataataaaaaaacccactgactgaaatcacagtatgcattttaatgatctcaaattgcagtagctatgctcatgattgtggacgataaaataatacaattttgtaaaatgaaccagaagattatcaactaattaccgaattcaattttacaatcaagcaatttaatctattaaggtttaccatagcaatatcgatgctagtaacacgaagcagctcatctggacaaacaagatacccaaataacacccattctcgataagaagtaacatttgctagatcctgagctctctgcaaggagcaaaaagcatgaaattgcagttagctatcacttaagaaaaaaaaagaaaataatacggctaaataatgcagaagaagtaccattggatgagcagaatttgtaagaatatctggatatcgaggatgatacgggcttaaaaagccttcatttctaagttttcttgtatctgttgataaaaagataataggacctactgcctctaggacctgaaaaaagctcaaatacaaattataaatttcgaattgtaatagttgctgaaattactaaatcgtgtagataatgtttctacaagcgtgtagatttttctcggacaaga

SEQ ID NO: 180 - DNA, 1814 bp, Cannabis sativa
tttttttttttttttttttccggggggtgtattaagaaaaattaaacagcatagcctatccgaagacatgcatggtattttgtgaactttggtatgtggctcatttcgaaatattccgagtgatttagacaataaatttttagtttaatctagttcctgattatgcattttcttctttaggcaaaatacatagccgaagctgaagaaaagtacaacatattattgaagactttggattcccaattgtccttggattaccatagaagatgtgaagaagccactcaagaaggtaatgtaaaaaaaaaaaaaaacttaatttcttatgagaatagatttagttctcaaaaaaaatattaaaaaaaaatctctaggacattttattaacttgactggaagaatttttaggagggagtacgtcaaaacatcctcttgggacatggaatataccgaaactaatagtagacgaagaattgtaccgatcaaacgtgctagatattgagagggaaatgtaaacgtttaactttgctttcaatgcttttgaaatcaattgtctggtttgattccctttttatcaaaaatttgaatatggttactcgtgtatctatagtagtaaattacatgtatactcagagctgaggaacaagattgttattgttatgtttattcagagaaactcgtatacatcgtacatacatgagtctatagagcatctttaatagaatgttaaataagtggtgtattgttattttagcatactttaaaaaaaatactataattgaatatcgagttctacttattttattattatgcaatgcacttattttattatttatgcaatacacttatcttaaggagttatctaattgaatatcgggtcttacacaatcaaatctagatttatgcttgttaagttagttatgacaattggtgtgctgttagagttagttggttgagttgttttagaggttgttacaaattggttgttatttttctgtatttacttcagcttatatataagttaccggttggtgtattgatgcaataagagattcctttatgatttcatcatctttctctttatctttcctcaatcttcaatatcaaaatgtcaaagaaatctaatatggtattagagcaccacttactttgttgacggcggacgtagtgacaaactcaggggatacttcaaacttggataacaatggcagatcgactcagccatggatacaagcactaagaaggagagatgtggatgactattctttgatttatgttaatcacagtctttcactcaaactcaacgattacaactttcttttttggaaacaagttcttgctgtaatatgtgggaattgtttataaagtttcatccaaggtaacaattctccaccaaagtatcttaatgatgaagattgagtttataatatattcaatcttgtgtatcttgattgggaagctcaagatcaacggctgatttcttggtttacatcatccatgtctccaagtttcttaactcatatggtagaatgtgagtcaactagccagatctagacgacattagaaaattatttcactctgcaaattcaagtcaagataccggagttttgaacaaagttgtagaatctcaagaaaggttccctaactcttaatgaatatcttctcaaggtcaaagaaattgttgatttgttggccttgattggtgaagtcttaattctcaaggatcacattgttacaattttcaaaggccttccaagtggatatgatacattcatcatatccactaatacaagaactgagtagtatacagttgcgga

SEQ ID NO: 181 - DNA, 3690 bp, Cannabis sativa
cggtgtcttttagcatttatcaccgtgtacatatttagtactttaattaaagtaaaatttgatcaataaaatatattaatttacttaattggttctcagtattagtttcatataattaaatgattagatctgaatttagaacttatataaataaatgcaatttgatcgaaatatgtactatttcagaatgcagaatactaaataaacattactgaaaatattgggttatatatattgtacttataatatttgattagtttaattaaggagtgacgttaagacactaaaatactaagcactaaatacaagcgtgaatctcacttaataagataaattaactaccatatgttaagtatggctgtatgggatatctgaattcttccaaggataagaaaaacaaataaactgtacaaatatttaaataaatagccgttaaagataattcttttgtgatattaataaaaaaaacaacaacaaataaatggaatttcatacaaaaaaataattaaataaatacaaattaagagtggttgcatggtggaagtggaggcccacataggccatgattatccaagaatgaagaggcagagaatgtagtattgtgagaaggaatcattccactaagaaggtttccagagacattgaattctttaagatttatcaagttgattacttgtttgggaattgtgcctcttaatttattccttgaaagaatgatagtagaaagtttctctgcatttcccaatttcattggtattttcccggaaagcccattccccataagctttaaaatctccaactcactgagttgtcctattgactcgggtatgccaccacttaatggattgtttgataacacaagtgatttgattgaagccattgatggtctttcaccaatgttcttatcaattggaccagagaacatgttgttggaaagatcaatggagttgaattgaccaagtgggttttgtaattcttttgagaaaatcacatttatgtgaccaattaacatgttggaatgaagatcaagatccattaaaagagaaaggtttttgaactcaatagggattgatgaatgaaacccattacttgataagttaagaaatgacagattagtcatgttaccaatccaattaggtaatttcccatttaaaccattgtttgaaaaatcaagaattgaaattgatgttgaagctaaccattttggaagatggccttcaattcctgttttggcaagctttaacctaaaaagcttcatctttgatataaacttaggaatataaactaacccaagtggattgaatgaaagatccaaactttgaagattctgaagtttagatagctgaggaggaatcttaccagaaagtttgtttcttgataaatcaagtgtttgtaaatgaactaaattttcaaagcttgatgggatttggcctgtaaaatggttgtttgagaagaaaatatctgtaagagtagtgagttttccaatacttgaaggtaattttcctgacaatctattgttctcaagaatgagtctttgaatatttggtaacttacctattgagtcaggtaaattaccctttaacttattctctgataaacgacaatagtaaagagaaataagccctgaaattgaataaggaatcattccagtaatcctattctgattaaggtacaaaagaactaactcagataatccacctattgactcaggaatcattccacttatactattttcagacaaatcaatatatttaagactcttaagcttaccaataccataaggaatggaaccagagaaatggtttccatgaaaatcaagcttagtcaaagaactcaagttctgaatcgaagttggaatcgacccggaaaactgattccctgccaaacccaattcaaaaagtgaactcatggactcaaaaacagaggaagaaatgacaccagacaaagaattatcactaagatgaagctttttgagactaataaggtttctaaatgtaaagggtaatgttccattaagctgattagtatcgagaaaaaggtaactaagttgaaacaagttacctaatgctaaagggattggtcctttcaagtacttgagattgctcaagtcaaggactttaagaaatgacaagtttccaagataaggagagagtgtaccagccattgaagtgtcaacaaaaaactcgtcgttgccaatgaaaaggccaggacgagtgaggtttgtgactctgcctgaagtggtatcacataccactccttgccatgaatgacagcaatctgtggaagaagaccatgattggagaagctttgaagggtcggatatgatgttttgtttgaattgaaggagtgcttctttgtctactgcatgacatgcattggtgaagagaaatgagagagagaggagaatggttagatagagaggttttttgagaatggtaatgtccataatttggataacagaggaagaggatagtaaattaatgagtatagaaatatgagatgtgttatatatatatagagagaagagaatagatatataatgcggtggtgagtattaaattttcatgtgcttatgtattaaatatggttgattgatgctctctcaagaaacaagtgtgtcaaacgattcttataatattgacacctttcgagttttgactctttaactataggaccaaaatgtcaagataggaggccactcaacagggaagctagaatttttacttaatacttaagtgtgcccaaatcttttagaggtggcactctaggttctttatcatttcttattatttcaatgcattgttatagatacttgtagtaacattttataattatttagtgatatttaattgaaccaaataaatcaatataataacttttaaaaaatatcgttaaataatcataaggtgccactactagtacctaataacaatattttaaaaaataagaaatgctataaaataacacaaaataaattaaggtcaaaaaaataagttagataccataacacgtctcgaaagtcgaaactcgcacgaaagttgataattgttttttttttttttttgaccatgaattagttttgcaacatttgtttctgattttccaaatactagatgttagtgaaactaatcttgctgagctgtcaagttattatactgttaatcaagattagttaaattctgttttgctgttagttaaatcttaactaactctgcctctgtatcttaaagtgtataaatactctgtttgtaatgttttgctaatcaatgagaattatacacttttctacttctttgtcaaactttacactagaatcttgttttttttttatatatatatagaaatgttactatctaattactaatataactgtaaatacgtgtgtcagataagtctgacttatattttgaaaagcctgcaataatatgtgtcatactgtgtcggtctataaaaaatatgaatcttgtcgcatcgtactaatattttaaaaagtaagcttgaaatggctcgtaaatctatatatttttgtgtcgtgctttttgtaggctgactcatttttcataaatggataagcctaatttcttatacatgtaagaatttaggttccacattttcactagtttcgtgtcgtgtcgtgctaatttacagttttatattatgtcgtgctttgttaaattgatcagatatttc

SEQ ID NO: 182 - DNA, 6022 bp, Cannabis sativa
accgtcttgatcatccacttgtttataactatgcacataatatgaaaaatggtttaagaaaaaattgattggtaattgaatgaacaggttaagaagattaatggggtagagatagaaaatctgaaacatttatgccaacttgtggagaagaacaaagaagagaatgtccgttttgatttggatgatgaaagggttgtcatattgaactatgaggttgcaaagattgctacttcaaaaattttgaagcggcaccggataccatctgccatgtccagtgatctagttgatgaaaggcaactaaattcttagtgaacttattctatgtgtacattcttaacttttaattcatggctcatgttgggttttgctaggattttattcatattgtattgtattgtttgtgctcaacagtccacaatacataccaaggaatttattatagggaggaatttgtaggccatcaaatcaaaaaacaataatttaaaactacgaaatgcagtgccttcttcttctccatacattacaatacaatacatatcaaggaatccaataaagaaattcaaaaataggacctgaaagtagaaaagaataccccttaaacagagctgaaagaaagaagaaatatacatcattctcttcaacaaatggacaagtagagccccgcacgtctatatctttgattactaaagtgtatatacatacaagccagccaccggccaaactaatcgattcaaaattccattcccacatgactcttcaaacaaaacaccatttctttttttaagatgggatttctctccattcccaacaacactggcaatttattattttgtaagcttttctcatccctgccataaaaaatcataccctttgggtgggtgggaatttagtgccctgctggatgaactttgacagttaccgcccagtgaaacagaagacatcattcttggatgtagcaggtggaaagtataatgcttttcttattcaaggattccaaggccaatcatgagtctgattttgatgcggtgaatgatgaaagtagacctgcagcttgagcaggtagaatgtcgccaaatgttgacattgcagcggttgatctatctttgaatatccccacttgcccgtctttaagtatggaccccaatttcagtgtgcttccaacctgtccaatacaaggaaaagcatgttgttcactaccctctaccatccaaacattcaggagatttcaaaatctattaatgctgacatctttttctccataaccactaaaaagttccaaacatgaagactggcaacaatcatatactattactgaaacattcttccacaacagcgacaaaaagatgccaagctaatttggcaaacttgctaaggtaccttttgtcaaacattcatttgcctctatgaaattactctactgtaatacaaatgattattaagtcccccaaaaaattgctaccatcaccttagatttacagggcaaacaccagcagttttataagttcgagaacatgtttcaacttttgaaaatacttacctgcatgaaagattttaagaatggtgttgcaaccccgaaacttgagtcatcatccatatcaatcttgtcgggaagctctccgttagtaaaagctttccaggaacttcttgacgagatatcttctgaagatgttgttatagaagccttagttgcccctcttgttgacaatgctggggcactggatagccaaaacaaaagttaatacattgtacaattgagaggttgaactttggaaatggttaaagggagctttaaaaagaaaaaaaaaaacaccattctaatagtaaccggaaaagttaatcatccctatcagttaagtaaggaaactacactctcgattcaggttaatataggaaggcaaatcaaattagataagagacacttgttgccagcatgcaaaaccaagttactcaaaactcaaaaaggatataattagacacacgcaagctaacctgataggaaggtatttgaagcgaggaactgaagagcatctcatgatattggactctgaattagtaggtagtttctgaacagtatctgtatacatacgattgagttggacaaagaaaccaaaaagaactgcattccgttggtatgactgcctctcattttcccagagatacggctcatacctaaagaataaaagaagtcaggaataatatcaaaagaaccaacacaatactcaaattgtcaacctttaagagaggaagagggagaggggattgaactgttagtcaatgatctactgatctttagattagctaatgtcaaataaaaattcaagtgatacaacaacaaataactttaggcagtaacgtaagtttcacattcaaaataatggtatgaactcaaaatttgaacgttgaatatatatcaacttacgtgagccagtctatggggtccagtctttgagaaagacgagccatcaaccggtcaacatactctctagtaactgattttgtttgggtttgatcctgcttccgtctaaaagcagttcttgctttcgggactctatatgattcctcaatcaaaacagaatcacctcccgacagaacatcagcaacaaatctcaagtccaacaagacctgcagaactcctttctctgagacttgagatccactctcttctctggtagaaagaaaatcctgataaatcccaatcacctacacaaaaatttgtggtcaaataaattgaaattgcaacataaaagcacataattattttcattttttaattaaacatgtataactctctaatgaaaaataaaatctgttataggttgatattatctaatatgtacttaatatcccttctactttaaaacaacctggctcttgtaagttccagagcatgtatatttttttttctttttcacctctactatggcaacagaagaaaggaaataatgatgatatgttgctgaaataaaataaaaagggacagtaaaaaaggatgcctaggaaaattacttactttttccaacaggcttaaagcaaatttttgcagaatggttctgtcaagtacatgaccgccaattcgatgaatttcttcacacgcacgaaagagaaatgacacaatatagagagaaggcatagaaggaagcaatattttcatatccgattggctatcatcagactgctcttgcttgactactgtctcttcccaaccctgcacaattattaggaaaatgactagattattaaacacaacaaaaacaaaatcaccgattgatacagaaaatgaaacacacccaacccattccaaactaaaaccattgtcccaatgtttctatagctgaatactttactttttcctcaaaccgaaactgagcaccattattaatcaaacagccacaaatgggctttgaaaagaaaaaaagatgacaaatgtcagcaactaccctaccctcattgcctgtcctgacaaaatcctacagctacaaaatccatctctacatgattgttcgggatactcacaaacgataaattcaagttacagaatcccccatagtaccattttgaagttgtaagggcattgcaagcaaatagtttttgaaacctatcccattttcttgtcagcaactatcctaccctcattatctatcccttttgcctacggggaatttcttgtcctgaaaaatcctaaagctactaatcagtttctacatgataatcacctcagacatttttcacatttttggttgatggtctacaattttttttttttttggtaacattttactaaacagattttaaaaacaccaacattttcacttgattaccatccaaaaacttttatattacgaatgataatgctgtctagttagttttcaactggtcaacttattgtaaagtagaactattcgatttacattcaattaagaccaatacataacatactaagcttacatcctatatccatttgatgcttttttttgacttcatttattctggtaggagaacaacctaataataaatgtcagaaaacacaagctgaagtgaatttttcttaccctcaatggagttgtggatgacaaagcatcatcatgtccaagctcacgcgccagaataatagaaagctcgttagacaaccatgatatccacaagctgtgagctctgatacaaagatctcgtaaagtggaagtaagttcttcaagtttggggcttgcactatcagcagctccaagcaatgcagcagtggctgatgaggtctgtttcttagaaccagttcgggtttgctttccagacccatcaactgtacgagaaccagattgccttaacaaggagggcaacctatcaaaaacggcagacatggtgtcactaacccaaaacctcggaggaccaagtaggacaggaacatgttttgaatgattgaggaatgcaaacaatagtcttccaatgaaaagggctctttcgactgttatagcagcagaaatgggtcgatcctccttgtcttttccattttccatggcagcatccaaagactgaagctcctctttaagttgctgcaatatagtcgaaagacaatcgtagcacttggattggagataaggtgcaagactcttcaaccttagagatgcctttggagattccaagaaacccagaaggtcctctagaagactctggcagcagttatccacagcatctctgatctcactgatctgtggaccaagatagccattaagacaactcctaaactcatactcttcaggaggaattagctttaacccagacattggcttcctagaattggagtctatgaaccaaacaccgccaccattaaagggccggtttaagtaacctttgaaatcaatcccatcaccactggcagcagagctaacagcctctgcaactttcaccgtactagccagctccccaaacctagagctgactatcactttcatcctaccaacaaaagcctcttcaaaaatgtcatcccacaaatccgaatcttctcccaaaacgagctcccgcattctactccaaggcagctcgatgtcagatccgaaaacgttcttgagccactccagactcccttccaacacctccttgctttccattgtctcccttatcaatttctcagccaaggcaagttcccggccactgcccacggcatcaatcagaaatctgccattgatcttatcaaccatttctctcccgcagtccctcaaccacaaagaacaagcattggcaatgtagtccctgtcgagaatcgccatgactgactccaacttttctctgaaggaattccacaacttgacttcctcctctgggttgggaattccaccgaacagttgagatgcaggaggggaacccagcacaaccttgtaaaacaatggcatatcactcaaaactcgtagaaaaagctctcccacctggccaacggttacctgaattgtcctcaaaatctcgcagaagactgacacaacagcagagcaatcggcatcgggagagcaagcagctaaggtttgagaaacccacgactttctggaatcgagaaagagagcaagagcgtgatcgggaaggagatcatcaatggcggcgacagcggccaatgcatcagcataagatccaaccggaaggtgacgatcgaagaggcggtcacgggcacgctgggagatctgtgccttaaagctgtcaacgatctgccactggtgctgaaggagagggaaatgagagaggaagcggcggtggtcggaatcagcggaatcgaggaggagatgaacgtgaagtgcgcgcacgtagcgcgtggcagcttcgaggaacatagactcatcaagacagccccaaatgttctcaggcgtatcgacaagatacttgacgcggcaagcaatggcgtagatccggtggtggagggaaagagatgaggttttggaatgatcaaggggatggtggtgatcggacaaggagagaatggattggtggacggaggagagattggaagagatggcttgagaggagcgcttcatgagaagaatggagtcgg

SEQ ID NO: 183 - DNA, 4115 bp, Cannabis sativa
tcttcgtttcgatgttgtttgttctaaccttctgttgaggacacctcctccttatcagaaaataaaaatcataagttatgtaaccttttctttgatttaaaatttcctgaaatcccatgtttgatattaaagtttgttctaattcttgtttcaatgactctcagtaacaaaaattgggtttattagctaagcccagatgatgaactgtattgtatagccactccattttcatgtagtgcaagtcttttcggtataattaggcaacatgtggatttccctgtcttcattgtgtttttccatgagtgttgttgtttgtagataggagaggtaacacttacacacagatcagtagtaaagtttaaagtatttctcttaccttgtcttgtggctatatgttcttatttaggtgctcgtggaggttacaaaggttcagatcagtttggttctactcaggcttttgttactgatgctatagttagtcatggtgatgaaggtgcttggttcttggataacggctcaactaatcaatatcacagctgagtaacataatctaaccattgcaaaagccaaaattcaccattgctctgactttccaattaactatggcttggagctttgttttctccaagacaagacctttaaacacctcaactaccttcaccatcttcaatctcagaccctacctttccatcttcacttctgatttctccacctccttccttgtcacaaaaaccccacaaaaatttaagaagcgaaagaagaaggaaagtcctcgaactacactagtccaaacagagcccaaccgaattccagcgcttgaacgcattgttgagcgtgatgccttcttccgattcctcatcaaatccaaggagtttctctccaagcaaccccaacatgttctccgccttgatgatgctggaaagctctatcgtgagcttggatatccccgaggccgaaaggttgctcggttcatccaacgccatcctctaattttcgagacttatcgccacaatgatggaaaaatgtggattggattcactgatttcatggaggagcttctggaagaggagcgatcagttatggattccatggaaatcgatagggttgataaggtacgaaaattgcttatgatgtctgcccagaagaggattccattgagcaagatttatcattgcaggttgttgtttggaattcctgaagatttcagagaccgggttgcaaaatacccgaactactttcgtgttgtggttgaagatggcgggaaaagagttcttgaactggttaattgggatccaatgctggctgtgagtgcactcgaaaaagagttcatggtagatgaagataaggttaagagggcattcaagtttgctgtgaaacacagtaaggatttggacttagatgaagacgatacgaggaagctcaacttgttgaatacacttccacttgtgtctccttactcggacggttcaaaattggatctttggacattggaagcagagaagtacagagttggagtccttcatgaatttcttagcttgacattagagaaaagggcttccatacaccatgttgtggagttcaaagaagagtttagtttgactaagcatacctatcaaatgcttttgaaacagcctagaacgttttatctcgccggaactgagatgaactgggttctgttcttgaaagattcttatgatgagaatggtgtattgataaataaagatccacaagtggtttttactgagaagttgtttaagtatgctcaaatgcaggaaagatagatatcctcgattcttcgaatcactatatgacaaacatcgaagcagagggactctagccaaaaacgacttatataagatcaagttacttcgaaaatttaaacaaaaaaatacaactttgagaatacctcaaacgagtcacagtcttatgttttgttggacatgaattatctaagtggaaattgtgttgggatcaaatctatgtagaaaatagcaacattatttttattccccttactggtaggggcatttctatttttagcgcttagagaaattataattaaatttttttatatgactgtgtacattgtagttactgtagattttctgcttgtttttcgaaaaatttagaataatttatggtattgaaaataacgtttaaagattcaagtgaactcgtgcaaccgaatttttaaactctgttttcgatattttaatcaaatgttaagtacgttgtaaaatgtatctcttgcgtcgctagaattattacttatgtttttcaaaatctcataactatgattttgttttctttatttcttcaaacttttcttccaaaaataaaattactaaagagtatcaatagtgattaatgctattttaccgttcatatttatcttgtttcacatattaatttaaagtaaaatagttaggaactattactcaaatgcactaagcaaaatattgtgttaaacactgctgatgtcttataaaatatacattttaaacttttgatatgtgggaataaaaatattgttttggtctttgtgttcaagtagaatatgagagcggtttcttagagcatcttcactaataatgcttggagagaatgctcggtgatgtagaatgatgtttgaaatgagctaaccattgaagatgtttggataccaaactaaaaactaatattgatgccaaaactcggcattgatgtcatacacatttttccttttttttttaaataaagttaaaataaataataattagtgggatatagtaacactagtaaatttgagtagtgttcatcattggagtacttttaaaagtaagagtactaaaaataatataaaagagagataaaataaagaatatatttttcgataatgtggagatttttagcacatttaaaaagtgacactattgaagatgctcttatattacctaatatactaagttgggattaaacttgactactcgaaatgtttatataaagtaaacgagatttgtcatatccataacaattttacttttaacttatttttttatgtgtatggtaatgttgacagtaataggagaaaagtgtgagatcgtgaatttgacgtgggagcatacacttgtcattctatatctacttactttttttgttttaatttttacttttattttcatattctttaagatatacctagacgatgttcccattatatcctttaaattaatataaataatatgttacttaagtgaaatgtgagaaaatattagacaacccacccataaaagtaggtacattttaataaaatataatgtgtttttgattaataaatacaaaaaaattgtatttctcaacttatcgcatattagattgctggtgaagaatgaagaattttgagtattattatttgaatttagattactagattatctcacctatctttcaattattacgtacatatttgaatttaaattttgaaaaaacaataaattacttaaattaatttagatttttttgtaaaattaaataattttaatgatgttaggatagttataattatctctttattaaaaaattatacacgtgtgtgttgatctgatatctaaactatctatatataattaggattttttgtaaaattaaataatcctaatgatatatattttcttgttaattatttcttccactattaattgccacgtcagcaaatttaatttttatttattatttaagactttaattgatgtgttattttcaaatcatattaataaaaatttagattatcaaacataaattaaataattatattttatgatcataaaatttttttaaaaaaaaaaataaacaataaaaaaacctcaaagattgcagaaagggacggtggagtcctttgaataaataaagatatttatcttttttcacaataataataataataataataatatgaattaggatattctagaattaagattaataataatattatatctgatgataatattataggaaatatctgataaaattataaaaattataggaaatatcatacgtactaattatattaggattagggctattgtgtatttaaatacaccaaaaattagctaattaatcattttcattttcat

SEQ ID NO: 184 - DNA, 4387 bp, Cannabis sativa
gtcataatcttgattttgctcgttctactcttgatacgggagctcctcaaatacaactccgacaatgaaccagctgggaacaatgttgtcggcggtgaagaaagtgttcagttaatcgtaaggtcgtctggtccagtcgatgtaaatcccgaagtgttgaggaggtttcctacgttacagtactgggaggtgaggaatttggtcaagattgaagaaggctttctaaggtgcgagatctgctttgaagaataccaagatcattcagagattacaataatccctaattgcggtcacgccttccatagtaaatgcattaatagagttttggaagaagatatgcgctgcattttctgcagagtaaatctgagtagagatggtgatgagtatcgttacaacacaaactctcaagaagatggggaaagcctttacacactgagattgcctttatgggtatgggtgaatatagtaaagattcgggagagaagatctaaaattggactgccgttgcgtagatcgagacagtagtagaagtatatggaagaaattattaaacaaatattaatggtacatttcaattgatgattctacttctacttctattactgttacgttatttattacttttcttttttaaaatttttcgttgaaaaaatttacacgttgcatgaaaactcatcaaatatgtaattttcacttaattaccattactgggataaaattggttactagatttgtgcattcaactcttgaataattatatgcttatgagcaactccatgaaggtaacagattatagccaaatacgggtttgcttggacaacttattttctgggaaatgttattcaataacaagatgattggcaaacactcaaaaatacaatcatttagatcacagagtgttaaaacaaaaatcccacaattaaatcattttaatttgtctaactcaccagaaaaaaaaaaatggcaaagcaaaataatatcagaaattttattattattaaagtttaagaacatgagagaaaaatcaaagagatgagaaatttcttgtgagatcaaaataagtgccttgatattactcctctagacattgcatatgatattcatatctttggttagatttttgcttctcttactactgttcattgggttgctattcttcacattatatggtatcttcaaggtaccattttttagagtctactactatctttgacctcttctctggaattgtgaacttactgtgatgcaaatcatgatcgtgatcccacagaccgaaaatttgtcactgatttttgtatcttttgggagattctcttatttcttgaaagagcaagaagcactttgttgtttctcaatcttctatgaaagccgagtatcgggttatgtcgtctactacaaaagagattatttaattgagatggttacttgcaaatatgggtgttattcactcttgtcctacttctatgtactgtgacaatcaaagtgtcatttagattgctcacaactcggtttttcatgaacacaccaagtatattgcgattgattgtcattttactcattaccattctaagttgtctaccaatactttgtcttttgttccttcttcgttgaagcttgctggtttttttactaagttgcatacgatttctcgttttcattttttttaggcactctcgatgcttcgtacagcaacatcgtgagtttgagggagagtgttaaatagttatttagggttagtttagtctttttttagtggcctatataaggcttttttattaattatattcttttatctttgactatgtaattgaataaaatcctaatttatctgcatttattttattttttattggttattctttgtcttcacaaataattatcaattttaatggtatgcataatgtattacttaatttgtttaagaataacatgtacaagtttttttgtgatgcagtaaaattaaaatatgcaagtttgatccaacttctacttccccttcttttatttactcataaacaaaagagtaaagagagttacaaactcatacgatggccagtaataaaacgaatcaagctacacaaattgttatgaaaaagggccaaaatacaatttgaaaacttaagtaaactggcctattaattttattggtgcaactgcaaacagtttaattagctcaggaaatggagctctgtgaagcattcctctcaatgcatatgaaattctttgacgatacccttgtagcatttctctcgatacatgaagtggtcacgaaggtggtggtcatggcaatggcggtggagaagtcgtggtcatattcatatgctcagttaaagaattgatcagctttaaattttaatgacatgtgtttcacttagcaacacattatttttgtataacatctaatccatatacagtatttccataatagaaaaacaaaacaccttattttattacatattattacttatacgtttatatgaccaagtctttgttcagttaaaaaataacttcaacaataaacaattgaagcagctatgtggaaaataagaacagaattaaacgaagctaaaaccattatcatcagcttcttgaggaacaagtacatcgaaatcacttacagtccattccgccgtctctccattacgactaacatagatttctgttccaacattgagcgaaaaccaaactcgctttgctggttctgttcctggatcctggcaaaatcaaaattcattggcaccaacttaatacaaatgaacataatccagtaatctaatacttgtaagggcaaaaagaaaattgttttcagctgaaaatgatcatacctggtagaaatacaaacgactagaaaggcctccgacatcaagctcccaagttctagagtcgccaatccacccatcaccttgtttttcaggatagccatggacagcccattcggggtgtggaataatctgtacaagttcctgtgcttgtggattgctataagggtcgcatatatcatatggtgcctccaaataatccccattcccagggctgcagtatagatgataagcagagtatggaaacctcgacgtgtcatttctgtatatcttctcacccgaaacagtaacatggtaggggggacaggagacgaggttatcagcacgacaccagcttgtggtagctggatttatgatcatttcgctatatctagtcacatctgtgagaacatctccatcacatggttttccattgttcttccaacagcttcctatgtctaggagataaaactgactgttggatcctccaccgcgtataacattgagtgttaatcttactttgaaatttggagagactggcaactgaaaacatgaaaattctggatttatgatatgctctttcttaacttgattcacaaaagaacacaatgagaaataaaaaaacataagcaaggataattaagcaaaagtattttccacatgccatttgaactaactaacactaaaaaactaacctttttcatgataccacgaccgttataatgataacctccattaaatcctttggtagcgtctgcacgcaggtataacataagccaaggatacttttgagatgttgtcagtttatgggagaaaatccaacttcctgaggtcaagttcttttcccatgatactgaaaagtaggaattgttccccacacctttgctcaagtccacatcaaggtcataagttccgaaaaatttcccacttaagaacaatggttgcatcttggaataaaacaacctcgagtaattgtgataaattagtggttgattcatacaccctttgccaaaacaaggaaaatttctgcctgttataattttgctgacctttttaccattttcaggacaaagtgtagtgttcttgtcaaagtttccatttttaagcataatcatccaaaactgccatggatcctgggagtcatgaacttcacaaagcgaaccaagataaagttccttttctactgcatacaagtcagggtccggatatggattgaaactcgttgcgggaaactcatcacctgcttttaacttgttgtctgattcatttactcttctttgcattcgacatgttcgtccattcatattggtgatatccaaagaatctggtaatgaagacataaaacgacaatcatctctgagaaaaaaaaagtctctaaagagttggctacttttaatgtacatacggtaattcaatgttagtctaagctttattgaacatagatttcttagttcaaattatttaacagtaagtcaagcagagacctattaactattaagcagtaagaacacaattgtttcatttctatatatttggcaaactacaaaggaaacaacttggtttcttaaatgggatgtttgtcttacatg

SEQ ID NO: 185 - DNA, 1086 bp, Cannabis sativa
gacaaaaatgtaagacctaaaggcaatgaccactcaatgtatcaacttacatagccattaaactgctgagcagccgcttcaacttcatccatagaagacatggtcacaaaaccaaagcccctgcttcttcctgtcgttttgtcataaattacctgccaaaaaaaaaccacttcttaagacaaatgaaagcaaaccaaaccctagtctttaacaaaagaaaaaggtcaaaattttcaaaaacaagcaatgaatatacttataaaagagtgaaagtttacctcaaccatctcgacatttccagctctctcgaagagaccagcgagctgagcactgtcacagttaaaaggaagattacccacaaaaagtttgaggtcaggggcgaaatttcgttcgccgccgtcgctggaaacctcttcatcctggtcaaactcagacgaaatagcaacattccgtacgaaccgagaaggaaggttacggaaacccttggcgggaacgcagacgagattgacattgagcttcagagaagatggagagagtgaacgaagggagagcaaagcgggtttagggctgaagagagaaagggttttgggagccaaggaggcaagagctaaggaagaagcagcggcagacatggtagcaacgcttatagaggaagatgaagataaggtttttcgagaagagaaaaagagagggtttgggtttaagaagaagaaaatgaaaaagaaatatcctaagagataagaaaaatacttttggcagagggggatatttatggagggtttcgggtccgggccggatccgggtttctgcccacttgctcttgtgtcagattatatcacagccgtagatgtaaaattggaaatggacggttacgattgatgccagctgtagatatggcttgttgtggatagcttgatgggtggtccaggttttgagtcgcacttatgtttttattcactcactactatacgcagcagctacaacttggtctaaatttaaataatacaatttaattaatgaaaattgttttatgaatgaagaaaataccacctaagcaacgagtcaaaaggtgttatcaaaaggttt

SEQ ID NO: 186 - DNA, 1531 bp, Cannabis sativa
tcacttcttttctcaaaaaagcaatcttgaccatctatttccatatcctgtggcctggttggccatctagatttctttccaggggtgagttccagcaacccttcatcatctaatgctgcatcgaccaactgccaaaccattgaaaagacaaattcaacaaccagaacccctggttcagcaacttgaagaccaaataactgggaaagatgtagagcttcatcaatggacttcatgatcctgcaaacacaaaataaaaaacgaaaccaatagaaaagttactaattttttctttaagcaaaaaaacagcatctttaactttattttttatgaaaagacaattaggttgaatggtaaacccctctgcgcaaggaggtcaaacaataaacacaatttcttttctattttgtaagaaacaacaaaacgatatcctatttctaacccttacttttgattataaagtccacttgtttgagaggtgaatgaaaatgaatgtctcttaagaagctccatgtaaagcctgtaagccgtgggatggagctgtcgatttggaatgaccctttacataacaaacaaagtataagatatcaatagtaaccaatcaataataagtgaagaaaaagcaaacccttcaaagattttgataaactatgccacaagacatccgaatctcagttgtaattgactaagaaaaaaaacgccattacaatacaatgcatcatatatatagatagatagatgaatttgctttccacgaagtacagaagccaactcttttagagaatttgacaaactccatgtcaatgcaccacaaaaacgaatttttcttcaaaaaaaaaaaaaacagaaaaagaaaaaaaggagctgcatggtcaagttaaaggaagagtcagagacagacccattcatcagtggtcccataaatttggtgggaaaaaggagagaagtggggataccttgcggaaagaagagcaaggacgaggatgggagggacgatcatagcagtcaaagctttctcgaggaacttccacgtgatgggcacgtgattagcccagcagatgtgagaaaccaggaggtgagcaagttcaacggagggcaaaggaaccccagccgagttaaggttcgaactcatttgcgttgcccagagttgaggatcgatgttcctttcttgagctgacttggtgatttccagcacggtgtcccacagatgactcgtcggtttctgtacggacaccgccatggcccctagtttctctctctctctctctctataaagaccaaaactttactctattacttctccttcttcctccttaacgaggttgagggagaccttagaatctgagaactcgccactacttcttctactctactcgaatggaaatggaagagtaaaaagagggaaatagccaatcgaatttgctttatttatgcttttatttttttattattttcttttttcacttcttcagaaaaaagagatttgggattttgtgaggggaataatttttatattatacaaaaaaaaaaaaaa

SEQ ID NO: 187 - DNA, 3436 bp, Cannabis sativa
cttatgttgttgacaaatggcgcattcttggacgaatttcagtacatcttttcgcatccctacccaaaaaacctcagatttcaatcgttggtatgtcttcatttcccccgaatgtcctcccataggagtggtgtggaattctcctaggataacaggaatcaaagaagaatttcgggggatcacaatcctacccttgtacaacaaaatatcctgctcgatcgtaaacccaacatgttgtttcccctcggatatatcccttttgatgccgagaatgagagaatcttgctgaacctcagtttggagttgctcccagtgttgccattgaggtgtttgaaggttattaaactcagctatagctgctggttttctagacagggcgtctgccactaagttgctagcaccggatttgtagacaatgtcaaattcataggtcatgagtttatctacccaacgctggtactcattacctatcacccgttgctctaagaggaatttaaggctttgctgatcagtcctcacaatgaagcgtcgaccgagtaagtaaggtcgccatttatttactgcatacacaatagccatcagttctttttcatagattgacttaagtcttcctcggggaccaagagtgtggctgaaataagctatgggtcgagatccttgcatgagaactgccccaaggccatatcccgaagcatcggtctctataatgaaaggttgagagaaatcgggcattgctaacaccgggactgtactcatggctgtctttaattcttgaaatgctctacttgcctcttcgttccacccaaagcaatctttcttcagttgatctgttaatggctaagctatttgcgcataccccgccacaaatttacggtaataccctatgagacccaagaaccctctaagctcgcggatgtttcggggaaccggccaatctatcatagcagccaccttgcttgggtcggctgccactccttgacccgagatgatgtggcccaaataagtcatttggcgctgcccaaattcacattttttccgatttgcgaaaagctagtgctgttgaagtaattgaagtactatggtgagatgtccaatgtggtcttcgtcactggagctatataccaaaatgtcgtcgaaaaaaaccagcacaaatttcctcagataagggcgaaaaatggcattcatcagggattgaaaggtggcgggagcattggtgagaccgaacggcattaccttaaactcatagtgtccttcatgggtcctgaaagcagttttcggcacatcctcttccctaacccgaatttggtggtagccggacttaagatcgagtttagagaatatttgtgcaccgtggagttcatccaagagctcatcaatgattggtataggaaatttgtcaggaatggtggcactattcagtgcccggtagtctacacaaaacctccaagttccatctttctttttgaccaacaagaccggactagagaaaggactttggctgtcttgtatgattcctccttgtaacatctctgctgtcttcttttcaatctcggtcttctggaattgggggtatcgataaggccgcacactcactggtggggtcccttctttgaggtttatggcatgctcatgaccacgtgttgggggtaacccttgtggtgtttgaaacacggggtcaaacttcaccaaaagctcctccaaaaaaattggttgttcggtcttctccacggttgtcaatgagggacatattggatcgggtcccccatttggttgggattgtttcctttgacaattttgtactaaagacttcaaagttaccacgcttttgcccaaggaagtatcccccttaattgttaccggttggtccccaacctgaaacttcattgtttgttgattccaattaacatgggtggtccccaaagttgctagccactggattccaagtatcacatcagtgcatcccagcccaaaaggtaaaaagtcatctacaatggtcaaccattgtagctccaaaactacttcccgacagattctttctcctttaattgatttacccgaaccaagagttactccataaaccccagtttttgtcaaaggcaagttgtgttgctcaactaggttcttggaaatgaaattatgtgttgctccggaatcaataagcaccattacatcttggctgccgagggtccctttgatcttcatggtcttgggagcggtcacaccggtgactgaattcaaagatacttctgctgcaccggtcagttctgcattatctaaactaagatcctcctcttgcatagaatttgagttctcctcgcaacctcggtcaatctcatcgtcatgggtcacaatcacactaagctctttcttttcacatcgatgtcccggtgaccatttgttgtcacaccgataacaaattcccttccgtcgcttctcttgcaattcggaatcagtcattctccgatattggcccattggtttcctatcctttggtgggaattcggtgctcttgcgatcttcgtggtggctcgggtatttggaattgccccaaggagagcgatttccaaataaagattggttcttgttctcgatcttggctgccatttccattgctttattcaacgtactaggttcaaacaatcgcaattcctctttcaaaccccgtttgagaccggaaaggaattgacccaaagccacggcatcggataccccctctaagggtgccaacaactccaagaatccctcacaatattcatcaaccgtgccggattgccgaaattcaaagaattgttcatgtaaagatccttttgaagtgtttcggaatttattcaagaggagtaacttgagatcttcccaaagcaagattggtctccgacgcgtctcccatcgaaaccaagttaacgccttcccttcgaagctaatggtggctgcctccaccatttcttcattgttgaatctttggagtgcaaaatgcttctcagcccgcattacccatccatcgggatcaactccttcaaaggttggcagctccaaacggcgtaatcgaacatgccggcgatgttcgaaggtggcaccactgatttctctttccggcatcatcgatttttcatgtcccagccgctgtcccatccttgccattccttccggcgtccgagcggtctggtagtcaacgccccgttcttgatttccgaccgagcccgactcctccgtttgtcttcccaaaagacgtccgaccaactccttgagttgtcgcatctcctctcggaaatccccaatttctgcacggaccgagcccacctccgccttaacttcaccaatctcagaatcgacaacctcctccatctccgacaactcctccgcccattcttggtcggtctttgccggtttcttgggcattctttccttcccggacgaactgctctgataccactttgat

SEQ ID NO: 188 - DNA, 4635 bp, Cannabis sativa
aatgttggcacgattaagtgatgtgtagtattcaagaaggttggacaagattcgagcaactgtattccaccctaccattcgagtgagaattttctcagacattgaaaaaaggagccaagaaagaagaatgttatcttgttggtcccaatcttcatattcaaaacacatccgattagctagccaatctttgttggtcataaattttggtggagtaatccctagatcaagatgtttttggagccgatttcctttgatcacagtaaacacttgataataccatgggagatagttgtgttcatccaaacaaacatagagggaatgagaaaaagtaattggagaagacttcgggagattgacattactcggattgaaagtggctgagtgagatgaacctctattcccatctatgaacgaaagcttcaagcttcaaagaaaaaaagggctttgataccatgtaaagggaaatgaactgaacgaatcaaaaaatgaattcttatgtattgattatctaagctttgataattatacatgaactaaagcaaaaagccagctaagaaaacagttacaagaggtaactaacacctccactaatcaactaaaacagaagttaattacataacagttataactaatttaactcccttaacatggatgacattcaataacagatgtacataatcacctactagccctagtaaagaacaaccaaatttagaaatagcatgaacaactctatttgctcccatgtaagaattataaaattttacacataacatacataaaactaggagaatccttgatctcctccactctcctaattctttagtgtgcaattgtgcatttcagtgaattgtcatgtacactacttatattaacatcttagaatttgtcttgttaaatattttatagtatatttttccttttaatatttttaaagcaaaatatatattaagttgttgagaaacttaaaaagaaaataaattcccaaactgaaaaataaataacatggtaaaatgaaacatgtggggttgccggttccatctctggtttacatcacggacagcctgcctcgtatcactatcataagaagtccttaagtccacctttttctttctttttcttcattcattaaattatctttgttgctctgcattgttaagatgatgagtcatggccattgagacctatctctttttgataatctttaataattgaaatatctcaagtaccctttcatttccctaatttaagccctcgtcacatttttaaattttcgttctgatatcatataaataaataaataaatatatcaaaaggcatgtttccagtaagatttaataaattcccacaagagaagaaatctacctaaaagacgaagcacataacacacaggagattttcatctatcgctatcatctttgtcagtaatacagatgaaagaaagaccttgttttcccaccactcatgcacatgcccatctgccctcatgcctttcccatgtgctaaccacagataaacctttcttttataatgttatcctcttctacataaaactaataacataatttatctattatttgattgttcatttaatgttcacgagtcatgacttgttttatattggcaataatcagtctttattgaaatgtctacttaattaatgttacaacttatatagaagaagaataaggaaaaattgaaaaaaaaaaaatgaactgttcttctaagtctggaaatgagaactcaatgtatatatattataacaaaccagttaaaaaatggaaaacatggaaaaccgttgtaccagatatacagtttgcaaaaattatttatacagtaaattaagaatgccaaaatccagtcaatatatttcggaacctgtttgcggacaatttcctgacaagtttcttggcatcgtaaacctctgcatctgctaatttttcaatgttcttgagatgaccagaactcgcaatctttcttctcccactattgctactggtcaacgacataagtattgaaagcaacaattttttgttacctgaatgttcttgttcagggtcaagcaattggagaagcagggcaatattccgatcgtcctgtacgaacctttttcgatttctgggcaccgaaaccatgcctgagagggcctcaacagccatttctcgaacctcaaatgattttgaatcgagaaacttaatgagctcaggcatgaaaccggcatcgcctaatgctttcttggcttcttccgatgtcccagatagccttacggctacttttaatgccaattcttgtactgaaacttctccgtttcgaagaaaaaaaatgaggtggtctacgaacgagttattaagtagaaacccaattgagcttgttgatgaaaaacagagattttctattgcccggagagctatctctctggtcttggaactacaagtcgatctgggctcgatgacttttagtaaggttcgaattcctccttctttgactaccgtttgcctgatgaactcatctccagacgctatattttgaagaaattctatggagtttacctgtacagtttcatccttggaccgagaaagcttgacaaatgtcgaaatagctccttcttcgaccataaatcttcttatttcttcaactccggcgagatttttcagaaccccacaagctggacctatcaattccgctcggcaatcacttaaagaacaaatatttagtagagccgtaactccgccgtgagcagaaaccgaccaagcgttatcagaattctctgttattttttttaagcacctagcagaagcttctttccccaactcactcccacattccaaaacccgaatcaatggggctatagctccggctccgacaagaaaacctttatgggaatcaaacccagcaatgacagatactatttttgcagatccttcttgaatttcaatctccgacgagtccaagaagttgacgagtacattaacaacgtcgccaagttcagtaatgacgttaacatacttctcatcttcaactaccgccgcgtaaaagttactcaaagcttgatgcttcatctctatatcgccaatcttcatccgggtcaccaaatctctcacgtaaaatctcatgtcgtctctgcaagctccaaaaccaggtctggaaacgattaaggcaaacccttgagtcaaaatcccagcgttataaatttccgttagctttcttgaatgggcatcgaatttcgcagagatcacatccaaatcactctgcatcaaaagctttccactataggaaaaatcaacacagcggcgagcaagatcgtagcactcggtgattgtaaccatcaaagacagaaccaagtcattgatttcttggttctcacttgaattgcaattttcaaaggcaatcaggccagagttaacctcctcgagcttgctccgaatcgattgccatttcccagaaaagactttgatggaatgagacagtaatataagagacgagagaaaatcaatggcttgccgtagtccggaatctccagtggaagaatccggcgaggtttgatcgtgacactcttctcccattgtgtatctttttttttattattattttctacttatttaaccgaaaaccccattttggtttccggtcggattggtccggtgagccggcgggttgtgcggattttccggtgagtttgatcggaattaggggagcagagtggaatcttaagctgtgttcttatcaagaactagagggaggtggttctgtacttattatccttagttctcaaagctgaatcactaaatagtattttacggaaatgaccttgctatagtcaatgtcgtgtcagcatagtcagtttcgagttaagagggcactactgtctttgtgttcagtgaataggccgtgtcaaattgttggaagttggaacgtatttaagggaaaggaaggttatttaactcttctgatgattgtatacgtgaatcgattttattaatagttttcttttttttatatgtaaaatataaaaataatattttattaaggttcttggtgtgtttgggtttctattctgttgttcttttgttaggaaaaagtaatacttttacggtgttttgcgattagaatattactttttaatgggaaaaagataatggagataaaactttaaagcaatgcattttgttttgttacttaataagtgttgtacaacttatttttataatgaaacttttgagtgaaagttatttattagttagttcaatcatcatgctgcatcagcaattttgcccctcgaataggttttgtttgttttcttttcttattttttttttctaaaaagttgattcctttacatccatacatatatgtagatagatatatttataaaataggaagttgagatcgatttagaaggtgaaattttagtcatttttttggtagtgctccaatttggtctgattcattttggagtaaacgtcttggaatttagcttgtggcctttactggccaatataaggtaatcttagttaaatttgagcttttcgtatttgtcaaggtaaggaaaacgtaattaataaattgataggcttggcttttggcttttgctaaaacgggttatgtaaacatattcaataataatcaataatgtaa

SEQ ID NO: 189 - DNA, 5286 bp, Cannabis sativa
aaaaaggtccccattttttcctcaaaaaaaaaaaaaaaaaaaaaaaaggtcaccattcttttactttcagtcatcctctcaatgtcccaccatgtgagcaggtccagcacataacccatcatcatttatgagctttaattaaacaccatgttggaggactagactaggcttctctattctcttttatgataagagtattgttattagatactaatcgtgtttagtattttttagactttgtaattggtcaaaaatatttcgttaaagttattacataaaattatatagaaattgatatttaattgtaccaataacaacataatatcgatgaaggtgttggccactattagtgggtccaatattattatatgtgttaatatcattattggtacaattaattatcggaacctatatacataatttttgaggaatatcactagctaattataaaatgtcaccttaagtggtatcaatgacactgctctttccttataataaaaatgaacattattattaagcatcaatggtacctaacactataataagatggtgatccatataaaacccgataaatactactgatgtattttaatattagaagatgctaagcaccactaccactagcattactaatatattttaatatttccatactaaattttatcaaaattaaaaaccattgatttgattgaaaaataaatatgatcaattcccaacttccatttatttaagattctaatttattaaaatctcaattcccaacttccttttgtttaagattctaattattaaaaatctcaattctcaacttcctttagttcaagattctaatttattaaaatctcattctcaacttccttttgtttaagattctaattaattagtgcaatcatctaaggaaggaaggagggaagtttggttggggagattttgattttctttcaagtattgaaaaaaaagtcaacaatgattctgagttgttagctacaaacccattttcattacaaattttcaaacccaatcagtaggatgaaacatttgttggttataaattcacaattgtataatattgtttgattttcttaatttttcaactagtttattagattgtgtaataattttgtaccaacatcatctttacaagttaccattgttttaggctctagctttggtttaataaaacaattatatatatatatatatatatattcctttttaacaaaaacgtcatcaaaaagccccagacaattaggtaagccaccaaacatgagaatttatttcggaaaatactaatgtagctaatgataatatgcaatatagtattatctctttcacaatatgaaaatgatataaaagagagacttccaaaacttgctgaaaaggtgctgggaactaaaaaaactagttaacttagtaagtttgatggtatattatatattgttaacgttgaaaagtggtcaacatggtgagatgattaataaatttaagtaaataatttagaaacacataaaatttatagttgttcactctccataaagcgatattaatggaactatatctactttgagtttttatttctcaagagaattatagaaaatgctaagtgtttaaactctaattttgagagagataaactagagagagatgttctggccttgtagacagttttttgaatgtgaaaaattagctaagaaagctccccttttataggtgaatgagacccacaaaaatagggaaaaaaaatacaaattagatatttttcatcgtagataatgatcaaacaataaaaattagctcttggtggtaatgactattttttagaacctggcgggacccgttacaggtaactcagagcttattttcgtaactcacttgtggtgaaatttgatgccgatatcttcagaattacgattgaagtgtgagacatgacttgatagagcattaaatcggcttcaaaatacaaattgaattgcgtcaatcagataaatattgagtgagttatgactgttttgttgaaggtagttcatgacccaacacctatgttgacatatgatgtcaacctggacgctaagtaagtgtaaaaacgaccaagagatgtactttaagatgcctgagtgatattgtgacatcacttagtctatatatgtgttctggcgaagctggtcactagttctcggagatgttgttattctgcggaaatgagatacttaaaactctttatttccaagtgagtttctcgtgctagaaatgagaaatgcgaagttgtgaatttgacttctctgacttaaaggatcttagttattgtgaaaaactatacggacgatcgaaacagaatcagaatcagataagcaaaacccaacgcactaggccatttgtcaacttgggcattgggtaccctattcccgagctcccatgatctcgttttgatactttcaaggttcttgaacttgaggacgatgtttcctacccggtttttaactatttcagattcattggttagattaaatttgacatttgagcaattgaaggtagcatcgcatgttgattgtcaacctgggcgttggatcccatttcttggggctcgagtttttggttttcttctcgattttgcttgaatttacattatttctaatgaccaaaaaaatgttcagaacactttttcgagaacttgactagaaacagctcaggttgataatatatcaacttaggtgctgggccccgtgccagctgtcaacctgggcactgagtcccagttatggcccttcgaaagtttcgtttggtcctcgaaaatagttgaatcttaatttttttttaaaaacggagaagatgctcggaagagttctcgaaaaatattatcggaatccgcctacactgtcaaaatgttcacctgggcgctgggccttgcttctggcacctagaaagtgttgtttcttccccgaaagtacctatttcctagcttttgataaagacaaagaagatataaaagtcggatcgtcgatctgatacttggaaggcgcccaaattaataaatagtcaacttgggtgctggttacccgagcatcaggtgctctggatgctcaaaaataaacttgttctgaatttaaggacaagaaggcattcctttgatactaagcacaaggagggtagtggttcgaattacactccctatatttaaacgtttgtttcaaaaaaaaaaaagtagatagtataaaagtttgatagaaattgttccagtaacctctaataatatattagtaacaagtatattttttttaattcttacttgaaatatagatttaaagtgaattttttttaacactctaaaaagaatatgcttaggaaagatcctttccttaccaatgcactacataattgatctttcaataaatcaaaacattgtagatttataataaaaattacattaattctaaacaaagagattaaccttttagtccaaagaagttctactagcctaatgttctaatacacaaagtccatctaagaccctacaatacaacccacttcacttttttttttttaagctttttattattcccattggttcgcattaaattaattattctttttataataacttcacttgatttggatctttgacaaataaatctcaaaataggcatttttaagtcaaataaaaaatcaataaaaccatgaaattatgtcggtaagtggaatatcacactccatacatacaaatcatctactatttttatttatttttgttttttatattatttagacaaaattcaaaatagtgtccaattaaattattactaaaataacaactacatatattttttttgctaaaaaattattaactttattacactagaattaatttctacacaaattaagaaatatttcattaatagtaataatcatatatataaatggatcggacggcatgggacaaattccgttaagtgggacccacacacccaccttattccactgcaggagatctaaaccaccgacaccctcaaaacacctcttacaaaatcgacgctcgaaaactcgccacgtgtcagatcagcccccttcgattaaacaaaaacggtcccattttaaagccgcgtcctacgggattctatcctctgcgatcgagttcatcctaatctataatactctcgaaattccgacacgtagtggtcaagacacaaaagtcaaagacaaagaccatgcttaatgggagtaagaaagagagtgtaggtgaggttgcgtaacagagaataaaaacccactcatcttcttcctactctgctctcagtataaatatacgtcacacatttctgcaactgagcttaatttcatttctctttctttctctgatatttttcttggtttgagcttcgaaaatggagatattttactacctggttttcggattctttggccttgttgtggccgcaatggagttgagcaagaacaacaaagatcgaatcactacatcaccggctttcaattccttcaagaacaattatcttctcgtatactcgctcatgatgggtaataatatataacatctcactttttcttcttagatctgatttacgctagatctcgtttgattttcgtgaatgtgttgcttttttatgtttcaatttcttgaaattcgatctgatctgagtaatttaaagcaattgtgatgacacattcttcagatctgtgttgaaacttattattgtcgtttctttgatcgattatagcaatatttagacatgttgtttatatattgtgtgtgtttgtgtttaagcttagaagtttgtgagtgtttatgtgagagaggtatatattgttgttcgttcatttcagctttgaaattatgtgattatatattgatctggtgctgtgtgtttatctttgctttctctcaaattagtttaaattaatggttacgttctttatcactactagggttggtaggcatgttatttgctttatgttaaattaattgtttattcagcttaattagattcttagctttttcgataatcttttttattctaagggcatatatatttgatttctaatgtacaaagtttaagaaatttcttgatgaatttgtttgaacctttctggatgttgtttacaaggaaaattcttgttttacttttaactatggttttatatttaagaaaaaagaatgttaaaattctgattactgaccgattaattcattaacagcgggagattggttgcaaggtccttatgtttactacctttacagtacgtatggatttggtaaaggtgagattggacagctct

SEQ ID NO: 190 - DNA, 8186 bp, Cannabis sativa
agtgaagtaaactacgaaaagagctctaaaaacacttgacatgcgtagtcacaaataagaggagcatacatgataaacattcacatttcttatcccattggttgggtcaaggaaaagattcatattcaaggctcctcttcttgctatggttctagtaagaggtattggagttataggacaggacatcaagtaaaactacatctatcttagtaaaaagagtgttagatgcatgtgattcaagttactgctaaataaaaaaggattttggttatagttttcccaccgatgcttgatccggtcatgtagaactagaaacaaccggacatgcgagtgatggattaaacgaatttctttatctctctgtgaatcatatgttttcatcaaggacatattttttgttgtttaaattgacaactttggcagtggttttgttggaatctccaagcaaaccaagcttattttgggcttaagagatgatgcatgagttgattgaggtaagggagatgaaaattttcatgagcttatttgtgtaagcatttcaaaacaacatatgagaagtatcattgctccaattgagatagagcatcaattttaataattcctggtcatgcaaagaaacaaaatgaataaaaaatttgggctggcgtatagcaaaacatttatgagataaggggagaaataactaatcaaagaagatttttctagtgacgaggagattcttttcaaataaaaaaagaaaaatgaaaaagatatgagaaagttgacagaagttttctattcagattggatagacaaattccatgccagactaaatggaagaagaaatagaaaattgagacctctcaatttattggttatagctaggataaaaatggtgcctctcaaaaacctgagaaagctttttccttatcctttcgttgtttgcctccaatattcttcccaagcaaaacgacatatcctttcatccctagtgtgatctttctcctagaacaataatgttcgaaactatgcctccttgaattttaagcaatcaccaaagcaatcctctaggattctttagacaatcaaccagaagcacatacaaagttcctcttggaaccttcaactacctttagctccatttcttctgcaattgattttctaacaaacacctcctattagcgaagatcagcgatggattctcgaaaatccaagttcctttgggcaaaggaagattgatgcaaatactaaatggcttcattatttaatgagcccaaggaaatctaaaaactttattttgaaaattgagaggaaggatcggtctatcttggccagagaagaagatatcaaagcatatcttagtttctataacaaactttttaagtagaggagatttgttttgtaggtggtagatgggtgaagtagagacgtatttcccaaattatggtggattggatagagagatgtgtaaagaacaagaaataagaatatcgattttgcatgatgcaaataagtttcttggccttgatggccttaccacagttgtcttgctaccatgttttctaagatcattaggatgtaattagagaaggtttggtgtgtattcttaacaaatttggtgcccacgattttgttcatggagtggctaagaagatttacattctaaaagctttggaagaggagttgcttgcactttaggaggggatcaaggtgtttgataggctgcggttggagactatagtgttttgttttctgattgccttttgttggtgcaggccatgtggaaaaaagcctcctagatggtctttggcttgtgcttttcaatttgttgttgtttggttttctgttaaaaactgtttgtttaggagggttcctatagaatctaatgttgttgctcacactgtaggcatcaaagactattaaattgattgatcttataacaagtctttgtaaaataatctcaaatgcaatttcctcaagattgaaaaaagtggttgagaacacattttagtaaattcaggagcaattctaaaagaaatgttggtggctaaccaaagaaagaggataagaggggtgcttaaataagactttgaaaaagcacaacctcatggattggaatttttaagattttgtgcttcttacgaaagattttggggaaataaataaagtggacgagaaagatttacaaggtatctatcctcctttcttctgttcactttagttttactcttgattaaattcacgtatgctaagagtaagaaagggagccagggggaagagttgttcggaaaaagatgtaatgttagtgggaggagtattttttcatttgactagttagaggaacatgtaatgttatataatgtgagtgggaagggtattttgatatttgattagttagagaggaaaatgtagcattggagtgggagattttaatcatgaatgtgcttagaaatcgagcagtgtatcatggagagaagcaaacctctcaaatatatggggtaacttctggcctatttcaataaaactctcataactttcttttgttccagttatttctttgttggtattataccatctatactactaaccgacaaaaggagaatatcaaattggtatcgaaaccactcgatttcgatgaatgcctctcaagttgaacaggttaaaggggctatttcaccgattaagggaataatatctacagtcaactaaacaatttctcacatgcaagagaatgttcaagctcacgagcacagtttggctgaaacaacaaagaagttggatttggtgttaaacggccaagccttcattgctaacgaggtggttgtcgatcacaaaagtctagaagcaagagcccaagaggtgtgcaagtgtcttcgggattagcaaaatagcactggtggagcttcacgcaaaggcgagggtgttgtcgatctaagtgttgtcctcagaagattgagttgcccatttccctagtaaagacccggacaacaggcctacccagttgactgttactttggtcttcagcatttgagtattgcagagcaatttgaaacaatgatcctttgtttggaaggggctccattgcattgattttgttgggagaacacaaaccatgagattcagagttgggaaaaactccagtccttattaatatgtcgattttgtcctgcacatgaaggatctgtgtaagatagatgtctagggcttcaacaattgtcttatgttcaagaataatggcgccaattcaagtgcttggctttgtccttgggatcaatatctaaacctcttttggaaacatcattcttgaaagggtcactttgtatcctaaaactggagaagacaagggagctggccctcaaacaattgaggccaaccaagccttcgtacaggctcatcgtattgcacctagtaaatgaaccagtcctagtcttgcccattcatcaggaggcttctcttctcaaggccttaaggggactgctgttgagccctctaaaacaccatcttcgcacgactattcctcgaaattttgtaggcatatgaatcgattaaggagaataagtttagtggagtttgcttcatatgagacgacaagtagtcttatggccatcaaagtaagtttctgaaactccaaattgtcctgattcaagatgtgatcgcggaatcgaagctagaaatgacaattgaagaagtgttgagtttggccagcgaatagaaagtggggactcaacttgtggaagtggcccttagtttcgtggtggggctgcttcgtcgaagaccatggaacattaaggtagtattaatggacaacaattgccagttttaattgatagtggggcccaagttattttattactttcgagttggttgcccaattacagctacctacggctcaaacggagtcatatggggtccaaataaggattggttaggaaactccaaacaaaggaatgtgtcaagaagttcacctctctgtgtaagaattggacgtcattacttattttcttcttcttccccttggcaacactaatgttatttggtaacactaatgtaattttgggcattcaatgacttagagaccgtgggcgaaatttatcaccattggcaagtgcaactcatgtgattaacaatggatgggaagaaggtaaccttgtgatgtgacccatctctacatgagataagacagtaggaaggtaagaagtttgggtggaactttacagtactgcggaatattattggtatcatcatttggaggccaatccaaaattagtacatgtttgaaatgcctccatggccattcaatcattcttaggtacctctctggttagcgaccgttcttaccgctaccccccaaatttaggaggaggagattgagaaggtagttggcaagatttcaacaattagaattatccaatcgaatcttagcattggtgtttttgcatggattatcgcgccttacacaaggaaaagttgttcattaagtttttgatcctatgtattgaggaacttcttcatgaattgaacggtgctatagtgttttcaaagatgcacttacttgaagactagctatcaccaaatcttaggttgaccggaagatgcccaaaaaaaacaatgttccaaacgcatgaaggtcattacaagttcttggctataccctttggtcttattaatgcttcttccatagtgctcctgccacattccaatctctcatgaataagtgttcaagccttttctccaacattttgtgttcttctttgatgacatcttgatttatagttcggatctctccactcacgtgtctcatttgacaatggtgttgaggaccttggccactcaaagcctttatgccaataagaagaatagcttgttcaagcagcaccaaattgggtacttgggccatattatgttaggcacaaacgtctcagttgaccctagtaaagtccaagtaatgttggattaacccaagcctaagtccttgcgtgacctttgtggttttggggagtattaccagaaattagtgacaggttatgggaagattgctagtcccttgacaaacaaacataaaaaaggatctgcttggttggatagccccagcaactgcagactttgatgcctttgatgcattgaaactcaccacgactttcgtaccagtgttgacttttccaaactttactcagcctttttgaggtggagacaaatgcgtcgaggtatggcatcaaagcaaatctaatgcaaaacaatcgccccatcgcttatttcagtaaggttcttaagcttcaagtcatctctaccacatcatcccttattccatagtttttgaccgcctataaattagtggcattctagaaagactcaaacctacaaacgacagacgattgatgtttactgggtgggcatgaaaaaaatatgacagagtttttcgctcgatgtgatatgtgtcaacgcaacaaacattaggcaatgtcactctttgggctaatccaacccctcttgttgcttgatcaagtcctgtaggatttgaccatggacttcattaaaggtctgacgaactcgaatggggtggatacaatcgttgtggtggtaattcatttaacaagtacagccattaaattcctcttaagcaaccttttaatgctcgagtgatggctaatgctttcttcaaaaatgtgtttaagctctatggcattccccgctcaacttctcactaggacaaagttttcctaagccacttttgggcggagttgtttaaactcaaaggtattgagctccatcatagcactgctaccatccggagaccgatggacaagcaaaagtcattaacctttgtttggagacatacccccattttttgcttctaaccaaacccagggtttgggccaagcagcttccgcaggcaaatattagtacaacactagcttccacacctctctcgagtgtaatacaccgtttaaagtattgtttggtcatgatcctccaccaatagatcatttctcactaggatccactactgttcttgtgattgatcaatgggtcgaggaacgcgatattttccttgataatttgaagatgcatctacttcacgctcaccagaagaggaaattggcaatgtggagttttaggttggggatttagttttcatcaagctacatctttaccggcaagagacgttggttgtctgcaagaatgaaaaattggatgcacgctactatagtcatttcaaggtcttgaggcatatcgaccccattgcttcccatttggaattacctagcaaagcaactgctaaaggcccaactcattcctcgcccactattccacctcaattgatagcaaacctcaagttgcaagtgcagtcaaagggtgtgttataggtgtgttgtagccactctagcacgactcaagacatgaagttgttgctcaaatgaaggggcttgccactctataaagctacctaggaacactttaaggagatccatagacaatttctagagtttcaccttgaggaaaaggtggcggctgtaatgttagaaccttgattaagttcacatatggtaggcataagaaagggagctaggggcagtttgttttggacaaagatgcattgttagtgggaagggtattttggtatttgttgagttaattagagaggagaatataacatgggagtttaagggatttttatcatgcatgtattcataaattaagcatcgcatcgtagagagaagcaaatctctcaaatgtatgaggttccttctagcctaattcaataaaattctcatagattctttctgttcttgttatttctttgttggttcttgtattatactatcctactactaaaccacaggtggagcgtatcatattacgatcatgattaacaaactgaattcgtttagtgcgatttcaaggttgagaattaattggtatagtgcttacttgggtatgccttttagaggacaatccaagaaagctttactgagaaccaattgtggcaaaggtgaccaccaaaaagcttgtcgggtggaaaggtgcttctatttcaaggggaggaagactaactctcaaccaatcaatcctttgaactttcttcccttcctatttactaattgggaagttgatgagaaagctcttatggaaagggggagaagacttaaaagggtataatttagttttttggaaatttgtgtacaaatcaaactggaaatgaagcataggattggaaattttaaggggagaaataaggcctatgtatatggaaatggagcagcctattaataaagataacacagcaatggaagtgttatggactacaaaggcagaggctattttgtggtctctttgacttgaaagaaacaatatgatttttgatgaaattgaaacaaatgcagagaccctttgggatagaggtagacatttgatggcaacttggcttttaaatgttgaggattcaaaaatattctgttcttaaaccttcatagaaaatggaaatattacttacaattatggcttgttatatgcccttaaaatcctatgtattattgtctctattataccatctgtaatttttttttcttcttattaattaggacttcttcctaatttttgatgtaatagttcaaattaatttgatatggtctcatttcaaaaaaaaaatgataaaaagatcagcattgtagactctatgttgcaacacatttcaagaatgactaattaattgacaaatcactgattcactggtagcccgaaatcagaatattacatgtaacaggggagaccagattgcaattgataaatgataagaattacgtatggttaagtttaccattaacttgccacaaaataaataaataaataaaaattcacccttattactcattcaaaaaaaatggtttaccattattaccaaaccaaacaaccacttgaggctggctcaagtgattgggtgagtgtgtgtgagagatgatagttctagtccctataatacatcaaaaattaaatgaccaaacaaacaataccttgtactcatcaatggcatcttgggcgaatgtgatatctacatccttttccctagttccaaattccaatagtaataagcacatagattaaagaggtgaaatgaaccaactttcaagctaagagacagagaatatgcaaaaaggaactcaaaatgtatcacagaaaaaaaaaatattgcatcagaatttgaatctaag

SEQ ID NO: 191 - DNA, 7780 bp, Cannabis sativa
  modified_base (863)..(873): a, c, t, g, unknown or other
actaaaaccgaccgtgcaaaggcatttttaatcgaatgcggttagttttcagttttttggatgtttggacggtcggtgtactcggtttggtcagttttttggattttttacttacccctagggtggagtgatacgggacgttgagggtgtagtgtggctggcttggtcatctggtgtgttaagtgaattttctattaatgagtcggagctgcttgcaattagacttggcctgactcttgcgcaccaatttagtttcagtgtctccattattaatagtgattctactatggcaattagttgaattaataatcttcactaaaattttagtttttagtctattttattaaatattaattctttattaattgttggtggtggtagttcttgtagtaccattttgcgacttgtaaatgatgttgtccacacattggcaacctctgttactagtttaggagagtgtgtatggacgaatgcttgtttataatttttaagttcttctgtaacaatgaatttatcttaatatattgtgcttttccttaaaaaaatattattaaacatacaaatatcaaaagtatataaatatatcttatattaaatatggtaattaacataaattgttggtataacaattttttttctattaaagttaatagttaaagttaacactgttaaatcaattaataaatattattatttaataaaattagttttaaatattcaaatttaatataaaagtatcaacaaaattaaataattatcttttttatataaatcttaatttaaattttaattagatattaatttaattaattaatcatactttataataaatttattagttatactatttaaaatatctaaannnnnnnnnnnattttattgtttaataaaattattaaatatattttgtcataaataaagttaaaactagatttaaaaattttatatttaaaaaatataattaaattgtattagatttaattttattattaaaattattaattaagtaataacaactttaatacgcaaacatgcgttgcaagttactaatacctagttatattaaatgtggctatatggtagaaagtgttattcttaaatatatatatatatatatattgtaattcaaatttaaattcactacacatatctctcttatcttcggtggctatataacttaaattattttttttaacattgcaatacaaatttaaatgcattgtacatatctaaaaaatatatttctattatcatttttttaataaaaaaaatatccttttattatttttttttaaaataaaaattagaaaaaatgtataatatttttttaaaaaaataaggtattataaaatcaaaattattatagttaaattaaaattataattaacaataaatattaatattattatgttttttttaaataaatagcacttatatattttataacaaaaaacaatattgtttattaaataacatcaaaacaaactaattatttaattaaaaatatatactaacaaaaataaaaattaagaatataactatgtattatacctaatattaatctaatacattattctcgtaatataattgttttgctaaaactctctcaaatggcaccgcactagaaatactacaacacactttaaaaaaaaaaaaaaatacaaccaaagatacatttacaataggtcttaggtagtataaagagatttttgccaaaaacatattcattggagatttttggtcagaaaaaaattagaactttacaagaccaaggggagaaattactatttgccattttctttgtattagtgatgacttattaggtagaatagttaaaagatttttaccaaaaacaaacatattcattggagattttggtcacacgaaaaaatcagaagacaactttacaagaccaaggggagaaattactatttgccctttcctttgtacaagtgatgataacattacaccagtaacgttttggatctagataaaaatgattagttaaaaaaatttcaccattttattaaaaaaaaatgcacatatcattacttttaatgaagaaagccctaaaaactccaaaacaaatagaaccaattcgaaaaaaattctataccaactgatgcctgatgcaactatgcttcaagcttaaattgttttataaccaactagtgggtaaaaaataaattgaaatgatgaaatcgtgttcattagcgagattctccttttcattttttccaattgtgatccaatttataacctccaaactaacataaattagagttagacagcaaagaccaatgactctttatccaaaaataggaaaacattaagattatttttaaccacaaaatgtctcataatataaaatgataatcaaaattaagactacacttactcagattgacaaaatgatgcaccaaggctttcctttaccatgaaatcagctcaaatatacaacattgtcacatcttataaatcaaaggaagaaaaagcctagggttacacctattaaagaatgtgaggaagactgatcaaacttataaatcaggccaaggaaggaaatctagtatacaaaagaatggaaataaatagctgacatgctaatctactcaactaagatgcactgaacaatatacagaagggtgactgcacataatatactatcgccaccccactagtatagcacactattttttttttctcttttaacacttacaatgaattggaaggtgttgtatatgaagactcagattcgggttcatttgaattatgtacactgttagttttaatgtctagtaaaggttttagtcttctctctacctcctcaacttgaacactcatctcctcaagaatcatagacaaggcacacttacatgattcttcgtctttaaatgctaaagtccatctcccgtcaaccaaagcctttgtcttggtttgtccactcaccccagattttgaaaggtccgccgatggtaaagtggatggacgaatccgcaagtgtaaccatcttgaatgtttactatcaattcttggctgcaggggcaaacacacaagtaaatactattatcactggattcctcaaaaatataacaaaagagagctaagaattaccaaaagggtgcatctattgccataccctaatttgctcaaaatttgtttattcctatacaacatttgattgaaattatgtttaatttttttatttttttggtaaaattactctttacatttcataaaaataatcataatttaaaaatgtgatggatgattcaaaagattgcgatcaaaagaatggaattgtatttttttcaactttgaaatagtatatgattcttacgttaaaaatgcatgtaatgcataaacaacaaattactaaagaaaatgatggcaaaagatagcaaaaattagagtcttggcgtatagaagacaaaaatattgtgagaataagaaaatagagaagaggatatgaacaaaattaacaagaaataaagaaagaaatggtacaggtaacacaaaaatatagtttacaaaaggtaactacaataaaatttaattgaaaattgaatggatggtttttttttttttgtgtgtgtgtgaagaaagtagacaagggaatggcgatagatccaaaaaaggaaaaatgacttcaaaaagaaatcgtagtgaacttttgaaaacctgcacattcttcatattaacaaacaaaaatgacttgtcatcacaaaggacatgttataggcatatctgtacatacatttgatccagccaaaggcgcagctatgcgaacaactccatagcttcgcttcaggggcaattcctctgctaagaccacccacccagacattccccgtgagattggtaaaaagaaaaaatgacgctctttacctctctcaaatgcaattcgacaaggtatggcatcaactgcaaatagcagcacccatagttatttggcaagaattcgtaacttgtagcacataacaaacaaatacagcatactagaattactaaagaaaaaagtggttaggtagaaagtcaatatcattattgcgcaatagtaaatataacttcagtaaattacaagtttcgtagaaaactgaccaagttttaactcagaacctgcctttggacccaaagaatctacagcagcagtttttgctcgaacattttcataaacatgaactggaggattgatgggaggctgatctggcaaagctttaccaagagaaaatgtttgcagttggtatagaagtacaaataccttcaccaactcacacattctttctccagcagaaactgtggattcacctgggaaaacatccacacatcaattttaactctgctaatgaaacaacctgtctttctcttgcccataaactcttaaacgtaacaaaaaactacacaccagcctttttctaagagaaatgatagaataacagaaagacagcctgacactttttcattccaaactataaataataagttgcatccacactcaccaagaccttcagtagacttctgtgatgacaagagaatggatttgggctgtttgcgaggagatgaagcctcaattgctaaaaaaaaatcagcagaatgtcaatttacagttaagaaataaagacaacaataccacttaacagtaaatacctcttttgcactttttccattcatcacaaagaactgataatagtagatctggccagactcctctaacctcctgcagcatagcagcagcacagtgtttgtatgactcctgctttcacaaaagaatatacagagaaatttaatgagcatacaagtaattaaagtatgtttattcagtaagaaactgaataatcaaataatcaagcagatgccaaactactggattccaaatcaccaaaagttttcaatttaactcccacagatttacacagtttcatgtaatttgaatttgaagtctgttatgagattaaataggaaatagttcagatcctagtctctaaatatttgcacaaagtcaaatacacaggccataataaaactattttcctctcaggagtgcatctactcggagagagcttgagagaggagaattcatcatcaattacaccagcaagctagttctcttcttatttccttaaactctattatctggaattatgatgttaattatgtttgagattatggaatagtttctttctagattaaggtttattatttcaaaaccctagacacaaattcttgatttcaatgacttattgttcgtactctttaatattgttttgtttatattcttctattttaacttcacaattgatgtgaaatcttgcttagaatttgcattattctaatataatcttagaatttctattaacctaattgtctaggattctaagttaaagtgataatttgcaattaatgatagtattataggtattgttaattgtgatggaaaatataacctaagttaaatgtatcgcatattgagcaagcttgtttcccaggttaactaacctccaagaaaattaatgtctatgctagattaaatctaaggtgttgaactattaggttgtttggtaaaaaaaaaattgttaagagcgttgcgcttaatgaaatacattaggaggattcggaataatgactgttgaagttttatatatggggttaataatttgatagggaatagagttcaatgatgctattattgcttgaataaatgttcagtggtagataatgatttcattattgtttttatttacttttcattcattctcaaaaccccaatctcactaacttttggtttcttgaataataaattgaagtaatagtccttatggaatcgactcgtactatacgactaagttgaaaagtggtaggttatgtttgaaattaataactgtaatatatagtatgacatacggcatgcatcatgaagttgggtcattcatcaattgtttcgatgatcattatcaccaaattcgattctaaacttcgtaccaacagaagaccttgcaaattcttagtgatgctttttggccataccaatgctccaatgaccttccaagtgtttaaaccatatttgtaacgatttgtattggtatttttcgacaacattctaatttattgtctgaatattaatactcatgaaaagcacttactatcttagaggcattagttgccaatcaattgtatgctaacttgaagaaatgcaactctacccaattgattacttagggcaaaatgagtatatgttcatcctagcaaaattcaagcaatgtttgattggcctcggcccaaatccctcgaggaattacgaggttaatgagtcttacagggtattatcgtaacttcgtagtcggatatgttattgagagagactgatttagatggatagaaaatgtcaccacaacgattgaacagctaaggttcttacttaactgaatttctctaagcaatttgtgctagggttattatgtgtgatgggacatcctcttgcttatttcaaccaagttctaagcccttgtgtcaaagggttgattttttttattatttttaactgtggaccatatttgttaggttcccacattcgcgatccgtacagattagtagagcttgaagtttcttctagagcagtatttggtcgagttgttggggtattttgtaattgatataactaggtgttggtaatcaagatgctctaagttgactcaaatacggttgccttcacttatactaattagttcgattgggaccctttacggtaggaggtgaatcaagaaagaagtttcaagtttcactttcaaacaatgatcgattgctctataagaaactattagtgttgtctcccacttctcgtactcccttcttttcaaaggaatataaatcctcttcggtgggcagtcactccaaagagatgcatttaatgatgtctcgcatcaaatgtgtattagactagtatgaagaagatcatgactacctttgtgcgcaattgtgaaactacctagtgaaacaagcatttggcaatgtctctcgtttgtctatcgtagactttggcactgcccaaacaagtacaggaggatttgacaatggattgtattgagggattaccaaatttgagggggtcgatactactttcccgtgacggataagctaagtaactcttcccactttataccatttaatgctcatacagcagttgaagcttttatgaaagcatctggtcaaactccatggtatgcctcaatcaattgtctctgactgtggttttgttttcctcagccattttaaggttgaattatttaggttgtaaagaacgaaatagaaacagcaccacctatcaccctataccgatggaaaaattgtgggtattaaaatctaagataccaaaagtctaggcaaaagtggatgtctttaggctgaataaaggtaaaaaaaccagatgtacttattgtaaagtattacatgcagagataccccaccccttattcgatatttggttggttccattgcagtggtgggggtggtggatcaatggctagcaaaacgggacaactttctagttgatgtgaaggtggagctatgtcgagcccaataaaatatcaaggtggcagcgaattcagcaagaaggcatgtgaaatttaaaattggggaccacgtgtttgtgaatcttcactcgtgctgtcaaattacacttgcacttcacaagaacaacaattttgctactcatttttatggtcactttaaagttatacgtcacatcagtagggtagcacaacatttgggtcttctagcaatatca

SEQ ID NO: 192 - DNA, 1579 bp, Cannabis sativa
cagaaaccatttcctttttaaatgtatacaaggataaagctaactgcattctcaagtatcacataaagtctgcaacaagaaactcatgactgataaatagggaaatgcagctgttcgttaggttcactcatcataaagctaaaccacaatcaaagagagtagaaagttgaatgacatttcatgatctgaaatcattcaaagataccatgcaattctagattatgcttatgaaagacaaatagcatgggtttgtaggtctcgacaactagtctttcctgagttccatatgttcacggcgtataccatcagcatttaggatgacaatttcaacactgtctccctgccaaaacatccatcacaaagttaaaaaaacaagattctgagtggcaaaagggaaagaaggataagaccattagcatctaaacttacagtgtatatatctctctcagttgcagcaacaaagactgttttcaccaaatcaattgcttctgcttcagaaagtggagtgacagaatcctgcaattgcaagaaatttgtggaccagacaaaggcagaataaggacaatttatacgtagatgaataaaataaacttgaggtcaaaaactatacctgagcaggcaatagaagagggcttggagactttagacgcttatccaaaacaggcatgataagtgttgatccagaaccttgagagctatatccaaccttctcatatgaaccaacagcatcgtatgtgaagacgcaacccttgcctattgaaatcaatacatctaattagcatgcagaaagttcatcaaacaggaaccgtcagagttttatcaattaccttcactatcgagaccacctaaaacgttgaatgagtagtaaggaaagaaacgtttgtagtaaagagtatttgacagcaattgggccatagcagggcagctcatttgtttgttatgttgatgttgataaatctgaagcaatatgaataatagatgaaaacaaaaaccaacttgtattttttttttcttttagaaagtatgcagatatgtaaacttattcaacttggtacattatttgaagccttaccaaatgtttagcatccaattgcttctgtaaggctctcacatcagcttgaaaaccagatgaagccattatggatttatcagctctgcgagtttaagataaattacaaacatacacagtagcatttaaaccacatcatcaagaatcataggagtcaatctaaaagcttttttaatctgtgaaagtccgataaaaaataatcaagcaacacacgaggaaatatgattcattttattaatgctcattaaatatgcaaaaatttcttatagggtgataatcacacacacgaaaacatacatacatacatcttgccaccaaattatccaaatgaacatagtgtaagtgtaaaggttcgactcaacaaaatgtacaacggaaccgagcactataaattcatttctacacagaccaataattaaacgttcagtatactgagtctgctccaacagttcaaataccaatttagcgaccacaaacgcactacaaccctctttcacgaaaaaaaaaaat

SEQ ID NO: 193 - DNA, 4139 bp, Cannabis sativa
ttgtttgagtatgttatagttttgttagctaaaacctcaggctattaccgtttatttggattaaagattatgatggattatggatggaattgtggaattagtgagtttgcatatacatgttctgggattttcgaggtgcggattcactatgagtttatgttagatattgactgggcatgatggactatggacgtcttggtatttccaagtttttgataggatttgagatttcaaaaacgcttgttcgaacatgcatcaggatttttggtattattttgcttagttagtggtttctcttggttgcatacctttgtttgtaagaagtgatgtacatgttggagaaacaacttttggaaatgtcttctgagaaacttgcttttggacaaactttggtttacttatgcccaactattaagttgctgaaaagtttaataaatatactttttgaaatggggtttaaatttttgctgcattttttaggttatattttgttgggtctttacaagcggtaaatcagtatttctattaggatagggaaaaaaaatactctatcactattggttttgcacaaaagtaacaaaatcactaaatagcaaaccttaaactcaaggtttgttgttttcaaaaaacaagaaaaccctccatttcgtattttgttcattcagaaaattgtaagaactgcataaaccaaatcagttcaagtaaaatgagtagatctacagtgaattcaatttatataagatgaatagaagctagtaaattcgtaacaaagatcaatgaatgaaaatatatgaaaatagactgttgaattgaaatgtaaccaaaacaaaattagactttcaaaactcttatttcatttttcacaatgtctaaactacaagtttaatttgtttttttgttttgtttttcgtttttatattttttttttatttttttttcgcttgatatatacatgttacaatccaaagaaggatcaaatgtgagagagtaaaatgacaggcacctcctctccaagctcagacaaactccgtacaaaagacataccgacgagcaaaggaaaaccttcaacaacaaaaactcagcagtcagcagccctctcacagaggtgtgtaaaataatcccagcaacaaaatattatacaaatgaaaacccatctcttcttttctctttctttgcctccaaatcaaaaattggccgtgcaactccaaaaatctttaataagctggctgaatctgtcattcaaaattgattatcatttcaccatttctaatgccactcaggtaggcattataactagcttaatgattgttcccttttaaggtagcagcagctcgctccttggcgcgaaaatcccccaagcaacggtactcttcccgaagcagtctatccaattctggatgcttctctagaggctctttatggtcacgttgttcgcgataatgatgaaatgccctgccatacaataagtgactcttaaaaacagtcacccttatcaatttattgtcgggaataaccagtagtcaacttgtcaacttctcaaattcagacatatttcaatgtcagaaatattcatataatagcaaaccatcataagcaaacttgataattactcaagttattgaacgtgtgagcttgtttaaggagtaagacattcctcataggtcatgagagagtaggatcggatagaattagataaattttatcatgcaattttgttattaaaaaaattaagctcacttaaaaactgaataattatcctatccaattttgatcttcttgtacttcaatacaaagaaaaataaaatcataactttgcacccaactaattttctcctaatttaactcatcccctcgtttaacgttttctcgcttatattttcaactctactcatataccactatttttctgagctacagttaaatcaagcaaaaaaaacaatcgagctaaatgataacaataataattataaaatgtacaagaaaatagttaccaatatttttcaaggccgtaaagattgcctttttggtaaaactcaagtgcaagctgttcaaagtccttatataagtcctccttaaattccttttccaaaccataactacaataacaaaaatttcaattaatctccaatctccataattcataatttgaagtactcaccctgcccaagaacattaaacttctctattgaatataaaccaagcgaaaatctagaaactttttttttttttttttttttttgaataaagcgaaaatctagaaactaagattatgagaataaagaataagactagaagatctttagtgcattgcacatacctatagaacctgaaaaggcattctattccataattataacttgcagcagcatcttctctcgcatatttctggaactcgttatacattgaaggggcgaaattatctctaaggaaataacaccaaaacctataaagagtattcatttcctgcattcaaaagtggcaagggatacaattcaaatgtcagtgtcatccatgattatttatgaccagtaaaaaaagtaagaaacaaatcccataagaccatgtaaacaggttcacagtttcatactttcattactgtaaccaaacccttgcgctcaaaggggataataaaatggtgagaagttgtagccaaaataccaaactttatcaagatctttaaatataaaaatatttccataatcccccctgtaactaaactcacccacacaaactattcaacaaataaaaaaaaagaggcaaaagttcagaaaagcaatacacctcactacaaccaatgccctgcttctttctgtcactcaggcatcgcttttggtacttcaggtacctaaaagaaatggtaactaagtaaacagaaaattttgagcccactctatgaatatatccagaattattatatccttacttctgttgtttaaaaccattctcctcaagaagctgatggcttggatgctgaaactgtggaaatgacttgggcaaagaacccacgggtggactactacctgagaggatcccatgtggagaaacactcatttttgaagaccttaggctgaaaacccaaagtaaatgagaattagatactagaaccacaaaagggactcaaaaccaatctgttaccaggtagcgaacattcttgctattaagatttacttggattttggcactcttaagactctgaaaaataaaacacctcaaaaatgctagccagaacaatatcattgctgagaaagagcaacaacgtcaaaaacagaagcaacagtcgctttagactaaccaatgattttcaggaggggtggacccaaagaaatatccaaccgagttactaggtgggctctctgatatgattcccgatgattgacgaccacttccgtgattcctaaatgtgctagaaaagaatctttgtttgtgggatgactggtgttttggaaagcttttattctgcttctttcgagaattagcacttccagagtcttcaatcccattgtttccagcaaagttctctccaggtttcaaatttgacagtcctgatgcacaatagctagaactgttctttttacgaccagaacgcttggttttcagttcctgccaaaaaatggacatcagaattgggcaccataatgtaaaagggtcaacaaacaatccaaaatgattcttctcaacctgctcatagaagtaaagaccatcatttatagttgaagcaagctcgttggaaatggatttcgattgtttaccaccaattgtagatccatcaattaccccactattctgtaaaggcagagtagagcatgacaactgtttagagttactttggtacacaactttctcgcataccagaaagggtaagttttcatatgatgcagcatagtaaagaggccatcaatcccttgtaatttataactagctgatttcaagtaaatggaatgagaaacacaggacttattgcaatattcagacgaacaagaatctcatatttaacgtcataagagtacatttgtatattctcatataggatatatttacaggaaaaaatttactaaatgaagggttatgttaagtatttgggtggtggatttattgtttcccttatctcttcccatcccctcctatttaattacatatac

SEQ ID NO: 194 - DNA, 4116 bp, Cannabis sativa
  modified_base (3288)..(3289): a, c, t, g, unknown or other
tgtattgtagcttaatttttgatttaataagaacaagtttacaagtagggcaatatatgaagtttttctagacaataattcaagattataagtcccaacttcctctgttcataatagtcgtagtaaatatagtaaaacctgttttgacatattcaaaattttgttgcaagtaaacgattttttccaatcattaatttcatgttcatcctatctagctattgatgtagttgatgcgaccccccaacttgaagtaagtaatcacttatcaagactctgtttaggtcgtcttgtcttcttattgcacgacttcattgcttattaatgttgcctcaaaaaaaaaatgttgaatttcaaaaagatagcgaaccgccttataacggatctaagagatttttcacacgaaaagaaaaaagctggaagatagttaaaatccttaataacaaagaattcattaagcagacaaagctgagaacaacgttaacataactgcatgaagatagttactacaggacagcaattcaattgagaacttaattcacaaatcatcctttggtgggggagggtgtcttggctttggtgggattggaggctttggaggatgaggcggccatggcggaaaggggaatggaggacgaggtggccatggcggaaaggggaaaggtggtcggggtgggaatggaggctttggaggacgtggtggccgaggcgggagtggaggctttggtggccaaggtgggaacggtggctttggtggctgagcataaccacacattccaaatctgcaacgaactttaaaagggcatctgtgtccacactttccacagttaaaaggattaaaatttgtatttctacaacgcccattgcaacattgccatgtgaaggggcaccttcttccacacaagccgcagttgtttacgtcggaagtgacatcaatacacacatttctacagcatctttgtcttggtggcctttcaccttggctgcatatccatggtcgcttcctgcaaccggtgtctcgtggtttatttgttttctttagccacgaggatgagagtgatccatccatggtgtaatttggtcgtaatccatcataggtttgtggcttatttgaatctacttctactactatcacaaacaatagcaataagatggtaattttagcattggctagcatagctctatgatgcacaacaagactcgaagctcccttcgtgatatataatggtgacaaggagtatagtgatagtttttacttttatttttatgagatcatgctttttttcacttctactcgtgttgtggaaggtagacatgttgtttgatgacacttctaattacatgaagaaggggaggtgttatgcatttctataattataaaatgattgtgattaatagcgtgattgaaaactgatattcaaatcagtaagcagatttttttaatgaccattctatgtccttttctcgagattattatgatttgtaagggcttccacctgaagagttaagcctcattgttcaacctgaagtatttttgttacctttgcatttacagtagtgagaaactttttacctggcttaagttatggggagggatgaagaaacgttctacatcatgagttaagttttgagacccatcaaaaaaaaacttcagacccaaataaaataatggataaacaaaacgcgtaaagctgagaaagcaacccacccatcacatggttaagcaagtttaatgccataaattgaaagtagcaacaataactgatcaagagattatgaatgaattgaatatcttagcagaaaatgaaaatcatatatttgatacaaattctgaaacggttaacagatatttgatataacaaataaaggaaaaattatggcctaaatgcagttaaattattataatctattgcaggacctaaacttttacccttccttttatatggctttcaacgtttaactttgcaatcctaagtataagaagtgaaatgtcagttgttattttcatttttcaatacttgagcacaataaaagctgaaatacaaaatagaagcctttcgaacaaaaattatttcaactaagtacataactcaaaaatccaaaacttcatataacctttgaagactcagcagaaatcactcacaatatgagaataaaatgagaaaaaaagcaccaaagagtacatcaaaaagtggtgcttcactgcactcagtagggttcatatttattcaaaagatagccaactaaaacatttttaaactacaaactctgatgaaatcaactttcagaattcccaggcgcttgtttctcataacgctgcctaaacttggcaatctgcccaacgctctcagccatttggcgttttgctttcaagtggtagactttgccaacatggtgtattttagtcatcataatgtgcatcaatctgccactctgtgttacatacgatatccattgcatctgaggatgtaaccctttcctcatttttctctaaacctgcaacaaatcattgtatttattcagaaagcagttcataaaggattattctcctgctcatcaacatccacaaagcaacaaaatcttcatcaaataaagcaaaaattacaaagttcaactcattatcttcatacaaaagctaatttggtattttatcactaaaaatagttaaagacccatcatatacgcgcccttccttttctaaacagtgggagacatacacaactctctcctttgtttgcttacacaaaaaattattaatctatagagtagaaagaaggctggctgtattgtattctcatcatactaagaataagcaaatgcaggaaacttattcacttccagaaaaaagttaacaaatatgccaaatatgcgatcaatattcatcaatacaaaaaacttattcttgtttttctgtactatcttactgtaaaattagatattcaaaaatcttacaatgtattgtcaagtttcgccaatactcctaaggtaagtttaattatattactcgtagtcatcaatttatcaaatttaaattagattttcaagttaattctctctctaattaatagtggcacttctaattacatgaagaaggggaggtgcctaattcttgagcaaaatctaaaggtgcatttaactacatctagtcctttcggatcctggtggagacgaccaaaataatattttcaaaatgctttacactgtgtttggatgttggatttggtggggaaagaaataggtaaagaaaatgtaggaaaaaaaaatgtgaaatataaaataataataataatnntaataataataataatatagaaagaattataccggaaaagatttgattgagcaaaaaatttcgaatggaacttgacaaattagtttttatttattttttacatttttatttttcctacacttttacttaattttttttttcgcatcaaaacatagtgtaaagcatttctctatcattttttatttttcttacattttattacttttctctttcagcatcaaaatcgaacttccaaacaccttgagaaaaaggggaactatcaacactaacaaaacatttctatctttctcatacactaacaaaatcccaaaaggaaaaggcaattaaattagaatagagagctatgccctactgctaccaatccaataatgaatacaacccaaattagaacataagatagaaccaaaaaaatatctacaagtcaaactaaacggaatccgttttcgatcggagcatacacaaataaaattacaacaacaacgataataattccaattctcaagcaatatgcaactaaaacctaaattacatcacaaaatatacatatataccaaacaaaaacatttacagggtacaaagtgcttcaacatgttattactcattaatatcaaggaagtcgataaaaatgcaagactataaactgtaaaacacaaatttaaagagcaccacagaacagagaataaatgaacattaagaaagaaacaaaacaaacgaattggttctctaaccttgacctgcttcagaaagagagcattggaggtggaaccggtgggtgaggagtcgacaccggtggagtgggtttgagaagaaaaccctgactgtgatgg

SEQ ID NO: 195 - DNA, 4062 bp, Cannabis sativa
taaacctttgaagaaaaaaaaaatgtgaatcctcataaaaaaaaaaagaaagagagaaaatgagagagagaattacatctaaatttattaaaaaaacaaaaacagagagaaaaaataaaaggtgcctaaaaaaattaaagtgaatggctaaaagtattacttaaaaaaaaataatgaatagctaatagtatcacttaaaaaaaattgagaaagtgcaaaaatatataaacttgattgaatagtaatgagcataggagtttaacataccacattttatcaataaaattagcagcagtaattatacaaataatttaataattacgttgtggagcgtaattttctcttatataaaagcccttattttatatatgttattttattttttatgtaatttttctgcaaataaactccccctataaataacaatatcctcaaatttccgctcgcatagcaggggcacaaaattgaaacgccattattatctgaaatggctacctctctcgctcccagctttcgcatattatgttcagatacttctccctcctcttcttcaggttcttacacactcagaaccctagaaaaagaaaaactgaattatggcttgcaatgtaccaatctttactctgttaaaatcttcgaacttgatatatattgttcaaacttttcaggcaaacggtgcaagtacgtaggccagtcagttgtaagctattcccttctttctgtttcgtattttcccaatcttggtaattttacgaggatttttttatgttttttgggcagcgggcacttcctatacggatattatgggttggcaaaaagagatcacaaggagcacaactggtttttgatgagtattttgaaaagatcaagctttattgcactgtcaatgaagttcagatacgatcaaatcctaaaaattcacggtaatttatgattgaaatgttcagaatatactgatattgctgttaaatgatattttaaagtttagatttttattaagcttcttctttaaactcagtatgtataagtatggcaaaggactggaattcgtgtaaatagctttgaaaactctctgtgaatttagtctacgttagattggattatgcgtcaatcaactttggaccagggtggccctaaataatgtttaaccatgtatctatatatatgcgtgtttgtataggttagaattgatgtcgttataaatgttgtgctttgtagtgattggaaggttcaggttgaggatgaagacaatgctgttatgaatcttatcaggcctaatgattgggtataaacttactttattcaccaaattgagatatttagctactgagaattgctatgggtacatcatctttgaattacaactaatacaaaaatgtgtgtggcactatcatcatggtgctttgtactgcaattaataaaaacatgtgtgtgcagatatctgtcgtttgttttttcatggatagatagttgaatctactttaatttaaactatgtattaaggaagaattgcaacttgttggttactttaaacatcttgctgattggaaacttcattaatcaccaaacaattaatttaaagctatttagctaatgagaattgcaatgggacatcatcttaacaatacaactaatacagtaatgtgtgtggcactgtcgtcattagtgctttgctccacatttaatgtgtgggcttttatctgtcgtttggtttcatggatagatagttgctatatattgaagaagaactacatcttgttgctacacatcctatattgttatacgtgcgtgtgtaggttgtgctgttagatgagcgtggccgagatttggggtccgaggagatggcagacttattgggagatgcagggaatacagtacgaactattatcattctaaatactatctccttttctttcatgataataaaagaaacagcttcatttttgtccttgtcaaaatatatcaattacttgaaatgcttggttcctcttgttctttctttgttgtgtctggtaacagcttgcatttctatcgttgagataaccatgtaacatctatctgactttcacaatggctacctcattggttatcatgatgggatggcatatttatatcttgatagtggtggtgtactgtattcatttaagctgttaaggtataaactgtggctttgcatctatgaagctaatatcttggagtttgttttgaaccaacaggatcaaagattgacttgataatttccatctagctattatggcaactagcttctaaatttaaaaattactataaaaattagatacttctgactaaatgtcaagagtaccaaattataaagccatggatattttgtttactgcatgctgaaacttgtgtggtcattataatattaaaaattattattattattatttaatacactttgtagggagcttcgggattatctttttgcattggtggaccttatggccatggtcaacgattgagggaacgtgccaacttatgtataaagttatcatccatggtctttaatcatcagattgctttacttgttcttgtggagcagctttataggtacaaactttcatctcctttcaaaattgagctctccaacggtgtttacttgcctacttggtatttgtggtatgtttgttagagattgatgatactttttatgtatgccatttttttgttggtggctcctagtatgaaaaatgggacattattcttaaacaactattgtcagttagcatgaagtcatgaacaactgatcatctctttgcaaaaataaatgacctttccaagagggtttgtggcatctgcttatcttgaaaacatgatgtcagacttgaatcttggaattataaggggaagagagatgagagtttgttacctacctaaagctagcagattattgttaaatgctgcttattaattcataaggctagggtaaaaacatgtttcatgtacggttgggctgagtatttaaattactttacatctttggtgaatggctagaagaatgtatcatcttaaggaagaagcagaatagtattgcatcctttcagctgttacaacttactatccagaaacaaacggttttatcatgctttcttcattttctcttcatttaattacttaaatcaatacatgatttttgtgtttgacttcaacttcaggtcatggaccattctaaaaggacagaagtaccatcattaggatttttcgttcacagcaccacagtaacagatgggcagggcactccttccttgttttgtgaagctcaccacgaagctacaggtagggtgtaacatttgctatttttttggcttttgtagctcgctatttacatatattaattttttttaggtgattttatcactggatcaaacaatgcaaaggctggaaatagtgacctgtagagggtaacaatagaattagattaaatatggctgcttacagattcactctattcttgtataacagcttttgaagttctatcttatacggtataagagttggagcagttgaagcttctcagaaatttttgataccgagccaagcagttttagcagcctgttgagatcacagacaacaattttatagattgtaattttagttgttgataactgtgtgttcagtttgtgcaatcttttcccaagaaagaatttgaattgatggctgatagggagtttaaatcatgagagataatgaatttttgtcatgttttgaagattgtgtagatgttgtgaaggctgctgttgtttgccaccctgcactaatctaatcttttaaacaaaacataaaaccacagttaaacaaaatgaaataaagaaacttaaattaaaataaaataaaaatgagatggagagagattaaaaagttagagagtttgacaaaaatttgtgagacagtgtaagaaatatagagggagcgacatcgtgtgatcatcgacgatggagttaggtggtaccagagttgtgcgatagtagttgtgggtgaggagttgcgtgatgcatcaaagttgcttcacaacaagcgatggagcttggcaacgttggtatc

SEQ ID NO: 196 - DNA, 3083 bp, Cannabis sativa
cctaattacgacatgtttataaacagacgtaacttgtttataagcatatttttttttaacatgtcagctaataacacgtttattacatattcaatacgtttatgacctattaaaatattaaaataactttaataagtcattaacaaatcaatttcgtattagctgtgtcaacccgaacataactcgtttattaaacaagttagacaagttaacccgaacacaacccgaactcatttaaagataaccaaaatccattaactctcgtacaagttttgaatcgtgttatcatgtctaacccgttttgtcggccctacctaatagtatctgtatatatatatagatgtggatttgaaataataatgttatatagatacatgccaattttatctaatgtaataattaccttccacacttgaaaaatttgttgctatttcagattattgatttggtcatcaagtctctactcggttttaattgctactttgctagtgtacgactttttcttaattatttagttaggaaattatgttttcagtgaacataaaattgaatttgaaatacccaagtgttatataatattggagtttgtgagtgactactttttaacagcaactagctactgaaatgtcaattttatttgctaaaatactactaagatattgttgaataatacataaaaatgtttcccactatggagataaaaatcacataccacttgggtgaatgaaattaaaaaataaaaatgaataataataataaaaaaaagagttagtaatactgttctacagcataagattttggtggctagtgtaagtaataatgataataattttggcttatatttcatatgaagaaaatgtccaatgaatctcaacaaaaggattaagacacatcatatttccattgtcgagtcacatctttgtaaccccacctaaatatagaccccttttatgctctagtaaggtctaaacctggttgggtaatataggctcttctattattgaacacaaatacagcacacaaacaatttcaagtggctactttaacctagtaatatagcaaattaaataaagcttaggtatgtttttgtggggtaagttagcttaatcataaattttcaatgtgagtttattcaccaactcttccaatcaatcgaccttaaataacaatattaggtttacagccttataacctaactactttgaaagtaaataattgattcaagaactatattttaaatcaaatgtgaactgaaagaatctaaagggcaacccaggctatgtgagaacaataatattggtggcaccattcaccaaaaaaataatgtctcagaaaagtacaagcaaattgcaatatacagcaagagagtgaaaatgagaggacaaaggggtaattaaatggaatattaagtttgtggaagatgagtcagtaatcagtataagcctggctctgcctattataagggtagtgactagtgacccaaaacattgatttattttctttacgaaaatacaaaaatggggtctgagcactttgcttccccttgggtggacacatggcacaaacccagtacactcactataaactaccatatgacacctgtcaataaggaccaccatattacaaccctactagtagtactaatagtaatactactactactgctactactactggcttggcttggctataaactccaccagcaacaatccaaaacacattcacctggatactcaaatttctctcttttgttgctttcatttcatcagtctcttttgcttttttgactcatttcaatagcacaaaagacagtagagagctctctctcttcctattcccttgggggccagcagtggataaaaaaagaataaactgtcattttccactaatttctctcaaccccaccaccattttttttttactttttacatcatttttagttttggttttgttatagagaaactaagttgaagaatcattggacaagcacttaacagaaacttctgatatgatgctgtatcagaagagccccaaggttcaagcccctcttgtgtagttacattgcaattgctatggttcacataaatatttatctatctaagacatcaacaagaatatcaaacctaccactaactctcctatcccaaagttgactcataaaagtatttatatgtataacatgagctttctcagcatataaattaatctgcctaacttcactgtggattggtattccattctaattttggtagggactaaaataaatatttttaaacagtttaaggtaagccacttctagtgtaaagacagaataaaactcattggtataacattccattccaaaacacatacattctattcttatttaactaaattactccttgttcttttccattactaccaccaattttttgcatctagatataaagattctctatggaacttgggttcagaatatagcaagcatttgtaaagacgtaaaaattattaatcacatcctcttgtgattaaaatttaagaactcaaagaggtaaatgtaaatgatttgtaagagagaggtgtttgaaatggttatgaacttatgaagggatatgattcagtctagaacatcatagttcaggcataggagaagaatgagatgactaaatttcacaaacatgaaaatcagagcatagcagatactaattaagagaagtgaatgcaacaatttatctacttataggcacataaaatcaacattcaataatgagttctcctacatgctatccaaaatgtacttaaaccaagcagccgaagtagtgactgtaaatataactcaacatacatgctacgggaacaacaatgtaaggcggcccaaatcaatttaatcggtgacacgatcatcattttcccctgaaaaataaagaaactgccaataagagagaaggaaagatttaaatagtatctacaacaaatataagctgtttttatgtccacttacgaattcatcatcagagttatgttgtctcctttcaatagtatcctccctgaagataaaagaaaaaagaatttatcagacctacgcatatcaaccagcacaagag

SEQ ID NO: 197 - DNA, 1010 bp, Cannabis sativa
aaaaaaaaaaagaaaaaataaaaatagtaggtaatctattatgggaatgaatgatgccaaatgctcttacttattatatctacaacatcattaacaatgatgtcaggcatgtcaccccatgtcatagatctatgatatatttataccaagcaattattccccatactaaaattaccttttatagcatactatgaattctgcttattattatatacttgaaaagatcacacattacacacgtgtagacagccattttcacgtatacaagtaatcttaaagctttcaccaacaacaaataaaaaattaattagcatataattttaaagaacataatatataacacaagtatatacaacattaattaacataacacacgaatatcaatagtacataattttatgaataaataaatatgatatatgataaaaatatttttctgtcatttcgttcgtatagcgacagtgacgaacaacacgcaaaggggaaggaccaagtttcattttacgaaaaaaggtcaatcgctttctacaaaaagccattaataataataataagttgccttgaaactatacaatatgattatcgattattaacaatttaatcggttatttttttttattattattattaccataaatataaataaaaacaaaaatataaatatatataatattttcatgatatttatgctgtacgtacggaaagtaaaaaagtctaaagagaagagagagtactttgttaatttgttcttacctgtggccactgcaaaactcgtagagcctaccgttgccggagaagacgatgagtccaatctccacatcgcaaagcacagaaagctcatgagccttcttcataagcccacttctcctcttcgcgaacgtcacttgtcgactctgcttgttctcgattagtttcatctctacttttcctctccccatttcgatccaaccccaaaccctaaccaaaaccagtactcaaattctcgattctcgatcgatcgatcgatctaa

SEQ ID NO: 198 - DNA, 2035 bp, Cannabis sativa
attttgacaaatggaatttacttttctcttgtttgtatcagattatctttaagatggtggaagaaaacccaagggatgttgggcatgacatggacggcctaagcattgtgtatggagatgaatccttgcctcgtttgtacgaaaattctcgggtttcatctgatcagctacctggacaatcaggcaagtattttgtcactaacatagatgttttaggagttattaaaaaaaagatgtaattggattgaatatgtatattcgttgatcttttcccttttattttgttaggcattgttaaacgggctgtagccctaggaagatttcttcaaaacccactggccatggtatccacactatgcggacctggaaaggaaattttgtcttggaaacttaatcccttggaaacctttcttaccactgatgagaaatacggaatggttgaacaggtcatggtagatgttacaaaccaggtgggccttgacataaatttagctataggccatgaatggttatttgctccgttgcaatttgtttctgggcttggacccaggaaggctgcatctcttcaaaggtctttggtaagagctgcgacaatattgactagaaaggactttttgacagcccatgggctcggtaaaaaggtgtttgtcaatgcagttggttttttgcgtgttcggtgcagcgggatggctagcagcagtcaattcattgatttgttagatgatacaagaatacatccagaatcctatgcccttgcacaagagttggctaaagacgtttatgatgaagatggtgcaaatgatgatgatgatgcaatggagatggcaatagagcatgttagacatcagcctactattttaaaaactctagcagttgaggaatatgctaaaagcaagaaccgtgagaataagatagaaacattttatgatattaagagggaattaatgcacggctttcaggattggcgtaaacaatatgaagagccaagtcaggatgaagagttctatatgatctcaggtgaaacagaagatactcttgctgaggggagaattgttcaagccacaatccgtagggttcaagctcaaaaggctatctgtgttcttgattctgggttgactgggatgcttatgaaagaagattattcggatgacgggagagatatctctgagttatctgacagattgcatgaaggtgacattctcacttgcaagattaaatctattcagaagaataggtatcaggttttcctaatttctaaagagagtgaaatgagaaacaatcgatatcagaatgctggggaccttgatccatattaccatgaagatcgaagcaatctgcaaagtgagcaagaaaaagctcgtaaagaaaaagaactagcaaagaagctttttaagcccagaatgattgttcatccacgttttcagaatataactgcagatgaagcaatgcaggtatgttttcaataattagtgcgtgcaattattatttatttttttgcatgatcgtggtggtttgaattatgtgttgtgtagtaaatttatattttatttttgtaagaaaagataaaccttttgtatgtatgcaatgtattaactctatagaacttttgaagaatgatctatttttcaattaaccataatgaattatagggttattttctgctttcttgattgatggcttttcctttggattcttattgttgactgcatatttggacttcaaatgataaatattcacatttggatttaaatggtttaagattttttttccttttactttttcttttttaagaaaagagacaaaggtcacttgtcttaggctgacctcctcccaagtttatttaggtaacctcacttatggcagaggaaagttgtggtaataaaataacataagaaattaaggcataaaatacagcaatagcactttcagcactaaacctgatacattagagcctatgtctataaccccaaaccaagggactaatctaaaattgatacttgtgttatttttctctttattgtttgataaaagctta

SEQ ID NO: 199 - DNA, 1130 bp, Cannabis sativa
tatatatatatatatttaaatacgaattcttttttactttctaggactgtgggcactaatcatgaataaaagtgaattgtcctaaatattcatgtattgaaagcgaccttcaaaaaaaaaacaaaattctattttccttatgatacatcatatgaagatgcaaattgtttatagcttaatagaattaagattcccttatgtatatttatcaccactaatttttaaacaacacaccaagtttgaaaagcccacaagtgaatagctggaagaaaaaaaaacaagcgtaagaaccaaaatgagtgattgagtagagagaactgacccaatcatgacaagagaccatgaaatgatcagcaccattgctcctattccaatagggatacttattggtgacaacctcaacatagtcattcacaactctaaacagacgatctctgttgtaatcagctttggaacggataggattgtaaataaattggactatattagatacactcaggggcagaaaaaatgtgtgtgcctcctcaatatttgtagccctgaaagggctcttttcactctctatttcatccatgaattgtccttctatggcatatatgttgttcactggtgccatatggaatattgggggctctccttccttgtagctccacactttaaacctcttcaccatctctatgtgactcctgattttgttcaaaaatatttactataagtaacaataccacaaatttatctatcataagagaaattagtattgcttactgatgaaaagcatatgaatttttgtatatagatcctcttgggacaaagctctcagctttctctgatttataagttttagagacaatggcttcacgaatagctgctcgagccataaccaaaccatgctcaagtttatccaaattactctgcctctgctatgaaaaaaaaaagaaaagaaactttgctggtttaaaatttacaccaaaaggaaagaaacaaaaagagacagaaaagagtgtactcactttttggagatcagctatgtttggataatcagggcttgaaaggaaagtgtctagagaaagtacttctggctgagttgtatagttggtttttgtattgttcccactgactgtagtattagt

SEQ ID NO: 200 - DNA, 2052 bp, Cannabis sativa
gtgttggatccagttcagtttttattgtcttctctacaatctgagtgtaaattagtggtgaacacaccattgtcaagctgcaacgccactcttccttcggttggggctctcatatcctcacttcagagcattggatccattgtcagtggcttgctccacatcaacaactttgttcccactggcttcaatttcatacagactctcaattaaataaaactatatatgtaattctgtgtgtcttattattattgtcacatcatttgatcacgctactactacgtttagacttaaataaggtggtcaaacgacaatatatatatgtgtgtgtcgtttcattttgtgttgtgttttcttcgtttgttttaatgttgtgattgtactatttttgctaagctagcatgaatttgaactagctgcaaaaataaatgaaataaaatccttttattacatgattgatttgaattttttttttcttttaagtatatatgtccaaaatgattctttagccattagagaagaaaaaatttgggactaattgttttgaattttctcagcttatagtttggcatgagtaaatgcattgctttatataagaaaattatatagaaaaagatgggagccttttggctcattacagtcataacagaatgggaaaagaaaggaatatttgagcaataaaagggaagaattatacaacaatatattacaatcccaagagtttagagaataaggcatgagctgatgacaacaaagtaagatgcaggaccacttctttgaattccaaaatgctggtgtgtaataacaatcctagctatataatttcattttttttcattccctctcaaacgcaagggagatggcatcactccaagtttgttgattaagaactgagatcttgaatgtgataatccttttgttaaacagtcatcgatttggttatgagaagctatatatcttacttcaagctgcttgctttaaatcttgtccctaataaaatgtacatcaacctctacatgctttgtacgcgcatgaaaaatagggtttgatgcaagtgcactagcatcaagattatcacaccacgtcactacagtgaaaataggaaaattaaactctttcagaagagattctatccatgaaatcttagctaccacatgagtaagtgctcgatattcagattctacgctatagatctcaatactacaacctgttttttcaacgatcaagacattagagtattaccaagatacacataataccctgctatagatttgcaattgtctggacaacaagcccattctgcatctgaatatccagtgatgttcaatctttcatcacaactgatatctaaaacttggtccatggtgcctttcaagtatctcattacacgttttgcaccgctccagtgtgttgtggttggcgcgtttaagaactggccgagcttattaacaacatatgatatatcgggtctcgtatggcaaagatattgtaatcctcatataatacttctgtactttgtaggatttttgagaggctctccatcacttgtggacattggttttcctacagtgattgatgtggggcaaggtttgaggtgttggaactttattatctttaaaaggtcctcaaagtactttgtttgtgtaagatagaggcccgtgtcatcacgaaacacctatatgcccaagaagtaatgtaagggactaagatcttttaaagaaaattttaaattcagttctgctatgaaacttttcattttgttgtcatcacgaaacacctatatacccaagaggttttttagatttgtttttggaaaatttaaaaggaaaagagtgagatttgccatattgacatgcatcacaaaaattatgcatttcattctttgaaactttaacatgacatgaatttaaaatttgatttaagactcttgatgatggtggcctaacctcttatgccaaacatcaattgtggaatgtaaaaacttatcagttttgaactgatttacattgaatttagacacaacaactaaaccaaaaaatacagtggggtgagcat

SEQ ID NO: 201 - DNA, 1390 bp, Cannabis sativa
cagggaggattgccaaatgggaaagaagtagcagtgaaaagactgtcaaggaaatcgtggcagggcttagaagagtttaaaaatgaggttatgcttatagccaaacttcaacaccggaacctagtgagactagtaggatggggaatagaggaagatgagaagttgcttttatacgagtttatgcctaacagaagccttgactttttcatctttggttggtttattcagcaaaaaatgtaaaaataatgacaacattcaatttgaattctatgataatttgtttgcatacctgattttcagatttggaaagacgatccctgctcaattgggagacttactacaatatcataagtggaattgccaagggacttctttatcttcatgaagattccaggcataaagttattcacagggatctcaagcccagcaatgtacttttggaccaagacatggttgccaaaatatcagactttggaatggcaaggatattttacgaaaatcaaaacacagctaacacaaaaagagttgccggaacatagtatgtgtgccatttttcatgtcatgacttcctctcttttaagtcataagcccaaattttggtaccaaaaactgcaagatcaacataatagtaactttaattcttgtgacagtgggtacatggctccagagtatgcaatgggaggaatgttctctgtaaaaactgatgtttttagctttggtgtaatcctgcttgagataatcagcgggaaaaagaatagcggatacctcacagaacatgctcaaacaatcctttcatatgtatattttcttaatcatgattatttgttttctctctttgttggtgtacttttatgttttctacaacgtttataaaagtgacaattggcttgtttgtgcaattcatgacaggcatggagattatgggaggaaggaaaagaactggagtttgtggatcctttggtgatagaatcaagcacaaagcaagagattttaaaatgcatacgtattgggcttttatgtgtccaggaagatccagaagataggcccaccatgtcaagtgtggtcgcatcattgcagcaggagagtgaaccagtgccactttcagaaccaaaacaaccatttgcctttgccgtaagcaatgctgttctcaacaatccctcaactatagatcctacccttaatggcctcaccttttctgccattttaccacgttgataataattcatgtataaaaaataaaaatcaaatttactgattataaaattacaagacaattaacagattcaaagcaaaggaatacaaaaagttagcagataaaggtaataatataatcataaaattgtaaaataatatctctatatattgatacgaaaaacagacaagtaatcta

SEQ ID NO: 202 - DNA, 1244 bp, Cannabis sativa
cccccccaaaaaaaaaaaaactttatgaaagatatatgtatatatataacagagcagaggagagtgagtaaagtaaagggtattcttctttttattaagttatatctttctctgtcttttttttaaccatgtcaaacaaatccccaatatttcccatgcctcaacacttcagtgactatggttttgaccctcaaatcgactactttcaggttctttttctcttctttcttttttcttttcatcctttttattattattattatttttataatcatcacctcattattgtttttcttttaggtattagaagaagcaaggaagcacaagagagatacatcaagatccattgattccatacacttcaagcttcaaaaacctatctctaaggaagattctaagaaaacccagaaggtgaagaagaagaaatggtggagaagtgctctgtttttcttcaaatggaaatgggttgcttacaatccccatggccattgccgttctgatcatcattatcatcatcatcaaggttttgataatgatgaggatgttcaccaggtcagagctcgggccttcagggcctctatttcaggcccagtttacataaccgagagcagaagtggttccaccactccttaccggaccaccagccggcccacatcaggcccaatagccggaactttgagttctcccaataaggatgagtttgatattccttatctcagtctcaggcaccttaatatggagcaacatcagagagtctctacctctgctttgcctatttacttagtcacttaaacttcctctatttacttttttttttctttaaaggccatattagattgattttcagagcctttattatgcaaagctctaatcttttctaagtttctgtcaatgggtttggctctttttttttctatcctttttttttgggttttgctttctaccactgaaacaacctttgttgggttttgccccctttttttttgggtgcttttgtaaacagcaaaagatccattggagtggatgaaaaagctggatcctcctcttttgtgcatgttgttctcttttattttttgtttggttttgtggaactaatcaactattgtttgaccaagttattttccccaactttctccatcccttctttcatatctttctttttaagttttctttattgttttcttatggttaatagtaagtagtgacagtgaaccacttagttcgttggtaatatcattaaaacc

SEQ ID NO: 203 - DNA, 2480 bp, Cannabis sativa
gcgtgtaatttcaagatgcttacaccttatattttgtctcttgctttataagtgcttaccttatagatttgtttttcagcttcgcgaatcgaagggaatgacaactatcaaattccgtccacattctggggaggtattgattaattccgcccttttttttaattgatacagccattgaattgtactcacattgtgctcatgataccttcaggctggtgacatagatcaccttgctgcaacctttctgacatgccataatatcgcacacggaatcaatttaagaaaatctcctgtacttcagtatctgtattatctggcacaggttagaaaaaatgaagactttgtctcagggttattaatgacttgttctttgtgtgatttcttattgggggtacaatacttgcttgtcttatcagattggtcttgccatgtcgccactcagcaacaactccttatttttagactaccatcggaatccttttcccatgttcttcttacgtggtctcaatgtttccctctctaccgatgatcctcttcaaatccatttaacaaaagaaccattggtggaagaatatagcatagctgcttccgtgagtctctctttctaaaactctacggagaatggtattttgtggttgatccatatcatatgtcagtggtattaaaggcttgaagctgctttacaggtatggaagctgagctcatgtgatctatgtgagattgctcgtaattctgtctaccaatcgggtttttcacatgctcttaaagtaagtattaacattgtcattccttgcttgtagttgtaggggaagctgataacttttggaagtaatttatggtaaaaataatagtaataacaataatgaaaatacgagtttagctccaatttccagaaaattcacggaatctcttaagaagctttttcacatttccataatttttttagagctggacgtttgtgatggatcctaagattaggatagctgccagcaaagatcatcagtcctgtattttctggaaattatatttgataacattcacagcttcatcccacactcataagcatgcatacattgcatagtacacatttatacatataggggtgcaaatatatgtatgaaaccacacttcagagagcagtcttccgcagaatgactatccattctttaacctttataaatggtcttgttgaaatctgtggtattaaaatgagatttgtattgtatttgtactccttagtggtttgtactttgttcattgcacacatttgttgtagcagtgactccttacttatgagggtacttgtttccttgtgcaataaccaattagcgattgtatctcaaccttattcgagcgataaattttctgtttcagtcccactggattgggaaagagtactacaaaagaggacctgacggtaacgatatccacagaactaatgttcctcatatccgggtggaatttcgtgacacggtatgaatccttttaatggcgacagagaattactatgcctctgatttacctttctcttcctccattgccttttgtgtttgctctgcatatcaaagaaatgtaattcttaattcttattaatgctgtactccggtgcttgccagatctggagggaggagatgcgacaagtgtatctaggaaaagccatcatccctgatgaagttgacaagtgattctgtgagtcaggtcaaatattaatgtcattcttgaatggccatgtataattaaagtaatctccaaggtgcctaatttgttaattacttgtttaactcaaataatagcaatctctttagaaacttaatattttccatctaattccatgagctaatctaaatcctggttcttctcggcttcttcaggatgtggaaaacttgcatttcgacagcaatgtggtcgataaaaccttacgaccatgcgaatgtgaatgttcgaaaattggctttggcaggcaggcaagcatatattgacatcaacagatgtccgagtgaggagggtctaagaatatgaaggtataaaccatgtatatgatatataattcatatttagatataccgcctttatgtagagatataaggttacgagtgtcacgaatacaaagctgtagccaagaaagacatcgaaataattttgttccttccaagagttgaaaaaaaatacgtattaaagaactattgataaagctgcttctgcgttttgttgttttgcagtatcttttatgtgtaaggtttctagaaaataaaaagggttgttaatggcaaggagaggaagaagctctcgttcctcttcaaattttgactcatttctattttctgattatatattcatacctgtgtgaaatatgctatgcttgttttaagtttatttatttataatttaaaccaacaaatcaaaatataccaagaaaggtgtttgctaatttcatatcaatgacttccacttaaattttattataattctaaattagcaaa

SEQ ID NO: 204 - DNA, 1091 bp, Cannabis sativa
cttgaccatctctttcttttccaaatacatgatggagtaagatacctaaccaatgagattctaaggatgccccattcagaaaataggagcataattatagagatgacatcaaagagaatggttcccaagagcaaagcttcagtaagtccaacatcaaacccagtatatccgcgtttatctgttaagagaaacaacacagatgcaaccgaaacagaggagaaacaaacaatcctaagaatgtatccaaacatgttctgtaacacagacattttggtgtgcataagatcatgcaagaagctgagttcatactcaatcaatctaaaagcaacagttgaatttctacaccgaagaaaataatcgcggcttgtttctcgagtttggtagctcaaaaatgagccagtaaagagtatcttaaacttctcaaagaaataatgtgcagattttagtactttcaactcatctattttctcatcacagcctagcaaaatttcttgctcattgttataatgtgaggctatctttttttctggttccatttcaacttgtacaccccttgttgctgagtaagttgaaacagcttcttcatagtcacaacctggatctggttttggtaaaagagtttctccaaattgatcaaaccctgcattgagcagagctataaccctctcccatgacttgataagtccaaccccaaaaactaggattgttgggaaccatagcttatcctttctagaaattgcaacgagaatgaagctataaatagttgccaaaacttgagaaatgagtccagtgagtgactttaaccagactccactatccccagttgaaaaagttgtaatactatcaggaccagcaagatgcaacaaaagaaactgtgcccaaaacatgtaaaggtctccacttttgtttggatcaaggagatttctagttggctttctgacagtttgaccaagaccataagcagcaatccaatttgatagggtgtaggcaagccatatgaacaagtgtatgaagttggatttgcatattttcctcaaaaaagcagcaaacaacagaaagaattgtagggagaggcttattataagacaagc

SEQ ID NO: 205 - DNA, 7232 bp, Cannabis sativa
ttaaaataattagaggatgccagtttaggtataagtatagattcttttggataaattgatatcttttttctattttttcattttatgcggataaattgaactactttggtaaattggtggagtgttttagtgtaataattaaagagcttctaaataactaaatcacattgaataaccttaacaatgtattgagaactttattttagacaaaatgtgaattggaaacttggtaccaagaaagttatgtacattacttcattagatttaaagtagactgcaattgcgaacaaaatattagctagaaaaaataaataaattaaaaatagataattcatataaccgatttcgacaagtcaattttaactaattttcaatcaatctaaactatagagattttagaaaacatttatacactttaattgatgattgaatgattattctaaatgaaaaaacttcccctttcacttcttcacaatcacacctaacaattgagaggattttgctcctttctttttccaatcttatactaaacacaataatagaattacttgctctctttccctttcttctgcaagtaatttagttctccctcctccatttcttcctcccctccctctttaataaacatataagtgttagtggtacaacatcatcatgccaacatacaaagttttccaataacttccccgaaatcgaaccctaatttcctcccccacaaagaatagctgtacaaacaaataattatacacaaatgaaaaaagggcaagttatcaacgaacagaatcctaaatcttgaattgtcaagaagaggaacattgttgttccccacactttaagatagccatcctctgtgatctcgaataaccttgcctgttattaagtatgtcaatgtaatttcggagcctataccggtctgaactcgtcagagagaaaggagggtttagaatgagggatggcgcttcgattagaaggaagactaacaaccgaacagctttcgagtaaaatactgctgcactttccatgtcacccattaactcatctacctgccaaatgtaaacaactttgtgaatacgaccacattaaagtgatttctcatttcaaaattcatttcttatctaccattagcattctgttttgtaatttctcaatgtaagacgaccatatgcgacaagattgcatctcaaattaactggtgcaaatgagatttcaactaagctgaataaaatacaaccatgcattttacttctagaacttctggagcataagaagaaaaagattgtttcagttgcatttctaaataaggtatattttcttaactccacaacttagatgatacctaatcgtttaattcacttactacacagcatattttaacaaaatttacagttcagatgtggggaaagaaaataagctacttcttccataataagaaataaaaattaatactcacacccccgtgtttcccaaaagcaagagcagattgaaagattgtttccattggatctggcatctctatattccctgcaaccacgacaaacaaaggggtagaatcttatgagcaacttgcaattcgtggtaatggtttataaaatcagcaaagaaaatcaggcaatgatgcggacatctctgccatttgttcaggctacaaaaactagtaagaagatggtaatattaggtggacaacaaagagtaaacatgagaagatggaaatttgttgaaagcatagttgtgtaccaggcttgataatctttgcaagctcttcagcatgttcaacctctctcagaaattctctctcaatctgaggggaaatatcctcaggccctagagtgttaacatcagaacattcctctgcatcagggctactgttcttcttgctggcactcttcaatctcgtagtctcttggtttggacttccttccatatccgaggcagcttgcgtgtggcatatatgcaatgcttgcttccaaattgcaagaattacaagctggattgagaatgcttcaagttgcttatcagcctcaatctgtttaaacagacatttgctgaaaacttagacaaaatattaaatatatttacacattcataaatagatttgtatatttttaaaaaaggacttaacaaataaacatgtaattaagaatatatgataaattaatatattacatatatttaattcggtacacaatgcaaatgttaaaggcaaattaaagcttctaatgcaggtttgagatcttgaagttaaggaagccgaacaaatcatgcctcagattgctttaagctcaaattatacttaaagcctatataaaattacactagtggtccacattcaaaagccaaactaacaaaagaacagtatgatggtcaagcttcagaaatacttgagcctaattgaacatgcagtactttggcacatgttagctaatggcacagaatggatggagccaggatgtcatggcgaacagcttaccttatcattaactaattctgttatagcagctgcacacttctgcaaagactttagccttatcatgcagttcgttgatggctgctccaaagtatccatatccgttgatccttgggaagtccctggaccagagctctgactttccatgctttccatgcggcaaatattactattagtggcaccaatgattggcaagggcgctgttgaaattgtagctgcagatgctttaggtggactctctaatttgtatggaaaatggcttggcttggttgtactgcctgacgatgatgacacatcaacaggtggtccagagacaagtacatagtcttgatcactaaactccagtgaatcaacaactgcaaacgaataagaaacaggaaaaagtgaaaactgatgctctattagaatatttaattgacagtaaaacaaaagtgaaaacatgatagattattggcacctcttgggtgggcatttattggtttttggcttgtgagtttaataggatcatgtagaattttaacagatgatttatggctgtccggcctaatattataagattctttggggcttgcagtcttgtattggaatataggatcaatgttgttagacgtagtaggtgccattgcaagcctatcaatttttgtatcaaaagatggaggttcacgtctctcattttttgtttcaagagaaaatccaatagtagacttcattgagggcctccttgagtaagaaggactcccctccggaccacttgaatcatcatctaagaagaaaggcaagcaatcctcctgagaatttgcatctgttttctttaccgggttgctatcagatagtggaaatcctgtaactattctcgttgttgagcccctactcctgcatccaatgaaagattgtttcatctaatacacactcacatcaatagatgaaaccatcagaatttttcttaaacccatatataccttaacgagtcatttggcagcttttgagatagaaacggatggttaaagaactcttcaaatgtcaaccgctccactgtaagtacaaatgaatcagagctacaaaatataattatatatatgattcacaactggaagcatcaagagataggacaaaaactatacgggttcctatctcattcctatgcttgcttttatgtgaaacaaacaaataattatcaaacatgtttttataagcaatctttgtttaatgtcaaattcaaaattataattagctgcgcatgtctatctaatattttcagggactattacttaatcaaaatgaaagactccgagcttcatgaggaatatataagtacaataatgtaattaaatttctatccacaaacagacattacctatagccacacattcgcaagagcatggtggaacatacctggattacgacgcaacaatttttggcacaagtctttgcactcggaactcaaaaagttattactatctggaggaaaatttaattcagttgatttcacaatgttttggagcaactgcacagcatatgaaggacaaattaaactaaagatttagtaagacaaaatattgaagcatgtaaacatggtaacattccatttagagtttccatgtagagggtgtaattacaagcttgaaatacagtgctcagaagcacaacctaaaaccaatttaaaatcatttatattttccagaaaaaggaaaaaaaaaaagaaatacaagcaaaaaataaaaaagaacctgtatttgattgtttccagtaaatggagtttttccggttacaaactgaaataaaattgccccaacactccatagatctgcctgtgaattcagttccaaggacagtagaaagacaatgtataagtctttcgtgagaatgagatttgcccattataaacacacaaaatagacacataaaaatagacgttatcaccttcgcatcatatttttgcagttgcattatctcaggagccatgtagagaggagacccacataaagtttctgcaaggcctcgaggttgcaaagatctaccatagaaaaataaaatgcataagacataacgttgaagaagtccgcaggggagtcactagttagtacttagcagtaaaataagtgttgagaatactaataaggaaatttacaagtacatatgtgtgctcatgcacgtttgtgtgtgagaacagttttgagttgagagaaatttttctagtatgatccaataaattcacggtcgacatcaagttaaacattttgcatcagcatcttaacattaagcatgactactagggagaaaaagagaagttcatgaaagctatttgatctatagctcacaaaaactcataagaagactacaagggaatacctgaatgcgataaaagaatcactatacatttcttctacaaagtaatatgtaaaaaataatagtgaacaaaaaactacaacaaaaatggtaggcaagaagataatgaactataataccttgcaaatccaaaatcggcaatcttcaaaactgcactatcttcatgagtagaaagcaggagattctgttccaaaaatagtgggtgttatgatgggaaaattactacaaatcattctgcaaatgactattattagaggtgaaacattatcataagatactaatataagctagtttcatcaccctttcatgaacttgcccaacttacacagctagttaaaccattattccaccatgcaagttcaattctgtttggatcatcagcacaaagataatttagaaaataatacattttgtgaaagcagtgaacctaacctgtggctttagatcccggtgtataagattattgtcacgaagaatttgtagcccagccgctgcaaataatggaagtagttagtatcacatgcgacactacaagttaaatgaaatctggcaaaacaaagcaaacagggcggttcaagacaaacctagctgctgcataaaatgcttagcagttgtttctgggactcttccatgtcgttggatatacatggaaagatcaccacctttacagtattccagcacaagatgtatcttcccaggcgcctatattaagagaatgtaagccaaaacattgaagccgacatgaaaaccaaagcccaaacgcccaaacccagatgaccctttcttccactcttttacaagcttatctagtccatagtagcattcaaactagcatatttaaaactcatttaacgtaacaattcaattaaaccttgactctagttgatagatttttgaagacaacaaaacaaccaactccaacataattgtagaggtgtgattgaacattccttcagtgcacaaacaataagcattccaaatttattttcatattcctcgaaaataatgtaagttttcaaagttcaatgtacggttttcaatgcagtaacaccgccaacaacaacaacaacaaatccatacatattgtatacatgagcacttcaaagacttgactttgaataaacattccggtcaatacaataagaaattaagaattattgcagtcaagttcaaactctcaaaagaagtccaatcattttccttcactctaacagaacataattctaaaaaaaatccataaaaactagaccacgaacctcaataatatcgtgcaactgaattatattgggatggttaatcttcttcaagataaagatctcagacattaaactttcctgcaacttcttgttgagccggctcgtggcgatttccttgatagccacctcagttccatggacgcggtgcctcgcgtgccacaccaccgagaaagaacccgacccgatttgccggcccaccagataatctccgaccactcttcctctcccgttcgcctgagccattatccaaattccaataccaccaaaccaaagcaaccctagaatccgaacccgaaaccagctccgaatacccgaatctcaaagctccaataacaacttacaaaatcgccgagctcttgttaccggatcttccgtatattcgacccagattttacagaacaaaaaaaaaacaatttttgatcgaatcgatttttcttttaatttttttttttaaaaaaaaaataagatgagagagttattagagagagagtgaaagaaataaattattaaggaatttatgcataaagcccaattttgaattatgctcttaattaggaaactaatatgttaattaacatttttggttagtgaaatttgatcaaataaaattactaattacttttagataagcttctcttctcgttctcagcacagaagcatacgtagagagaagaaattgaaacttgaaagcgaagacgtggagctataagataaactaaactattacgatgcggttgagtctacgataaacattgtggttcgcgtgtactaattggttaggtagcaggtttgatgatgtgtcgacgttacattggctacctatataatttaagatgacgtgttttctgacgtgggtataacttattggcccggttagtaggtataatttgagtaattcatctcctaattaatatttaataatatatatattttgttaactgtttttattggcctatggaatagctgtgttcgattcatttttctcttctcattttcaaaagaagatatgaaaatagccaccaaagatgactatcattcaaaatgttttttttttaaatctgtgcattcattgatgtactataacaagtaagcatacaagaatttttcaatgtccaaataacttccttatctaagcttaaagtgtacttagctagttaatgagcgac

SEQ ID NO: 206 - DNA, 2877 bp, Cannabis sativa
aatttccataaaacatcatgcttagatttaaaggggcaacaagaaatcagatatactatggataatgggcattaaagctcaaaagccacagttgaagttttcagtttatgagccattaacgtttcattaaataagagaatttttttttacattcatatcagtatataaattacaacccagtcaaactttatatcagggtgacaattcagtatctaacttcccaaataatctaatctccataaaaatacacactttttcttgattctatgtggtcttttctgtaggccttgcactaaagaggatagagcaatattttcaagcattcgtgtgtgcaaattattgattactctctttaaagtttaaagtctgagctttatgcaataacttaattcagacaaactacaacaagcaaagccatattactaagataagaatagcacctcaatttttgttcaccaataatcccgacaggagcacacgccatctttgaaatgatggaacctcttggcatcacgcatgatgagttctctgccaactatctttgaaataatcttcagtgcattatgacaatcaccgcaaacacggagattcttgatcaccctaataggtgaacgagctgagctgctaaggaggccataggcaacagccagtctttcactgtgagcaagaagagcatcttccttgctttcctgatcaatgtcatgtaacacaaatctagtctctggtatataaccagcttctttcatttgttctcttaaacccctaagcttggcatagatcttatcattctcgggatgagaggtatcgcctgctctatattcatgtactcgacttctaacttctaaaagactgggatctttctttttctccttctcttttgcaaaatcagacgatttcactggaataaggccggcttttgactccttatctaagcgtgaaggttctagctgctcaacaagctcagcacaacgatcaccgagctgtgtgtgcccatgaactctgcacaaattcatcaaggcttcccaaatatctacactaggctgcaatggcatcttctcaatgaattccaaagcttcatccagatggcctgcacttcccagcatatcaactatactgacataatgatccatcgttggaacgattccaaattctttgctcattgactcaaaatgcaacattccctcatcaatatccccaacaacactgcaaccgtggaaaaccccaataaacatttgaccatcaggtttccgcccagcttgcttgaactcagtaaacatatcaatggcatcccaccccgaaccatttttagcaagccatgttatcataatgtcccacgatgtcaaattatgctgcggcatcttgttaaataccaagaatgcatcttccatagaaccacatcttgaataagtctctaggattctgttataaactcttatttcaagagaagattgtgaccttaaaatatcttcatggacaaatttggcctcttctagtgctttagcctctccacaaacctgtaataacagtaaatatctaggcaaatccacaggaatatgttgttccaccaacaatttcaaaacctccacagcttccttagctttaccctccttacaaagaccatctaaatcctgaagactcacaacatttgggctactttcggatgcttcaaccaatgccccttcagttacagggtaactcggtacttgaggaccagtcgtagtattatgataataattattatttggctgatgattctgttgatattgtccataaacaggtccagcgtttcctgcatactgagtatccgggctttgctgaaactgcgaaaatgattgcgaataacttccattctgagccccctgaaatcctaaattcccttgtgaactaaacccacctgggttttgtctcatttcactcgaacccagctgataagaagtatttaaactctgcacctttccatttcctccattattttgaccataaatcccattaaagttttcattttgcccaaaccgattgttaacacttccatagttagagctctccctagaaaccccaccatgattctggtaaaacccatttgagttttgcaacaaatcactctcatttttcccataagctccactactgtttccattactaaacccacctaagttttgcctcatttcactcgatcccacctgataagaagtacttgaattctgcatatttccatttccaccattattttgaccataaaacccactcaagtttccatttttcccagactgattgttaaaacttcccaagttagaactctccctataacccctgccatgattctggcaatctccatttgtactttccacaaaaccatttttagggtctttatcataaaacccatatggatttgagccttgtcccttcactttgtcttcaaaatcagtaaagtttcgtctttcactctgaaacccactagggttttgacaatattcagaagaaacctcattttgatagccattatcaatttgggaatcggctattcgagcggcagtgctgaaatttctcaaaagataatttttttcaagaaaatttgaagtgtatcgtggatagcatacctttgataatgccgtgagagaattgagcttgagaattagggctctctttgtgtacatttgaggaaatttgagccctttcttgcttcaaagttcagaaaaaaacttcgaaggagaaaaggagaaattttccgccagaaatgaatcggaggaagatcaataggatttctcgtttgtcctgaaaagttggatggagacaaggaaagcttggaagagaaaaactatggcggaaagagtagttgaagcttaaaccccgacagtgataatggccagtcctaatatc

SEQ ID NO: 207 - DNA, 2371 bp, Cannabis sativa
tgcttaagaaaaataaataaataagttttatctttttccttttcttttcttcttcttcttcaaccatcagactgttccttctgcgagacccaaaacctaggcgatcatggtcttcttctttttctgtcacactctcttcatttcccttttcctttctgtgcaaccactgcacagccatggcaaggccacctccgaccatttacaacccaaacaaaccccaaaacctggttcccgatccttcaaaaccaaaaccctaaaattttgcttcctctctcagtcactttctcgcgctcgctctcctctctcgtctatctctctctttgacgaaaagggcaacgagccacaaggctccatctctgaatcaattttgactctcaaagatggcttccttgctcgtcacttcacattaattcatccttctgcgatcgctatcaaccttagttcttctgggatcatggcttactctcttgataaacaaaactctcttataccaaggtataggttttattgcatatgaccatttctcacattttggccttgggaaacctttgatactattttccttccatatttttggtaatggtggaaccctaacgggttcgaattggatttctcggctcttaaatcgggggttttaagagcaaaaaatgtgttgtaaggtattggtattgttgtattgaaatggtccttaaaatctaaataattagcacaattttctctattttttagatctgcatatgtatttttttgtttgatttagggaaaatattgatggtcgtggtggtaatgatagtgtggttgtgataatggtagtagttgtggtgtgacgatggtgatgattgcaccatgaaggtgcagcgttaatagaggtggtgtgacggtggtggtgttaacggaggtggtgtgacggtggtggtgtggtggttgttgtggggtgagtgttgaatgtctttgaaggttgaagaaggaagaagaaaaaaaaattactattttttatttattttaaattttaattttatttttttaaaaatttttaaataatttttatgatatttaaataattaatattgtggaccactaaatttccaagagatttgacatgcatttaaattttaaatgagatatgaaaaaaaaaaaaaccatattgaagttggttagtttatagatgataaaatatataggacctgtatgaaacttgaggctgattcagccatgagatcggtatatgcagtaatatcataatgaggctgtctgaatggggtagtgagataagtattggcaatgtcatcactccctaaacaaattaagaatatgcttttcgatactatcatccctgctctgctttctccaactcctgcctttatctttcttatcacatctttaaacatctctagttgatctgataatgataacacagactaataacaatatatatatatatatataaagaaaatgtaattagtatctgatttttctacacctaaattaaaaataaaataaaataataagtggataatatagagacatgtatgtatatatataccactacttgagatgtgagaggatcatatcctgaaccacctgaggcaaaactcactccagtaagaaggtctttaagttgaagacttggatccaggtaagcaggcaaaagcttcttgatattaagtatttcatcagctacatacacaataattagctatttatcaattcacattctttttatatctgtatttatttagctgtctatagataatttcacattggttagtaataaatactcgatccaatcattccctaactagttagttttattagattgagttagccccaataactttgatggacatgcaatctaagctagaatatgtattaacaaagagaaagggtatgtacatttagctgtaaattagataattagtacacaatttatatgtatatatgtacctaaaatatctgtgggaatccttccattgctaaaccttccagtagggatgcctccaatgaagtttctcccataaggtgggaaattgcatttaacaatggttttgaggtagttattgttgcctggatctataatggaatctccaaaagcaaacaatgcaggaactactgtttggttcaaggtcattacttttgttgcaccaataacgcccatattattattattgttattgttatgaccatatagtatggaaataataacaaagaaaaatactttgatcaacccaatacaaacagaaggagcagagtttgctgctggggagatcagaaactcattcattgttgtgcttaattgtaaaaactttcttttcttttttggtgatgaaagttgaataatgctgccaagctttattatttattggactcacaa

SEQ ID NO: 208 - DNA, 1463 bp, Cannabis sativa
cgtctttctcggttttggttctttgttagtacctagttatgtctattgaaacaatctgtctttgttctgtactttttagcttgatgttgcaactgaatcaagagcttgagcaagatgaaactcgaacctttcgacatccagtaggttcgccattaaccaactctccaccaggtaaagatttttgcaagaggattttaacttgcgagcaaatggcgagttatgagttgattataagtataactccaattttttttgtctaaaaatcttgacaggtaactggatgcagcagtttaacagtcctattgaacagagtcccatgcagagtattagtaactctcctggtttcaagagcttgagcccaaccaacaataatctgtctggattagcatcgattttgcatccccaagtatcaaatactgtgaagatttcaccgattggcaaggaccatgcgatcggtagtcatgtggagcatatgtttaacaatggtagctcagtgcccgggtcatcgtttccactatcaaattcatatcccgagctgaagttgggtgacttccatggtagtgcaccgtcatttggtccttcaacatcaaatggatctagggtagaaactttatcagggccacagttcctttggggaagtccaagcccatacacagagcgtgccaattcagcttggccaagaacaagtgcgggacaccaatatacatccactaacaaaggccttcactttccaatatcagctcgccaaggttcttttcttggttcgtcccaccatcatcatgttggatctgctccctctggtgttcctctagagaggcatttcggttatttccccgagtcaccagaaacttctttcatgggtcatttggcgtatggaagcatgggcttaggaggcctcaatgacaggaaagtattggcgaatatgggtcctcgtactgctgccatcaacgctggaatgtcattaccgggaaacatgtctgaaaatggttcttcaaactttaagatgatgtcctctgcaaggcttagccccatgtttttaaacaatggctcataccatggtcaaccatctacaaccattgatggttttgctgagcgtggtgcccggagcagacgagttgagaacaatggaaaccttgttgatagcaagaaacaatttcagcttgatttggataaaattatcggtggggaagacacccgaacaactttaatgataaaaaatatcccaaataagtaaggctaacatcttaaactccacaccctattattatctaacttcttttatggatatggtgactgataatttttgtttgtcttctagatacacttcaaaaatgttacttgctgccatagatgaaaatcacaggggtacctatgattttctctatctgccaattgattttaaggtaattatttgatatatcaaaagagaatttttatataaagttatgaactttatctaactt

SEQ ID NO: 209 - DNA, 9798 bp, Cannabis sativa
ctctctctctctctctcttggcagttagcgctcacacacaaactttctctctctaaactctctgatatttctgagcttcacgcttctctcggcgccttggactcaacactgtttctagatccgtctttttcattagctttccaattcttcaacctcagtctcgccatttctcttcctcctccttcttcttcttctctccttcaaagagaaggaaagtgaaaaatggtttacacaatctcagggatacgcctccctgcaattccatcggcgtatactcctttatcgcattcgagcttcagtagcgatcgtagaagtaccagtctctcattactcttgaagaagaactcggtttctcgtaaatctttctttatctatctccttttctactgattgttaatttgttactgtgattgtgtttgtgcctcctcactttattgcttgctcaagtacttcgtttagtatttatttatatatgtatatgcgtatctttccacatatatatgtatatgcatataaggagttgtttatagaacagtgttgtacaaatttcatagtttaagctacatttcgcgggattcagtgtcttttgggttggcacatgtaattttgtgagcatcgtatgagagaatgtcagaaacaatggcggtcttgatcgaagagcaagctcgttaggttgcgtgagtcatttgattgttatttcctcattgtaatttctttatatatatgtatatagtttatgtaacgtcagtagagtagtgcttattgtggtgctgtaggaattgaaatcaaagtggtagatttgtgtccgtatagtgtggaattatattcgtgtgctgaggaatcaccaaggtatctgtctctctttggtgaagaagggatggaattgaaagtaatggtagattggaccttatcgaagcatttctgagtgattcgttgctattttgagtcccgacgaatatagtagaaagaaacctaatatggtatttggtcttaccgaagtattctgaggcactgaattgcttcgatgttaattctgggcacaacaagggagccaccgttggggtaaagttctaaaccggtgagtaacactcatggttaataaaaactggagcactggttcatagattcggatcatagtgaatagggatgtgaaatcttttgtgggccgaaaattcagaacagtgtactttgtgttgagtatatatctgaaggaagaactacttagacatttctatagtctcggaaagtagatggttcaaattccttttcctttgtatgcgagatcaagtgtgggcgaggactatctattcctataccaccaacttcatcatactttgacataaaccattttaacagggttctttgaaatagcagtgactactcactggaactggattcatatgacccttttttgtgattccctttccttttattttctattatcaaaaaacttcacccattttagcacttggacaacataatatggtttgaatgaaagacattgggttttgttatgatggtacttcttattgtattatcatgagttctcaaagtgcattttaatttgttcatatcctactttgagattgaatcttttctgctcacgatgattttttttttttacaggtaagatttttgctaagaagtcttcatacgattctgattcttcatcttttatggtctctgcatctgcatctgataaagttttggttcctggcactcagagtggcgaaccttcatcttcaacagaccaacttgatacaactggcacatccacagaagagcctcaggttttgaccattgcaatttaaataagagtaatttacgatataaatacttaagtttaactactagttgtaagtactgttaagtattaaataaaatgccatgtgaaaatccctaagtcattaatttttttttaaaaaaaacaataatttaaatataccaataagaaaatgacacgtggataatgacttgacatttaagggtcaagtacagttccaaaaatataatttaggtattaccaccaaaaattaaacttaggtatttatttgtaaccgggagttaaacttatgtatttatgttgcaaattactcctaaaataaatatacatacataatgttgttttaatatagtccttttgctgtaaatattttatcattctctagtttagtgtatttttaaaaagaaattaagaatttggataattgtgatatcggaaaacttggacaatgaaccaaaagattaggtcatttaatttcactatggttttgaagttgataaacattaagatcattttacacttttcaagtaagatttaataaatgatacttattgttggcatctttattgccacctgatatgatttttgtataggttcttgatgtagatgatataacaatggaacatgatgcggatgttaacaatggaactgattataaagctcttagcgaggaagcagctggtcctttcaatgtaaagtccattccaccaccgggcccggggcaaaaaatatatgaaatagatccaatgttaaatggttaccggcaacaccttgaatatcggtgagacttttaatttgttttgtttcgttttgtttttgtttttttttatacaaatatgacttaaaacttactgagagttgtcctgaaattttcctctggtttactaggctttatgttgtactttaatgttaggcgaatagatggttttacatttgtaatttacctaaaattttgtgaacctctttatcaatttaactactatattgactgcatagaacagggaacgcctttgctgccataaaaatttgtttgtatagatacagcaaaaaaatcattgatgttaaataggcagtcagccaacaaaaaataaaaaagaagaagaatcataatacagtcatttgactattttttttcttgtttagtttagtttccctaatctgtgcaaattcagtaaagctttgttgcctttgagtgggccatgcagcattttctcttttcctttttcttgtatatacgtacaggtgaatatttaaactttactgtacagttatgggcaatacaaaaaactacgtgaggacattgacaagtacgaaggaggtttggaggtgttttctcgtggatttgaaaagtttggttttcaacgcaggtatcactttctcagaatattttgcatagttttattttttagtttgattaataatttatcgtgctttggtagatataaattagtaggtagataattgagtgaaaaaaataagaatatggctaagtatattcctgatagttatctcaattgttttgcagtgcaacaggtataacatatcgggagtgggcaccgggagctaaggtttgttatgcgtgttttgtatattaatacttccattatccttaatctttcatactaggaactatgacaatgatcatatgaggactagattatttacatatttcattaggatttgtgtgctctttagataatgcgtgccctgttatgctctcactgataataggaatatccattgtgctcgagtttcattcacattccttcaatcacttccattggagattgccctatttttcttttaaaagtagtgattgcttcctgttttttcagtcagcatctctgattggagacttcaacaattggaatccaaatgcggatgttatgatgcgggtaagttctgagtgttaataatttctatgaaatctttgtaaggaataatatttaatcagcgtgaagtttcccagtcaatcatttctctattagtcaaaatataaatagttaatgatactcacacttcatatgccaacagaatgaatttggtgtctgggaaatctttttgccaaacaatgcagatggttcacctgcaattcctcatggttctcgagtaaaggtaggtttttcctggatgcattataaatgtaattgtttcagtggtattttagtgtttaaatactcataatcaattttctttttcatgtaaaagatacaaaaaaatattgtaataagtgatgaaactgccaatagtatttgaccatatgtattaaaagcgcaatgtactgagatttcctgtggataaatatttgataaagattatctaataccaatgtaattcccatgacaataagctacataagccatgtttcaaaagtaaagctgtagttttagttgaaatagggtacatttggtaagcaggattgctctagaccgttgtctacaattggattaaattagattattttagtactaagacttacttagtgcgtaggattggattagtttagctgtatgacttgcatcctgtaatgaatgactaaattggaaagtatactttgcgaaaaaaaaagatgaaaaagtatgttgggtacattttattaggagattgtgctttgaaatatataaaaaaatgatgcggcactttattagagaacctgaacagagaagaaagaaatgcctactttgacacacaagggataaaggagtttaatttgacattgagactataaagactaggcttacaaatgggttaaaatagtccactatggaggtcactactgtttcctttccaaatccaactctgatttgacaaatatagtccatcatagtcatgttcctgaccccctattgatatgcttgggcaaaaagtaataaaagagtttctttgatcaaacttttgtaagcactcaatataaatcgactccaaagtagctttaattttatcatgcgagtttcgaatagtaaggactttctttcatagggaatgatatggtgattttttttcatatattggttcttgaattctatttaaacaattttgctacaagattatttcaccgttgcatttgaatattgtgtcgtcacattaatctgggatgcaaatatcattggtgttttcagttgaaagtgacttcatcttgatcatgtactcacagatccgcatggatactccttctggaattaaagattcaattcctgcttggatcaggttttcagtacaggctccaggtgaaattccttataatggcatatactatgatccaccagagaaggtatttttttgccaattgttttgtaaatacattttctcagcttaaaatgctaaccccaaggattctttggaatctgaaagaaagacaaatgattttagtcactcaaatgaggataaaataatgaacttttatatgtgaatatgtatatacataaaatatcagctttgatggcttttcaaatattcctttcataattattgtcatggttttgattttggaaattttataacatcgggatacaatatcacatacaatttagaatactatgagtaattaaatgatatagaaaacatatcttccatagagttaatggagaaagaataggaattggtagtgcagtactaacctgctaggtcttcttccctagatttctaaagttgaaccagatcaatagatcaacaaaagctacaattgtgagataatatgtgtttatagtgttggggagagtacccacctagctacaaaagttgaattaggttttagttaaccaaaaaagtccacacttctgcttcaacttgacttcatacagatgctaaatccattaactatagatccctaattatattggctaaaatggcaaggaactattcatcaacccatgtgttaataaaagtctaacatttgattctcttgtatcaaatattgaatattaaatcatttttcaggatgtttcttcataaatcaaataacactctcttaacggaatttccttttatatatttattttttattaattgcatcttctggaagttaaactaggccaaaaatgcaaggccatagcctttttcactatttctgtcccttactatggctaattattctcttgctcctatgtttacaggaaaagtacgtcttccagcattctcagccaaagagaccaaaatcacttcgtatttacgaggcacatgttggaatgagtagtacggtgtgcattgcttccttgtaactcataaattatggtggaatgttcatgttatattgtgaaactattcttaggtaaagcaagaagtgtttgatggaccgtgcgttgttaatcataggatatatgagatatgagctcatatgtttctcttgttagtcagtatctgtttagggctgttgatattttagtggccttagtttgtccacccctcccctctcctcttcccccaaataaataaatgaaaatggttcaagaactggagaaaataagttcaagggccttttatttctggaaggaaagttgagagagacaactatcactacctctttcttgcttaggaaaacactatatgatttgtggatgaatgtacattatttgatcacatcaaaagtagttacttgttgacaacatttgagaagatgatttgtagatagtatcaactgcaccagcattacaccatcttgctattgttggatgaaaattttgcattcctcccttttactaatgctatattttttcgtgttttatgatctactgttaccagcattatgtcgtattgctattgctggctgaaaaattagcattgctcctttttattaatgcttttcatattatctgcaatgcaggagccaatgattaatacatatgcaaactttagagatgatgtgcttccccgcattaaaaaacttggatacaatgctgttcagctcatggctattcaagagcactcttattatgccagctttgggtatgaatctatgatcaacttcatcatgagctgagatgtatttgtactttgcatgtgtttgataatttttttttatgaaatttgtttgaagtatcttctgtcgtttaagatatatccatttatttttaatcgttatgcaggtaccatgttacaaatttttttgcacctagcagtcgctgtggaaccccagatgaattgaagtcgctgattgataaagcccatgagttaggcctgcttgttcttatggatattgttcacaggtattaactactttgtactctctcctgaagcatcccttggtttagcatatgttatttggcaggtttcgttttcgttgaaattgtttgtttatgagattcttaatatcagaaaatttgcacttagttgatctgttcattttcaaacttaaagcccattttcagatttctgagtgcaaactttctcaattcgttcagtacacccatttcgtgatagctgtgagctgaaatgtaaccttaatttctcacttgattaacatattggcattcccttcggtgtttggcaattcgaagttattttgttttcttgctacatatctgataaatctgattgctatgtggttgtaccagccattcatcaaataatactttagatggactgaacatgttcgatgggactgatagccagtacttccactctgggtcacgtggatatcactggatgtgggattctcgtcttttcaattatggaagctgggaggtatttggttttatttctttttgaaagaattaggcctatgcttgctgtgtaacattgtaaccctctcattgttttgtttttaaaagtgaaattgaggataaagattttcttaagtattcattatatcagaatgatttctgcctttacttgtaaaaaccaaaaagaggtgttgccaagcaagcccttagttttttttttttttttaaaaaaaataaatttaatatatttttatggtaattgattctttctatgtatgtaggtattgagatttcttctctcaaatgcaagatggtggctcgaagagttcaagtttgatggtttcagatttgatggtgtgacttcaatgatgtatactcaccatgggttggaggtactattaatttaccactgtgacacagataatctgcataatgtttaaaaattcagtgttagtttcttattatacgagaatttttagtataggttgtgtagcagagtcaggattctttattttaccatctttatatgggcctaactatgttatacatttttttttagcttgcttaagaaatcaaattatttgaactcttaacttctaaattcttctttagtcgtcttttctttaacagtctcttatattgatagggctacagaggtttgtagaaaattaattatgctgtatatttctatctatgatacctattttcattttactcagtgtgaatgaaaggttgtgtgtcattggtgcaaaacagtgtatggaatttgtaagtgcatttcagtcacttataatgaagtaaattagtcctcaaggttgtttaggcacgtaaaaaattttatgttgactgacttcagtccctccttaacaaggttttgagaaagtccacaaaaaggttcacctaaggtctcgcagacttttccttttcaaagttaattgagggatggaattgatgtttgaacagatttagatgtggatcttctgctctttcaggacttgatatggtctcatttattgtttatatctttgagaggggttggactgcagaagcagatcactaaaagttaaccatgcgcacacatttgcattagaaatattgaagagaaacataaagccagtattatgagtgcatatctaaaatcatgttggagattagtacagattattttgtatttgcctctgttggtttcattctcaggagtcttaaaaattccaagtctgggaaaatgttagaactgaaagtttggttttacctgctcacaatttttcttttttatataaatattttatgggcattcattatctatctttctacacatgattttggtgcaggtagcatttacaggaaattacaatgaatattttggattcgcaacagatgtagatgctgtggtttatctgatgctggttaatgacatgattcatgggctcttccctgaagcagtgaccattggtgaagatgtaatataatcctataactataagcattgttttatttcgttttcccactgttcaatatttttgtaaaatagagatattcttaaaaagagtgatctgaattagtgaattaaaactattaataattgaaacacacacccaatcagctgaactcacgaaccagtacaatataaattgctattaaaacttattttagtacccataaaatatgtgcttaccacttgaagcgcttaattggtgggtgggttgtttttgagtgatgtcgggttcatatcccagtaaatagatcttcttgaaagggaaatgcatgtgctttgatatatactttgttctttcatgttctattaccattaaaacattttcaccatgtaagttctcttttgttggttgatcccacgtgcaaacatgttggatttaaaaatattaaattattggagatttgaaatcatgaatcatctttcaatggaatcaaatgccaaaatttacatttttattcaaatagcaagttctgtgtttacaggtcagcggaatgccaactttctgtattcctgttcaagatggtggtgttggatttgattatcgccttcatatggccattgccgataaatggattgaactcctcaagtatgtttgaatcgaaaaatgaagcattactttaattttttagtggatcctaaactagttcatctttcttggcttttggtgatttaggatgcaagaagaatactggaaaatgggtgatattattcacacactcacaaacaggaggtggtcagagaagtgtgtttcttatgctgaaagccacgaccaagctcttgttggtgacaaaacaattgcattctggttgatggacaaggtagtatgattcttccatgttttatggtattctgcttggtgacaa

SEQ ID NO: 210 - DNA, 4321 bp, Cannabis sativa
  modified_base (3749)..(3750): a, c, t, g, unknown or other
tgattatcagtgattaaagcttccagctctttctgtaatcctgaaatgcttgtcttgaaagcatttgccatcatttgcaaatcaacagacacaaaagggtgcgtatactggataagagccttgttccggatttgatcatatagtgtgtcaacatggtcgtgcaaatggatatcaagtaatagatttgctttgagattgccaaggtaatccaaacatgatgcataacgactacattgagagggggagggggaattagaatagtagtgaaaccacaatactaaaatcagcaataaacaattcttcatgccagattagaagaagaattacaaggatggcaaaaaggatgttataagaatagaatcccacaacaaattgtttttccatgtggggagtaactaggtttacactggtcacgaatctccactaaacgcgcgcgcgcacacacaccctaaacaacaaattgcttttccttgttgagtaactaggtttacactggtgaagaatctccactaaacacatacacaaatgcatacataagatttatcaaattctttatagcattacatatcatacacttaaccatattgtacacaaaacattacatgaatcattgattcatacataacataaacttaatttaaaatactctacatgtcagagcaactttgaagtaacaagttcaagactcacaataacaacatgtttaatgaaaggtgaaagtaaatagttaaacttttacaagatagcactacattaccttgagtagaaatcattgataagctccctgacctcaggcactaactccaagaaattcctaaagttaaggttgtctataactttgttctgtcagaaaagggaaaaaatatttaatcagagaaaacatctcaactagaacaaaataaactaaaaatgaacatttagaaataaaagcttcagcatctgtagacatgggagaagaaaaattaaatgccttcaactctgtccggtcaaaactcgcaagtgcacaaagcccaccgtatgttgcaacatcttgcggcgcaattacttcattatagttatttcccaattcaggattagtttccaagaactgcatagtgtcaatgggaaggaataaaactttaaaattaggcatgacatgatggaatgtcattatcaaaccttatcataacaataaaattgaaatagaacaaaaaattaattactattccacacataggttaaagcacgagccatttaaggtaattgaactcatcttaaaattaaaactacctcagcaagtactgaacagaagaatcattacatagcaacccaacatatcaataataaattgattttcccaggattatacagagataattaagcatgtaagcaaatatttaattaggactatataattttccaattcacaagtgtctaagtgctataagctcataatgtaatttgttgcaggacaaaggaaaaaactgccatctactcattatattgctggaggcaaacaagtaggacaccagccatactctcaattattagttaaaataataactctaataagtagtacattgttgagataaggaaaataaaatataacaagatcaaaggtatttgtatctaagagcatttagtgaggaggtctgaaacgaattactcattgcagttgacttgacaagtgaaagaaaaatgaaggttttcttacatattaataacattagatttgaatttcatcatccatttaacaaacaagctctaaaataatatcatggtatcatgttgtttattaaaaaatagtgttgtgtctgcctactataattctctcttcttttactttgctttaagcttgtaactcaagtgagatgctcataaataaacttccgaaatgttctcatatttcttaattacatttacaaagctttgacaatgcaagcagaagtagtaagacataatcacaaaccttacgagcagcaagcttgtactttttggcctccaacagagccaaaccagcagcacaacgaagctttgctataacaattgggtctacgacctcctgcgactgctctgctttactaacatagcttgtaacatgagtaaattgacccatctcgatgctgacaagaattgcactcatacacatatgaattatatgctttgatgtggtacaatagtcgcgcgttcgaacataatgcttaaaagcatcccctaaagcaccgtgagcataataaaagtctccaaagtcattataccccattcgtatgctttctttaatgagattagtctgcacaagtatcatttaaacgattcaacaagacaaaacagaagttacaactcacaacaaatttatacataattaatctactttaccaagacacatatacacaggtctgttagaaagagaattctagggtattatcatttgataagcgtaaagcaatacccactgtcgtgtatcaacccagaatgtacatcacagcaagcaggtctcgcgtcaaatagaattatcattcatgtaaaaatcgatagatagacgtaaccatgtgaaaacagcaacctaaatcacttaaaacaacgaaaacccaacaccccttgcatataataaactttcacactcaatagtatcacaaaattatgaccagtcaaagtatgcagcgatgagtttaaatcagacaagtacaaaacagcgtaattctaatctgcattgagtatatgaaattgcatatgagaaaacatccagaaaaaaaaaaaaaaaaaaacgctaataccgaagatgccatgaaaatcccactaaatactcaaaagagatagcaaagtttaaaccaaaaaaaatggttaccctataggcattgagctcattctcaagcttctccttcttctgctcggccctacggtcgacagtagcacaccacgctgaatccatactataatccgggcccaaacggccatcaatcttctgtacaacctccctgaacaattgggtgttctcgcccttcttaatctcatcgtacgccattcttagggcttccaattgcatcgtctggttgttctggcagtggtcggcgataaagagaagacgcgtgatcttggtacgacccgtgtagagactggcgtaggcctcgatgtcgagctgctccccgcttatgattggtcttttacgtttctcttcttcaccgacgccgttggcatagatctcctcgtcaatcatcttggccgagtggtcgtcgtctccgtccatggtgatgttatacaaaaaccctaaaacgaaatccgagagattagggttccggccttgtggggtttccctgaaatctcaggggcagagggaaatgtagcactacttctgatgatctattgctctctcttatgagttctcatctaaaaacagatgatgggtttccacgtgtaactgctaaacggcgtcactttgttcctatttatattttcatttttgacaaattgttcctccctattgttactatgaatatttttatttatcgtaaaatacaatataattgtattaaaaaaaaaaaaaaaaatagaagtgattctaaataacaatatagttattttgcttgcaaaaaaagaaagcaatatagttattttaatctattttttaattttatattataaattatttaaaaatttattaataattttaaatagatacaatgtatataaaaataaagttaattattaatttaaattaatgcccctgaattttttttgccgttaaaaatttccctgaactattaagattgttnnatttaaggatttttatctaatttttgtaaaaaaaattctaaccgatgaaaatttaaggggcatgattttagtacatagtaaagtttgagggacatgatttggtagatatcaaagtctgggaacatgatttattacataaacaatcaccgaaacaataaaatttgagaaatttttaatggccataaattttagaggctatgatttgctatatgtcaaagttcaagaaaaaaattactaattagcttaaaaataaactaaacaactctcccaatttcctaaatataggagggtacactacaaattattttttctctccttgaattttaaaacaatctgcatgcatgtgtatatataaagactcattcaccattttcacaatcgaacaaacaaaacttaacttaaaaatggcttctcaacctccagcatttccaataaaaatgtaaattagtgaactgttgttaaaatatagttcatgttgtaaaagtttactctattagtgtatcaaaagttattaaaatttgtactataagttaaagttattagctacctgtttgaatgtaaaggtggagaa

SEQ ID NO: 211 - DNA, 3242 bp, Cannabis sativa
cttaatcacctttttgcatcaaaaaatccatgtacagaaccattaaacattttagagaatctgggtgctctcacaaagttcattaaagtttggatgaatgaattggggaactataatccagttagcatctcctctataaaatcccattcaattgtatcataggctttctgaaggtcaagcttgatcatgcagttaggcttgtttgatttccttcaatagtgccttactaggtcctgacagatcataatattgtgctcgatgaatctcccttgtatgaaccccccttgagagcttgaaaccaactcaggaagaacacacttgattctagaacacaacagcttggttgcaatcttgtaaataacattacaacaagttattggcctaaaatctttgataatgtttgggcatttcatcttaggcaccattgttaggacagttgtattgatttccttgaggatcttgcatgaatcaagaaaagaagtgactgccctgtataaatcctctcccattagctcccaattatcctgaaagagtaacttgagaatccatctgggcctggttagcatagcagcctgttcagaagatagcatagggcctctactcaaaaccttactagataccttcttcctatttgccattttagatccaagcagggacttgtaataggaaatgaaagcacttataacctggtctggttcgaagacccttattccagtatcattctcaattgaataaacttgattctgcatgttcctttgtttgatactagcatgaaataatgaagtgttgctatacccatcttgaatccagctaattttagccttcaattgcataaaagactgatagttttgttgtgctgttaagaatacattcctagcagcaagttctagctcatgaagcatagcatttaggggttcttcttgtagcttcccttggacttcatctagttcatttttggcctatatcaaagtagcttggagatcagagaaaccatgttaattgatctctctcatgacaagttttaaggcctttagcttagatactattcggtacatgctggtgcctcttattaccttcctccatacttcagcaaccctcttatcatattcaggatgtgatttccacatacgaaagtacttaaaaggttttttttccacaattccatttgggaaaaagagacaagatccctggtgtgtggtcaaaagtcccctcatttagaaacaaagtttctgcatcagggtagctatcaagccagctatggttggctagagctctataaattttcgaatagattctctcctaaccatgctgcttgttagtccaggtgtagtagcatccagtggccttgacatcttctagctgacagatttgcatacactcaataaattcaaattcagcttgatatttcactctatgacccactctttcttccttagctatatgatggcattaaagtctcccatgattagccaattatcctttgtttttagagcatttagatccttccacaattccaacctctccttactatcattaaatccatatacagctgtcaaaaaactgctatagcttccatcaattgttgaaattttcaaatgcataagttggttcgtacatttgataatgtcaacaataaaacggattgcattccatgctataacaatcctccctccttagtgccaagctatgttcatagaaaaacaccaaccattgaacacgttgaggcacaaggttccaatcttatgaaccttgacccttgtttcaaggagcccaacaaagccaacaccttgagttctaatgaactgtttgataagttgttgtttttgcattgttggctcctcgaacattccagactagaaacttatccataaccaagagagggacctcccccctctctcgtgttatcgatttcttcaacctttggctcctgcactatagttccctcatttccatcagctacatctgccaatacttggaaaccattactgatcttagtctcactaacctcttttttctgttctttgatctttttccccttagaaacaaccagaaaaccctcatcatctgtggcgggtttctccttcctcctgtcttctttaatcacccactcttgtttggtacctactttctttttgcagtcctctgtcaagtgccccatcccacaacagttgagtacatcacaggtttccattcatacttgacaccaacctgagaattctttccaaattcgtcttcaaacttcagcatactagggaaatcctgcttcattaacacttccaccagaactctagcaaagttcagacgatccctttccctagtcacagaatcaaccattatgggataccaagctggcctacaattttgaagagtgacttctgtccctagtatttgagatcaagctcttcaagctgaatccaaatggggatagatttgacatcttccttcctgaaatttgtatttggatcccatgacttaataatgactgaccttctgttaaaaaatatatacccaccattaagcacctggtctctatactccattgagttgaacctaatgatgaaaacaccataggtgagcattctgactttgtcgatcttgtccttccacaatctgttagcaaaaccttccaatatgtgtaatggatggttcgaacccaacacataacccagaatggatggtttctagaaatttacctcctcctcaatatcatctagagtaatcttgaccttactggtcccttcagattgcttcaaagattgctttagatttcgaataacagatccagatcaaagtacaggaggagtagagatcttaccttgagacaatccactgttacattgctgatttgcatgaataaattgcagtaagtcatttcaagctttatcaattcgtctaatctctcagtgaagatttgggagacagtggagattggaacacatcttgaggctcaatctgcgaatcaatattccttctccccatcattcaagttaggcattcatcctcttcctcaaatagctctagaggtgtaattctaatcactgcatcaatcgacttcgtgcgtattgcatcagattcagaatcagcacctttctttctcactttctttgctgaattttttgactttccctgagtttttgatctagtttttgccatagctctaacttcaagctgctagagcaaaaatcaaggaaaaagtctacactaacaatattttattttttctttttcagtttatttttgct

SEQ ID NO: 212 - DNA, 3725 bp, Cannabis sativa
atatatatatatctatttttatcaactaagatatgcagtattgcttatatgtctatgaagttcactgcatcttatataattcagctcctgcttagaatggagatacgtttatccgatgctcgaagaggctggcctagaaacttgggctgttgacattcttggatggggtttctctgatttaggtttgttttttttgctttgtgtaagcttggtattacttattttcttgcatattacgttgttgtgttttactcacttgatctttatcttcttttgggtctgtcagaacaacgcccttcctgtgatgttccctctaagcgtcaacacttatatcaggtatttcatgttattgttcatcgtgctattatgacttgtgcaatggagtaatttttcaaactcagattgatctgagattggagcaatagttgcatagcaataaggggaatagattgaaccttattttcaactttgaattttaagttaaagatggtattatctataaacgatggcagctttggaagtcccacattaaaatgcccatgatattggttggaccaagccttggcgctgctgttgctattgactttgcagttaaccatccagaagctgtaagtgattttaaaaaaaatacgaacttggaattatgcaccacaattattttattcaaacagttcctttaatttgtgcctaatattttataataagtttcagaagcttgttataataagtgtgtgttactactatctcttaattttttttaaaacatccaggttgaaaagctggtcttgatcgatgcaagtgtgtatgctgaaggcaccggaaacttagcaagcttgccaaaattggtggcttatgcgggagtaagtttttttgccctaccatttgtcttaagccaaatcacttggaagtctatattcatcttcatttatagaacaatatcattataagctataaagaagagagctgtatatagaatgtcagttgtccgtttctgaggattactgtttatacaagaatctctgtagatatatgataagatgtctcgtctttatctccaacatccaatgaaggtgtgctatttttcaaaaacataaaagctgattagaaattaattgcgggttgattttctctgcttttggtaaagaatgagtgatcaagtttgcgtgacgctaattattgcttcatgattggtagtcttcaccaaaggaacatttaggctgctggtccatgacctttgtaggaaaatcttttctatttaagttttattcttcgtaaagctctcacactattatttagaaaagtagtaatggggtttaattgcctatctttattgtcttatttttttcctaaatatgaattcttgtaaagcttatgtatacaaggtttgtgtattgtgaatatatcagaaatatattttacctttttttttttctaccttaaatcatctagttatgtcaaaacatttaaatttcattcttgtagtatgattcactttactaatggctatcagagttttgttgaagcaggtatctttactaaagagtgtccctctgcgcttatatgtaaatttattggccttcactgatatatcgtttgataccagcttagattggatgaatgtaaggaattctcaaaggaagtgatacattatttttgtcattcactaccagcatagattgaagctttattttagatctcatgttgttgtttctctataatcttagattggccgcttgcattgtcttttaccttggtgggaggatgcaactgtggattttatgaggagtgggggctataaagttggtgaacagatagaacaggtacttttgtatcttttttttctggcacttaagttatttttttaaggcactttagttgatcatgtgttttctgaatggattttggtacacgaggatgtcatgttggatattacagttgcaaataactaagtcctaactaacctatgtagtatgtaaatgttattctcaatgttaactactttggagatcatttctaatttgcttatttaacttataagctctatatcttaactcaacctcttaggaagctatcgatactttatttttttatttattttttttgccaaacaatatatctagaatttagttatctaagatttggctcttattcaagttttgtcaaggttgtctacaagatatggtctctttgatagacatcaaatactaactaactttgttggtatgatacacaattctgataggctgttggaacttggaattaattttcttctaatcttcaataaaaaactgtatattttttaatatcaaataagaatcgtaaaagagtcattggaattttttatctctcttgatcaaggtttcattctttatctcataatggtactgtgctccaaccagttggttgctatgtggctggcatatagattggacacaatatcatggcatacagtgtgcattgtatgcttccctcaagcaaatgggtttttaacaaaacctaaagtagtgtttatacatataattatagcggctggtatgttcaaagtttctcgttcaccatcaagttgggcaatcagggccgttaacatagaaaaagtaagctgaatctatgacccccagatatgagccaccaaggggtagttgatgaatttgtatgttaagtgatattgctgtattctcttataaatttaagagtcatgatatgtgcactataacattacacaaggcattgtttttaaaacagtggcccggaattagataagtgtgattggttgagaaaaaaacgcggacacgtcattatgtataatttttaggtgcatattttgagtgcagatatatcattactctaaatttgattattgcaatgttgactattttggttttttttttttgaacaatgaacatactatttaggcttttgttgatgtctattatctctggaatgactgtttgtttgaggaaatttttttcttgtggtcctctcatttgcccagttctaacatatcatagatgaaggatatgttggttaatttccttcttaaaggggaagatgacatttagtaagtttaacattggatagtatgaatcaagatggatttttttgaagagttttgttacaaatagtggatgttaatttattccatttatacagtgaaagtttagcctatggcatcttctgcgaattggtgagagcttaactccctggaatcaaataaatttttaagcgaaccagtatgacttctatattgaagtttttgttgaaatttatattaatttttgtgaatatgttgtcccgttgcctaagcagtagatgataagctggagagagctgaaagtatcagtgtagtgaatccaatcaagtggtagaaggcagttttgcttgcttggaacataacaatcaaaacatacaccatcattcctataggcaagaaccattatgttggattcacaacgctaatactttccccactttttgtcaagtacgcagaaaacaagttatcacctgcaagcttagacagcatgaacaacttattcgcacattaatattgataaaaaattcaacacaacttcaatgtataagtcatactgccaccaattcatataattacaatgtctcaagctaaactttcattgcactaatagaatcacttaacatccatttgtaacaaaaaagttaaaaatataatcaattttgattgatattatccaattttaatcatactaaat

SEQ ID NO: 213 - DNA, 2160 bp, Cannabis sativa
gtgactttccacctgatgtcataatttaataggcacctacctaaacctaagttgtgtttattttatttttttctttcttagacaaactttttttttttttttgaaatgataaactttcatgtcttgggcacttaattatattttgaaattgataaaagtgaaaaatttcacatgtaaaatagaaattgaaattgataggttccatcattagatgatactaacattatgtttggtagaatggaaaaagtaaaaacatagtttggagaaagaaaaaaaattggttggttgagaaaaaaaagtgaatgaaacagaacaatgggaaaaaaaaataatggaccctaccaatattttattctccaaaagtggagaaaaaggtgaggacagatttttacaatacacatttaaattaaaagaaaagaaaaagtttacctttgtttttttatataaaattgttaaattataaatttataattgtaccaaattttatttatttaatagcaatattttctttcctagcactagtagcacctctattttctatcccactatttttctccctttccaaccaaacatagtgtaataattttagccgtggaatgaaatgaaatgaagttttgacaaaagaatattaggatgaaatggttatgaatcacaattccaacaataaatctcatcattctgattataaaagtaataagttatttagtatatacttaataaatggtccttctattgagaaatatgactaattaatttacaaagtagcctactccttccaaccaaagcttaccattaaaaatcatcaagaacatgaccacttatgcaattacaaggcatatgatatgaccactatatataaagatagtggcaattaaatagtgttatttaactaatgagctacattgatatagttctgatctctctcgaaaatttacaactcaagaggaactaattctatgtgctgtctaaaaccaaacaattttttttttcttttttacaagtttttaaatcccaacttagtgaaccctatcctaaatttgacagacagaaggtcagtgaacctaaactaaattgggaaaaatgaatggagttgaaaagtggagagaactaaaattagacatttaagcactagctcaacgtgtaaaagacgacagccagtggaaacacacacctatcttgttagcagtcattgcataatccatctctcttcagaaaagcgtttcaagtagttctggagaagataacactgcgatcgatttatactgctaagaacgaaattcattgtattagatacttggaatgaaaaataagaactaaagattttttctcatcacaaatgtgatttgatacctcttcttgtctatattttgttcgtgtagcacttagaatacaaccgttggagtttcgttgtaatgattgtaaagcaacaacagcagttttcaaatctgatgccttgtacgaggtgtagtgttctagtgttggattctgatagaaattaagaaagttaaacttctgctgaattatatggaactcacaacaaaagaaaggaaaaaaagataaggagtaaaggctcacccatggatggctagtctgatctaatgtccatcgggagagaaatatagccgatgcagcaatgacagaaggaaggaaactcaagaacccataatctatcagcgttaattctgttaaataactggccaagtactccagttcaagactaggattctgtaaatatataattacacatggtaagaatctaactaaaagtctggagtatcctgctagctacactaaacaacttagttctgcattatcttaccttgtatgatgcttgagctgctcgaagaaatctcctggagaaaagaaaaagaaagaaaacaagaaattgagaacatgcataaagcaaacaattagttttgaagtgactcgtttacatgcttaagtacctgaggaaagtttttgccgtgggcgcaaacagttgaaatttgaagtacttcaacacttgaatttccatttccaagacctgccatttactaaattcaggaatggaaacgaaaaacataatttgatgggaagagtaaaaactatgtggtgagtgcaaaaattaaagatgtggcaatatataacatccttgtgagctcatttcccgataaagacaaa

SEQ ID NO: 214 - DNA, 6131 bp, Cannabis sativa
gagagagagagagagagagagagagagagagagagagagagagagaggagtaggcatttaggaacttagcaaataaaagtagttggtgccgcataagacacaagcatgctttgttttctatctcagagtcacaaataggaaactgctcagaaatgagcaccaggctcttgcccaagtgggaacaacaaattttagctctcaacttggaaacttgtgaaaaacaggttgacgaatacatgaacagttgcaaacacaaattttaacgctcttctcatagagtgcgaaagaaacggtgcaattcatcttttctttcttttttcagaaaagagtacaatttaattactcatacttacaagatcaaaaatagaaaatgtattgtcataaaacagcacagcgatgcgccctctagttcggtctccagctacaacaggggagaatttgatccttcggattccttctctatgagtgttgaatgaagacgactgtccagttgttacatcccaccagcgaatgtttcccgacctgtctcccataacctgaaaaaacaattctataaatttagaaacaatcggatacacatactaaatatttgaacaacatgatggatatggtacatactacgtgaggcaagcggtaggccatggctgttattagtccgtcagatgaaacaaatgaagaagaaggccatttcggcctacaaataagaaaaaaaataaccctttcagagagctgaactgaaacaaaattaatttgttaagaaaaataagcgcaattaaaagaaactaaatatctaaaaacactgaacagattagtttgcttatggaattaaatgaagtaataacagaaatgaataaacttgaggggctattagaagtaaaataggtgccacatcacagaaggaaaattaataaccaccgaaatttcaagttattcaaaagtagtgttttcaaattattacccttgggcaaccaaaggatgagaactttaagagctaaacactaacaaatggacaattcatgagcaaaaacttatgaaacaatgctagcctagtatatgagttttaagaagtaggaactcagcaccatgtttcaatgtcataacattgtcatatccacacagcatcctattacgtataaataaaacaatacctgaagtcacggatccttctcccatgaacctcaaaaactccaagagcaccatttactagagcaaatgcaaagctctcagaagtctcttcttgagatccatctgagctctctgcattgagaaacttacattcaataattcaagtagaaaatccaaatagcatcatgtcatatgggtacgcaatcagtctaaagtatacaagcatgtcaagtaaactagctcactggaatcacttgaagaagcctttgttgggcaagatgctccatctggttctccagatgcacgatctttgggggataatgacgatggcttagcagatccagtttgcccaggccgaggagctgttgggagggtccattccaacaccgtaaatggaagtgctaatgatctaagctacatgagatataagcataataaacacccataataaaatagtaaagtataaataatgaatataaaagtgtaccgatttaccataataggacttttagtcattgcccaaacttctaccggtgcatcgcgaaacaagattagaaggtatctgcaaattgttaacattataagtactatatgttatatcttgtatacatcgcaaacatgcaacaatgaaattaaagccaagctcagaagagtatcacataaacttttgcaatgatggtgaactgaagaaaggatggactagatataagttgatctaagtagaataatcctgctatatttgcaagttgggagaaataaatgcagaacaacatgactcgtgacatttatgtaaagtccttatataagatcactacacatttagtaaatatgtaaaccaaaggtccaaaggcaaatttaaatttgtccctgaacgttgttgaaaacaggtatgaaattctgtccaaagcccttcaaacattatctctaacatatttattttgttattatttgtctccccatttggtggtcatcggttgaatattttcagataaaacaaaaccagaaatatcaagtatcaaaaagttacattctcctcatacacatcactatgttaaaattaccttatttaactccactctccacttcaagagtcagtcaaatcttaaagctaaggagtattgaaagaaacaggctcaatagtttctactagcaatgtttaaataaatggatatcttattttcagaggaaaaagttaatggtaccaagtgtcctcaaacttaagaacttctcaagtaacagaatttaaagtcttaaaacgaactactgtaagcatagtgcatacaaatgaaatttgagaatgtccaagctgcaccaataccattgcaaacagcaagtgtataatatgttgaatttgtattttaagaattacacgagaaagctaaacattctgaaggagcattcacaaacacaaataaaacaatattatgaaatacagcttaaagaaatcaatgaatgaggaaaaatgacacctagaagcttttgaaattaacctgccagaggaagaggcccttagagctcttatgggtgcacgttctggcttttgtagtatccggaatggtctattaaggccacttctcagacaggtcacaacaagtttgttgatataacctccagatttctcattcgcctaatccaacaaaatttacagaacatgtcactatcaagtaaaataaattgattcaaggtcgatcgttcaccttgcaaacaaggtaaaatgcattcaagtagctgatgacattcaattcaaagtgatatacctggctaaatgaaaatgaaacaacccttgaatttccaagccatcgtaatcccctaaccataccattatggacagagaaacttgcagcaagagcattagctgaaacatcaacgacatcaattgtcccattttgagttcccaaagctaccaatggaacagctacagcaggatatgttcctccaccttcacattaatcaagttacaccgtgttacaatttccaacaaaactactgaaaagttctaatgctttaacaaaagaatactgataattaagaaaaaaaaatcaacttgtaaaacagattggcaagaagatgaactaacgagccaaggtagctgttaaagaaggcgatggtacagccagcatcgtcacttgtgaagaaagaagctgaagctgaccaactaagctaatctgcattattatttggcaggtaagtatgcataaatagcctgcgcaaagggatataatgctaaatggtggtctcacagttcaagacaaatcactaacacagaaagtgagtgttaagcagtatctattcaatagaaactacttttttttaattaaaaaaaaaaaaggaacaatctactttgttccatctcttttgcttatattaaaacccaatataagtaagataacaagcccacatttggaatttcgaaaaactttattacgatagtgataacattgcaatcaggtaaagggctatactaagcattattttttttttgaaacctcacttgtggcggaggaaaatcgtggtaaacaaaacctaaaaagtctctcagcaaacataaataaaagcatgagaaaaaacagaaaacaacttctgttagtacatcaaaaatttcaactctctgcataaatataggaaagaaaattcctcaaacagtttggtcttatataaccaggtagctgtccaaagcattgtaattcctgaataattattagtgtattaacttcaggcttctccttagttgattttgtatcataagtataatttttttcgaaaatcaaatgtgacaaagtattttccagacataccttaaatgacatatctatttgcttgctggtagacttagcatggcggcttctgctaccaggcacatactccttttgcttcccttcttccctagcaggtcctttgacagaagaaactgtttcattactattatcccctaagataggcacctcacttacatcagcaaccaagcccacactactattttccttctgagcgtcttccactccttcaacagtcagtaaccagttccatatttttccatcatcaaaaatagagaccaaacaggtcttcgaaacaagtggaggttcatcacaaaaatcaaacgggctatcaaaatcctgagaattaggtgtttcagaataaagtttcccaactttttggagggtggaatctgaatggcagatgatggcagcaagaagtgaaggagaagggacagatgtgcctaatgacggcatcaactcttccattgcgcacattgtgtgaacctgttcttctctgtaaaatgtctgttttaataattttcttcaggaaagaattaaaaactttataacgagaaaagccagtagaatatgtaagagacattaaacttgaaacttcaataattgcagaaaaccttagcaaatactgaccagaagtaagctcaattcagagcacattccaaaactttggtttttttttttttttggctaacaaaaaggagaggagaaggctaccaagtgttgctcccctctctgggcattaccgagatgttcaccaggaccctactcagggtcgcccccacctacaacggggtgtgtcattggccccatccgaacaactagtaatgagtggcatcctgaggtagaggataaggcaatgggctggcaagaatcaagccttcacattttaagactcgtaagagaactaaccatgctcaaacccttgacctccagccccaggatagcaaagcactatcattaggccacttgtttgcttgttgttactaacactaaaggtgtgtctgaacattttctattatggtaaatgagtttccatgtcaaaaatcaacccgaacaagctacctatagttattgaattgtaaagcatacatgaaatattttaatatggtttgactgactgattaagaagttaaattgaagagaacatttccagttctaactccacactagaactaatcgtcaagctcatatactacaaatttagttccaggctcgaggagcatttcttatatcacaaaactaagaagtaaaatcaattctattagcaattatggcttactcttttcgccgccaggtactgagcttcccatcaaggtgagcacaatagagaaatccattattcggatcgggcaacacatccagaaacttgccacaaccacgaggtaacgcagttgaaaatagcacagtctcgtactgcaaatcaaatactaccaactcttttggaaacgtcacgaatacaatgtgcctacattgaggcgaaaaggcaaacttcaccatatacaatgggaaaatagccgatgccggcgacgtagacgtcgtccccccattggccgcatccctctccagcttctgcaactccgtgcaatcagtccgaatctgaaattcctttataacgacatcgttttcagtctccccaagaactttgaccgacaagaggaaccctttgagtccaataacgcaaaaacggcgagcatcaaaaggatcacggcgaatgcaggacaggaattcagggctagcatcgtacttccagacgcaacgaccggtagtggtactgtaaagagagagagacgatggaccagagatagcagcgaggagatacgagtcgggccgtgcctgaacccaacatagatcctggacactaagccgggctgcgtccgattcaaaccagagaaccggcgacctgagtcgaagatcgatgagagcaattcggccttggcgatcagcagcggcgaggagaaggtgagaactggagggctcagtagtgagaaggtcgcggcgaagagggagtggggtccatcgtaaggaagtgacgaacggagagagcgaagaagaagaattagaagctggaggcggcattgggacagtggcaacaagctgcatggatcgagagtcaacgacggagatagagcttccagcagcgaaagcaatgagaccggaagagctcaaatcagcggatccaaagttgcttcggctcggtggaccgggaagcatacagtcccaggaatcatgagg

SEQ ID NO: 215 - DNA, 3202 bp, Cannabis sativa
aaattagtgattcatcattttcactaataacagagaccgcaattttgagtgaagaaacacagccatttggccatcatacatatatatgtacaaggtataagtgtgacctagaaattgcccttacaatttacaaatccaagacttatcctcatcagtcatcactccttccttccttggttttaccaaaaccacaaccccattcaatttttgacgaccgtttcagaacaaagctaataactgcaaattcaatagtcacgactcacacacatcacatatggctgaaacattctactcaaaccaaaattttctttcatcattcctatattattactaggtcaaaatttcaaactaacatttcacttacccttttacctaaacaatagcgtttttagtatcttttgtcaagtggtttgaaactctcaagttgttgtcaagtggagcctatcgcctagtttagtattagtacagttattattaaataataccgtttttatttaataatattcacatgtatattactcgtaagtactatactgcaagacaatttagtaacataattatgaatttgatgacaacgattgaaattagaaaaaactaccatttttctctcgttgcaaaacattaattactatatatcatgaatttcacaaaatagtactatttttattattaaaacaaaaagactaacgtacttaatgcattatcacatgattatagatagcagctactacctatggattctatatttactataaaagacacacaatacagcgaacaagtaataaatattaattcacatttaaccagaatgattagtactttttttttttctatcatgaaacgttaccaaaataatttccctaaaaacaattctcttctctttctcccccacgcaatttaaatgaccttttgtttatttttataaatggtttctatagatttttaaaggagatcgaatccaaccatagaatggaacacaacaaaggcttattaaagttgtaaattttcaatgcatgcacacgttatcaaaatatacacttgcagcctttttaaggttttgcgtgttcaaagcagagtcagtttggtgtgaattagttcatcttctcctctctactcattcctctcattccatcatatatctgatatcacagtctcaaagctacttcttcatggactcacactcatcgccagccaagaactcggtttatgtcgctggaggcggcgagaaaacccggtacagaattcgaacagaaagactctcctacaagctgtcacgccaagttgacgagtacagcacttggtttttcaagagagaagtgagcccaactacttatattttgaagaacgtaacatgtgaagctagacctggtgagatcacagccgtggctgggccgagcggagccggaaaaactactctgcttgaaatacttgcaggaatgatccctttgagcagagtcagtggccatgttttggtcaatgatcagccaatgaatgtcaagaatttcaggagagtttctggctatgtcactcaagatgaagctcttttcgctcttcttacagttgaagaaacgcttatgtatagtgctcggttgaggatgcatggtgggtatgagaaggccgtgagcagagtgaaagagctattgaaggtgcttggtttggagcacgttgccggtgtgagaatcggtagtgaatcgagccggggaatctctggtggcgagaaacgacgcgtttccattggtgttgatttagttcatgacccggatgttcttcttttggacgaaccaacttcgggtttggactctgcttcggctctccatgtggctttgttactcaaaaccatggctgcaaatcaggggaaaaccatcttgttgactattcaccaaccgggttttcgaattctccagctgtttgaccatattctcttgctctcaaatggtgttcttcttcaccatggctctctccatatgttggaggagaggcttagcattgctggtcataccattcctcgccatgttaacgtgctcgagttcgccattgaagtgacagaaactctgtcttcagtcatggaagaaagtgaaatagatgatagtgaatttgaagaactgaatgactcattcagaacaagtccactttcagctagtgatatcgaaaagaatcaatttctctacgcgaatacaccctttcaagaggttttgatactaagtcaaagattcttcagcaacattttcaggaccaaacagctctttgttgctagaataattcaggcattgcttgcagggttcgtacttggtaatattttcatgaaatctgcacatgatcatgatccaaaaagagtggtattccaaacccgaatagggtttttcgcattcagtctcaccttcttgctttcttccacaacagaaggattgccgatttacttacaagaaaggagaatcttaatgagagaaacatccagaggagcttacagggtatattcttatgtgatatcaaacacgttggtttttcttccatttctattagttgttgctgttctttacaccaccccagtctactggttagtcggattaagaaaagaaatggatggttttctctatttttcactggtggtttggatggtcattttgatgtccaactcttttgtggcttgctttagtgcactggtcccaaacttcatcactggaatgaccttagtcgcagggattatggggtctttttttctgttttcaggctatttcataacgaaagaagatttacccagatattggattttcatgcattacttgagtttatttaagtacccttttgagtgttttataataaatgagtatggaggagagaagggaaggcagagatgcttggcaaatctgggagaccaatgtgtcttgtatggagatacatttttggagcagaaaggactgaaagagtaccaaaaatggagtaacttaagtgtgatgatgggattcattattgggtacagagtactttgttttcttattctgtggttcagaactcacagaaccaggatttagatgttagaacgtatcctgtcagtttgtgtaaaataatcaccagtttatgatgataactatactaataatgaagatagctttgtgtgaaagtttttttatatttctagcctatttagcctttgtagcagccactgtgattatcaatatcgatgtcacacaatccagattggaca

SEQ ID NO: 216 - DNA, 2001 bp, Cannabis sativa
ttaacaaatttatttcttcaaataactaatatctaaccttctatgactggactaaaataataattccaaccactaaagttaatagagaacccttaactttatttcccctcatcttagtctccaataaggcacctaaaccaatcgtcctaatccgacacaaatccaccacaacctcttgttttttaatattattgaggactccaacattccaactaagtatgttactgctgtccatggaaagataaatttaaaccattttcagctcaagcaccttcttgttgtaaatgaaaaatctcaatagcattaggatgattagaactaccttatgtcttggttcccacttttctggaatgcaatgattttttaggagtctgccaacttccattctttggctttttcaacaccctacttcctttatcaacagttacaccaacagctttaactctctgttttgcaacctcctctgcttcttcatcatttccattgtgttccactatcttagtaacttccataacacattctaaaccactcttcataacatcatccttccctttacttgctatctcactctccttggcctcaatcttctcattcttattcttatcgttagggtcctttcgagctttcctacaataaaccattatatggccatagccttgaaaagttttgcatctcactgggagccattcatgctcaacctcctgctcaatgagttgaccatgttcattcaaaaaatggagcaccctcagtggcttatctgttatctctatctcaactagcaccctagcaaatttaaccatagatctttcctttgtcaccttatctgacaatacaggattcccaatagtgctaacaattgcactgaggcattaatttccccaataatgaagcccaaaaatatgtaaatgaatccaaagtggaaccgatttaactaatcttaaggctgtaaggtctgtcgtccaaggttaaaatattacaggcttatgatcaaattgcgaagccccctcctctaaaacatgatctcaagtcgcaacatcattgatcttgacaatggcataaccaccattcatcctcacaatatgagtaattccaagattcccccattttcatatgacaaatccctcgaacaccttaattgggggattagcccctaaaaccatacacacaactgttgaattccaattaacagcttgttcttggacctcatcaacatcaacttgagcaatttttatcccatctctcagagtgggttcagtatatgtgagtttaacatctagatagggacttactttcagtaaattacttccattattgttgtaaattcgacctgaaatcctcccgttcaacttcctcagcccatctttccttttctcccttgaaatcatcttcatcgtaactcccattcagaggtacatgaatgacctttttgacttcacctgattgctaacatgtgcaattagatttagaccatctgatcaaatgttctcaccattaatctcaacttgaattgaagggggatccttaagattcaccttcatcacaggcttttgtcccactattttttttttcgctatggaagagagaagatgagaacacacaccttattaagattataatcttatgaagctaattatgttgtgattagggattgttataaaaatgatcgtaatttattaatacagaaattttatggaaatatatgaatattgtatataccattgatgaaataaaatatttttaagttcggcaactgtggacacccaattggtggccaaaaatatcacaacggtaatgaacgtgaaagtttatttaattgaggagtttagttggtatttttttactcggggtgttttggggtaagtggttatgcccattttattcctaaccatagaggtagcttagtgatgaagtaagggtataaaggttattttgatgggatttctattcttttatccttagtgaaatcctagtgaattctaggctgattggattaggtgggaa

SEQ ID NO: 217 - DNA, 860 bp, Cannabis sativa
tgtggatgtagtgatatctgaagtgagttgattgaagaactgaggctttagccctttccattctcccaagcatttactgggtttttgagaaagatgataagaatattaaaatcgaaaccgttggcatcatatttcgaaagttcgagccatcaattgctgcaaagatgctcagttagtagaactgcaaaaggtaaaggtaagttgaaagatgggcagcaattgaagagatctaaggtaactacgaaaaaaggcgctggggatgctcctcctacaggcagaaaaggtagtgaaaaagataggctagaaaagttttatgatcaatgtttaaatgctcctactcctgttaggcacttgaccccgaaacagagagaacgtgaagcggagagggagaaattggggcttattagcaaagatcgacagcgagagattgagttgctgaagaaagataagggaaaaatgagtgtatcaaagacaccaacaattattgggactcctggtttggatctgatatcactcggattggttgatgaaaatgagctacctaaatatgaactgacagttgaagatggtcggaggcttgcaaaggaatacagtagagtcatgatgaggcgtcatcgtgcaagacaagcagcggaatcaacactgttacgaatgaagaaagaagcgattgaggcattgcctgaacacttgaaagcagctgcaatggtgcctgatttgactccattcccagcaaatcgcttcatggcaactttaactcctcctattgagggttatattgagaaagtcaaagaagcagctaagaggagcagtggaaaggagaaacttcgatgattaaaaaggtaaaagcatgttaacatatt

SEQ ID NO: 218 - DNA, 747 bp, Cannabis sativa
tcgaatattaaaaaactaataaaccttgactataattattaacgtatgaaacaaaaaaaaaacgaaagaaaattcttaaagcaataaaaatattctcctaaatacttaaaaatgacatataaataaataaataaataaattttataatatataaataaaataattggtattggaagaaagtagttgatgtcaatgagagattcaacggtttcagaattcaactctaaaaagtaacagatcaactgctagagtatcttagtttaggcatgtcttattttctgttagttggttagtcaacttggtgaggttggttagtccgttaactgttctaactgtctaaccgactctagtgtagctggctttcttggttctctttattatgtatataaataaacccctctacttagattgatcaatgctatgaataattctcttctttcactatctttctaaaactatcaaagctacattctttctttaagctttctttgttcctcaacaaagacagcctagactacctattcataatgattaattctccttatggtacaataggttagggcatcccactgccaagatagtttaaagtgccttgaacacttgtaatattcaaataagcaataaaactactactggtttttttttttatctctgtgctgcttgttgtttggccaaacaccataaatttctctttcctaactccaccactgcttatacagcaccattacagctgctacactctgactt

SEQ ID NO: 219 - DNA, 9705 bp, Cannabis sativa
  modified_base (4754)..(4757): a, c, t, g, unknown or other
ggggggggggggggggtttaaatgtgggacaagatattgaggatgtagtgttagaggtcaatgggcaaagtcaaagattagtttctaaaacgatccaagttgtggattccaaaggaagtgtggggacgggttggaggagggtgaggttgaatgggtggaagagggcaatgtgggccaggcttttataaatgagattcttatggaagaagtggatgatgtgtatggactttcaaaacatgagttattggcgggctctggtgtttaggcctgccaaactttatgagtcttataagttgaaattattgtgggcctatgagcaaatgggctaattaattcttaatggacctagtgtctaataagaaacccaatttattatttttgtgcaagataatttgtagtaaggaggttgtggagaggctaagagttaagtagggctttgaaggttattttagtgttgcggcccaaaggcgtagcagggggctagctcttttttgaaaagacaaaagtgatatttgtacaggggtatttacataattatattaatgtggaggttaaaatactgaaaatgattcactggagattaacggggaattgtggggaaccttgttgtgatatgaaatataagacgtgtgcacttttccaattattcaaaggtcaaagttccttgatttggtgttaattgatcagtggtatgaacaatttgggaagcccgttagagaagcggggtggtcgtttatattcagaggctttgatcaaggatttttaaaatactattagattgcgaccttattaatcttaagcttcaaggttacccattcacatgggagaggagacgagattcaaataactggattgaggagaggctagataaggcttttgttacagttgagtgtgttcaaatcttctgtgaggtaaaagttattaagttataattttatattcttctgaccactgtcctttattgttagatttgggtgttcttaaatctttcattggtatagcacctttgcggtttgaaaaaatctagcttataaagtctatgtgtgcccacattgtggaaagttattggggtcaatcgggtgggttggatgttcaagctaaaattcttttatgtggtaaggtgttgtttgaatagggcaagaatattactagggggttcaaagcttgaataaatagcgataaaaactagttgaatcgataaaagtaaggtagagatccttaatcgctccagcactttaaggaagcgaaggaaattcgcttgaagtattttctcaaaaggaagccttttagaaacagagatcaaagaaattttagctaaattcttgtgatagaaatagtaaatattttcatacaaaagccagttctagaaggataaataatactattcattagttgcaagatggaaatggggtttgggtgggttgggaaaatagttttatgaatgtgatgttgagttatttttctaatttattttgggcttgagtttgagttgggtaatatttttgagggtataaagccatctattttggatgtgcaaaattgtgctttattagaaccggttaaagaggaaaagtacgacagactttgcttcaaatgccctctgacaagtcactgagaccggatggattgaatcctagtaattatcaaaaatttcagcacatggttaaaggggacgtggttcactttattcagcgtattttcaatatcgattatcttcctaaccatataaatgatactaatattatcttgattctaaagaagaagagtccttctcaaatggatgaacttagacctatctcgctttgtaatgtattatacaggatggtcctaaggtgctaccaaattggatgaatattgtgctacgtcaggtgatttttaaaagtcaaggtgcttttatcacagaacatctcaatttgaataatattatggtggcttttgaaattatgcattacttgaagcgtaagaaaaaaggggaggaaggttatatggtggttaagctagatatgagtaaggcttacaataaggtggagtggccttttttggagtccatgctcttgaggatggggtttgtagataagtgggttgggttggttttgaagtgtgtcaacttggtaaggtataatgtggttcatgagggttgaagtttgggtcctattattcttacaaggggtattaggtaaggtaatcctatttcaccttatctttttatagtttgtgctgaaggtttctctgtaatgataaagaattttgagagaaaccatttgatcactagttgtcaagttgctcgtggtgctccgtttatttcttacatgattttcgctaatgataactatgtgtaatgtagatcgagttcttagcttgcttcatcgattcgagtgtgattcttgacagcatgtgaatcttcaaaaatccaagtttttttctcaacttgaatacttctggtgtgattcactcccaaatctgctctcagatgaatattcgcaaggcgaatgatgatagtttttatttaggactgatgactattattagtagggatgagaatgcagtgctaggcttcttaaaggagagaatgagaaaatgtatccgagggtgggaagttaagtttttatctagagttggtaaggaagttttacttaaattagtggttcaagccttgccatcttttgttatgagtgtcttcttgctccctgtgggtttatgtgatttggtagagaaattaatagctaatttctagtggaaatcagccactaatagtggtgaagggaggggtattatttagatgtctggaggtcgcataacttgtcataagcatgttggtggtatgaacgttcgatgtctaagggattttaatttggaaatgcttggtaagcaagggtggaggcttatggttaggcctaattcgttagttagcaaagtgttcaaagatcgttatttttctaatagagacttccttttagatgtgcttagatcaaacccaagtttcatttggaggagtgtgtttgttgtcaaagatattcttaaaaagggactgcataaaagggtggagagtggggtttcgattagtatcgcgaaggacccctggctgcttgtggtggactctcctattccagttcctcttgtcttgggcttggagaatttttcagctaacagattgttgcaagtggggccaacggcgtaggaatctgaagtggtgggtgatttattttctaaattgctaagggggtgattttaggtatccctttgagtgttgacgttgaggaggacttatggtattggcaatttgagaaaaatgggttttactcagttcatagtgcttataattgtctttaaactctcacatgtgcttatcctatggatgctaattttggcttttggaaacgcttatggcaattgaaagtacctccaaaaattaaagatttagcttagtgatcattgatgagatttcttccttcgtggatgagtttacaaaaaaaaatatgtagatgtgggagtgaattgtcccatgtgtagtgtatttgcggaagcaaattttcattatttgattcttgtcaatttgcatggagcgcggctgggaaattgtaggcgtgaggagagttggaaagaattttggttttatgttagcttggattgaggaaatggttaagagggttgatggaagtagattatgtcaggtcttaatggtgttgtgggcgatttggtcggctaggaatgacgtggtttggaactagcagagaaggggtgtgttggagattgtggagtttgttgattttagtcttgatcaatggattaaagctcaaggtaggggaaatattcctctgctgcatctgctagcggcaagtgacggaaatgagctttggacgaaattagttttgaacatcaagataaatgtcgatgcgactctatttgaagaagaacgaaagtttggttttggctttattgatcggaacatggctgaaaagttggtggtggcttaagctcggtgtaaaatggggagagtataatcgatgttagccgaaaccatggcttttaaagaggcgttgagttagctgaaatcagacaaatattccatagccacggtgaaaaccgatagcttggtggcggtggagtctattcgaaactcttgtgagtgaccactctgtttagattgattattgaagattgtaaagggttattgcgtttacttcataatgtttttatatttttcgttaagcgatctacaaattgaacttcattttattgtcaaaaattctcgtttgttaactaatcgtatgttaacgaagaatttttttcctttaaatttattatctattcttttgaagtattgcttcatgaatatatatatttcaaaaaaagaaaaaaaacaacaacaaagaaagaaatttctttctaactttctttccttgcaaccatacataagtgcaaaatccttgcatatattatttgtttcacaaaacggaaatgataaaacacttttaatataacggaatagagattttttcatttttaaacttcaaaataatttcttttataattttacaaaattccatataaactctcatagcaactaacaaaataacttaaatcgtaactaaaattcacataaaaattacgagagaaacccaaaccataaattttttttttttaaaaaaaaacatatgaagtaattttcttaaaaaataatgaaaatttttatttacaccccaaaaattactaaagaaaaattactaaagataccttattttaataatttttannnnatataaaatttatatatttaattgaattgaattttttttttctttcaaaatatattttaatgtattgaaattaacataaagtaatgaaaataattttaagaaaaaattaaaagtaatttataagaattatttaaatttatatattttttttaattacgagatatatttattattttatagaatgcaaataaaactcctcaaaataattcatataacataaacaagttttaaccctattaatattttcacatacaattatatttatttttttaataaaatgcatacatataaattttaagaaaatatatatccatgcataccacacaaacatgtacaaatctaacacaaatataaacactaaattaattgtctagtaatgttgaagcgctaaaatgaagcatatatatttcttcgagattgaaaaaggtgtgaaaagtgaaacaattcatgatggaccattatctcaatcagtgattcgattcaatcaggttttcacaattttaatgggtcatgttcgagcttagaaatagaatctgtgagaacatgaaatgaaagcactcgagccattaaatttcataaaaagtataacccctaataaatccatccacagagatcagaccgtgaaagaaaatacccagaaccaactccgaaaacaataaacacgcacaaagtcgaagatcagcacagtcggagggcttgagaactttgcatacgaaaaaagtattaagcgcgagtaaatcttcttgcctgccttgttgccttgcagcataatattcagctaaagcactacttccatagcttgcgcaacgacatgtttttgtctgtatccttcttcataaccttggccactgccatctcaaagtcttcttgggttacatgaacccttctctccctcaaagcaaacatccctgcttctgtgcatacagcctgtagacagaaccagacattgcatgtgtcgaatgtgtataattttagtattaaaccaactacactgtatggttggagacccgtaattaaagaattaatggaaatgttctacaccagtagatgtgcatttgacgaatttggagagagaagtttaccttcagctctgcaccagatgccccattcatcttctctgcaattttttgcagatcaatcccacgcattaaattcattctccttgaatgaattttcaagatgtcgaaacgagactgcaatattgtcaagagtgaataagtattgcatctagaagacttattagccaatacacagttctatagaataaagctgaacagaatttgcaagccaaaaatgcaaataacatagtaaaatgtctaggctccagggaaacaaaccagaggactctgtatatgcaatagaatagtagcaaatcattctagttgacgaaatgaagatgcttgaacaaaattaaaagccttttcaacctataccactaaaagaattcacctctccattaggatttggaaactcgatctttctgtcaattcttcctggcctgagaagggcttgatccaaaatatcgatacgattcgttgccatcaatacctgtaacaggttcaagtaagcaatgaatccagaattatgaaggataatacttatatataatattgatatatatatacatcaaaaaacaataacagctcttttaagtgtgtaaggaatcagaatctatggaataccttgatcttgtttgatgcttcaaatccatccaactggttgagaagctccaacatagtccgctgcacttcactgtctccattgccacttccagactccattcgagcagacccaatactatcaatttcatccatgaaaatgattgatggagcatgctccctgaaacaaacaacacatgctcatttaaatggtaatgttaatatgagcacaaagcatgcaatcaaccagaagaagagcaaacatcagaagttcaaagacacaaagcttctagatgccactagctggggcacatagttgttgcataatagtcacttcatacatatatacaactgcttcaattatactgcatcaatatttttttactcatcagtggagaaaaaaaaggattgaacttaaaatcttttctagggagatcctatagaaatggataagatatttcgccacaatggcattgtgataccaccgggaagggtgaaaaaaaaaattaaggaacccaaaaattgaaaaattggatctatgtccaatggatcacacctaccaagaaaaattagatatataagagcctcacaacaccagcaaaacataatgacacaaacagaatgggtgacagaagttattaaggcaacatattaaaactataccacgtgaatgaaggaaactagcactaatacatggactaaagaaaaaaatcagaacaaaccttgccataacaaaaagttccctaaccattctagaaccttctccaatgtatttctgaactaattcagaaccagaaactctgataaaagtacaatctgtatgatgtgccacagctcgggccaacagagtctttcctgtaccaggggggccatagagaaggacaccctaaaataagataacagagatttagaatgataaacattcaatgattacaagaaggttgttgctaaccagatgctaatgctacaacttgaaatccagcattaccttcggttgagctattcccagactctcaaacaattcagggtgtttaattggaagctcaataacctgaaacacatcataatttacaaatcaatgctgtaataatcaatcagaaaacaacacagcatatgcgacgaattgtatacttgaagtaaagaaatggaacttaagcaactaaggatgtggcaagaagtacctctttaatttctttgatctgctggtcaagcccaccaatcatatcatatgttgaatctggaaccttttcaactttcataaggttaaccaaaggatctactttacttggcaataccaaatgaagaacataactgtcattgcggagagcaactctagtggatggtgtgatctttgtgatatcaatgcttttatcaatatcaacaacgtattttccttccggatgaacctgcaataagaaagaagtaaatatatgtcattaggttgaacaaatttagaataaacagccattacagtaggaagattcaaataacacaaacttagcagagagtccggagaccatgtgaaacttaccttaactaggaccttgttttttcccattactttgactacttcaccaacataagatccaggctcctgaagcagttgtagctcttccctaagcatcctcactgttgtacacatttaaacatctttcactaatgcaacattccaaatttaaaactatgcccatagaatcaaaactgtaataaaccaactctgaataaaaacaaactaccaacatatatcctatggaattttgaaaagaaacactaatcagttgcacctagatgtaccgaaactcaccaagaaaatacttacttgctaaagtacttgttcgattaaaacagcaccaaactaaataaaatattaaccggatgggttttcattcacgttaccaccgatgtcagtaacacaaaaattcgttctcagtaccaaatctaaacaggggatggtgatttataaatcagaaaacaggaaaatgtagcaaaattttagcatgatactttatgtatgtaccaaaatttgctcagtaatcattctaatcgaaattcaaattgctcatacaaaggatccctcccaaaatccccattttcaaataccactttttaagcgtttcctacacaatatatcacttcttcagagcgacaaacaaccctataaattccacagtttacagacttcaaatgaaacaaaccctatgaacaaaaacaaaaacccagccccaaaattcatcataaaacaagcagataaaatcagcaccaaacgaacaccacaattatcataaccaagaattagggttatgccaaaaagcgaacctcttgaattgagctcattgcgctgagcttcgagacgattaagattgtgggttttctggcggacctggagttggagctcgtgaatgtgttggaggtagtactgtctgagaccttccccttgcctcgtcgacttggctgagcaagtctcctccggcatggcctctggtaatttagattccaccccgactgtcgccattgaaaagggaactatgagtatggttttacctaaaatattccaaggagaggagagtcagtttcctcaatgtgctgccttgccttgcgtaagaagtcggtcgtgatttgggaaaggtgggtttgagtgttcggtctcttttattctctgatcattttccaacttcaaaatgggccacacttaaatcataaactgaattgggccttatgtgaagttacgaacacaaataccacttctagaaaagatgcaaatttaccaaaactaacacaatatctgaggctagcagataaatagcattttcaggaatcataaaacagcataacacatttgaaatatttcttttttctttggaaaagatcatattttttttaaccagttagcacctcctgttggattgttaaaattaaatgtggatgatgttatttattgggaaaatagtagtattggttttggagttttggttcgtgattctcattgctttccattggggtattttgctaaatctttggctgattttttctcctctaaagaagctgaagcgtcagtgttcggtattttgcttaatctcgtatgctgtaaaatggtgtgctgaaattattgtcagttcagtcaattttctttctgaatgtatcttctaatggagttgtattattagatctattaggtctttattatttgtctttttgagtgtatattttcaatatatgatgcaaaatagtaatactgcagcatatgagttagcaaaaatatacactactattaggagaggaaaacagagaaa

SEQ ID NO: 220 - DNA, 2376 bp, Cannabis sativa
ttctcctctgttatcttcttcttcttttcttgattgcattatcacatggtatcagagctagactcgttcgttaatggagattcctacttccgcaaatggtgcagcatcaagattgaacaatgctcaaccaaacaacaatcaacaagtatctctaccgaaatcataccctgtttcattcaatcactctttgtccatcaagctagatgaacacaactttcttccttggaaacaccaagttctggcatccattaaaggcagcagacttcaaaaatatctggatcacactcgagcgccaccaaagttctcgactgctgcagatcaaagaaacaatattatcaatccggagtacgaagacttggagcagcaagataatctactgatctcatggctcctctcatctatgtcggagaagacaacgaacagaatgataggatgcgaaaccacgacagagatctgggagcaactgaccgtgtattacactgctctaaatgcaacaaacataagcctgtacaagactcaacttaaaaacaccaagatgactggatcgttaagcgattatttactgaaaatcaaaggtcttgtggatcgacttgccaccatcggtcacagtcaatcgactcaagatcatatagaagccattttcaatggattgccatcggagtatgatgtttttgtaacctcagtcactaccagaaaagagcagtacacagttgcagaaatagaagccttgttaatggctcaagctgtccgaattgagaaaaatgtcaagaacatggatatctccaaagatgaagccaatttgtctcaagcaagaaactctggattcaactatggcagatctccctatcctgcaccagcagctccaccaggtttcaccaataacaatttctcatatggtcgaagttctagcaatttcaatatggctaataataatgcatgccactatcaacaaagcatggccagaggtagtactatgtacaatcgtggtcccccctccaataccaattccaaaagtggtccccctacctatagccgtggtcccaatagcaatatgggtcaacaagtgcaatgtcagttatgccataaattgggacacactgtcaaacagtgcttttaccgatttgacaagacattcacgggtccagaatccttcacaaacttccctcatgtggccaatatagctgagatgcaagctatgtatgttggaccagacacagttattgatgaaaattggtatccggatactggggcaactcaccacctcacaccagatcagaccaatctctgcaacagcaacccttatactggaaatgaacaagtgttcgtgggaaatggagttggcttaagcattgacagtataggtaattcctatctcttatctccttatacttcacaacagctaaatatacacaacctattacatgtacctgctatcaccaaaaatctcctcagtgtctcccaatttgctcaagataacaatgttttctttgagtttcaccctttctcttattgtgttaaggacatacctacacagaggatcttgttggctgggaaccttgagcaaggtctatacaagtttcaaccttcttcctatccaagtgtctctactcatctctcaaactcggtccagtctcaccaagaaccaagttttcaatgtcacactcatgtaacagatacaactaagtcttctttttctttgtggcatagcaggcttggccatcctgctgccaaagttgtaaccatggctctttccaaatgtaatataccttattcaaataaaaatgttactgatgtgtgcaaagcttgttgtcttggcaaatctcataagctaccattcactagatccactactcaatacaatgctcctcttgaacttttgcattctgacttatgggggcctgctcccataaactcatctagtgggtatagatattatattagctttgttgatgcttactctagatacaattggatctatctcttaagaacaaaagatgaggctcttccaactttcaccaagtttaaaactcagattgagttgcaattagggaccaaaataaaaacactccagtctgactggggggtgagtttagatccttcacaacattgctagaaaactcaggaatagttcataaacttgcatgccctcatacacatgaacaaaatggggtagttgagcgtaaacatcgacatatagtagaaaccggcctaaatctacttgctcaggcttctctccccttaaaatacttggatgaggcatttcgaactaccacataccttataaatcgaatgcctacaccagtattacacaatgccacaccattaaagacactttttcacactcaaccaaattattctatgctcaaagtttttggt

SEQ ID NO: 221 - DNA, 1295 bp, Cannabis sativa
ggcttaggatagatcctaaatttgatggctgcaaaaattgaggttgttaagttagttagacaaaaactaacttaaccaactctcttaattaagagcgaggtctccacgttaatgtaggtaggagtgcattcaggagcgagtatgaggacttatggactcacggtctaagacactgattgaaggactttcccaaataggaaagatctagctgcagtcgactatccaagacaaccttccaagaggaacaactagccacccggagctcttttctggaggagggctagttttcctgaacactgcacctggagaagacatgatagtcattcgggaacaaccttccgaaagacaaaacttttcataaatgacttttgaagatcttttcatttaaaaaaattataccacaatatatacatacactgaaaagaagtcatttctcgagctcaacaaggcattacaatttacagttgcttcctacactacaatctacaatcatgttaaaatactatatagatcataggaaattaacacccttagtttcaaagttaagcataagacaaagaacaacagcaataatgatgctttttaaatttgatcagtgaccaagtttgggaaattcatcatatataatggagatatggatgacaataatatggtggaacaatttaacaagcatactatactatcgatcgattatattatattatattattatatactttgttgcttttcttatactggcccatatatagcctggcaaaaaactaactttcaccttacaccaatcatggaaaataatgtagagaagtgtcaaattttggttgtaggaaccaactcataagggatgaataaggtatttttcatttcccttttgtacatgtgctttttgaattgacagctgattagtttatataaatatatatatatatataatatatacatattatatttttgttgaggaattataagcaagctttgtgcattaatatctcatacaatacaaggctcatttttccttttgttatgcagaaaaagaaagattagaaaaacataaggacaaagcgggccacatgcagcaaaagaagtaaaaggagagactagatctagtattaaggatcaagctaagaagtaagaaccaaatatttttgttaaaacattttcaatattgagtgagtgacaaggttaaggttacattacacgcattaaattctctcctagtacatatctactaaagaaacaagagcatattaattacacgtgtcctatttatttatggggttttataatttctttattat

SEQ ID NO: 222 - DNA, 7867 bp, Cannabis sativa
tactctaatttatattgtttagtactaaaaagatatggaagaacaatactgaagaaaaaaatattaattgtttgttagttgaattataatgactaattaaccactaattaaattttctcattttttattttttcaatatgacagtaatctacgctataatttgcttacaaattcgataccaccatctttgggagagctttcacgtctgcgagaactgtaagaagtaattaattatctgcatcgtcaactagatatatacgaattaatatttttttccaaataaagtgtatttatgcaatgtatattttttgcctatctgaaataggatttatattatatatgtcatcatgttgattatgtagggatgccagttataatcaactctctggttctcttcaacccacacttggtaatttgagtgaccttaacactctgtaagttttggaataaggtttatttatttattattatttttttttgcgaccatcaattcgtcgttgacttatttccacttaattctcaaaaatagaattttataatttattaactaatatagagaaattatataagcatgagagcatcccaatattaagaaaaatatcatattaattaaattaatatgtactcttaatattgttttcaaaaaaaaaaaaaaaaatatgtactcttaatatttaatttaattttcactaaatttgaataatttatttttaattttcttgtatatattttttttttgtttttataaattttatgaattttttattttaatcgttggtcttagttaaggttgttaatggattggtttggtctaaatttttaattttttcaaatcaaaccacacagttttttaaaaatttaaaactaaaccagaccaatgaaatgattaaaccaaaccactcaaaaacggattggtttggttcgaaccataatttgtatttcgtagttgttctatttttttttgtacaataattgtttattttttcggtattttttttagttttaataagtttataatacataagtaacaataaaaaattattttcataataatataaactcaatattaatatttacttaaagttgttcccaaatatcaatattttatctaaaaaaatatatattatttatataataattatacgaattggtttggtttaaatcactaccgagatttttaaaaccgtgcacgtgaccaaaccagagaatttaaaacgttctggagtgatcaaatggtttagtttagattttgaaatttgaaaccacagatcacggattatattatgaacatatttctagtcttagttaatatttaaaaaatattttatgtttattttaatatttatttatttagaatgtaataaggaagaaaaaaaagtgattattagattaaacaatatatttagtacaaaataaaaataatataataattttttttttttaaaaaatggggtacaaataaaattttctttctatttatttacttgtttattgtttaacctctcaaagtgatttatctatttcattttaaaataaaatttctcaatttaattaacaccaaactcactaatctgataatttttcatgcatatatattgttattatagtatatctctatatatatatacaaattaattttatataatttgaaatcaataatgcagctggttatcatccaataatttcactggcattttcccggagagttatgccaaatttgaaatgatggatcgattgtgagtttttcatttcattctttttaggctgatctagctcttgaaagttctcttcaataattatatatatagagtacttctgcattttctaattgttattaattattggatataataacacatgaacgtaccatgcagttctatatcagggaattatttgtctggtcctttccccaacttcatatcaaactgggctacaggtgaccatatccctagtacagtgtacgtaacttcaattttctaacaataataataataatacatatatttttaaaaagctagcttcattagttcacccacaataatacatatataatttccccactaattaatagtatttagtgacattaattataacaaccttccacaggtctctttgtggaaacaattttaacggatacatatctgcaaacattattctcgtggctaaaagattgtacgtgtattcacactccgttatatatacacttcttaattaggcgataagttatacattattttttttgttgactacaatatgtatgcaggattatttgtgatgttggagacactcctttcacgttccctaaattatctgtagataattttacgccggaagtgaataccatgtgagtgaaaatatatatatatatatttatatatatagcatttttctttaacaaaaagaaaaaaaaaacttattaatattggctttatgttaattaattttaaacaaaaagtactcttggaaatagatgaaacaacttattataattagtaactttttttttttttaattatttgatatgatagaaagcaatacagatgaaaattacttactagtacaccatttttactatatataattacttgtcatgacttttaggtaaatatatatatacacatacatttatcatattcaaaattatctttattaattcacttctgagatatgctatgatctctagtgtactgaggaactgctcaatctctggttcaatacctgcctactttgggtatttatcaaatttacgatacttgtaagtgattttcattcatatatagtttaatcattttgacttgaaatatacctactgatttgatacaatgacctgttctatatttaatatattaagctgactttttgaaacaaataaataagtcctttttattttattgaaaactataaataagtcctatttgattatattaattacggtgaaaattcaaattgtgtcaaaagttgccattgctaagaaaaataaaaaaaaaaataaaaaaacagccaaattaagtatatcttccttatattttgatttaaaggaagacaaaggaaattaaaaaaaaaaaaaaaaaccaaaaattatatgggctaattcagatttttaccccaaaactgatatggtgattaactattttctactattgttatgcagagatttgagcttcaacaaattaactggtgaaattccggactcttacgaacatgcaaatttaacgtacttgtacgtccatatatatatatatatataactttaacatatattaaatcatatctctcaagttttcagactttaaaattttttctgatctataaatttataaacttttgctcaattttattaacaaaaagctggcatagattaaagttcagagaaaaaatataatttaatacataaaaaattaaatttagagagcacgttatggtagataaaaaagtttagtggcacaatttaatagctgaataatagccattttaataaaattaaatagaaatttttaaatccatcaaccttattaaatcggagaagaaaattctagttattagtcaatataatacgagggttatgtaaaaactgcatgtgcatgctaataaatatcttatcgactactctttcattgattgagaaaaagtttgcgaaaaaaataaaattaagaaaaagtacatatgtttatacccgatatgttttctatttctagtcatggaatattgctatctcctattgattgctcaggtctttagcggagaacaagcttaacggtacaatcccgaattggattgaacatgcagctttctcaactatgatgtaaacttaatttacacattattttgatattttaaaaatttctaagagatatatatgatgaaaataataattaccatcatttgcgaatatattatatatttgtctttatttcagcgatctctcctacaacaatttttcaaaattaagcttcaaagatccagaaagttcaaatatgtaagatatatatttatgcaaattaatatatagaaaatatatattctgctagtttgactataaaaaagtaagtatacgtagtaataacattttctgcttgtatgtttcagaagtctattttcctgctgttgctgtcagccagaaaaaacgtaagtaaatgttcctttaatattgcttttcagatttaaaactatgaataatattctaccctttagataaatgtaatattaattgtcaaagtgagcaagttaaaatgagtattataatcgatgctagctgctatatataattaacaaattaaggtttaaatatatatgtgtgcaggaatgatgatgtgaatcaattgatgactgaatattgtcctcaagggaaacctaaatgtatattctttcttttggcattatatatagagaatttgtagatatttgcttaattttaggtactacatatttacatatatatgatttgtacagatagttctttgtacataaactgtggtggtgaggaagcaactataaatgggattaagtacgagagtgataatgacacgagaaatttttacgtaagtcccaaaggaaattggggttatagttctaaagaaagctttgtagcaggaaataccaactacagcaatgacattaaaagggtgaaatgtggattttctgtctctgaggcacctttatatgagaaagctcgtttttctcctctttctttgaaatactacggtttttgtttacataacggtaactataatgtgacactacattttgctgaaatcgtttacacggaagaggcaggctacgacagtaataaaaaacgtgtatttgatgtatacattcaggtaattattcaattcgatattaatcaagtagtgtcgtgtctttaatgttgggagtattattaaaggctgatcgatcaattggaaaattctcaatacaggggaagagggtactaacagatttcgacataaaaaatgagagtaagccaaataaaatagccattaaagacaatctcaccgccgttgtgagcaacaatcaattagagattcacttgtactgggctggaaaggggtcttcagactacacacaagagccttcagggcaatatggcgaatctgtaccaccccctgattttaacggcccactcatatcagccatttccgtaactgcaggtacctaaatgattttcagaaagaaaagagctcatgtttacaacggaagctgtttctatgatgagattaacatatatatttcagaatattcataatattgattggctagctagctaactaatcttaacaaatcaattagttaacattttaacatatgtttatggatttaatttcacacaactcataaatggatttccctacggaatagatcagaaaggccataaaatgaaaaatagatagacaaacattttcttgttaattcattattaattgtttgaaaacaatttttctgatttcagattttaagcttggtaagaaattatcaccagtacacatagccttgatcacggttgcttcagttatatttactctgttgcttatattggctctcgcttggatgatgggatggttggaaaaagaagacttacatggtaaatgtactgaaaaaaacatgcttatatatatacttcatcactcattatttaaattggaaacttactctattacatactttttcaatagaaataagagttggtgaagacaaaactgttaccctcagacaattaagcgatgctactcgaaaatttagcaaagaaacagagattggtaaagggagttttggaactgtttacaaggtatataagtatacacaattatgttcggtagttttaattatcttaatggtcattaatgtatagtataatagtataaaaactttccttaatttcatggttccaggctgaatttccagatcatcatgttgtagctgtgaaaaagcttgacactctttcagtggagggaattgagaaattaaaaagcgaaatctataccctccaatctcttaggcatgaaaatctagttcggttgtttgatatatatgttggaaaggggctgtatttggttatctatgagtacatggaaaacaagtcccttgcagatgccttattcagtaagtgtttaataattaatgtgagaacagataaaagtagtcatttataacactggtgcctaatgataatgacttatgcaggctcagaccacaaagtcagacttgaatgggactcaagatttaacatttgtctagggattgcaaagggtttgcagtatctacatgaacatcctagattcaagatggttcacagaggtattaaagctgctaatattcttctcgacagcacactcaagtctaagatatcagactttggattggcaagtgcttatgctgaggacgaaacagatgcaatcaaagtcatcaaaacagaggcaccacagtaagttattgactactctgtttttatcaagccaatataataatctctttcaaaacgatcatattttatatcacaataatgtgaatgttattagtttctgttagagagtctcacgtggaaacataattctatatataatacaggtagtaaaaagtctatacataatgtaattaagagttgaaaattaacaggaacatcttgcaatcacaataagaactaattaattcactcatactttgtacgtatacatcttatactatatttagttgttattttttaaaattatatgatatgcaaactatatatgatgtggttgtccttttttcctattacgtgtataaatagtggatacatggcacctgaatacccaatgtatggaacaatatcaagtaaatacgacgtctatgggtttggagtggttatactggagcttgttagtggcagaaaaaatgcaggccataaacacaaccaagatgagcttgagtttcttgtagacgaggccagtataaactattgacatatttttctataattgtgtccatataataaagctaaattactcatccattaatttatatgaatgcaggtttgtgtagcagaaacaaaaggaagtttgttggatttgctagacaaaagtttgaccgtttatgaaacgaaacaagctatcaccatcttgaagttagcagtaaagtgcaccaatatatcgcctggggtcagacccacaatgtccgaggttgtgagtgttttgaatgaagaaaaaactcttgacgagatttgtgtgcctcaagcttctgatgaacctgatcaagaccttactaaagatgcataattatttgcttatgtccttagaataagtactatcaaaggatgaacaagggaacattatagtaacttgtatatccgtgactttgttatttttctagttacattgatcgaaccactaattactagaaagaataagatcttacaacacattatatatttataattatatttcgaaaaaaattaaaaatagttgagtacatgtcgaaaaaacgataaatttcaagttcagcgaaataacaaaaaaacgaagcaaagcaatttactcagtttggtaaaactaccaaacccacaaagagagatatatttcacttattacttcaaaattacatatactttctatctcaatctctctacccaaatcccaatacatcctttgcttctcactcactctcaccacataacaaactcacacttctcttttcacaactcactatttttctctcactccacacacacacctctctctctctctctctcacacacacaaaacacatatttatagagttacaaagcttgggcatcaagacaacttggatgccaagacattccaaagcttccttaagaaggcttttcaaaacttccaccaagactttccttttcctaaaattgataattacccaaaaa

SEQ ID NO: 223 - DNA, 3150 bp, Cannabis sativa
taataatccttatgttaattgttctcctgttcctgtttcatcatcttcctctgccaaccgtaagtacttaattttaattattgtgttattttttttttctgggtaaatttgatcaataaagttgttgacttgaagtgtttggtatgattatttaaattgtaattaatttttttttaaggtcaaagagtgagagtttttggggcatttagtaggtgtgggaaaaaattcgaacaagctacaagaaaagcagaggtcattgcagacaatctatggaatcatcgtaagttgaaaataatccatttttccatcttcaaagttcaaatatatcatcatgttttcttatgttttaattcaacgttgtgcttattgctgttggtttatattcttcgaacaatttttttttttttgggtattgcaagaaagtcataaagtaaattcttgtaatatgacactgttgatccaatttttgtatttattcttcatttgaaattgattacaattagaagttcttgatactaaatagtaaatactaaaaaaaaaaactataatgctgaaatgtgatgtttgaaaaatattattgaattggatgtattttaattagagatttagttgatttcttattatttattgttgatgaacttgtattttttttttttttttttgttattattattattatctaaacataattaatcaaataattttgcacatgatgttttaagtgtaaaataagtttaatttatacataaattatattcttaaacatgacctcatgtctcatgtaaatcataacattataaatagtaaaatctttctatttatcataaaaatagaaattatttcacactacactaatgtttctttgttatatgccaaatgaattgcgtacttatagggttattttgatgatatggggtttttagctatagagtacaataatgtagaggaattgcggagtagagtattgttattaggtattttaaggtatccaatactatattgatgtgacatgttgtgagtggttagtaatttcttatattaaaatgtgtgggacctgatattaaattacaccaatagttatatgtcacctcttgtagtgcttggtaccttaaagtgccccttcgtatttcttgagtcgcgtagcaccacgtgagtagttgaaagcaagccttaacctaattcgagcgcaacttaataaacatccgaatctaagtcatttttgtttgcagtgaaaacaagtccaagtttgtcagaggcagcaatggcaaggattgtacaaggaacaaaagttgtagcagatggaggatatgataaggtattcagagaagcatttgagatcatagaaggggagaagctcttacactcctatgcatcttacttatccactgcttctggacctgtaattggaacactttatatttccaataaaagacttgccttttgcagtgatttccctctcacccattactactcattatctactaccactcccaattcctactcattacattacaaagtaagtactatttctacaaccttattttattaggccttttgttttttgttacataaatggcccaattaatccaatagtgaatgatgggaaaaatctgacaatttgttatgtatatatatatataggttgtgatacaaaatgagcagctaagaacagtgaatccctgcacaaatagatggaacccatcagaaaaatatatacatattgtgactaaagatggccatgaattttggttcttgggttttatatcttatgacaaggctctcaagaatctcattgaagctagctattcccatcccttaccttaatttcaccacacacacatcactccataaaattttaatatatatatatatacataattaaatgtgcctcttttacttattgttctctttaatagaaaagtacatgacctctatattggcatatattgttccatgcaagtatacatttgattcggattccaaaatgtcctttattttaacaataaagttagacttgaatacaaatgtcctaaattcatatggacaatacataaactcttgtagaccctttggtccacaaattcacttggacaatatattacttgttgtgttgatagaattaagttcagggaatgctatgctagtgttattattacatccaaaaatcattcatataataatacagttgagcctaaaaaagaaaaacaaggcaaatgacaatttatgtattatgaacaatgaactacaattttcaacattttaagggcattttcttaatttagagcctctaaaccaaatcaataatcacattctcttggctcttgaatatgctataaaccaaataaactatgtccttattattctctccaaacttctgtgcttcttttcagtcactaactccattaacactactccagaaccataaacatcacttctctttaatttgaaaaacttattaatgacatcatattttaacacccaatatagaataattagtaaaaattgattaccatttaaaaaaataataaaaaaaatcaccaattcaataatataaacttaatacttacctggagctgtgtagacaagtctgccagcaagaaatgagtccaatctccatctgaaaaatcttattagccaatccaaaaccagcaattctaggcttttttttttttttgaaaaaaggcgttttataaattaaaaaattagacctcacggtcattacaaaagatagaaaccgttatggacatcatatccaccttaccgaaaatagagttaacataagctcacctggccacattataggccataggccaaatagttaccaacaattctaggcttgatccaatagaatattagtatgtgaataactattattcaaccccctattacgatcttctaatcaatctttacgttcgaaatcacatggtaaaatatatttttttcatagcgatcagggccgaaatataatggaccatagaaaaatagttttgaactcttatttagaaaaaaaaaaatgtgatatttttcaaaattaataaaatatgcgtaattttaaagagaaatttttttgggttctaggcacatgcttaaagagaaattttactcttaatatattgaagactactataaaattttagtcaaatactcatt

SEQ ID NO: 224 - DNA, 850 bp, Cannabis sativa
gcaagtcaacaagagatgttgaaataaacaatttgagaggtcagggacagtaactttttttggggcccacctaggatttgagaggagaggaaaggctgaccaaaaatccatgcaaaagtgagaacatcaatatttgtaaacagtctgctgctaattgaaaaataataaaaaaaaaaaatagaaggcaaaggagaacaataaatcttaaaggacttggagaatcatttcgttaatgctacagctttcactaaaacgtatatattcgatcattatatgaatatataaatcataagcttaaggttacactacaagtggatctacaaatgaaacacaaatctccattggtatgaaattaatatccaaatgctaatgctataaacagattgaaatcatctggagggtaatttatgatgtggtggaaaaatgacttaataacatatatgatgctttcctagtagaaatgtgttgtcccatggataatggaacaaaatatttcacaattcatcagataaaagacttaccagaggcatttccaatttggttttgatttttgaacccagctgtcacagcaatgcaaagaatcataaggatccaatttacatcaggaatataaacctgattcaggaaccttttagatgtatgcacaactttgactcttggaaaacagccaagtgcaagagcttgcttgatcaatgaaaaagttgcagatatggtggcctgacttgcaaccacagcagctgcagttgcaataacaaacactggccaatatatgcaatctggatgataataaacgataagatttaagcataatccccaaaccaataatgaaataatctttcctgacataata

SEQ ID NO: 225 - DNA, 884 bp, Cannabis sativa
atttttagttaaaactttaattatttgttagtcgtatgagacatgtcaagactattttcttctaaatggttcctataaattatgtatatatctttcacaggtggagaaggctcttgatgttgctgaaaaacttgtacgagcatcacctgatgaactcaagcatgtagcaagtgatcttgtcagaactcttgtacaggttcgttgctctgacttggctgtagaaggtgaggaggaaacggctgaaaacaagaggcaaagagcacttgttgctttggttgttatgtgtccattggagtctcttgacactttacacaaacttctgtattctcccaatgttgattttagtcaaagaataatgatactcgatgtaatgaccaacgctgctctggagctgtctcatacaaaaactacaaaacccaaacatcagacgagaccccttatctcaaccatatcagagaaccaggcatggtttttgcctagtgacataggaccaccaggagcaggcacctggaaggagatttcagaaacaggaactttacttaactgggaaaatcgttacgagagagaacttccccaaaagcccggtcagataagaaaagggaagacacgcagatggagcttgggatcgtcaaacatacaagacaaccaatcagaatggtcccataacaagtttcctatgtatgcagcagcatttatgcttcctgccatgcaaggctttgacaagaaaaggcacggtgtagacttgcttaacagagatttcatcgtcctagggaaactcatctacatgctcggtgtttgtatgaaatgtgcagccatgcatccagaagcatctgcattggcttcccctcttctagatatgctacaatccaggtaattagccgaaa

SEQ ID NO: 226 - DNA, 2999 bp, Cannabis sativa
aaaaaaaaaaaaaaaaaacaaagtaaccccacgaacggattatcagaatcaaccaacagcgaattataatgataatgtttctgtttggcagaattaaaatttaagttaaacaaacacgaatattctcattacacccactttccccaccgaaaaataaaaaagaataagaagggtcatttttctaagacgtactctttcggcgatactatgtgggtcggtggcttgacctcttcgagccctgactcttggtctaggttgggccgcggctgccccagacgaaccacttggcgctggagtctggctcatggttcccccttgtgctccaaagttctgagactgtaaaaattaaaagaatgatttaataattgtcgtttagatgtaaaacgacaatagtaagtttttgagtgaaattaacctgaggatggtgaaactgattcggagcttgaccggacccgggtaaagatccagtgaacccattgaatagagcttgaactgaaccgtctccaccctgagaaataaaccgcagagttgtaattatttacagttattgccatcgccaaaaaaagttacttttacttactggattcggagatttaaacgaggaaccgtcaacgacgtcgttttgagatcggtcaaagtcaccgttaccgagagacaaaggcatcggaataagaccggattctccggcaccggaaccagctgaaccgggaagacccctagacatcatcagctgctgctggagcatcatagccgtggcggctgctacggccgatttggaagcgccggttccggtgctgatctggtggttacgaaactttgaggttaagttaacggattcttcgtagttaggaaaggcgacattctcgtgtccagacggtgccgtttcgtcagttaaatctctacatggcttgttggaggaggagccgttgattggaagagttgtagtagtatgatcccatggggatttgccggagttgtttgggccgaggtcggcccatgaacaggatggttggcccaaagtagaaagcatttgctcgagaaagtcgtcgtgggtcgacccggattcgaagtgacctgagccatgaatctgagaaccctgttgtcctcctccttgaagttcttgtagtgagatttgggaagatgatgagtttaagagagaattaagtccttgcatttctctgctacaaggctgcatcgaaaagattagttactgaattttgaatagagcagtagtagtctttaaaaggggggataaaaggttactttagatatgtttgggagctgagaaaatggagttggaaaaggttgagaaaaatagtacaaattgtgggatgtgtttgttttgtttttgtgtgtgtgttttttcgattgattaaataggtctttaaaaaggagggagggatatatatgtcgttttatgaaagagaagagatattaattaataggaaaagtaagaagaagatgaatgagtgatgagaagtttgtttgtttgtttgtttaggtaatagaagaagaactactctagccaaagccaagtcttgatgtgtggggtttgagctattatataatgatcctagtcatatgatactatggtggggactattattatttattgttattattataccatttgtgttatgttgatttgaattatttacatcaacatatcttatgatgtaaaggaatgatgtattgttcatatcaaatcagtgagaattgttaataatgtattaaattcagcaaaaaagaaatatattaaattcctttttactaaaagaaaaaataaatatttacatcaaacattagaatgtgtggtgctaaatattatgattaacacaatagtttaggatttattatttgcggcaatactacttgaattattcatttgttacatttaattttataaattgacttctttaagattaaaatcttccaaactcaaatattacttttctattcaaaagctctattagagcagttttagtgaaagtagtctaagggttgctcactaataaagtgggtcctaatttaacttttcaacatttattttttattattttttatttatcttagatgtgattggatatattatatccatactttgatcaataaatatacaagtttagttgtgtgacatttgtattaaatttcacaattaatgaggtaacagttaagctcgatcattgaagaatctggatttaatatatatatcccagagaatactatttaaacaaaatatcgctacggttaaagtagccatcgattgattaaaatactcaaaatcacctcaaataaaagaggaatattttctcatcctaaataacagagtgatgaaggcacaattagggaaaattatctcgcatgatacacccaattgacgagaagaagaaattgtatgttttgcctaagcccaaaatggcaaatgctgatttggtttcgtgaaacaactaaagtagtatataatgaacgcctcagaagatttaggagttaaactaaaggtgcttaacttgttaagtcaatcaagaatatttctggtgtagatatcattgacgaggagagacaagacttatataaagcctacttctggtaatcatcttagatggtttataatttggatcaaagtaacttatgaggagtctggtaattactttggaaggtttgtaatctggaccgacgtgatctatgagtagtctatacttaacatgcatttttccatcagtgtttttcctgaggaagaaagtattgtcttaaaccagttcaactcgaaatgacatcctatggaattcagctaagcaaaaagaggtccaaatggttcgattaaccaaagaagaagtgaagagaagaatcacatgtgtttggcctaaaaatgtcaatacaatagatacaaaatggttttcaacattgtaaatttattaaaagtagtagacttagtagagagcatagtagagcaatttgtaatacattgtatagttggagaatatgttgggttttgtgcccta

SEQ ID NO: 227 - DNA, 3545 bp, Cannabis sativa
ttttacaaaagccatatttttacacaatttgtataaaaactcgtgtaatttccaatttgcatcaagcatgaaagctaaaaagatccccatttgggcccttagacaaactcctcacttgagatcagctgcctttggcaggcagcatgaatgcaaatctaaagttcaaggttcataccatagatcggattaataatatataaaagaaaaggaatattcctttggtatttttgtaagggcatctgactactaataaaagtatcaatttttaggaaatatcaattatatgttggtagtttctcattataagtatccgtctattttaaattaattattatgtataaaaggactattgttttctgattaaaaatataaagctgacccaagccaccatgtcaagtgtatgttttttttttttgaaaaagtgtgacttgtatgttgaaggaggaaaaatagatagaaggggtaatttttatatatgaacttattttttaaagagtaggatgatcttcacttcagcaacataataagccctatgaaatctatcaaagtaccaccgaatttgaggaaagaagtaaagagaactagttttgccagtctccaaaaaccaccaaaaaatggattacttgtctaactagaacaatcctaaaaccagccttgtatcaaaatggaaaattttacaaattagatatagtaattgctgcgtaaataaattgataaatacgtatctaaaacagtatagcttccatgaaggccaaaaaaaaagtgtcacagttaatggctacaaaagaaaaccccaccatttataatgatgtttaccgactttataggcttttgaatgtgcaacagacactaaaaattctgctgagatgatttttagagggcagttcgacaatcttttatttttttttcttttcctttcaaaaaaatgtcatgaaaaggcttgtctatgcttaaaagtattatacatttagtttttaaggctgctcttccaagaatcaacctagttccgttttttttttttaagaatctattaatttggtaacttgtgttttgatgaaatgcaactttggtaacctatattttttgttatagtgatgactgatgatcattattagtgaatataggatacaaaaacttactttgttaaaacacaagctagcaaatcaaatggatacctgccttttctttatgcatattaataaataggtcaactacttgggttccagcatgtgtaattaaggtgtgattattagaacataacataaggattagatataggcaaaagacaagtgggcctaactaggttagatacccttagtggacaaaaaagccataaagtgggaatgcattccataatgatgagcaaagaccagatataatctttcaactacttcagattattaacttccttgagaatcaagaagaagccaacccaacattgtcaaagttaagatttgctctttcttttctactgctggtaattactttacttatatggctcttcagtttaagtgtaataattgtattctggtgtaacatgggagagaagagtctaaacaagtacaccagaatactgagacaaataataattaaaaaaaataaataatgataataataataataataatcataataatgataatggaagcagaagcaaactgccttttgtccaaactatccaaaccttataggaaaatgacaaaaagtcgatttgataggggtgcatttaattcgattcacagaaaaaaggctaccctttgttgatgacaaaacagcaggagaattcaagaagtgtaacagataaacaagagactgtgtaaagctacataaatgtttgtgaaagtgggggaggagggggttggctcatctgctatccccaagttaaaagctgccctttttatttatgaaataggcagagaaataaaaggtggtaattttccaggtgaaaaactcaacaacccaagtgagcttatctcactaatatcacatacagtcttaagatttttctttataatttttttattataattattttctaatattggatcctctttttatcaccattggtttgtcttctagtcatctaagcactgtaaattatggtggatagggttgccaggtagtggtatgtaccttccacttgaataatgacactgttgatctattaagttgttttgttgtccttgtaaaggagtcatctcagtttttcaaaatgtaaatagcaactagtaaccagtttatatatctatatatatggatggtgaaccaaggtgtttgatgctctttcacactgtagattacataaaaacaatcttatcaaagtttttaagtcttggtgggattagagatggagtcttcttcccatctttttggaagttcagagaagcctacctacgacacagaatccggttggacaatgtacattggttcccaaatccaacatggagtcgatgatcgtctacacgaaaatgaaaacaaaccttataaaggtgaagacttcaatggtgaaagtgatgactccatggcttcagatgcctcctctggtccaactctcagtgagcttggagtgaaggagagaagtcaaatctcgggtgctcttagaaacagagtaaatgtacttcagcatagcaaatgttctaaacttggcaagcaagagaagaagagaattgaaagtagaaggaatactaaaggagagaaagaagttgagaaagttagaaaagctgaaagtgcttctagccaagtctaaggttgaggtaaaacatgaaaacaccaaccaaactagttagtggccaaatattttcttttaaactttttcgttgttgttgttgttgttgttgttgatgatgtcgtctctgattctcttctgaaatagcatattttctctgttttgacacaatgtcttctcttgtgtatccaaacttgtaaaaataacttgaatacttttttctttatcttagttctttatatgtgttaagggatgagagactgcatgtttgcatgaaatcagtttttcaaatttatttgctattgccttgattatcctggttaccaaactgaatccatggtataaaattctaatataaggcactactgttatataaattatgcttgcttgcaccacatgttgtcttatagcaatgtataaatatacattaattaaaatgctttatgaggtgacgtgatgtatattataattaacagtgtcaaaatgacaaaatagtaaagataattaggtcctgcataagtatattttctctagcaagtacaaaatgataattattaattacattatttgtagatagataacacaaacaaacccagatgaaaatatgttcttaggcgcagggattaataatttaatatcgaagaagaagaagaagagaatgaactccatgacaaagaacgtagttgcttgtgatgaatactgatcccattctttccaagatcattatgaggaactttcagtaacaagtgatactgagtgaagatatttttagtaactagtaatgatgttattgcagtactatttagtgaggatttccagt

SEQ ID NO: 228 - DNA, 3656 bp, Cannabis sativa
  modified_base (2446)..(2469): a, c, t, g, unknown or other
tatagcgtaatatttatcggattagaatttataaatatcgatacaactgtaatatatataaataaatatatttcaagatttttgggtgccactcaaatgaagaaaaaatatgaaccagtcgttataggttttggaacttagaatagtagacgaattaattaagcaaaggccaatttagtcaaattttactcaattttcacgtttagggatgggcaattttaagggcacacacagtaaacgaatgcaatataacacgtaataattatattgatttctacataatatatagttatatgacaaagttagagatgagtcttgtcatagagacgtcttcggaaatccatgacagtctattaaataaatagaatttaaccattttttataattattatataatttagtacgtagtagttggtgtatagtcttgaaaatactaataggaaattgtaagagatacatcaatacgtatatatagatttctaatagtatcaaattttttaatatcataaaaagaaaaatcatacgtcaatactagtcattgcaataatatccatattggtcacacataaaattatagatatatagttttataaaatcaaagcgcacttgcctaaatcctaatcatgtaactaaatggaataatacattaatcatactcaccaaattgtcacttcccatcaaaccactaccaaagtaactagactcattttactaaacccagctcaataaatatcacacaagttaattataatgatcatatatatatatatatatatatatatatttaaagagcttcgtaaatacatatatacttacataaatgtcctttcaaccattcaaatgtaatgcattatctctctctctctctcttttcttttgttgtatataaataaaccccaaagagaggcaccctacgctttcgtctcacgccacggtcaattatcaaaagcacagatagagagagagagaaagtgagagtgagagagagttctggttattagttctctttattcttatctttcttaattctctcttttttcattagtatttagattcacaaaaactacgagtatatactactttaattcatcatctgtatagagatctctcagaatctccaaattctctttctgaaaaaattatgtcgtccaaggactgcggccaccacgggaagaaacgggaaaagcttatccggcgaatctgcgccggtttcctgatcttcctcttcatcgttttggtgttggttctgttaatttgggctattcttcaaccttcaaaacccagatttattctccaagacgtgaccgtttacgccttcaacaccaccgtccccaatttcttaacttccaattttcaggtaactatttcctctcgaaacccaaacgataagatcggtgtctactacgacagactcgacgtttacggagtctatcataaccaacaaattacttaccgtactcgaataccgcccacctaccaaggtcacaaagacgttaacgtttggtcaccgtttgtttacggtaaccttgttcctgttgcgccgtttaattccatggcgttgactcaagaccaagctaacggcgccgttatgatcatgttcaaggctgacggaagggtgcgttggaaagtggggacgtttatctctggccgttatcatttctacgtcaagtgtttggcgtttatcaatttgggaaataagaactcaggaattattgtgggtgaaaacgccgttaagtatcagattgtccagagatgcagcgtcaacgtatgagagatcacgccgttactcatgtctattaagcaccttattttttttttctttttttctttctgtgtttattaattagtttcatctgtttgaatattggaccgtatatgatacacgtataagtccttgaattgtacattttgctatagaataaaaaatatctgagtatgagagatgataaaaacaggtatagcaaaattgcaatattatatgtgaaccggaaattgtagaataaattatatatattataaaagaaatttgcaattatcattattttggatatattacaataattttagtggaggttgtaatgtcgttttctttcatcatctaaaatgacacaattttctattttgattgtaaagtttctttttcaattctttatgctttgtttctgttcacccattttttttttccttccattttatatttatcttcgttgtatttttgctcttttgtataaagtctaaacaagttttgtatattaattattacaaaatgcgaaattgtagtactagaaaagggttcgttaacacaccaaactttttgccaccaaaaaaagaaaaataagaaaagatcacatacaatgaatgaaacataactaaattcaactctttggtccataaaatagtaatagtcctaaaatatagaggttaaccataataataataataatannnnnnnnnnnnnnnnnnnnnnnnataataataataataaaatgaataaagacaacttattacaataatcaaatgggacaaaatgggcttctaagggcggttctttcttggaaagtagtgggttttgcctttcaagcttaattgaaggtagaaaaaattcatatttttaggaccctttactcagtcataggcatacataaatgcttccacattatttaatattactgtttgttgagagagagcttccacattgtatatgttagatagaaaatttatgatattttcaaatgcatgtaaatattgtaatgggaactaaggatagatagggaataatttgataatttgtgattgtgtgtgttttatttttaatatcttccactttcacatgcttagtggtggtccttttcatccctcttctcctaacctgctctacctactaataatagtcatattagaaaaagacttttcattattatgtaaacaacccaatgggtcattatttttcattttaaacttgaatcaaattaaaatattttagctccactcatcacatgccattataaagtggtgacaaactaatagataaatgaacaatgaaccagtggtaggactaattatattatatatataaaaatgttttgaaaaaatgccaatttcttgagaagttatgaaaaaggcctaataatatttactaatgcaaaaaatacattattttaattaaagtttaagagatggaatggacacactcacactaatttccataagaatgaatggcttttttccaattgatttcatttgattgctcatttttttgataagttcgatttgtttgtctatgctttcctctcccaaaaagaaaagagagaaattagatccatttttggagggtgagattctgatagtgtcacatggtctgtcacctgtagttaggcaacatttaagaagatagtgaaggtgtattttctatattttgataagtcaaagttggtttgctttgattcattaataagtattgggggactctaagttactttgggctttggtagaagaagttatttattggactagacatcggcctgaggctgatttatttgggcctttcttaacaacccttccgttttgtctttaaatcaagctttattaaatatttctaaatactcttggattctaagttatgtataagttacactctttactatgttaaataacat

SEQ ID NO: 229 - DNA, 1549 bp, Cannabis sativa
aaaattcttaccttacttattttggggacaacagacctaagcatgtaaagcctatcattaagtttcttcctccgccgcctctcagccatcaaattcttagccggcaacccttttttctttcccttctgatctcctcctccggtgacagtactattagcattagaattacttccaccaccatttttgttagtattatcctcaagcttactatactcattagcatcatcagaatcataattaagaccagaaacatcaatactctcttcaatttcaccatcatcaatactcttcttcctttttttctcaaaactctccaaacttttcccaaatctggtagaagctgaaacatccaaattccccaacttatcagctccacctgaattttgcctgagcgccgcccgtttctgaaacagagttggctgagcacccaccggaggaaaaacctcaagaggtctcaaaaccttagctctgttgttcagaaacagagcactaccagccgagccatcaaaaccctcgaaacccgtcggactaaacccacctccgagtgcagcggcgtcgtccgataagggaagtaatcgattccccggaaaatcagagctagaactcaattccggagtagttccacccatctgattctgctgcgaattaagtccagcgaaacccatcaaaacagggttgttgagaaacccactttcacagctcaaatcaaagccattatcaaaagggttgttattaacaacattaagaagagaagagaagcaagatttagcttgtaagaagttgtgagagtgagatgggtcaagattgaacgcttgagaaggagaacaagaagcagaggagtcaattggttgtaagagaagattattgttatgatcagtaactgggttattacagaagctaatatcatggtgattagtagtagtattattaggaggtggaggaggaagagaaagaccatggagatggtgagaagaaggagttgggttaagagcattattcatgtaccagtcagtttcgagcatggttttgaaagaagagaaagaattagcacccaaacccatttcttcttccttgttgttgttgttgggttcaacaacaactccttcgttgtttttggtccaagaagaagcagcgtcttcttcgtccccatctatccaaacggcaccgttcgacctcggcaacatatcaaaatcgagaaagagagagaaacgggtttaaggtctttagtactattctgcaacttttacagaatggaaagaaagaaacttttttcacttttcagaacatggtttcagagattttcagagatgaaggagaagaaagagattccaatgtttgaacgttagtgtattttctgcaaatgaaaaaaaaaatgaatgggaaatgtatggagattgggttatcttatgtgtatgttaaattttatttattttattttatattttaatgttgttttactattttgcccctattgacaatactacccataatagagttcttataattaccaatagtaccactctttgggggtaattctatgtcaatgtac

SEQ ID NO: 230 - DNA, 1160 bp, Cannabis sativa
cagtgagagcgtccacgaaaactctgtccttgttgaaaacaacaacagccacaaacgcccagctaccacgcaccgcagcatcggagtagaaattgaactccttcaacacctgctgagggagacaaggaggatcacaaacctccaaattctccaccgagagtctcaactttcaagtcagaaaattgttaaccagcttcgagcacttggaaaggacctcttgcggacgcaatgaagagacgttgtggtaaacatggttcctagagttccacagagagaagcatatgtaggcagcaaattgggataatgagggttcacccgaggtaccaggatagacacttggagaaggatggaggatccaattaaccatatccaaggtgatactgaatagcagccgctcacttcgaatgccaaacgggctactaaaccagcaggctctagcaaacggacagaggaagaagaggtggggaagggaatcctcaccatcattgcacagaacacaatgagattcattgccaaacactgttcgaagacacgatccacaggggagaatatccttacagaccttccacaaaaacaacttgactcgttcatggacaggggccttccaaatctctttccaaacattagaacctatcccaaggcgaggcttgatacgagaaaggtaggcttgactaatcgagaaggacccatctatcgaatcccgccagattagccgatccttgtcactattagaaagcagctccacacgcccaatctgattccccacacggggtgcgaaccactcagcaatggcctcggtcataagttcccccctctcattgaagaagttgcataacaagttgactctaggcgattgaactcttggattgaaggcagctatgtaatcattccaactaagccaagggatccaaggcgaatgccaaatatctgtatttctaccattagcaaccagccagcacgattcaccccgaataaagtctctcgaggcaaggataccacgagcaaccttagaagccgcatcggggagattgacactccaaaaggattcatcatgcttacaatatttggcacgaaaaatacgacaccacaacctttcatccccgctagcaagggtccacccaagcttcgaaatcaaaggcatattcagatccgagaacttc

SEQ ID NO: 231 - DNA, 3122 bp, Cannabis sativa
  modified_base (2624)..(2631): a, c, t, g, unknown or other
atcctaatatgtataatcgaaaaaacaaatcagcaaagaaaacattaatttagtagattttataaataagaaaattatcattgtattttatttttagaaattaattaagatttaagtaaaaaaattaattgaccttaacatggagtggacatctattattattgccaagcatcataaaagggaaggcacgtgaatgctaaaatgagcaataaaaaaaggtgacatatactattaatgtggtttaatattaagtctcctatattttttttttattaacaaaatttgttatattttaagttaataaataatataagaaagtattaattatttatatattatgttatttatttatttattttatgaagaaaaaaaagttaatttttaacgaactcaatgtaggaatgttcaagtgtgtttggaataaagcacacagggaagccttttcatgggggtggtttgagtcaaaaattgtggtcagactccttgaaccaactgcattacttccaggtcctttttagactttttattaactcccacgtgtaacttaattaactcatgagaaaaagtattaataaaaattaaaaagtaatctcttattattacgggttacattaaaataataatatcaaatcccaaggaaagaaaggaactcttgtttcaaaaatatttgtttatttttgtcatttttatcgttcacttatatagagttgtatctagaatagattcatgccactttatcttaaataaataaaaaactttatttattgaggcataaaatcatttctaatttatctatttatacttttataatgggatctggagtggctagctcaatttgaataaatcatagtggagatggaataaaaattatactttattaatttaaacgaaaatcttaattaatattatatggcttaaactactttctttttcattagagaatcgaaggaattactttagcttgaatttgtacgtattcttttccttttagaaaataattcttgtgagtcctttttcttttctttgaaaaatttgataatagagtgaaaaaccattccatcacttcacaccaaatggtatggtataaaaacttatatatttattatatgtgggtgtgagacaatagtaaactcatatatgttaatgattaaacaagaaaaatgaaatttattatcatgaaactccacttcgtattaatttttatgtggtcaatactttgtgcatttttcagaaatcgcatgtggcatgaacaagatgaaaaaaaagtggtgaaccacttgaggctagcttaagtggctataagtgggtgtgtgttggaggttcttcgagtcccaagtaaaacatgattgtaatatataatcgcttaaataaaaaaaaataaaaaaaaagtggtgaaccaaactaaagtttcctacttaattaataatattcttaaaatattccaaacttcgtggtgcttatcttgcttgccatatcacttttttatgcaattaatcgtaaaatatataaatctatacatatattcatatatgcgtttatagtatattcaattaagtaattacaatgtttaagattagttaaatggtaaataagactttgaaattttatttttttaaaatagaactctaaactaattttatataaaatttaataataatttgatctaaaagtataacaaaattaattatattttctgcatatgttcatgttagatatttattttcaagttagatatattaaaaatataattattaaaaatgatgttgaaaatactattttatattattaattttggaaaatataaaatttaatttattatttaaccaaataaaaaatttgattgttaacttttataaaatttaagattcaaaatagtattaatgataaaactttttttttttcttaatttatacatattaaccttacgtaatctggaaatgaagacacgaaaaatgagagcatagtgataaatacatgtaaatgtaaggatcatgctatattattcaatattttaatctaatttttgtaataatattattttatatttcgatattactattatttacaactcaacagcactttcttctacgatgtgcggacaacttacttaataacaaagcctttattatactaacatccaaaataattattttatttattccattgattaataatactacatagctttatattttttgatattgtaagaatgaagtcacaattattatatatactttatcattataatattttcgtgatatactttgcatcatacaacttattatattatatgaattatttctttaggtgtgtctttgtgtatatattattattggtctactaaaaattcaacattattttttgtactatgatgagaaaaaaaaaaaaagaaaaaagaaaaaacaaatgaagggcagcaaaatatttatcttttagcattagagggtccttatataataaattgtatgaccaattcaaaaattgacttaaatataatataattatatatatatatatttatataagttatatattcgatcgagttggaccgtgggcaacaatattcgattatgcagatgatccaactacatagtatatgagcaataataataataataataatnnnnnnnntaataataataataatggaaaaattctaaattgtaattgatattgcttaactactagattatataaatggtttagttgttgaattggaaagattattgggtaattatgattgtgatatggctactaccaactttgttattatttcatttaatttgttaagtgcattatgttagattgttaggtgtacttcctctaatagctggccacctgtgccattttctgcattttaattgtgatcacttttcttgccattgaaataataataattaaaattttctattacaaaaatatatgcatattaatttgtatatcacgttttaagacaaaagaaagttattgcatgtgtgagttaaacttggatcgtatacaaataaatgaatacttataatatgatcaatattgtatatgcccattttaatatataaatatatatatatatataaatgtattgttataatataatataacatagtatagaatatatgagaaga

SEQ ID NO: 232 - DNA, 1812 bp, Cannabis sativa
ataataatatttatttctttattgtttttaggcattttttttcgttcttgttcgtcccctatcaaagaacatgtataggagaattaataaagtaattgctgaattattatggttggaactcatttggctcattgattggtgggcggctattgaggtacgtagacaactctttttgaataaaatgttcaatttaacgcttatctctctctcttcatattctatggtttgaaaatatgtacattaaccaattagccaattgattatcatgtcaagaaaaaaaaaatagccaattgattatggttagatttccaacttggtatataaatatgtatctactttttttgttatgatctaaggttgaggtgcatacagatgcagaaacatttcgattattgggtgagtagatagattatcattcattgactttttcagtcaattaatagttagagtttaatctcttcaaaacagttgtaaattgctatgttttatagtttaggtttctcacaaaagatggcacattcccacttcccaggtaaggaacatgcacttgtcattagcaaccacagaagtgacatcgattggctggttggatgggtcttagctcaggtgcataccgtttataatatatgatacattataactcattaattaaataaaaataaaaaaagaaattgggttagatctaaatcttatctcttatcttcaattaattgttgtattgacttacttttaacagcgttctggttgccttggtagctcattagctatcataaaaaatgaagctaaattcttgccagtacgtcatcaattaaacaccattctgtaaaattcttatgtactcttttgggcttgttcttgataagtcactaagccagtgaattcataaatggaagtaactctgcagatcataggttggtcaatgtggttttgtgattatgtcttcttggagagaaattgggcaaaagatgaaagcatcttgaaggtatctccttacagtagtttctaaagtttttttttatttgtttttatttggtcttttgtcttgcttcatctcacagtttctatgctacagtcaggttttcagaggctagaggattttcccatgcccttttggttggctctctttgttgagggaactcggtttacccagcaaaagttagcagtggctcaacattatgctactgcaagaggcttgcctgttcctaagaatgtactaattccgcgtacaaaggtgaattgtattgaaattcttaataacacaacaagtattgattccaagtgtctaccatcttttgttttgcttactattttaatatttttgtgcattgtcacagggttttgtttcagcagttagtcatatgcgttcatttgttccagcaatttatgattgcacagtagccattccaaccaatcagtctcctcctacattgttgagaatgtttggggggaaaccttcagtggtaagccaataaaactagatagtaactacagtattgcatttaactggtcgaaatgcagcaaggttccttctctagttttctatatctacatcacagagtatttcttatctatttggttagactacgaaattaatcatgtttattataagttttccattcacacaggtaaaagtacaaattaggagacatttaatgcatgaaatcccagaaacagaagatggtatggcacaatggtgtagagatgtatttgttacaaaggtaaaaacttttcttcacgggaaatctctctttttccaactaggctattttttgaccttttataactattcctagttgaatcccttcatatatg

SEQ ID NO: 233 - DNA, 6043 bp, Cannabis sativa
atagaaaatcaaatttcccaatttgggatcgctgtcaaacatgtggtacgctagcagagtcaaaacaaacatataaacatatacaatttttgacgaaagttggaaaaatatatatttattattagcaagtagcaactcactccaaattccaaagtatatattgccatcccctaaattcccttaacaaaaattaacttgatgtcactatttaattcacaatataatcatgtatcattaaaataaatcgacgtactaatattacatgcatttctttatatccaataatattcaggttttattttcaaactcccccagggtatttttgcatacatttaaactagataataattttttataaatgaaagaaaatttccgactttttgcataatgttgttacttttgttattttaatcttcattggttttctcttaaaaaaaataaatttgttcgatattgatggtaagtaaaggaagatatatgtattaatttttacttaattaatgaagacaataataaatctttattattattttttttgacaaaagttattaaattttttctaaaaaagagaataagtgaaaaaaagcaaagaaaagaatgttagtgtgactagatttccatagtaaaattattattatcatatcaacttcgactgtgaatgaagtgtccaaagctcactacaatatctatctctttcaatcgacgagtgtagcttgccaatattattcttgttgtaaaactccaacccaagattcatcaaatggtgtgctttgcttgtggctagcgcaatcaatgggtgccatttggtggttttgtgaagaaaaaaataggtggtctctttctctagtttgacccgttagtccttctccttcatccttcacttccttatcctttcaaaaatacccactttctcaattctctctcacataagtccatataatataataatccaaaataatgtcaataattcaaggtttaacacaaactaatgtgttggaatactgaataccgtaaatgtgcatctagtaaggtaccaggagtagattacactggttaaggttggtaggttgatcacggtgggttgatcaattggttaaacatataaaagtagattattgataatagcatccatgtaaattattaagaaacaaaggctatactttagctaaaattaaacagtaaatggtaaatgaaagactgagacgaagtctatagctagcatccctctaatttataggaaacccctttttcttttgtctattagtagaagctagaaattcatagactaaacgaagtagatttgcagtgtaataagcttataaacccaccagaacaagaatgtatattcccataaagaagtttaaaacaaagtaaggagcatcctttcctttacaactatcatgtcaaacaattactcactatttttattcccaatagcgttaagtcatctcaatttgaacaaatttgatatatactaataatgaacaatgttagaaagcctgaaatctgactcgactaaccttgttccaagaccaaaacaaggagggatcatttcaatgttcgagttccgaaagggtttcctccttgattttcgcttaaagaagaaataacacccctgatcgctgccacagcagaatcccccttcttgaaaacttccacaagctccccaaccttctccgacagagatataacgtttgagttagtggactggaccaacttgtttgcagtctccagaccagtgcacaactgggaaaccaaaaacaggagacaccattttgagaatgtcaaagaagacaataatgaatataaatttaggtcctaataaaaagcattcacggcctctaaacatttttaatcgaatagcatactgaggtttgcaaattcaatcatcaaatgataaacaaaagaaaatttaacattttgaatcggaaatgaactgaaccaatctacatgatatttgtagaaccaaaatttcttttatgattaaaaaatcacctttaaagttaggccggtccatgaatgatctgacccagcaagtgcgtcaatcagatccttgtaattttcctgaaacaagatattgttatattccactaacagtattcttgattaaaacaaacacaccacacataaagattttactaatgcaaatacgcaaatttagtcgaacacagaagctgagattaaaattggcaattgcaacaaccgaaaatatgtaacttaaatcaattgaattgaagcaatatagagagagatgtagatagaaaagcaataatggagtacgagacaaaattgaaacaatttatgaaacatgaaagaatcgatcgatagagaaaaaacctcgaagagtgtggtgagatcaacgggatgcggtgagatggaagaagaagggtaaggatggagatcgggtttggaagtgtcaggatttgattctccgacgtcgtttaggagatcgcctatgcaaagaagtggtcctccgacacctctcatcttatcgctctctcttctttctccccgttgcggcctaccctacagtgtctacactacacatctataagtgttttccataatatttttgtttttaaatattttaatcacaaaattaagagtaaattttttatttttaattttttttttcttttttttagaaaaccaaagtatattttattggctcaaaaatttagactaaagacttttaaactatacgcgcttgctatattgacaagaataaaatagttgctaattaattataaaatagaaatatcaaatttatagtagttcacttcttgtatcgcgacagctagtcactaattctcggtgatgttgcttattaacgcagattttcgttaacaaaaaaattaagcctttttcgtaataaattaaacacagtatatgtataggaaaattaataagtataaaaattataataacgccaagtattttacgtgtttttgcagttaaatctgcatactccacgagtctatcttattcaagatatttctgagtatttgatacaatattacaattagcgatttttttctctcaaagattttcagtccttttctctgtagaatctgcccctatttataagaatataggttggcagttatttacatttaaatttgaattacacaactatttcatgaaacgtgagctttgatcacgtttcatataaacacgtgtggataacaattgataaccgcacaaccgcttatcattcttatcttcaaggcggttgatgctaacgtgggtagtggcatctcgtcttggccatagatgattaatgatgacttggctaatcacatgccttccagtaatagtatgagcaccagtgtactgagcaaatttaagaactactctttgaccataaggcctcgcagactggacaatcatgtcccacatatttccaagtgaatacactttagttattataatgtggaaaatatgctaagtgtttaacatccgattcgtcttgccaatattctctaatgtatagcgagatagatgtctcgctatacattgtccgagtttgattcgaataactttacttataaacgaatcttattctcgggattgcgtattccgaagtaggttggtatctcatcaatacaaacattaatagtcttatatcattgtctcgcctaagactatacagtcggtaagttatgaatatactctattaattatatatttaatgagttattcctttttgcattaaatgatatagttgttattatatcaggtagttcgtccacttaattgacacgtgtcatactctgaagtgtagccaaattttgggtattacaattgccccttaaaaagttcttttttaatagaagtactttttaaatgattacaaatggtacatttctcttaacccaatttgaaaaattgcatgctttcgaattttggcggttcataatttcgaggcacatcattagccttaatgagccatcttttccaattctctctttttcctatctgttggatctctgttcttttaatctgacggtggtcaatctcgagttataaaactgaaaaggaaccattattccaccatttttgttttttcaaaaaatttcaagctttttcttacgaaaaaaccattctgattttgcaaagtttcgtatgccctccttgtcattgacgtattttctgcgcatccatttggatatactcttcaacctcaagaattcacagaagttgtcacgttactcatcccaacctcagtttcagagcttttcgtcgtgcgaaaacccattttcgaacagtatgtgattcatccccttttctctggtcttttccattttcctgggttatgatccttattctgttaaataatttcatctctgcttgatccatttggttttagtaattttaatttaattttttgggtaatttttagggtttagacagagtaaaaatttagttttaccgtatttataagtttctggtttaataaatttcttccaggaattgggattgctctttttgtagaaatgtcccaatctggttttaaagtttattctccagaatccttagaaatagagtgtcctaaggaatcggccctccaatttaaacccaaaacccagaaacctcaatccttacttgaagtaaatgatgcaaagattagggaccatttaataaaaaccaatcaggatgcagttgctagttgttataggcaatttctgcaagagatatctgagggtaaacgccgtttcttgtgagacgcagcttggcctgaacctctattttattttctattccactcacgaggccaatgtttttacctaaagtcactattgttttttcaccaggtgaccttgaatttgacattatgtctactaagcctcataagtcaatgatcccataggatcccaatatcactttcgatgctgaacttatcgaatccaaggtcagatgcatcagagcatttgttggtggtatattaaaatcatgtggtactgaacaaaggtgtggatgtcgcattaggtctgttgctcttggggaattcagctgtttccctcctgagagggtaattcgcgaggagtgtagtggagccagcactagtaactcgtcgggaataagtgcttggagcctcgaacatatcgatgctggagcagttcttcccttgagagattatttcaaagaattttgtaattaccttggagttgctccctttcaactaaatctaatttcttacagaattcttgcaagtctaaaggttctgtatcatattttaggatgggagtgccccaatcctcttgaaattgtatttttatgctgttaaagcagtctccgcgagaaagcgatgtgcagggagcttttactatctcggtatccacacaaatgatcgtaggatcatcgtgaggttaccaaacataccgagtttaaggaggatttcttctggaccactggctttctctaataaatacaatcgcattttgcatcatacgtaagtaattcttctcccaaaaacttagctttgagttgtattgatttatatctttgaggtcgcttacttatttcatttattgtgttgacatcagtttccaagagaccagatccaactcctaaaatggccgagcatcataaaatcctgctaaaccttccattcggattgcgatcgactaacttcttatgtaatgagaagaatttggggaaggttggcctccttggctcggacgagtttacttgtgactataaagttcccaagtattcttcgtggcaaaaagtctctgttccagccgatgaagagagtgaagattatgtggcttgtatacattatctccaaaaagtaactcctcgggaagctgaagagggagcatcccgaggtaatcaatatagatggtcacctactgtgcttagggcagagcgtaacacgctagtgtctttccaagatagtcgatataatttttacacttggaaccccttcctcatagatcgcataacacataggttcgatagttggtaccctaggtttcacgttcagcttaactgcactagttcatactacggaattaccgagcaatatgggaccatcctt

SEQ ID NO: 234 - DNA, 2826 bp, Cannabis sativa
attacatgtttggttaagaattactgtttatagttaaacttttatgtaacctgcaaactaatgcttttcaagttcactccacacttctttccaagaaaaaaaagttaatctaaagtttttgtgtggactatttgtcatcacatggattgtttggtattcctgtactctggaattctgtagttggtttcagtatgatatctcgagcttgcttatgtaagtaggtctaggtttttggttttgaatgctgcactctggactagagaaaattccatgttctaagcacatccaccacttatattgaagtactttcaatttgaataactgataagaaaaaccaaattgcatttttggaaatggatgttaatttaaagttaatatctataattccattgagatatttattttttaatgatgctcttagtacttatctgctgcattaaattcttgaacagcttggagttttctcatctcaggtgttccaagattctccacgggataaaatgtggaggaagaaacattgtaatttctgcacttcactttgaattgaacttcacattgtttttgttgttgtgctgactattattttctcatactgcagcaccaatttatgaaatggagaaacattgcaacatcgaaattgcagcccagatttcacgagtcccatccgcccaaaatggtactttagttctccaagtgtataaaagaaaatttatatttacaattactatctccttaagattatttcccatttcttaaggctggtatataatttagggtatctccagaaccttaagttgcagttccagtttctttttaaaagttacatagaatctttctgatgtatttttaattgttgtcgttttaaaatttctttgttttactaagctgttttgttatcataaattagatggggatcgtgatcggtttcatatagaaggattgatggagagtcctgcagtggatgatgatggggactgcttctcacccttattgttgaatgcgtcttctgtcaacattgaggtctactataataaggcagtgaattataccttgatggtcacttttgtatcctttacacatcattagcggagagcttttgtttttgttttccctttcattgattgttgatcatagatttatgcatattaggtgccttccttaacaattttatcaggtttcatttcttcaagttctgctgttgattcggcaaatggaacatagcaacactcaatctgtaagaaatgactccaacccgttcttctataagaacaatcaatccagcaataaatcatatcatctttcacgtcattcttatgaggacactacttgtctacttagtagttttatgagtaatgatttggtttctgatgcatttttatatcaatgtttcccttcagggagctgccaaagtttcaattctaatgattggccaacaggctatcatggatgcttatctttgcttgatacatctaacagcaggaatacttgttggtaagatagtaaattcttacaaccagctcattttcagtttcttgattcatatgcctgtatgaaattatttatgaaaggacatttttatttgttcaaagtactgggtctctgttcaattcatgggatagctaggaaataatgtgtcaaaaactttcacataatcagcatcttttagacactagaattttacatacaattacaaatgaccagctctataattatagatcctatgtaataattcatcttcagtagctttgtggaatatgacctttcaactaagttctctttaatcactttaaattgcactgccccagccttcgattggagaaatttgtctaagaatgctaatggcggtcttggccctgaatcagaaggtagcagatttgtgtatatacttccaatacttctgtccctatgagacttttagggcaagaataagaatgcacattttcaatattctgatagttgtcgtggtgtgaactgacaagaaggcatcgatgcatgtttttgttggaagaaagaaagtatgaaatggacctctatggaaatctcccattcatcagaaagaatgaaatgccacctctattacttattcccatttgtcataaataaagaccaaagttcagattgaatgatttaaatatcatccatattttggactctgtagtgggtatgaaactgactgcatttggacggacagcccatttcaatatctgatagttttggggtttgaaaaagatttattttagggtgatgtggtagtcttatattttcatgtttgtcaagcaggataacgctgctacaaattagattattagtgtaccattgttttatcttcacttacatacttatatcatcattttcttatcaatacatttgattaatataattatttaattttcgtccccgctaaaacaaaatattggacttgccaccgactgcagtttgatatagcacaggagtgcatgtcatgttgtgttcatatagtaactattttggctttgtaattatctctgtcagactccactaactgcaagttcttcgattttatcttttttcagagtccttgttcaatgcctttgcaacggctgcttttttcaagtttgtagtcttctcaatttttgagatgagatatctccttgctatatggaaggcaaataggcccatgaataatggagaaggttgggagacaatgaggcgtgagctttcagttctatatagccgattttgtaagtactacttgtacattttcttgttgcttttatgctgctgcaccaggttgtaggttctattgattataattattgtaagtgtttaacacttgaatgcatagag

SEQ ID NO: 235 - DNA, 2160 bp, Cannabis sativa
acaactcctttatgatggcttgaccaaagccatcaacaatctggtcttgtgctggcttatacttcattgtattgagattcacaccaacttggaatgttggaaccgtatatcctcttctatcttaagagtctcattaccttatcatatatggcttaccaactctgtttgatatgatttgtgattttttttttgaaaataaatgctagtttattcgtaatgcaccttcagtacaatatataatgtgtgattatgtatcatgatgtcatgattaaactttatatcttttaatagttttgaagtaggcattttcaagattttgcactgcatttttgcgttttggtacatagaattttgtaattttgtttacatgagttgccatagttagagaataatatttgttttcattgttttctataaaatataacttttgaatttatagatacagttgtggactaatgatgtagaggtacatgatatcttgaaactaatgtaatatgggtgaaacactttaaatatgcaactattgtattttgattgtgcatttacattgtttgtgattgtacatgatagtttactttttataaattccttacttgttataaatttgaatatgtatcagaacaattaatgcataagaatcgcttgcaagagttcacacataagtcatacataccgttacctgtgtatcaaactgtcaatgaaggttatcaacatatgccaaagttcagatcaactgtaatagtaaatggagtaagttacacttcttcagatactttttctactcgaaaagctgctgaacaaaatgttgctgaacttgccttaaagtctatagctaaagaaacaattgtaaatggacttgtaacaaaagaaatggtggatgaaggacttcctcttatacatgaggttcgtttattttttaaattctattttcgtttaggattattttcttgatggtaaaagaatgtaattattatttttttaaaccaatatcttgacaagttaaccccacaaatatttcggctacccataaattacctttctctaaacttctttaagtcttcactataagaaaatgatcataagcttaataaagaaaaactgtgcatgtactcccacttagcaaacatacacattaaagtttaacaaataagctcacttcaaagaacaaattcttgctaaagtaaaactagaagtaagttgatgttatggggtattgttcgagctatataaaatattaatactattaagatttaatagcaatgttcatggagtaccttgattcaaaaacttcgtaaagttatttttgttggacagaaattgacaattaaccaccaaaattttaacttaggagagagacaattcaagttaatttcggtagagttgataaatattttataatttttcattgtttatttttatccaactttttgtattattagctttatttgcattaaatgttttgattaaatttgaatggtctagggattggagacattttatatcatatatattttcaatagatatttaataatttcttttgttgttgtactattgttgtttggagatgaaagattgtgtgaagagtgattaataagtgaacgtatgaattaatttttctttacttgttgcaattgaaattgaactgcaacaacttttttatttttaataaagataataaatgtttgtgtggttcttgatgttgttcactattcaaatgataactatattaattgttctaagttactctttcaggacaccgtgttttgcaagtctattttgaatgaatgtgccaccaagatgaatatgaagatgcccacttataacaccattaagcctgaagggttgcttccagtttttatatctactctggttttcaatgatgtttcctatactggtagtgttggaaaaaacaagaaagaggctgaacaattggctgctcgtgctgctattttgtcacttttgggtattgtcactaatactatatataatttataattgttgttttaaaaatagtatgcatatgatggtattgtagtgctatgttttcacaagtgctcttgttgaattttgaagatgttgaaggtgattctggaatgaggaaggttctttacgacatcattaaatctaaagtcaaactatatgctgcattgaataaagttg

SEQ ID NO: 236 - DNA, 4095 bp, Cannabis sativa
ctaaaagtaatcaagagaatgtaaaaaagacaagtgaagaaatagaaaatggaggtatagatactactagtaaatgtaatcatattttacttttcaattgagaaattaattagtattcgacttagaagaatatggcttttattttttctactatctactctacttattagacttaacaaaatttacgcatgtatgactaagactctgctgctagtaacatttacatctgatgtttgattagtaaagggtgtcattttaaacatctatccttcctttacttgtgactgtgaccaagatatggagtatctggagctctgtatctttgatcaaattgcaagaacgaagctgaatgtgaatgttggatatcaagatccatatgctacagtgaaaacaaaataaacaaattataattcgaacatagggtttcaaaagtaaaaatagaaaataatttgcaagtcagttctcatttttcgacttcctacttttgattacctgcctcagctgcgtagtgtttgatacagattctggatacgtattatggattagtggttcctgcatgaagaatatgaaagtcacatataacaaccttacttcaaaattcaattttttttttatgctcgaaatagggttcaacaaacagctagctcacctgtaataattgggattggctaggtgaatcctgttggttagcataaaagtttggtggttggtacaaattactattggtttgcaggtcaataacatgatttggctgttcatacatgctcttaaccacctgatttgcttcaaaattgtataaaccctgcatgttcatatggaagataggatacataaaatttataaccaaatatggaagtaacagtcctagcaaattagtacctgcataatgtgatttcctgttgtggctgaaggtgaaacataaacagccagggagttagaaatacagctaatagtactttgaggaagcacttctacattcgaaattccttctgtagcagagcttttttcatttaaaatagttagttgatctctatccaatactgctctctccccgtggtttgctttattgttatccttatcgtcaattgcatttccatctatgaaaacctgtgattgttcattttcagaggcatttgcgcccatgcaacttgaagttactccttgagcttcttcaggttttaatctcaatattttctcaaccccttctatcacttcatcaagatgtctatatgcgtatacatatgcttcttcagattcagaagccctagcagacaaggttagaattttgtggcacaaatccttgtaacggtttgctacaatagttttaggattatcatgggtgggggggagttccttgcactctttcatgctccctaaccttgcatcttttgtccacctcttcaatatatatgtggagggaactacttttatatttctgtggtcaagaactttcaatgcatgactacagaggaatccaacacattcaaactttctacaattgcatatcaccgtatcatcctcagagttaaacgtaacgttgtattctcgactttgcccgaatttcttagttttgtactcaaatgatggtccattctcactccactggttaacaacaacatttaaacacttctcatatccttgctgaaaaacttcaaatgcccttggggtgtaaacatcacttgcatgcttcaggataaccacattccccataagttttggcatacatctatccatttcatcactagcttctgtttctttgtaccgttgctcatctaccaccctctcgaagtgcttaaaaaattgaagcacatcaagactagaatttaggtagtctctcaaattattaaataaactttcaccaagatgtgagccctttgtgtcaataaaaaatgaatttttgcaatataccacagcccatttttcttgttctctaaacatccactttagccactcattttgttgaagactatacttttccaacatggtctcccacgtatgaacgaagtcctcttcatccttcgaatcataaatacagctctttaaatcattagcaaatgattgagcatcttttacagcacgactcaggtttttgacagcattctcatacatttgccacacacaaacacaatggttcgtttctggcaagactgactggattgcctcgataattgccgcatcctgatcagtgtgtatggtctttggagtctttccagacataatctctagaaaagttcgaagaaaccatttataagattccacagtgtcatcatataaaagcgcagcagcaaagattaccacttgtttgtgatgattcactcctataaactgtacaaatggaaaatggtctgcctttgttctgcaaactgtgtcgaaacaaacaacatcaccaaagtggtcataatctgataccatattatcatcagcccagaaaatattactcaatttatcatcaatatcaagctgtaacgcatacaagaatgatggattttcaaaatgttgcctttgaaaataatgcatcaagcgtgctgcatctccctctttcatatctcgtgttctttccgttctgagataattatcaaaattgaaagaaaaatcatctagagaatctcggactctaaactgcctactcatagaaacagatgcttcttttgactgtggtctaaaatcttctatcaaatcagctgcagtatattgatctacacttaattctctttgcagtggaaatgtttggacattacacggactgacattatcatgattgtgttgagcttcgaaatgtgtgacacggtatttaccatcaggttgacgagtaataatcatatgtgccaagcaaccagttcttgtttccttccgatgtttcctcacatttacatctcttctgtctttccgacgataaccctccttagaacaggtgaacttcctagataccacctgaccatgtaccttactcctatttacccagtcttttctaacactaaacccaaccaacctagcatatttgttgtagaatttgtaggcatgttcatcagaatcgaactctgtgccaatttgcaatattgaatctacaccaacttcatcttttgaggaaaaagtggagtgagtactgcaactagcatgtgccactttttgactgcgattgtcctgctccacattcaagtccaaatcatttgatgttttaagttggatatccatgttttctagatgaagagtaccaaaattgtcattatcactgtccattgaccttcagtttaaacaacttacattgttataacagcacagttttaaaagagagaaagtatgcaacacattgggtctataaggacaaatgcataagagtttatagtttgtaaagtaaaaagtatagcaatcacaataaatagtactacaattcttgtatgtctgtaaagtctatttgcatataaccattagcaggaaaaggagatcaaagtgaaaacaatatggaaaaaaagttatttctctgttagtactcaatagtatatgcagcaaaaacattataactgtcaaagaccactcactttacgatgagaaataagtaattcatgccttacaagccaagaaatgaaagctttgtgttttcttattcaatatttcttcttcctactttaatatgtaatatgaagaaaaatatactattgcccataggatgagcaaaaaaatttccaatgggactatctttcagatattttcgttcaccaattttcatgatatccaaccatttgtattcctataattaaacatccaaaatttgcaaaacttacatctcgaacatcaattttgagaaaaaaaaaaacgaattttccttattataaccatactaattctataaatattatcttagttcacaagctttaaagtttaaacctctactttctcaatccttccttaattggtggaagacatactttattgattagagctataactataacagttcattgtgaaacaaatttcaagaaggaatgagcaaaaggaaaagaaaattcctctaaagaaaaaagaagctctgagattgggcttagtattcatacttaaagccatgaccagtttcgaaccaaaaattaagacacaacctca

SEQ ID NO: 237 - DNA, 2999 bp, Cannabis sativa
  modified_base (1199)..(1204): a, c, t, g, unknown or other
agtgttaccaaacgacacctaaagtagtagtaactagttactactatttcttttttcactttattagtgggatgaccataacggttaccacctcatcaattttgaaaatattaattcaatactgataacttgttattttaaatattaatatggtagtttttgtgtcaaaaaaaaaaaaagaaaaaattaatatgataggaaatacaattttgaaaaacatcccataaatatataaaatatatataaaaataacaaatctcatacttataaaaattaaggggaaaaaaactatattcaatgtagttttctcaaattggtattataattgatattaaaatgtcttgggaccaatcaagtattttacatacagagcactttatcagtgtctctattttattttttaaaatactttgctaaatttttattttttattattttactttacacatttatactacaatactacaccatacatgagttactctatttttcctctacataatttaaatatttattttttaatatttaatttattttatgtatttattaatataaagaatgtgaaataattaaaaaaaaataacaaataataataataataaaattttagctaagaggtcaattttagttaaatgtaaagatacactatttatgaactaaaatattaatgtattatagttcatttaagtgtcattttaaaagttttgagctatttagcttgtagctatatatgtatctattatattaagagtgctctaattattctcctttttatattgaaaattctcacttttttgtttttataagcaacaacttgtggcaactattttttgttataaacttgttttgggctcataagaggctttgagtattcttgaaaagtcaaaccatatttttggtatacatataatatatatattaagaaaaaaaacaaaaaggtcagttgaatgtttttaaagctaaatattggatcattgtctacacaccaaaagtcaacaccaagttaggtaaagcacatctagattctatacatgaccccttttttggggggagatccaacaaaatttggccatttactcaagtaatcaaagcttcataaatcatcatcttcctagattgagacttcctgcctttcacaaacaataatggtttcctttaatgcaggccaaaatggtatttttcttttctttctttttttnnnnnnaaaaaaaaaaataataattatagaacaatgtaaactaatatttagagcatcccaacagttcctttattttatctttaaaatatatcataaaaattttaatttttttattttacaatacacttttatattactatttagtgcatctgtttttagtacacatttgtaaaaattttaaaatttctctaagaagctattgtgactgctcttagatctcattggaggaaaatacatgtgtgctcctttcttcatgctcatacttaattgtttaattacattaatgtccccaatcctcttttgtttttcctctaacactctttcattactttaattctttccaaccttagcagcaaaaatttattgtttccaaataaacctttgctttaaattaatataaatattccaaataattatttaacaaataaaattgtaaaatataattcttcacacagtttcattaagtaataaatataaaataaattataaatgttaacgtttattatttttttatttagaaatggtgtgaaaagattttttttttcttttaattttcaaaattctatgaatgtaattagaaaggaggtaagagaggaaaacaaagagtgccaatgccaaggcacccaataaattattcttggctcacacttgtttgcatggctatttaaacaaattaacccttatattaagcgtaatatagtcctaattaccttgtcatgtgaagtttgtttcaaactcaccttacagtttagtaagataaatatttccctccataatacaagtaagaggactcaagcaaacaaaatcacgaaataagtaagttcattagcaattatatattattcttaattttcttttacattactttacttcacatatttatataaaaatatgagtgtgttttttatgatattgtatggtagtatcatgaaaatttaagtttttatgtttaatttttctaattaattaattttttttttatttttacattatataaacttgagttgttctattagctgaaaaatttaaaaaaaaaatatttcggtaaaaagaaaagaaaaagttgaatttaacttaaatattttgtatataaatatagtgcaaaaagatgtatttttttaattaagtagctaaattaagcgtgaaaatttaaatttctcttttattattcgctattggatcaaaatttagtgatataatatttttaaaattaatatttgtagttaaatttatttagtaaccatcaatcaatgagtaatatccattgagaagtgtttcatatatttttatatataaaatgtgtctatgtaacgaaattgttagtttaacgatttttttgacatttctttttttttttttaaaaaaaaaactaacgaagggttaaagtttgatgttagcatccaaaaaaaataaaataaaattgataaaataaattcttcatggtgatattctccttccttgcgatttaggggtttaattttttttttcaatttttggaaaaaagagaaaaaaaacttccatgaatcttcagattaacaaattaagtttcaattgccacattctataccgtcgatttcaaatgaaggatttgatttccaattgccacattcaaaatctcactattggctagttttagatgctatgcctacgattcagagtaacaatttggtttctaactgctacaattgttgaaaatcaaatccacaaattgatcaagatataactcatgggtcgattaagatagttctcctccactctcccattctctccctttctttctctagtctctctctctctctct

SEQ ID NO: 238 - DNA, 3716 bp, Cannabis sativa
ctctctctctctctcttttttccagttctgtgttttgtgttgtttattgacattttacgtttttattattattttcttacaattttttaatacctcaaatatttatttttttggagtttttatgtcacctgacatgacatgtgaaatgatggtataaattttggaaatgtgatttagaagtaatatatttattaatctcaacttcaatgatggtttgttacaaattttgttttgctcttttggtaggttctttctggtagaaatcagaataaggctttacatatttatattagtatatgatttcaggtttcttgtttgtttgatttgcttaaaaaaattaccatatatatttaattaggatcgggtatgcaaatgactatggcgatttgttacacttaatattttcaagttgaataaagttgtggttaggtttcaactttttctataattattttcaagccgtggacattaatatggtataatcttgcgactacattcttatatcatttgttatttttgcagccattacaacaacagctactaagaaaacctgagggcaatgaatccctgctagcataccaagctggcaatctccaaggagctttgggagtaggcaatttttcacctcatggtgcaatgccgctgtctcaacagtcgaggaaattcttcgaattggctcagcaacagggttcttcccaagaaggtcacaataggagccaagggcccgaccaacaagtaatgaatcccgtccatcaagcttatcttcagtatgcttttcaggcagcgcaacagaaatctgctttggcaatgcagtcacaacagcaagctaaaatgggaatgttaggccctccatctggaaaggatcaggacacacgaattggaaatatgaaaatgcaagaacttatgtctattcaggctggtaatcaggcacaagcatcttcatccaagtccgagcattttggtcgtggagaaaaacagatggagcaaggacagccaccagcctctgaccagaggagtgaacctaagccattgtcgaaacctgccagtatgggccaattaatgcatggaaatgtcgttaggcccatgcaggggccgcagtctcagcaaaatgtacaaaacatggcaaacaaccagctagcaatggctgctcagctgcaagcagtgcaggcatgggctgttgaacataacattgatctttcagtgcctggaaatgtcaatttggttgcacagctcattccacttgtgcagtctaggttggctggacagcagaaagcaaatgaaagcaatatgggagcacaatcatcacctgttccagtgtcaaagcagcaggttacttctccgcaagttgctagtgagaattctcctcatgctaattcatccagtgatgcttctgggcagtctggctcagcaaaagcaaagcaggcagtatcatctggaccttttggctcttcttcaaatgctggtagtgttaataatagtaacaacattccaatgcagcagtttcctgttcatggtagagagaatcaagtggcatttagacagcctgctgtaactggtaatggaattcctatgcaatcacaaggaaacattaaccaaggtgttgatcaatcccttcatgctaaaaatccattaagtagcccagaaagtatgcaaatgcaatatagtaggccagtgaatcgatcctctcctcaagcttctgtttctatgaatgagagagcttctggaactccagtccaagcacaaggtggaccatctactcacgcgtcacaacaacgacctggtccttctgggttcaccaaacagcaactgcacgttctcaaagcacaaatactggcatttcggcgattgaaggtttccaaatctttcttttgcacccttcttgttgcacgtcctttctgccagttatttaatgttcatgtatacctgctgctgtcttgcatttattttttaatatatttattattttacagaaaggagaaggtacactcccccaagagcttcttagagctattgctccacctccacttgacttgcagcagcagccacagcagcaaaataatgcggtaggagtaagcgtgcaggataaatctgctgggaaggttgtagcagaccgtgtaagacatatggagtccggtgaaaaggatacgcaggcagctgcagctatgaatgggcagactgttttaaaggaggaacctttcacaagagatgagaaatcaaatgcagcagcagttcatgcacaaggtacgtcagctatggttaaggaacctcccgtacctgtggtttcttcgggaaaagaagagcagcaacctactgtcttctctgctaagtcagaccacgaagttgaacgtggtacctcaaaagctcttgttagaagtgattcagtggatagaggaaaggcggttgcagctcatgttcctgtatctgatgcaatgcaagctaaaaagcccacacaagcaagcactgctccccaaccaaaagatgttggttctgctagaaagtaccatggaccactatttgatttcccttttttcactaggaaacatgactcgttgggtccaggtacaatgaatagcaacaataataacaatctaacacttgcatatgatgtgaaagatcttctttttgaggaaggtgtggaagtgcttaacaagaagagaacagaaaatataaagaaaattggtggtttacttgctgttaatttggagaggaaaaggattagaccagaccttgttctgcggttgcaaattgaagagaagaagcttcgacttttagatatacaggcacgtttgagagacgaaatcgatcagcagcagcaagagataatggctatgcctgataggccttatcggaagtttgtcagactttgtgagcgtcaacgcatggagcttgctagacaagtacaagcctctcaaaaagcccttagagataaacaacttaaatccatctttctttggcgtaagaaacttcttgaggctcactgggctattcgtgatgcacggactgctcggaacaggggggttgccaaatatcatgaaaagatgttgagggagttctcaaaaaggaaggatgatgatcgaaacaaaaggatggaagcattgaagaataatgatgttgaaaggtatagggagatgttgcttgagcaacagaccagcattgacggtgatgctgcagagagatatgcagttctttcatcatttttgactcagacagaagattaccttcataaactgggaagtaaaataacagctgccaagaatcaacaagaagtggaggaggcggctaatgctgctgcagctgctgcacgacatcaggcatgcttttttttgtttctttttatttgtcctccttactttgggcagtcttttttttaccatttcccttgttatgcgtctgtttggcttgtctttgcatcaatattccttttcttttgctattcccttgccatgggctctttttttattgttaatatattttatgttgttgacaataatagggtctctcggaagaagaagttagagcagcagcagcatgtgctggggaggaagtattgataagaaatcgttttatggaaatgaatgcacctaaggatagctcctccgttagcaagtgagatggtttttttgtttttgtttttttttgaaagaagcgtctttttatatatacattgtttgagtaaacatacctgggatttgatagacgacccccccccccccccc

SEQ ID NO: 239 - DNA, 2265 bp, Cannabis sativa
acctttcaaacaacaatctatcagtagaattcccaatacaacaccaacactttattgtgttggtcattactcaatactcactatataaaactaaataaaataaatttggttttatcagaaaaagaaaatctgatatttcataacattttttatttggagcacacacaatatcacagacaaaaacaacacaagtccactgatctataccatggtgtttgagtacttagtctttacttcgtcagtgtaaaagtattctctcttattattaaagacttcctatcctcaatttaaatataattgattattattctatcacaatttcatctggggttcttggtttcattatctctaatacacattcacagttgtaattgtcctaacaaaccttatgtctactagtccattaaagctaaaatattccagagaagtttcaaaaactaattatagtacttaatcttcatgaacaaaacgaaaaaagaacaaactttgagaacataaatggatatcccatataacatagcatatatatatttttgttttgttttcaatttcattttcattttgaggtaattaaactaataaacaaaaggaataaacttgtacctaactttacttgcatactcaacatagttgtccccaaaagtctcaaccatcaaagcctcttcaagctttgccctctgctcatagtaccacaagcaaacagctactacagaaagtgaagccaaaggagcttgaagagcaatacagtaaccagcaaagagaagcattgttgaagcatatatgggatgacgaacccatctatatggcccaaactgtaccacagcagttggcaccacaaccttttctgagtactttgcaaggtacaaggtggagttatactgcattaacaatgtcaccaatatcataacccaaatgcccacattccttatcaccccaccactaatgaggtgaagctcaggtccttcgaatgctgccagccaatgggagagcatgactccaatgcagaacagaaggcgacgccacctgggtggtttcacatcccacttagggtcgtgtgaccgaaggtagtaatcaccataaagccgtttccttacactcacattgaagaagaagaagtagtgataaacgaagaagaagacaaaaggccaaccttcaaggaagccattgaaatgggcaggtgggacaagggtgagccaagtgaaagttgaggtaacaatggcaagttgctcgaatatgtttgcctcaccacacacatacttgcggaagcaatataacccgtaaacggccaaagcgccggccataatccatggccaaaacatccaagtccagctgaagtacatccagaaaaaggggttgagaagaccattcgttgcccattttgtggctgcgatcgttacggataagatagtagagagcttgataatatcgtaaggggtcaactgcaaaagggtgtttttcaatgaatcgaaagacaagtttttcagggtactcaattgtgggttttgggaaaaagaagaattgattttgacacaactaagaaaatgggtatttcctcttttagaggatgtagagagttggttcgggaaaaaaggaaactttgtctgcgttgtgaggggtttatgggtcagatgggaatggcgaatggggtagatagagtggcattgtaggtgtttgttagtatgtctaagagaaattttacccccaactgtcaacccaaaggaaaagggtgacactttcgagtgtataagcaggttcgactgtaaatccatggccgtcaatataacatagcacggtgactcagtgagtcagggtgtgcgtgactcgctcgggcagtaaactctgttaagagtaagagagagaagaggtcactttgatctttccattattttgtggactggtgtagtgtgccctattgctgaagtcctacattcttttatttttaaaaataccatttttattgggtgcttacaaaaatattaatatcttaattttatattttcactgtattaaatagcatacaattttgggagtgcaaaaattaaaagcagaaggcggctctgaagactttcaatattatttttttcacgagttcttttttttactttatttttcatattcttaattagttgttataaattgtttacaatgagtatgagtagcttgatagttattagggtattaatagatattgtttgatatttatttatggttttaatatgatttgattctttctcaatttaaaattttttatgtattctattttat

SEQ ID NO: 240 - DNA, 2343 bp, Cannabis sativa
aacaggcctcccaggaagtgaaatgttgatgatgcgttttgcatcttcatgtggaaacattgaaatggtgactctaaccacaaagcaaacattgatcatttcagataactctaaaatgagccaatctatctttagtatacgtaacctttgcaaacaggcaagccaagtgacaaattggtgctttgaacagctgcataattttattttattttttttgagtaaatgcattattatttctttgttatcacttcaaaattggtgattaatttaccaaaaaaaaatccatgttaaaattaaaattataatttgttgtaattaaatgtattttaagtcgcaaaaatcaaattaataataatttgtaattaaatattaatttttagttacaagtaaattcttatggtgcataaaagagtaatgtcgtactaaaaaaatattattactcatttaaggttagcttaagtaaccatagaaaatattgggagtgtatgagtgaggatcatgggattgaaacctaagtttgtaactcaaaaatatcaacaaaaaaaaaaattactaaatggtatgttttcttgtagaggatattaattatatattcaagttactcaatttattagagtatataagagtattcacatattattagaaattggtgttgaaatcttcctattcttttgaataataatgatatgggtttattataaaatggtcctgtgttaattttttaaaaattaatatcataatataccttgatgagtttcagaaattttggaaagaccctcatgtttataaaatggttttaaacggacaatacctcataaacaagcattaggggcagcggtgtttaaccctaatatgtgcaacaacacatgtacatacgatgtggctagctagggcttgcaacatttggagattttgtttaatttaattttagtttttagtaaatatatagtttaagttgttcaaaatgtttttatttcaggtttatgaaataattttgttttttgtttttttgttctttttcatatatgtagagtatatttttgatcttatttaaaataagtttgactaaaatcaagccaaaatgacttcattttagaatttagtctgtagtgtttctcaagttagaattcatttgaccctattttattattattaactcatcaattataaggatttaattaatatataattaaatttaatgaagaggaggtggaagtgcaaaatttatcatgaaactcatcaacttcaaatcaaataatgatgccccacacggttgtcatttatttaacactgatgtaatgtttaaccctgagcctaatatctgtgtgtggtgtgggacagaacagaagaaacacttggatgggatgttggcaatctcacatatatattatataattttatttatttgatcacaaatgtgtcgacaaatcattttcatcattaccattacctcggccatctgcaaccactccattaaaattgatcaccaaactatcatatttctaattcaatacatgtcaattcccatgttaattaattcaattatatattaaatttccattttgtttaatttctttctctacctttttttattataaatgtttatatattattatggatgagtggatgactgtgcagctttctttttttgcattattgatcaagtatggttggcctattagtttcttcatcaaaatatgggagcttttaacgtgctgtattttctttcaaaactcagtagtaaaggactcttttttggtttgtattctgttacttatgaaagatatagataccatacacttctctatgaagggctgtcagttatgataatgatacactcttgtcttgtttcattttaaatgaaaatctttttgtttaatttattttttataattctccatgttgtagctatgtaagattatttgtaaattttttaaaaattctgaataattagagcaccaaaaataaagttcaaacagttacttatgtataaaaaaaaatcacacctacaacaaaaatatttaaatcttattttctacaatataaactatacagaattttcttaaaatttacatttagttctaaattattatatatgacgtaaatgatagaaaaacaaaacaaaacattattgaatgccagaacagataaatcgtgtaccaaaataccaattctaaagtgtgtactataatttttcaaaagtgtattacattaattaagtgtgatggaaaacaaaaacgcactttttcttttgggtgtgtgacattatgaattaatgaagaaaaaaaatctgattgattatttttaattttaatagtttaggattaattaaaacaaaattaa

SEQ ID NO: 241 - DNA, 3419 bp, Cannabis sativa
aaaaataaaaacttttgggagctaaaatgtaattaataaaagaggccaaatgccctaaaaactatgtttgaatatatttatttgtttttgttttgttattttcttgctcattctttgtgaaaggacaagtaggtcagatttacattaaacaataagatccaaagtggggtcttcttaaataaaccttttttcgaaaagcattattcaaaactgaccgttttttcatgtctcacaatgattatgatataccaatactttgactatacatagatacaattgaataaggtataatattattataattattattattattgagcaccagtaatatttagtactttttataggtgacgttttacgattggttaacaatatttcttaaaaactattttttaaaattatatgagattcgatacttaattacactaataacaatatgataccgaagaggatactaagcaccagtaaaatatactaaaaggcactagtagtgtctatcactcttttatgtgtcaatatcactattagttcaagtaaatattgggtcttttataattcaatataataacttgtaaagaatatcgctagctaatcgcacgacgacatatttaaaaatactaaacactaaaaatacctaataatacattttaacaattctcttcttattattgtccaaatacatgtaatgctgttgcatgtgacattattacatatttaaaagtgttttaagtaatcaaaatctaataaaataagaacattgggttgggtcccataaagcactgaattccacatttggtcacttttaggttgtactttctcattggaacatgttcaaatagttatttcaattaaattttgagtcagttccaaatgggttattggataataatctaaattaatctttttaatattaaaataaaatgtatgttatgcaatggaatctaaacggcaataaaatgagtgaataatataaagctttgaaaatagagaccaaatactcatgaagagttgtgtgtggtgtgtgaatttggacaattttcaaaaatgacaaaataaatgttaaaaaaataaaagggcccatgtgacaatatagaatctcatgtcaaatagccgttacaaaaatcatgaccaaaaccaattccttccttcataacaaaggtaataatatggtaaagatatacacatattttttttcttaattatttaataacttcaactaaataaaaaaaaaagtataaattaacactcgattaattaataatttcaataaaaaatactttaatttaatctcgacgatattaatttaaaaaatttctatagtaaagttctaaagggacgatttagtaaaccttccctatttgtttcaggattataaaaaaaaattattcttattttttttttcatgatcgtgtacgttatagtcgattatttataaatttttaaaaaattctaaatagtttatagtgccaaaaattagctttaaacaattacttacaaaatgtaaaaaaataataattacatgtgtaacaaaatatgtaaatcttattttcagcattataaaatatttaagtttttttgaaaaatttataaataattctaaataactataacgtacactgtaacaaaaaaaaattaactacaaaactcatttggggtatccattaatttataaagatttgtttaagaaagtgaagtttgaagataagggtcttttaaaattttaatatgaacaaagtagtccccttctttctttgaccaattaaattaaactttcccttatttgaaatcttcaacttattttctaacaaaataaccaaccattccaatacatggtaaagaataaagatacatatttatttatgataacatagccaaattgtattacacatctatctcccgtggaggttttaaatttgaattcatatccccaaaatcaaaagatacaatattctttctctatcataccttgaaaaaaggatctttacacattttgaatgacttaatgggaattataaagaagagttcattgtgtttttggcctcaaagaataaggaacaaaaaacatacaacaaaaaagggttagaaagaaactaactccctatcagatctaaatatacaggtagagtagagaatagattcacgaatagaataaggaagggagaatttgcctggattgatattcggaaaacgaagctcggtgtgaaaaaaatggtgggaaccgagtgaagctagctgctcaagaacactccatttcacaaaatcttctcttagaatctgtcatgtaaaagattgaagcaaatgtcagattacatgttgaatttagagattgttatgtctctaatgaaaaaacttaatagtgaaatgaatttagtgttaagaaataaggactagggctagggctgaacatgaaatctaaaaaatcgaaaaaaccgttcaaaccgacctaccgaatactgttggaaatgagatacgaaaccgaaaatcgaaaaaactaccattgaacggtcagttttttttttttttggtaataaaccgaaaccaactgttatacatatacaattagtttttgaacaattaatttgtatagttacaattgtagaatgtaaaataatgtgcttatagaataaattggatcatattttacagaaaaaaaaaaattggttttaccaaactgatgttcaaaacagtcggttttaagataagttctgaattggttggtcggttttcagattgcaccaatccagaccaaaaaccgaattctaaatttttatataaaaaaaaaccgaccaaactgactgatgctcaagtctttattaagcacaattctccattgcatacctgtctcaatgcaaaaaattcttcaggctagttggttgaagagaatataatcactagagatgatcagtatggtctgattcaagccccagctatgttaatctgaaactttcgacgcagaagagctgcaaaaagagaatcttgttaatgtcatttgctccaatcaagaggaaataaaagtatataatctgtgttcattaccttctgctatgctgcaaaagctatctggtgggaatatggtctctgggtctattccatcttgtgaagaaacaaggagagccacactagatttactgttccaaaacaattgaatttcttaagtcaattataaacaggacaggattaatggttgataagggttggaaagcatcataccgagcccatgaaggaacgaattttttattcggtgagtcgtcgtcttcttcttcatcttcatcatctgaacatttgtatggagaaatatcatatgactgttctacattgtcagctcctgtgggtttgtctaaattgttcatctagaaaagggcagagtgtcagttactgttgagaggtagttatgaataatttcacagccaaaagggaat

SEQ ID NO: 242 - DNA, 4055 bp, Cannabis sativa
acttcttctttggttagtgattttcatgtgttgttaaatctcaaagaaggattcgaattcgccaacccgattttaaactcatggaacccttctttaaagccaagctcaatttgttcctcttgggttggaattacatgttctaaacaaggaagagtagtttcacttgacttaactgatttaagtctaagtggtactatttcacctcaaatttcaaaacttgaccaactcactcacttatctctagctggtaacaacttctcaaacagcattgatgagataacaagtttgactaaactcaaattcttaaacatctcaaataaccagtttagtggaagcttatcacattggaactactcaacaatctcagacttggaagtttttgatgcttacaacaacaacttcactggtgttcttccaattgggattcttagtttgaagaagaaactcaagtacttggattttgcagggaattatttctttggcaaaatcccaacatgttatggtgagttagttgagttggagtacttgtcattagctggtaatgatcttaatggtaaaatcccaagtgagttgggtaacttaactaacttgaaagagatttacttgggttattacaatgtttttgaaggtggaattccaagtgagtttggtaagttagttaatctagttcacatggacctttccaatagtgaattagatggttcaataccaattgaattgggtaacttgaaagcattagacacactttacttgtatgctaatgtactttcaggctcaatcccaagacaattaggcaacttaacaagcttaatcaatcttgatctctccaacaacgcgctcacaggcgaaatcccattcgagtttgttaatctcactaagctcaagctcttcaacttaatgatcaacaagttacatggttcaatacctgattttgtagctgaattgccttatttggagactctttcgctttggatgaacaacttcaccggcgaaattcctaagaaactcggcgaaaatggtaagcttcaaatgcttgatttgtctacaaacaaactcactggtacaatcccaccaaacttgtgttcttccaatcagttaaagattctaattttgttgaaaaactatctttttggaccaatcccatttggcttaggaacttgttttagtcttgttagagttagattgggacaaaactacttgaatggtagtatcccaaatggttttctttacttgcctcaattgaatcttgttgagttacaagaaaacaacttatctggttttttatcagaaaatagtagtaactcatcatccaatccaaccaaattaacccaactcaacctctcaaaaaatctcttatcaggttttataccatcttcaatctcaaatttcacttctcttcaaatccttctccttagtgaaaaccaattctcaggtccaatcccaacttcaataggacaactcactcaagttttaacacttgatctaagccaaaactcactctctggccaaatcccacttgagattggtaactgtcttcatctaactgttcttgacatgagtcaaaacaacctctctggctcaatcccaccacagatttcgaatattcgaatcttgaattaccttaacttgtcaagaaacaatctgaaccaaaacataccaagatcaatagctacaatgaagagtctaacaacagctgatttctccttcaacaatttctctggcaaattacccgaaacaggccaattcgggttcttcaacgcctcatcattcgctggaaatccacaactctgcggttcattgctcaacaacccttgtaacttcacaacaatcgaaaccaaaccccgaaaacaagaaccagatttcaagcttattttcgcgctaggcctactcatatgctccttagttttcgcagcagcagccataatcaaagccaaatctttcaaaagaaacagcgcgaattcatggaaaatgacagcatttcaaaaactggaattcactgtgtttgacatactcgaatgtgtcaaagatggcaatgttataggcagaggaggagctggaattgtctaccatggaaaaatgccaaatggggtcgaaatcgctgtcaaaaaactactggggttcggatcaaacagctgccatgatcacggattcaaagcagaaatccaaacacttgggaaaattagacacagaaacattgttagattgattgctttttgttccaacaaagaaaccaatcttcttgtttatgaatacatgagaaatggaagcttaggtgaagctattcatggaagaaaaaagggtgctcctttcttgaattggaatatgagatataagattgccattgaagctgctaaaggactgtgttatcttcaccatgattgttctcctttgattctccatagagatgtgaaatccaacaacattttgcttgattccaactttgaagcacacgtggcggatttcgggcttgccaagttcttgcttgacggcggcgcctccgaatgtatgtcggcgattgctggctcctacggctacattgctcctggtaagtactaattcatattcaaaattctgtttttttttttttttcgttttgtactctgttttttgttttggttagttatgttagttaattgtttggaaaagtcaaagtcaaagtatcgtacggttcactcatcatcttaatcagtctctgccgttggatttgattgtcctttgatgttaaatcatagatactaatatatggccccacattgtatagtaagtttcaaactatcaaacaaaaattcttataataatttctcaaatcaaattatattattactattaaattaaaaaattgaataaaactaattaatgaaatttttttgaataatttattatgtctacaattaatttttgtgattattcaaaattttctaaaaattaaaaaaatatcttggtatatgatactctcatctcaaacacataaaattatatagtagggatatcatttttggtacttgaagaaaattaatttttactagtgaaattaatatgacactaaaatgatactcataatagatttaaggttgtctctagagaattctaattttggtatatagaaacaaacctaaaaatcatgccctaaaggaacaaacaaaacaataatataagaagaaagtgaaattaagactactctaaattctgtgccatagtttgagtgaagtcatttttaataagtgtcattttatggggtccacgtcataccatgcatgcatgcaagtgaagaagaaaacctctttattttcaacacagttatatatatgactgacactactgatgtttaacgtaacagtgaaagagttttttgagttttgtgaaagcaaaattaaaaactatggcttttgtttggcttttctaaaggttttttgtgtttaagccaaaactaaagataaagctaaagtgggtttgtttgtttggttttgtgttgttgtttttaagtacttggttttttggcccattcttacgtgtaaagactttgccttttctttacaacttgattttaatgaacttctcctttttgtcgttagaccaactttttttcttttttatttctcaactttagcttttttttcttcttattggacctatcattatggtccaaaattcaaaaatgggctttttcttctttgtagtcaaaacccattttctaacctgtttcttgtcaggtccatcaacacggtccaaaactataaatgggctttctttgtcatcaaagcccatattatctcactaaggcctcataatcaactcatgcagggatgcaactcatgtacaaaaaaatagaaaaatagtattcatataacatcaaaataataacaaaaaataatatacaaataacacaaaattaagaaaaaaattaacaaaagtacaacataaaaatacaataaaaaccgtacaactgtatttttgaaacttttttattattgtttttgtgtatttgtgaaataatccttagactaaacttttgttgatttccactactttaggtttttcttattgggcccattacg

SEQ ID NO: 243 - DNA, 2510 bp, Cannabis sativa
catgacctttccacggaagtttttgtctattaaaatgtttggtgacttaatatcacggtggatgtagagaggcacagtgtgttcatggatatattcaagtcctctagctgaatccaatgctatttggactcgacttgaccatgtcaacgggtctctacctgtcataaaaatgttatatatgtactttgattgataatcatggtcagatatctaaattttgaatgattgcccacctgatccacgcaaatgctgactcaaattcccattttcaatgtactcataaactaagaataaggagccctccacacaaaaacctatcaaccgcacctgcatatataagaattttaagggtgatttggcaattaaataatggttaattaggagaaaaaaatttatcccttaacattaccatgtattaaattatgttttttttttttaatttctcaaattattaattcttttgttgaactattgagattgttggatttaatgatttttgtccaattctgttcaattttattaatctgacgattgtttatgtactaaatcgtattctccaaattttgacatctattaaatcatgccctccaaattttaacatgaaccaaattgggtcccctgaaaattcatccaagtcaagcttctattattaaaattagaaaaagttgttcaataatcttaatagtttgaaaaaaaaaattctaaaattcctaattaaccttaaataatatatgaaatgtgttgatatatagtaattaacaataccagattcaaatgatgaacatgagttagaatcctgagttcagcaagaaattcatttgaagcttgcatatccatcttcttcaatgccgctttctaaaccattatataagaagggaattattaattagtagaccaattaagtccaaatccaaatccaataatccaaaccaaatggggtattaaattgaaacctctcctctaagctctgcatagtaaacagagccaaaaccaccttggccaatcttgttatccaagctaaagtcattagtagccttggcaagttcttggtatgagaattcaactgatttctcaacagtaatacctgtactagtactcccaaccgataatgctgatattgtctgctttgaactactacagcttccaccacagcctatatatatataattaatggcttaattattttcttaaacattagatttagctagtaaattaattttcaattaccatggtcttgatcagatgcaaccgttagcagagttaagggctccactaacttattgttccttttgtagtgaagtaccccaaagtatataccaaatgccactagtgttgtcccagcaatggccgcaacagatatgcctgcaatgtctctacgtgaaattcctgcttcattgatgatatattttagtatctgtcatctcaaatatatttatatcacacatatatgatttattaataataataaaagaaaaccaacctgttctgcaaaaaagagaatgaagaagaagaaaaaaatctgtggtaaggcctcaattttagaatatatgaaacttaaaaatattacacaaaacccaactcaattcaaattataccttgacttgagtggccgaaagtttccttctccatctgcacaccccaaataatgataataataataagaagaagaaaattatatatatataaattttggtgagattttctgttagcattattatgataatgttaggtagaattatggataagaaaaaaaaattagaatttaggttatatattattatttttaacaatcgttcatcttggtgattttattttggtaattatgttgatgttgtcgattattgtaatgattaatgggttttttttccttacaggccatcctggtgtcactaacagcttagaatgaaaatgcaggcccgttttaataatgttcataattctacacgatgtaacaatttatcaatcacacaatctaacaagtgattttcttagaaaaatgtttgaagtagggattcaatgcattgtacattttatagataagaaaatgtgtctcaatcgctactcttaaataatcatttgtcttacattattaatatactataaaaattgacaaacgtgtctactaacttgagctttgtctcttttagtcaaagaaagtattaaagaaaaataattatgtttgagcattcacatattttttcataaaagaactaataatgatgacatgagcagaatatgcttataaatattactaaaagaccttttgattaggtgagaattggtatcactgataacgtgttgactataccaacttaaaattcccctgttacctctgcttgatgcctaatggcttaatcttattcccattaaaaaaagatacctaaattcaatgaaggctttgcagcataatgcccatgctaaagggacaaaaatatactcatttggatttcatcttaattttatataatcaatgtgttttaacttcgtacataaattcttgtagtgtaagt

SEQ ID NO: 244 - DNA, 2698 bp, Cannabis sativa
gccccgggaccagacgggtaccctggtgtgttttaccgtaaatactggaacatagtcgaaaagggcgtctgcaacatggtaatggatttctttgcatctggttcttttgcaaaaaaggtaaatcatacttttatatgtttgatacctaaatgcgaaagtcctaccaagtttgacaaattccggccaataagtttatgccattttggatacaaaattattgctagactcttgacggatcgtttaaagccagtgctggacagattaatttctcctttccagtctgcttttctaaaaggaagatggattgcggagtgctctgtgctggcggctgaagctcttcactgtttgaaaaaaaaaggaaagtcaggtttcatggcagtcaagactgatatgcacaaggcatacgacagagttgaatggggttttcttaaaagggtgttggaagctaatggatttagcaatcatgtggtttctcttatcatgcactgtgtgactacggtcagattttttgtgttgctaaatggcgcacctctaaaagctttctaccctcagagagggctgaggcaaggcgaccctctgtcactgtacttgttcatattgtgcagcgaggtgctctctaaacttgtttgcaaggaggagactcgggggggagttaactgggatcaaaataggaagagaagctatgccaatctcccatcttttctatgcggatgacgcaattttcttttgcaaagcaagtaacaaaggggccaatactttactatcttgcttccacaaatacgagaaatggtctggacagaagatcaacaaagggaagagtggaattgtgttctctccaaagattgataacgcgaccaaggacaatttattaaacactatgggaatgcacatattgagtaggcaggagaagtatttgggaaaccctttcttcactacggcaaagaaacgacatgactttgcctatgttaaaactagaattctcaacaaactcgagggttggaaggctttacaactatcacaggcaggacgcacgacgcttgctcaatcggttctccacagtattccctattacactatgtctacacataagcttcctaaggctatatgcagggaattggacagtgtggtggctcaattttggtggaaagggtgtaaagaccttggctcaagcaatcggtatttggctactaagagctggggagagatatgccagcctaaacgcaatggtggactgggtctaagaagatttcatgacatgaatatggctctattagcaaaactagcatggctagttcttgatcgaagtaacagactgtgggtccaaattctgagatcaaagtactgtaatcgtgtggacttctggaatgtggaacatagagcgagcgactcgcccatgtggagtgggattctggcagccagagacttagctacggtaggtgcagggtatttggttggccaaggtgatattgatatatggagtacgccttgggttccaagatttaccccggacgaggttcaaaggagtttcacctacaacatgatccatgctttcaccaaagttgtagatttatattttcctggaactcgcagatggaacattcagctaataaattcttgctttggtgaggatgtggctactgctattaaggcaatcaggcctctcgaggatgattctgacatccttttctggtctaaaggctcgaagggagatttttctgttaaaggtgcttattggctatctcaacatcatcgcttcaagcaggaaaaaccagtctggaaggccttgtggaaactcaagcttcacccacgactttccaatctggtttggagaattctctcggcttgtctacctcttaagagccacctggggttcttaactcatggagataaacaatgtgttttttgtggagatcatgaggaaaccgaacttcacctcttttgcctttgtccttttgctcgtgggatttggtatcaaagcctctgtggtctgaaaactgacagcctacttgtggagtcttttgaggagttttttctgtttctgtgtgataacaatgcagatattttggcaacaacttcggcctgcgttttagaagctatttggtactgtcgaaacaaagccattttctgcaactctactccttcttttgaagacgcaattcgctcgatatccaagcgtgctttggaaatttccatgctggctgaagtaaacaacaactatgatccccgctttaccctggatactgatcagatgcagcagcagacggatgctgaggactctgctgtgtgtttccaagtcgatgcattttttgctgatggggttgcagggattggagtagtggtgaaaaggcctagggcagctgatagtgaatcctgtcagtcatcttgtttagcttacagtgttcttgaagctgaacttgaggcaattttatctgccctggagtatgcgtggaacgatcgaattcaatctttagtcattcaatcggactccaagattgctgtggatgctctcaacctgagggagatgccaatggcgtggggctcttaccctgttttttcgaaatgtttatctcttattcctaagtttagttcagttgtctttacttttattcctcgctctatgaacaatgtggcggattgcctggcctctcaagccagagcaaaccttttgagccactcttctctggtttaggggagtccc

SEQ ID NO: 245 - DNA, 1206 bp, Cannabis sativa
ctcccgaggccgatcatcaacgactctccgatactttaccagctcttggtctctattacgccgtcaacaaacactactacgattctctctccaaaccgtttactctccctcctcctcctcctcctccaccgccgccgccgcctccgccgcttcctccgatgacgttaacagcgtctacgtcatcaacagcttcggattgcgaaactccatctccttctggaagtcctcacaccatgtttggacctggtattttccccaattctatctctattgattattagttttaattgtttgtttagtttttttatttttattttggtttgtgtttggttgttgggaaaataagatgatacgccccaaacagtgaaaacaaggctaaggcagtgggctcaggtggttgcttgttcggttcgacaatgctcttagttgattaattgatgatgatgatcgtaataaagctaaaaccaaacagagaaatcagagcgaataatcccgaaccaaaccagagttatcatcgtaaccaaacacatcaacatcttatgttatatacctgctttgattgatatgattctcccaacccattccccacacacccacccacccactacttttgtttgggataataatatctcaaaaaaaagtcatggagtagattgagattgaaattgaaactaaatttcgaattttattaatttcattttcaaaaaaaaaaaaaaagtattaatgggatggaaccaacctacctttgattgacattttgctgtgtcttcttttgtggttttgattttggattaattggtaatatggtggtaatattgttactgtattattttattaaatttagattactatagatttggtgtcaaaaatgtagaaaaaaaacttatgtatctgattgaattagggtctcttttttttttttttttgaatttgaaatttctgtttgtaatattttttgttctttaaattaaaagaaaaaaaaaaaggtggtggtttaaggagaggtggattataacagaaagtttattcctgtctgtgaatggattattgagcttttgctgacttgttaaaactagtaaaatattctttcttcaaagacaaggcaattttatggagttttagaacttttcaaggtacagtttcgtacaatgccagcaaatttacagtttgacttgtttggataaatgttttgttttaaaataatct

SEQ ID NO: 246 - DNA, 1105 bp, Cannabis sativa
tgtccaacaaggggaagatggctcgggtgaaaatgctctccaagtgagcgagcttccccactatgtcaatgtaaagtcgctagaggttgagaaggcgagcatctgtgttggcatgcccttgaccctccaaaaactctatctcgtctttgagcctggacaaacgttcttggaactcaaaaatttattccaagcattttttatgctcgagcgttgattggtaatatcgcacccaagggtcgggaacatccccgtccgagtcaaacgaaagttcaatgaaaggaaccccctcaagaacaaaaggtgatttatagttttccataagtgaagaaggaaagagcactctaaaggggtacaaacaactagcaagactcaaacaaaaactattataagataaagaagcacccacaagcataatagaatcacaaatataaaagacaaagtaatgtgtatggagggagaaggtacctgtcgagataagcattagtaaggataggtcagcaacgtcaaaactcatgggaggagcaagtgttgagagtcgtaaggcgcaagtaaaacttagaggaagtgaagagctaagaaagaaagtgaatgtagtaaaatgaagatggagtaaaattatgaaagggtggaaggctatttataaggggaggagctgatttaacattgtaggatcgagatgagatcaacggttgaggttaaacacatgtatttgtaaggaatcacatgtgcccacctacctcattgaatggtctcatcaatattgtggtgcgctattctaagtgtaataccaggtgaggtacactgtaaagacggggaaagcagttcaagtacagtcaaaaaggccacttgaaagtgctcgtttggactgggggaagtgtcaaccacgaagatctaaaagtgagtattcttacaaaaagcaaatggaaggataaataacttaagatgcccaatacaagcaaaagaggacaaaagatggccctcgtctcttctatcctcaaatctccttttgtcacatcgggctatttcttggtacttgcaaatccacacgcccgcgcccgcacgcccacagccctgtgcccgagcgcccacaaccccgcacctgcac

SEQ ID NO: 247 - DNA, 4899 bp, Cannabis sativa
tattgatttctattttcgccttttctttcttttctttgttgatctattacgagtcgttttgaccagagacgaagaagctaaaccagttgctttcgtcttcgtcttcttcttcttcttcttcactcttcaatgtcgttgaacttgttcaattaatctcggtcttgggttctcagatttgagggggtgaagtgtttgttcaacggttttacaaattgggggaagagcaaggagaaacgacgattcgatttgaggggtcaagtgttctttttttctttctttcccaatctctggtttggggtcattgtgttagggttttagggaaatgaagtcgccgcttgataagttgcgcaaattcgcactgtataagaatgattcgtctaaggataagagaaatttgcaatcttcggctcagttagatgagcttgctcaggctgctaaggttagctttttttttttgccctaatttaatttaatttttttagtactattctaatggttaatacagtctccttaactcggtgctggaaacaaggtctgtgaatttatgtagatatatttcatatgatttgtataaaatctgtggaacattattgcctatcgcaatttgagggcaacgactcggtgtatctattgttgatttttttgggtctgaattgagtgttcttctgtatgggtgtgatattctccattaagttttcccttgataataataataataacatttatacccttgttacacttttctaagaatttcggcaaactgtgtctaatttattagttaaaatctttgtggggggtttaagttagttttgtgtgctctaatgaacagaaaagggtgtgaagttgagatcttgctgaagataatagctatccaaatgctacaatttgtcactgtagagatgaagattgtagatttttggttcaaaccatagtttcaggggactggtttttaatatcaataactaaaattatttaggctttctttgtctttagtgacacatgtgtcaagttatcaactaaaaaatgcttgtttttctatttagcttagtttctaaatttgtattctcattcagcaaatgcttaactttgtaggacatgcaagagatgagagagtgctatgacagcttactttctgctgctgcagctacggcaaacagtgcatatggtagacattgttattacatttatactacttgatgtcttgtgatgtatttcttttcccgttatagaaagatttgggaatgtggttatattcttcttatgattcgttattgttcacctattcaaactcgttgctaaatcatcatatgacgaagctaattccatatataacttgtttggcttcgttaaacatcatgtcatagtctttccccatttgatcctagttgcacttgcagaattctcggaatcactaagggaaatgggaacttgtctactagagaaaactgcattacatgatgacgaagatagtggtaagtggagaaatgtgttcttctattcttgttgtggggtctggagaaaactgcataatggtgcagaagataagatagtgctagtgcatagggctatattgttttgtattttgacaaggatcacctgtgaagatttcctctctccctctcacttgctatatgcaaatttatatttgattgaaaaagtatgacactatttacttcggtttccatttgaaatatgtttatttcgatttatgtaccatttactatagtggatctacattatgtttgcaggtagagttttgctaatgttagggaaatcacaatttgaacttcaaaaacttgttgatagctatgtgagttcttgtaattttatttctttaattatttttggctattgaaatcatttatgggttgcttcaagtgtactttctcaagtccattttagtattttatctaatttacttctgtacttccagcgttctcatatatttctgacaatcacaaacccatctgagtctcttctcaatgaacttcgtacagttgaggtttgttcttgtagcttgctctttttttaatcatgtttagcctttagatggtatatatttctatttagtgctgtgttttctgttatcatcatagacatgcctttttaaaggtagttgtgtgatacacaatgtttcttcttctcttaaaatctttgcttttaaaggtagttgtgctgtacaatgcttttgcatttgataggttttcacctgcaaagttatcctgatttttttctcattgacaagttaactaggattttattttcgcaaggcttgtttgcattggtttctatgtttggattaaagttttttcattttcttttgttcaggagatgaagcgacagtgtgatgaaaaaaggtatgtaacttctagttttctttttactaattttcattttgtagaagggaatttcatttgattttggaagaatttttcaggagtgtataccaatacatggtggatcaacaaaaagagaagggaaagccaaaaggtagtaaaactgaaagttttagctcgcagcacctgcgcgcagctcatgaagcatatgatgaggaggcaactttgtgtgtttttcggctgaaatctttaaagcaagggcagtcccggagccttctcacacaggcagctcgtcaccatgcagctcaggtttatgagttttttagcaatctaaatttcagtaccttttttctcaaacatactgatgttatgacactttttttccgctctcctattacaaattcagttaaatttctttcggaagggacttaaatctcttgaggctattgaaccacatttgagagtggttacagaacaacaacatattgaataccaattcagtggactcgaagataatgatggagaagatgccgaggatgatggtgagaatgaaaatgattctaatgaatatagggagttgagttttgactaccgaccaaatagacaagggctagatgtttcaacttcaaggaattcaatggaggtgagaatctagtaagaagaaaatgtgctgtgtgctcacattgcaattagagaatcctatattcaactttgttccttgcaagtattttcataatgcatatttgatgatttgtaaataattgtgtaaaagaaaaaggaacgcaataaactaatttgaatgataatcaacatccatatattttttcttctcattcttgcctttttttattatcatgttcatcttcctttcacctttttttttttcctccttttaagacttctgtggcttatttgacaggtggatgatgatggaaatttgtccccccaaccttcaaaggtggaaaatgcagaggtatgattctaccgaacccatctgtggaaatttttagctgcatgttgtatattgtattactatttcaattttggggtaacagatagtctgatttccaaaccatcagaccataaatcacgtgtttattcacgattctttgaaataatatagttttgtaaagattttcatgcaaatagagttatcttaatgtggtcgatgtaaatatttttttctctttcctaaactgtattattgttacttttgctgtagatgattctagatagaaaccaaggagatttcaaggtttcaagtagagaaccaagagttagcagctactcagctccagtctttgcagaaaagaagtttgatccagctgaaaaagctagacaaatgcaacttttatctgcacgcaaatctcacacatatgtacttcccactcctactgatgcaatgagctttgtttcttcaagaaatagcagttcagctatcctcacaaagccaacgggtcggacccataacttgtggcattcttccccgttggacgaaaagaagcttgaaaaagacattggggatgtcaccttttctgcaaccaatacctcaaaagcaccattggtactaaaggagagtggtgctagaagttccacccaattacctccacctctagcagaaggtcttgcactatctcagctcgatacggttaatacatctgattctaaaaagatcaaaagacatgctttctctggtcctttgactagtaagccatcatcaacaaaacctgtagcatctgccagtgctcctattgtatctgctgaaattcctcagctagcatctggagtggcatctcggttgcaaatgccacagtcatcttcatcccccaaagtatctccaagtgcgtcaccaccccttgcatcttcgcctaggataagtgagctccacgagcttcctagaccccctggtagttttgctgctaaagcttcaagatctcctggtttggttggccactctgctccattgggtttacggaatcaagagcttggtgctacaaatagactcaatattgcatctcctcttccaactccaccattgtttgtgcctcgaagctactccattccttcaagaggtcaaagggaaatggctttgcacgtatctaaacattttgagtctcctcgtggttcaaccaaggctgaagatgttgcttcacctccattaacacctatttctctttccaacatcaacccagtaccaacggtttcagaagtatcttctcagtctagtccaatacaaggtgagcactttcaaagtatcctacctatatttgtatgacactttcacatccaattatatataaatagctctagttaacaaagttatgtataattaactactcaagtggttagtcatgtagtttgctccctgaagatttggatttactttgttctcaaatattatagggctaggcagggactaagtttaactatagggcacgtctatagtacaacactcctatgttgtattagtacaacatgcccccaaatcggcattgggcgttttaattcccattttttttacgatggcactcattatagttatagtgaatttcctgtaaatttt

SEQ ID NO: 248 - DNA, 3466 bp, Cannabis sativa
ttcaccattgttaaaagcttcacactcattatattgaatttcatgaaaaatgaatcatgcatgcacttgatgggctattattggaacataaaccaaattcagaattctcttcttaataccttattatagttaatatatattcactgttttttcaaaatatatatatatatatatatatccactgatattgcgcctaaaaatgtgtatttaaagaactgggaggattaataggaataacaaaggagaactagggaaatttacgagctgacaattaactctaaaagtctgggctattagtagaagatgtgttgagtctactatctaagaaatcaaatcacatgtaccaatgcatgagactgctcttacaactatatatagttcacatagatacggactttaattatggtcaagtaatcccacgtgaattgttcacaatttttatttaattttttagtatgttatagatttttcacaatttcaacgagaaaacggatatacttactttccagatgtatctcgaccaaaagaaccgaaaataaaacgctgaatacaaggttttttctaaaacaattcaatgaattaatcttaatttaaatttgaaaattaaaatatcgtttagttggaatgaataaaatataagaatatgattagaatgacaataaaaataggagtggaatcaaatttaaatttcataaaaaaaaaattaataaaaaaatcattacagttttctcatgttacattagaatggtgtttcttttcattttcaaaatggaatagtcattctaccaaaataatagaaaggacattctattgtagtgacattctaatacttttaaattcaaccaaataaaaaaattaaatgaaaattattctatttcattaccttcaaccaaacgcccacttaaatttgcattaaaataatattattactagcactttacatctcctttttgttcaatataaaaatttcaaaacaaaaacaaaaatgttttattaagattaattaagagtcaaatctaaaaatcaaagtaaatctcttttctaattctagttcacataatcataaagatttaaaattttgaacaatcgagaagatcaaaaataggaatatttttacaaaaattgaaattagaatcaaattttataattaccaaataacataattttatctgtataatttattttatactcattattttttcagaataattaatattttagctctttataaacacctgtattagatgtaacctagtacccttaagacgtgtcgccttatgattggctagcgatactccttaaaagctattatattaaactatatgggactcgatactaaattagaccaatagcgatattgacacgtaggaggatgcttggcagtactgatgcattttagcatttctctttattcatatgtcattattcaatttttatatttttttaatataatttattgtataatttaaggacatgtttaattaatttataattaaagaaaaaattaatttcatcacgatgaactaagttattgtttaagttcaaaaacacaaacaaaattaatctgtaaatcgagaatgaacctaattaagtctcacttaaaaggctcataacacgccaaaaacaaatgataaataatctaaatttaatcaagcacaaagaaagaattaaaatcaagggtaacactgaaatcattgagttttaatattttagttatacgtaacaaatcccaattctttaagcttacatttaaagcctaattagtttagtagacatggctacggccctatgcaataaaaaaggaacagcatatacattttttgtacatttaagaaagataattaaattgaatggcgtcaactcgttaaacgggtagttgataagttcaatctaaacttttaaatacaattgaccagaatttatagaatgagtaagttcatatatgcatggttatggccaattcaatcaactcatcttctttcaccaccattattaattttgttatgttcacattcagacttcagtggcaaagaaaaaaaagctattgcttatcttgaaagaacttctacaagtgtaaaactatgaattaaacattcagtcttagaaattagacgattaaaacacaaaatattaggagcatgaaaacaagcaaaggaaccaaaaatctttgcctagatacaacatctttccaacccttgcacaccattacaaatcaatccaagaaggtatccatgacatcagcgtacatacccccttgctcagaattcctatagtccccttgttggtggtgattaagatgatgatgatgatgatgatcgaccgaagtggatgaagacgatgcagccattcttgcaggcaaagtaaagctcctcttgaacttgttttccatgctattattcttcctaccaccctcagctgtgtggctgtctaaactcaataactcgtttgaatttccatgacaagcattatctgaattggagtgatggttttggttctcctgtttgtttcccaagctgtcggtgttgaagagaagctttgcatcgtcgcttcttccagtgagcgcgttgaagaaggacagaccgttgggccatttgatttcattttcatgatgatctcccccgccaccaccactgcctcctcccaacatgtcttccattcgagtttcggacgatgaatgaggaaggaggaacatgtgtgtctcgtctttgggctggggaaagcctagtcttgctgcagagttctggtaattaggagaaggaagcagagaattgggagttgggataggcctttgtgcccaattgaagagtggaggaggtggtcggattggcatggcagattgttttgaaggaattgaagtggaagatgatgagtttctggttgaagaaaataattgggagaggtagaaaccggattggtagccaagagactcaaaggtatgcctcattcttagcacaaaatgaaggtcttcaggtatctgtagatacgtatatatatatacatgttcatcgttagtactaattgctacacaaatgacatattcaaatccaaaggggaatagagaacagagtttgaaaaagaaaactcacaatcttgcaggagcccaactgcagaagaccatgaccagcctgaatcacagctattgtctgatgaaaaaagaaattgttaggaaaaatgtaacagtataatccgatgatgaaattaaaagaaattatttctgttctaacctgaatccctgactcaaactgatcagtccattcaggggggagctgtaattaatggcataaaagaaagtcacaacgaatattgctaaaataccatctaaccaaatgcagaaaccagaaacataattaaatgatttgcatttattaactaagttgatgtaattatgacatacagcatcaaaagaactttgccggtaaaataaaattgaagcagaaaatactataagaacatacagcatcaaaag

SEQ ID NO: 249 - DNA, 1094 bp, Cannabis sativa
ttattattttaaaaagaaataaactttttaagaaaagtggcatttattggaagattgaaggtgtgaaagtcaatccggtttacccgcgtctaccatttattatcaaaggtagctgtgacctaacaacttattattactacaaaatttggtttggtgatgagtagaacaaagtcgcaaaatgatattatacaaatctgtggaaaataaaataagtacaagttcaatttcattggtatttacatttagtgaaggtggaattaagatttctgtttttggcttcacatttcaaaaacttgtttcctactaaatatcatgtaactttaatattgttgcattatttatgtcaggaaacaacacaaacctttttggatcacctttagtcatgtagacagtgtattattaactttcgtaagccaaaagtttaaaatcatgtataccactgtttgagctcagttattatgtcataaagcaaaagtatatgtatatatataaaagaaattaccaaataaatagcagtacattaattttaattctaattggtgtttttgttaacagggggtgtcttgtgatatatttgatgggctttggtatgtaactgccttaaatattggaccagttcatgagaactctcttggttgtacaaaagatgttgagtttagatctccactctttgagcagcttaagcacttaaaagctttatccttcttcaattgcttttcgaggcaaaaccacccagttaccattccaagtagaagctgggaagcactatccaacagcttagagtcattagagtttcgattgaatcccggtcttgttggtgaaattccagctaattttggtagccttgtgaaactccaatcattagtacttcttgagaatggattagaaggccaattaccagctaacattggcaacttagctgagttgcaaaggctagttcttgctgaaaacaggttctctggtcacattcctcatagctttggtggattgagtaagcttttaatttttgatctgagtaggaacttactatctgggcctttgccaccaacacttgggagattaacctcactactgaagcttgatttgagcaacaa

SEQ ID NO: 250 - DNA, 3317 bp, Cannabis sativa
gtagcatttctgatatttcaatttgtagtaaactcttacatatttcgtgttcagaatgctaatttattcaataaaattgatatttcatctcaaaaaaaaagtcatcaccactatttttgaagaataaaatggagaagctgatcatactgctataaagttaataacatttgacaagtttccgaattatgagataaaaagtaaatatttagtttgaataaaataataaattgacgactatcaaaatttactaatttatacccacagccacaactactattgactactcacagttcattcatacatgtacatcaacctcttttcttctattcaaataaataaataaacaaatccttgaaaccccaactttcagttccatttcaacaaaaaatatcagttatatatgtgtataaatatatatattcaacttcacccattaagccactaacgaaaatctcctggctgaagaattctccatggctgaagtgaacaaataagggtaatccaatgtgaattctccatgccttgaatatctgaatctgagtatgtttatgtaccaacatgaatgaagaactacaaaccaaactatactgtttgccctttgttaattgtcatactggttggagtgaacttaactccggctttattggatattcaagaccccgaagcgctggtatttgtcttgaatcctcttctgaataggcagggatgaaccaatatctcttatcggtcccgaacacctgaaatgaacaagactcaatatctcaaccaaccttcacactctagatcattcctatcctatgttatgcagagatttggattaaaaaggttatggaccacgtgaaaaatggaggcaggagctaacctgttcgaagttgtttctccgcccaaggtcgtaatgccatttagaagttcttctcttttcataagcctgatcaaaaaagcaagtcagaagcttgattctatgaaaaataaggaggatggcaagtagtgaaagcgatcacctcaatcgtggtggtgttgcctgcgaccaatgataagtgcatgatgaagaaacccagaacactaagcgaaaatgcaaagttcaatactgcattggttgaaaagatcgatgtgagtcagaggaaagtaagatagaacgatagttacatgaacataaatgatttttatcaaagaatataactcactgaatgttataaaagtggctgcaagggtgcctgctgttccaccaatctcaccatcagtaaaaaatgctataaaatacggcaataatgatagactgactatagttgtctcaagaaatgtgtaaaactgcatcaagattgaactagaatgagtaaatttcttattcaaatattctcttcatggattactactgaacaataaaaaagcttaaacgcaactaaacaacattatccccatggaactcaatacaaaaggaaattgtgacaagttccggctacatcatcacatcaaatgtgctaaataaattatttgcgaaatctaaacttttctttaacacaaatgcatgacatgacaatcctaacaagaccacacagaaggatgacaaattattccaaacataaaagaacatccggaaggaaattagagtgcatatatcaatttcaacaagttcaaaacagtgaaaaacttatgtctgccacaaaatttaaaacataatgaatattaaacataccaggaaaagtagaaagtacttataatttaacgctccaacacaattgacaacccacaagcagtgatgatccattttgagtatacaccttccacctacaacagatgcaaaatttaatctttcttcattgataaacaataatataaaaggtaaaactgaacagacaaataaaaatcagttcaaagaactcacagacagaacaatgatggcatcgtggcggtttaaactggttgcactttcggcaaaatcgtactgtttgattgtttatatcacttaattggttagatgctaaagctgaagcatcatactgagcttccaccaaagagtccgcctcgcctctttcctcatccattacaggtttccagtcgggtggaacaccaccagggtcagtaataacaacagcaaaatagctccacaatagcatcaccagctacataacatagccaaaacacagtctcgtgttaaaaatatggacactaagaacaagagtgagtcttaacaatctgatttcaacaagcaatcaaactaccaaacaataatgatttcaattcaacaagtaatcacataaattgaaataaattttcattactcattaggtatactaagttcagttctattctatgccaaaaaaaaaaaaaaaggttcagttctattcttttcattttaggcataacccaatacccaattcatagaatagcacgaacaacaaacttttactttccaatttctatacctacactgcacactacactacccttcaaaagctcaacctaacatagtcaaaggaaacttctaaacctaaaaagctatgacatttaagctaaattttactaatggatcaataaaacagaaagaaagagagagaaggggctgttaccagagcatggaaaaggagcaagacaagtatagcgacaagagaatgaacgccaccgagaaagagagcgggaccgtaatttgttaaaacgacgacgtaataagttagactaatgattccgagaacgaagaagatcatgatggagccgagcgctcgcagggcgctgcagaacttgaagacgttccacgccattgatctctgctccgaagaagatgacaatcataaaaatcagaaaattgcaatgggtttagggtccttttttcagcaccttttaattaaaaaattttggattaattataatttttttttttttttgaaagaggattaattataattaaagtataatgtttttaatcataatttgtatttatttcttttgagataaaatattgttatcataatcttattcgtttttaggaataattattttatttttaaattcatttttcactattggagattaaatgtaatttttaaataagaaaccaatttagttttatcaaaaatctagattaatataatataagcaaaaaaaaatttattaacaatataagtataagcaaattgactacatgcgagttattaaaaatcacaattcacaaccgataattttatttggcaaaatgcctaaggcaacactaaagaaaaacctacagtggcacaaatcggaactgaatgaggccaatggtcgttacaacactcagagcaaacaaactgagctatacaatgagcaacctggttaaactctcgaga

SEQ ID NO: 251 - DNA, 1532 bp, Cannabis sativa
ttccagccggtaacgccggcccgactccttccacagtaggccacaccgcaccctggatgtttagtgttgcagcttccaccattgatagagatttcaggtccgtgattcatcttggaaatggccaaactgtcaatgtaagtttttgttatatcttataaaccatctctatatatatgctattattaaattatgtttgtttaaagttgtattaattaatagagtacttgttataattaattattattttaatttaattttaaatttatttataaaaaatatatctaactaattttattaattaaacaataaaataagtaaataataagtttagatattttaaactgtttactttttttaaaaaaaataattttcattaaataaacacatttaatataaaagaaataatatgtatgatgaataatgtgaaaatattgctactttgtattttaaggttattatttgctgtgttattattgcaaattacaatgtatattggtttaatttgtgaaataacaaacatctagattattggaatagtaataagtttttgttatggtttaatgtattaattgttaaaagtatggaatttaagtaatgttttgttttttaattcccttaatatatattaggcacttggcattaattattcaaaactatcacggtcatctatatatccatttatgcttggaaaggaagcggctattacttcttcagttgtatcaattgcagagtaagtgtcaatacaacagcaaaaaaaatatatagttgataacatttaactaactaattagatcaattgacattttatataacattcataagttaataaccacagtatacatatatgtcattgtaatacatactttaacatgaaatgaaaaaaaaaaaaaaaaagtattatataatatatctatacgaaccaaaatatatattgatgtgatagcatgatcatattttacatgtggtaaaattaaggtaaacattgtaaatatgcatgcagaaagtgttacgatgaatctttggacataaagaaaatcagtggaagtattgtggtttgtgttgatggtggaaactcatcacgtttagactttgtggctttagaaagaagtaaaggagtaattatgtatacggaagtaactgcgcttgcttctaccaatactttcccatcagtaatagtgaacaacattccagactatcacattcttctaaattacttttactctacagcgtaagtgttataaatacttttctcaattgattaattactgttactaatcaaattaatcacatcataattattatatatataacacaaaaaagctatatatattatttgttactcatatagttgattaattaataataaagaagtattagagagctattatttgttactatagcgcatatacttaaatataactaatatagaaatgataactaaacaatataaaagaataatagtataatttaatattcataacccaccacattaatataatatttaatagcaatattattttaaagcattctag

SEQ ID NO: 252 - DNA, 7925 bp, Cannabis sativa
aataaataaataagagttggaatttctgtgaagctgtttttctgaaaccctcactcgcctggtgctaagatggtctcacccgccggtcaccaatcttccccatcctgaacgctatggcattcggtccgaccacccaacttcctaccgttaccggagaaggtaaattcaaacttcccctaatatcctaatttataatctcagagctaattaactcacttccctgcttttctcaataaaccaatatggttttattgtcttctatatcaaatttgatggaaaaaatttaatatgatttttcttttggtttttttttttaatatttaatttcttcagcgattcggtgcatatcgtgtcaggagattacgagatggatatggagtcagagtcagattcagatgcggagacgatgaggtgcatatcgtgtcaggaggactacgacgcacatgatggtggcacctgcaaggagtgctacgacgaggccaacgatacggaggaggatctcaagcgcgagatcgaagacctcagagccaaggtcgcttttcttaagctctgtgattcgatggattatcccaaccattactccactgcccctacgccctattctactcgcttctccgacgtcattttggttgcattggaaggtacttccggtgctcctgccccggccgtcccggctcataaggctgttctggtcagtatccatagaaatgtgatgtttgtaaaaacaaagaagtatttttttacataatttgaccaaaaatttgaaaaaatttaaaaaaatatgttaaaactgagaaatttttagttttacagtttaatagttgttatgaggtttgttttcttgctgttctggttgttttataggttttttttttttttttaattttggaggagggggattcgaactgaagtgacctctatacttatttatagcttatttacacttgttgtgatgtttcgttttctcactttttgctgggaaattgtatttttataattttgaaagtttaaaatcatgtttttttcaaataaaaactttaaaccttgtaaataaaacataaaaaatatttttgaaaaaattcccccacttttttttttttggctcatataaggctgttttggttggaactcaactcaactctgttctgttatttatttatttttaaagattctttcgtttctttggtcttctgtatgccaatatcgatggattgttctttattatgtgacagtatggctattaaatgaggagaaatatgcatcttaaaaatcttgttcatccatttgaatgtacttatgtttggaatttgtgaaaacctatgcatttgggtgagactacatattctactttcttgaattcttgtattgtttgcacagcattatagtgataaagaatccttaaacatgagagtgagtcatgaatcatgatggggttgaagttttattgtttggtgaagaaaagaaattcaagtagttaggtgttagtctacatactttgctaatttaccatttgagtatagagtttggagatgtgtctcgaaactaggaagctattcttatctggttccattgcttgattcatttataaattacctatattatatcccaaacctcaatttggtgattttgtttgcactatgtagttatgaatattatagttggagttgaggacttgcaatggtaatttttcaaaacctgagatgctgaactatgtaccaagccatgtttctttaattggattgctaattcaatctcaatataggaaatatttcaatgtttcccttcaatctacgttccagcctatgtgtggtttattacggtaattttgatcctgattaagtcttgtgtgaactcctggaacttatatctttatggattggacatttttgttgcacttgacacataacaggcaagtcgttccccagtattcagagccatgctcgagaatgaaatggaagaaagtagaagcggcaccataaagatcaacgatgtatcatacgaggcccttcgtgcttttgtcaactatttgtacacagctgacgctgattttaatgagcatatggcctattccctgctagtgttagctgaaaaatatcaggtaaatcatctcaagatctgttgtgagaggtttctgatatccactctaaactgggataatttaattgggagctatgcctttgcccaccagcacaatgctaagcttgtcctcgaggcatccttgtcaatgataacggagaacatggacaagcttacaaaaagggaggagtttttggagcttaaggagaaagatccacaccttatagttgaaatctatgaagcttctctctcaaaacaagtcaatacagcagcctgtaaagattcttctcaaaagtcatagcaatgtttacttaggcaattgtggttttatgctgattttggggccagtttacttcttagtttctctgtagagctttctgttttattgggtttccaaattgtgaatagagaagtttaaaaattcatgggggtgcatcaactcatcctcttcaagtgtttttatttttgtttcttttcctcaacttgcatttaatttctatcaaaatatatctaatctgattgtagtgattaggaaaataaaaaaacattttctgttcattcaattttgaacactaacaccgatgtggtactttgtaaatagttaacaatatttagtaataattattaaattaaattatatagaacttgatatttaattacttaatcgatataacaactttagtacttttgtattgggagttgtagcactagtgccccttagtgggccttgtagaatggcaaacaacatcttttaaaagacataattatggaaaattggcatcatttaaaagaatgacctatgtttagagaaacaacaacaatatagaaatgactaaaaccaacactaaagtcgaaaaaaataaaaacatataagcgataggtttttggtcttgtgagtgggtttgagaattgcgagctggagtagaccaaatcttgagtattggatctgtttaagcattgagtgttgctaatgataagaaaaaaagataacaatgtgccacaatattacaaaaattagtataaaaatattattggtcaaaaaataattatgccccatcttgattttcgctttaaggaaattattgatgttcatttatattctcctggagtttcagtttgtatcttcttcaagattgtatttgtgatatatatttgttcagaaaaaaaaattgtaatatatatagacaaataaaccattttataaaggaaattttgtgttcctttttataaatttattcagatgtttcttcctaaattgatgaatgttttatgagaataaaaaacgggacatcttttcaaaaagaaaagaaaaacgggacataaattagtcaggataataatgcgttttcatctaaattttgctgtcgtttctttctacagaacttaaaaacgacatctacagacatgagtcgcgcattataaatttgccgtaaatgaagtatcgttttcaaaaacctccaatgtcgtttcttgtcatctttctcaagcaggtgtcgtttcttgttttacgacatcatttgtccggccacgtggtggacacatgtcctctcatgattgggccagtatcaatagagcgaagagggttcttcactcttctcttctctaattctcggggtgttgcagtgaaatgctagacttgttattcaacgtccaacagaagctttttctctaaaaccctcgttcgcctcgcgctaacatagtctcactcgccggtcaccaatcttccccatcatgagccgctatgacagtcggtccggggacccaacttcctaccgtgaccggagaaggtaacttcaatctcccccataaatgtcctaatttgtaatctcagagctaattaacccgcgttcctgcttttctcaataatccattcagttaattctttagctataaaccaatatgtctttatgatcttatatatcaaatttgatgggaattttttaattatgtttttttttcagcgattcgggtttcgggggttcggtccggtcctcgtccagtaagaaagattatgacggtggtgagtcaccaaaaaagtttgacttggaagggctgtctcatttcgagaagaacttttatgtggagtcgccgactgtggcagcaatgtctgagagagacgttgaggagtatcgtctgaggagagaaattacagtcgaaggccgtgatgtgccaaaacccattaaggattttggtgacattgggttcccgggtacctattttcttctcctttgagtttgttttttaaacccagctgctgtttgttgtttgagttttttgtaataagaatacaacacaactttgggtatggattaagaacagtacactgtgctaaatattaattattttttatctcaatcaatttttcagaatttttttgttaggtaacttctaattttgtgaggttttattttcttgtacgagtatttttgtgtaaactttctatttgaatgtagattatgttttggaagaaatttcaaaagctggttttgttgagcctacgcccattcaagctcaaggatggccaatggctctcaagggccgggatcttattggaattgctgaaactggatcaggaaagacacttgcctatctattgccggcaattgtccatgtcaatgcacagccaatactatgtaagctttaattgtttaacttcaatgattatgtggttattgttactgtgaaatttttgtagtggtttgtgtatatttattgaaccaacatcaactcccatgaatgtgtacctttgttcagctcctggagatggtcctattgtgctagtcttggctccaactcgtgaacttgctgttcagatacaacaagaggctaccaaatttggtgcatcttcaaagattaaaagcacctgcatttatggtggggttccaaagggaccccaagttcgtgacctccagaaaggtcagtggtaatttaaagtttctgatctttgtatcacaatgtcattcagtttttgtatttgcttcccgtgttgctgatgaaactatactgtacgttttctctctcaggggttgagattgtaattgccacacctgggaggttaattgatatgatggaatcacatcatacaaatttgcgaagggtcacatatcttgtcttagatgaggctgatcggatgctagacatgggatttgaccctcagatacgaaaaattgtttctcaggtatggttttctatttatttatttatttattgcacgtgcatatcgaatatgtcaaaattatgactgctgtagtctggactttgtattaagaatgtttacttgtttagttgtgagcacttaaagacttttcatattgccatttgtcacatgttccttcatcacccttatacatcaaatgttttgagccactcgtaggcacttaagtagcatttgctaattgctgtagtttccaactccccaagtattttagggttaggaattgagccccagtttgaacttgggcctactgagtgaatatgagggattttttggtatcaaaataagaagaaaaaaagtttcattattgcattttttttacatttttcaatttttgtagtttctactttttcattgtcatcctattagttaattgtcgatgctgatcacttaaaaatgtcacttaactgttacaaatatccaattttacgtaaccttttttttcccctcgagcaagtatttggtcactttggttacccatctgtacccaattcttaaaaaaaagtagtattggtttaagtgaaaaacatttaactagaattcgctaagcttcatccctcttatttatctatgaaaaggtgataaaatagtgatgtttcaagcaaaaagaatataacaaataagaaggtggtcttatttttggtaatggctttttgcagattcgccctgaccgtcaaacattgtactggagtgctacctggccaaaagaggttgaacaattgtccaggcagttcctttataatccctacaaagtaaaacacttgaatcttattgttttaatttgtttacttaccattataacaagaaaactatgttctgtattgacacttctattggactctctgaaggtaattataggatcacaagatttgaaggcaaatcatgcgattcgccaacatgttgatattgtttctgaaaatcagaaatataacaagtaagattgcatttattttgttcttttccacaataaatctataatgtgatttgaaggatacttgttgatcggttgttttttgttttcaagattagtgaagttgttggaggatattatggatgggagcagaatactaattttcatggacaccaagaaaggatgtgatcagatcacccgacaacttagaatggatggatggcctgccctttctattcatggagataaaagtcaagcagaaagagattgggttctctccgagtttaaagctggcaagagcccgataatgactgcaactgatgttgcagctcgtggtctaggtactgtgctaatgtattaagtgcttacacaatgacttaacaatgttgttttggtatatcatgtcagtccacacactttgtttgtattaaagacaatctcacagtattgaagtggtctttgattccagttactttttccgctcctaggcccctaaaatccattgcatcctatttcacatcccaagtggtctttctgttatggtggtatgtatttttgtttggtttggaaggtatgattctaattcttcggtacttttgatttgttgcagatgtgaaggatgtgaaatatgttataaattatgattttccgggatcccttgaggactatgttcaccgcattggtcgaactggaagagcaggagctaaaggaacagcatacactttctttacagctgctaatgccagatttgcaaaggatcttattaacatacttgaggaagctggacagaagatcagtccagaattagcatcgatggggcgtggtgcacctcctcccctttcaggtcagttgctagaatctgactagtatggttggcgctaacaaaaacacatactgctttcatgtataataagtgtggaatgatacaacattttgggtgtgcactgtgaaatggtggattataattttggtccaagtttggaaccaattttttccttacactgtattgtattggttgtgcgttcaaagtctagacacctaatagtgcattttaagtttgctaatttgtcttcatttcgctaatgcttgtctttattttcttccgttatattgatcatcaggtcatggtggctttcgagatcgcggtagaggttttggtggaagccgcccgtggagctaagagctatggttactgtgaagaggaattcagaatcaagccaagtaagggtttgggattaactagagtaaatgccggaaaacatgtatgaatctagagggtaggtttacagatacgtttttcccccattgaacataatgtttatgtgctttgtttttagcttcacaaactgtagaagttgggtagttagtacccaaaatgtgtaagataaaaacatttgttcatactataacagtttcatcaacaattgctaaacaaaaattttcttcacggttgtgtatatagcactccattctattttcaaaagaactcttccctttccaatccccaaattggtacactgaaagttggactaaaaaaacttcaatagtgatatgagatgattacattgcagggcatatgaagctggagttatttttaatataatgtaaatcatgtgggattatagagctcagctatgtattgtattgtatatatatattttgtatgacccaaccaaagcctacaaattagttactttactaaaagctttctttaatataatattt

SEQ ID NO: 253 - DNA, 749 bp, Cannabis sativa
ttcagtttcaaatcgtagtgttcaaatgactgacctccttaagaaaatcgagcatattaggtgttggttcatgaaaatctgggcccctataatcaatcactttatctggttcttgaatatagttcacagttggataaactggatcgccgccccatactgcaaaggccgaaaagaggagtcaattatcatagctcaataaattagaccaatgaactgaagattttaataatttctaatgtattgctattaatataaaccttaagaaacaagaaacaaacacccacacacaaaaagaaaagtggataaagtagctgatactcgataactactttaatcgactaattctccacaaaagtaaatcaaaatactcaatagaatatcggagagaacaaaaatgcaaaagatttattagcttttgagtgagtactttgctttatttgatcctcgcgcattcgcatggctagaggatctctgggtatgcggatatcagttcccatcattatgcgatactctctgtctgtttgatgacaaaacatgtcgattagttgagctatttcatcttcaccagtctcttcataatgcttctgaatagcttcccttgaagtgtccttcttccaagcttttacccattctgaatagtaagataacggaccatctctactcagcctctctcgttcatcttgaagcctacatatcaatacatgatacggaataccctttataaacaccattgcataataataaaaaaa

SEQ ID NO: 254 - DNA, 1336 bp, Cannabis sativa
tactattattgctgttttacagatattctttcttttcaggttgtgttctattgtcattttccagatttgttacttgctcagcatacaactcttcttaggagggtttataggaagcctattgactttgtagaagaaataacaaccggtctgattcaatatcttgcgaattttctcatccatgtgaagagctcattttttttctactttatataacatggactaatgatttttttctcccgaactataacatgtactaaatcgtgcccctcaaactttttaggccgttacaaattctccttaaactagtgagattgttggaacttagatttaaggactttcgtctaattttactaatagacgcctgatgtggatgaaagtttaggaagcataatttagtatatattgaagtttgggtggcacgatttagtacaaaattgaacggaactggacaaaatttcttgaatccaacaatctcaattgtcaataattcgggattaatttttaacgggctaaaaagttcgggaacaaaaatcctaatttaacctataatatatatactgcatgtcttattcttatttgcttttaggactgcaggaacggcggatctgattcttgttaatagcaagtttacggcctctacttttgcaaatacgttcaagcatcttcacgcacgaggaatacaaccagctgttctttaccctgcagtgaatgtggatcaattcgatgagcctaaatctatcaagtaacgaacatgtttgtattatctttcggtgacttcataaatttgattttagacatacttttaggctccatatctaatagctggaaactttgtattgatcactatgtttaactattcatttctcattaactgtaggccgatttttttgtccatcaaccgttttgagagaaaaaagaacatagacttggcaatttctgcttttgctatgctaaacgcccttaaagacggtgatcttcaaggttgcaatctggctgaagtttcgctaactattgcaggcaagtccttacctagtatctctctctctgcctttggatctttgaaatgaatgccctttatcaaccattatatgctttcttatttttatgcttaatgaggattgaactgttaattatcacatcattagatatcattatcaggtgtagtacaccactgcaatgaacagcctactttttcatgttctattcaatgtttaaccgaaaattgggattggaatggtttaaattgctgcttgtagtaatttgacttaatccacttttcatgtatcactgattaggaaagctcgtaatcattctctcctgaaataatgtcttcact

SEQ ID NO: 255 - DNA, 7160 bp, Cannabis sativa
atccagaattacagcagcttgtatagcatttaatcagccgtgccatgatagattggctagtcgttgtgttatagaacgaacaaatttcatagtgctttcacaagaatattatatttcatacatattaaccaaagccacaattagttcactcttatatttatattactataccaattctcattttcaacaatcacatttttctgaaggaaatgaaaggtttcacatgaagatatttgatattctggtcactggaaaactatatctacatctgggtcaagattaaataactaaaaagaatggtaaacgaattaaataggttttgtcagtgtagctaaataaacacaattaatagaatcatttccgaactatggccgcgactgatcgagattcttttctcctcatatatttctgtcgcgcatttattattgatgaaattaaacattatgttaaaactcaaattcttgaataaagctactccgtatacatttgctcatgaaaatcaatatatatatttatatgcttttataaatatctattacttggtcctaatctgactacatatagcaattatctctatgtgtcttttactttctatatgcttacgcaagggtttatatttatagatcaggatcaatatatatgtctgcttatattgtcgatttggctttttacaaccgtgcatggatggccatgtaagccaattcttacctcttctctcttgatcgtatacgcatgtactcctctggtttgtggttggtttcgattttctatcaaattggtttgagttgcacatgacttgatttatttcatctgtgttttaaccaaatcatatcataggattaaacaagtcagtttctaaagtataatacttataattaaataaaattcaagcattttattgagttagaaactcatcacgcactactatagtaaatttcctagctaatataacattgcagttggaggtggattgcacttccaataatttttctactctatcttgtacctcaacaaaaccttagactatctctcatagatgatctaatatctgtactaaaatttagtataaaaaatgagtttatacaatatttgacttactatttatatttgtgtttcaacgcacaaaatataaaattttaaaaaattaattatattaatagtcatttaatataaattttattaagaatatatcaaaattacttttttttattcttttattatttataaaaatagtaaataaagaatgtaactttcataaaagtcaatgaatcataataattaataatattataaagtaaataaaaaaagtatcatttattgtaggttaaatttgacacaacttttaacatttattaaattcaacacatttttttaaaagggcattgctattatttagttggaccaatagcgatattgacacataagagggtgctagataccattaatgccctttagcatttttctttttaaaacactattagaataataatttttctttaagtgtattaaaatataataattaccacacataaataataaaatattatatattatatcatattctttatacatttctcaacatcatttatataagatagttaccacacataaataataaaatattatatattatatcttatatttttaattaaacacttaagagtaccatataaaataatgaaatattatacactaaaacctaaaaattttgtagttatatttaactagactgcagaggtaaattttatagttattataatatctcatctattgtatgtgctattttgacactttttttgaactcttagctatatattttttttagcattgtaatgacatgagctattgtaagtgctataatgatagatttaaaaagatattagcttatcataatatatttttatattatatgcattttcaaaatttttaaaaaaattataaaattgactataataaaataaaaaataattcatacaattacattttacatcatgatattggggcagtcaacagaaccaacagcagctaaaaatgcaatcacaattcgaaaggcaactttgtaataacttgatatgagaaaaaactggcttaagcagagtgagaaccttctgcttttagtaactaaaggtttgtaaggagtaagaagcaaaagaatctgaaggagttgttgaatctagcacatagaaattacctaccgcagagtttgatctcatttggtggtaagcagtttcttccataattatttccagatatttacttcactgcaaatttgggtgattttgtgacctaattttgaagtatctttttaaaagccaaatacacgtataatataatagcatatttgttgggctagtgattggattctcaggctaaccaatccacatatataaaaagtggtaatatatataaatatatatataacagaatgtatatctgcataacaagagcttattaattacttcagatatcattcatcaactaataagtgcatgaaaatagaacaaacgaaacttgatctcttctaatcagtaaagaagaagaagaagaagaaagaaaagacctcttaagctagcaaattacattatgtcctaaccaagctgaaacagagccagcttcaattaacaaatacaatataaaacctaaaccatagaggacattttacatgagttaatttcattttcaacagaataaaatcgaaaagatacataaaaataataaaactaaatcaacagaagtaaggtttatgaagattgaagacaactttgtatatattactttcccatttccatgctaatttttccattagctaaagcaaacaaatcaaactatttcgtttgtactggtcacgcatgatctatttcatccatttaaaatttgaaaataaaattaaaggttaaaaaaaagcaaatacctagatgagaagaggtagggttaatttttttttctttttacctagtttgaaccctggaagaaacctgagctctgctccagacacttcaaatgctttcggccattattactcatcgacgactccatgcctagggttcataggtgtggtgttctttttccgtacggtacgtaaaaagttttttggcaagaggacaaaggaaaaaaagtgtcgggaagaggcgttgggcgggaaacattaatgggctgggctttcagggtgaacctcacggtccatgggccaagctcggtaggcccgatttgtcaaagctgagatgagagtagtcacgcgtgggttgtggcgcgtggatccacgaaccaactcccagtcccatcccaatggagtctttcccgccaataacttctgtgactgtgtgtactgtgtagacatatgtgtacctaaatatctttccagtataaataatacaaactcttcgcctgttctgttacttagggtaaaatttgcattccctacaacttaaccctaaagaagatgactcagaattttgaggatcagaacaagcttcctgagctcaaactaggtatgacacgaaaaccctagttcctcattctgatttttgataaacaatatatttaggtatattgaactgtcaaatcacttatttatacgcttgttaatgttttaaaagatgctaagcaagctcaagggttcctctcattctacaagagactgcctcaagtgagttatttctctttattcttagttaatggctgtgttctattcttagttaagattatgaaatttgatttatgttttctgtttggggtctgagactgagaggaaatggaggcaagggaaagaaagtttgagttttgatggctatttttttggggggttttcatgagggaaactatattcggctgaattatatggtaatactggagcccagttatgaatggaatttaataatttggcattattagtggtcatctgttgctcttgttatgataaagagatatatagtacatcaaattatcaaatggaggaaaagataaaaagaacattttactgactaatttaaatttagtttctgtctggttaataataaaattgtatattttgatgtttaactaaagcgaagggttttctttcctcgtttgttctcatttttctatgtgataatcaaacactggtttaggcttcctttgactaattgattatctttctaaaagcaaaactgacagaagttatctaaaagaatggtaatttgaagcctttttctttccgtatcagctgttctgaaatgggattattgtctgggtacacacaaatgacaggattataaaaatttggtggtcatacgtcttcatttttatttttcttattttgtttctcttttctcttgcaggacgcaagagcaattcggttctttgatcgtcgggtcagttaatatttaatcctatttcttttttcatctcctctttcctattgcggtttatatttgaatggttttccttgtatttcaactcttatctgtaccttagttattagttttctttactgtcttgttttagtttttcatgaaagctcacactattgtttattttctacttccgactaccaaattatttaagaattgtttatgtttttcttaacaggagtagagatgattgatatttacttaaaagtaccttttgactttgaaactttttcatgtgcatatctgtatgtagtgtcattgagtttgtctccatttccttgatgtcttctaatattttattgtatttcgttgcctatttagtgtaagatatcacattccatttaaatgataacgggttatgttgctgttactatttcattgctttgatgactaatcacaatagtgtatcggccacaagcatgcagtgcttgtcattagtattgaccaaaaactagcttaagtgttttgcactggaactgtaatttagaattttgtgtcagatagaagcatgtttagtaggtatataggcatgcagtctaataatatctattatgagttcttgaagttgttagtttgtattttttttttctggttgtgtacgctctctcactctctgtcatgatatgcagctgctctattcattataaaattcattactttcaacatacaactacaatgtcttacatttctttatgaaattattggctctagtgttcattcatggttcttgaatttacaaaaatatggtcctagtgattttcttaactacttttgtatatttcgtcttagtttctatgtgcataactagtgcttgttttaaaataaacttgcaaaaactgtgcaggattactatactgctcatggcgaaaatgcaacttttattgcgaagaccttctaccacactaccacagcactgcgacaattgggtagtggttcagaaagcctctccagtgtaagtgtaagtagaaatatgtttgaaacaattgtccgtgatcttcttttggagagaacaaaccatgctgttgagctctacgagggtagtggctcaaattggagactggtgaaaagtggaaccccagggaatatcagcagctttgaagatattttatttgccaacaatgagatgcaagatacccctgttgttgttgcactagtgcctaattttcgtgaaaatagctgcactattgggttgggttatgttgatcttactaaacgagtgcttgggcttgctgagtttcttgatgatagccattttacgaacgtcgaatcagctttggttgctcttggttgcaaggaatgtcttttgcctttagaaagtggaaaatccagtgaaatcaagactttgtatgattcattgactagatgtggggtgatgttaactgagagaaagaaggctgattttaagatgagggatttggtgcaggatcttggcaggctcgtcaaaggttctattgagccagttcgagatttagtatctggatttgaatttgcaccttgtgctttgggagcactgctgtcatatgcagatcttctggcagatgagagcaattatggaaattattctatccgaagatacaatcttgatagctacatgagattggattctgctgctatgagagctcttaatgtcctggaaagtaaaacagacgcaaacaaaaatttcagtttatttggactaatgaatagaacgtgtactgctggaatgggaaaaagactgctgaatatgtggttgaaacagcctttgatagatgtaaatgaaattaataccaggcttgatttagtacaggcatttgttgaggatcctgcacttcgccaagatttaaggcaacatcttaagagaatttcagatattgagcgactggtgaacaatcttgagaagaaaagggctggtttacagcatattgtcaaactttaccaggttgagtctttagtattttttccctttctattttggttttaagtattttgttgtacgcttcttggagttagatgaatgtgttggctaacaatcctctgtttactctttctttgatctgttgttctgtctgcttgaatcaatgatgttcatctatataatttgtgtgtaaagtactaaacactcttcatgaacacactgaatgtgaaatgaggatatcttttattaacttatttgaatgctacattcggattttctttcagctgtggatatcgtattattttttattctcctccctcttaaccttacatatttggagatcaagaaactaaatcaattgctatgttggttttccaagaatttgactgtgtgagaacaaaccacatatttgctcattagagctgcacctcgtagttgtcttttcttataatgagtgacatgaatagttctttattttccataaatgtgtaatgtttcttcttgtaattctgtttatgtatttttcttgaaatctcttcatcataatatgattattgttcacttattgcagtcgtgtataagacttccattcattaagagtgctctagaacagtatgatggtcaattttcttctctggtgaaggagaagtacctggatcctcttgagatatgttctgatgaagatcacctgaataagtttgttgctttggtggaagtttctgttgaccttgatcaactagaaaatggggaatacatgatatcatctagttatgaccctgcactctctgcattgagagatgaacaagaatcactagatcgcgaaattagcgatttgcataaagttactgccaatgatcttgatctgcctgtagataaag

SEQ ID NO: 256 - DNA, 10562 bp, Cannabis sativa
  modified_base (5608)..(5608): a, c, t, g, unknown or other
ttttttttttttgaaaagaagtgtaaatagtatagttaagcaaattagaccataaggtaattacaaacaattttatttagtattgagaaagcctcaatcatactaattatatttttgatcaaacgctcacttagctaactcgtgagcaacaaaattactagatctagaaacctttaaaaaattacatcctacaatgagttacataagttctcaattttccatcatgaatttaacccatttgcagctttaataactatgttagaatcaccttctacaataataaattgaataactatgttagtcttattgtttataacttaggtttatttaatatttttaggttaattagcattttttgcctgtgaagttttatatgtactaaattatactccttaaattattaagattgttagatttaaagccttttatccaatttcattcagttttactaattcggtgattgtccatgtactaaatcatgcttcctaaactttgatatgtatcaaatcatgtctctcgaacttttacatgtatcaaatgataccctctcaactttcatctatattagactttttttattaaaattagacaaaaattattaattttaaaaatctcaataattcaaatggatttttaataactttaaaaattcaaaaagcatggaacatatttttaattcaatatttaaatcggtatttgtacaaaaaaaaaaaaaaacaatattaacaagaaacgacatgtagtttggaagaagagtgcattagttagttggggttgtaagtaagagccctagatagagatattttctggttttgtaaaatagaagaagaagaagaagaagaagaggagcgaatttcaggaacaacaaaaggggttttagggttcggtggtacagcaaaacccacaccacaccactccaggatctcggtgagttgtcattattctatttacttatttactcaatctgattccatggtgtgtgttctatatctatggtggtggtcgattttttggttggatgatatagtgtagtattgtttttcgtttatgtgctagggttttgaattatttctttaggaagaagctatggaagagggcaagcgtaaatctaggagagaagggtcggaggatacgaggaagagccaccgcgagaaggagaggaacggagatagacacagggagaagagagaacaccgcgagtcgtctcgtcgttctgagagagaaaagagttctgattctgacattagctatgataatagagagagggagaagagggattctactaagcaccacaaagagagggacaaggataggacgagaagtcgggatgatgatagggagaggagtcgagacaagaaaagggatcatcgagagagagaaaaggagaagcgggctaaggagaaagaacgagaaagagagaaggagagggagagaagggacaaggatagagaaagagaaagagagaagagaacacgcagcaccgagagggaaaagcagcgccgggaagttgatagtgatgatagcagtcatgatgttaaagaccacgaaaggaaacgtcgaaggaaagatgatggtgattacaaggacaaggagaaagatagagttaaggagaaggagaaagagaaagatagagaaaatgagaaggagaaagagcatgaacgcagtagcagtaggcgcgaagagagtccgaagaagaggagttccggggatgattctgataagcaagagcaagcaactcgtgaagaggagttggaaaatgaacaacttaaattggatgaagaaatggagaagagaaggaggagagttcaggagtggcaggagttaaaaagaaaaaaggaggaagctgaaagagagacacacggggaggaaattgttgatgaacctaagtctggaaaggcttggacccttgagggtgaatctgaagatgatgaagaacttccctctgctgagaaagtacagatggctatggacattgatggcggagctacccaaactaataatcaagttggggatgaaatggcaatggattctgaaaatgggtctactcctccaccttcgcagaatggggttgatggggcttctggggatgatgaaattgatccattagatgcttttatgaattccatggttttgccagaagttgagaaactcagtagtgtttcggacccatcagttcatggtaataagagttcagagttgaagagcaaggataaaaaggataatcaaagcaatggtgagcaacgtaggaagggtggttcaaataagtctatgggcagaattattccaggggaggattctgactcagattatggggaccttgatgatgatggggagcctgcagaggatgaagatgacgatgagttcataaaaagagttaagaagaccaaagctgagaaactttctctagttgatcattcaaaaattgattataagccatttagaaagaatttctatattgaatcaaaagaaatctcgaggatgacttcagaagatgttgccgcataccgtactcttctagaattgaagatccatggtaagtatgtgccaaaaccagttaagacctggcaccaaactggacttacgagtaaaatattggatacgattaaaaaacttggttatgaaaagccaatgtcaattcaagctcaggcactgcctataattatgagtggtcgagactgtattggcattgcgaaaactgggtcaggtaaaacactggcatttgtgcttccaatgctgaggcatataaaggaccagcctcctgtggttgcaggagatgggcctatcgggcttttaatggcgcctacaagggagcttgttcagcagattcacagtgatatagtaaagttcaccaaggcactaggccttacatgtgtgcctgtatatggaggctctggtgttgcccaacaaattagtaaattgaagcggggtgctgaaattgttgtttgtacacctggaagaatgattgacatactttgcacaagtggtgggaaaattacaaatctccgcagggtcacttatttggtcatggacgaagctgatcgaatgtttgacatgggttttgaacctcaaatcactcgaattgtacaaaatattagaccagatagacagactgtacttttctctgctactttcccccgtcaagtggaaatcttagcacgtaaagtgttaaccaaacctgtagagatacaagtgggtggaaggagtgttgttaataaggacattgcgcaactggttgaagtgaggcctgaaaatgaaaggtttttaaggttattagagctactaggtgagtggtatgagaaagggaaaattttgatttttgtccattctcaggaaaagtgtgatgctttgttcagggatctactcaaacatggttatccttgcctctctcttcatggggctaaggaccaaacagatcgtgagtcaaccatttctgactttaaaagcaatgtttgtaatctgttgattgcaaccagtgttgctgctagagggttggatgtgaaggagcttgaactggtgatcaactttgatgttccaaatcactatgaggactatgttcaccgtgttggtcgaacaggccgagctggtcgtaaaggttgtgccattacatttatttctgatgaagattctaaatatgctcctgatcttgtaaaagctttggaactctctgagcaagttgttcctgacgacctgaaagctcttgctgagggtttcatggcaaaagtaaatcagggactggaacaagcacatggaactggctatggaggaagtggttttaagtttaatgaagaagaagatgaagtgaggaaagcagctaagaaagcacaggccaaagaatatggtttcgaagaagacaagtcagattctgaggacgaagatgaaggtgtccgcaaggcaggaggcgacatttcacaacagactgcacttgctaaaatatcagctctcgctgcagcctctaaagctgctacccattcaatgcctacccctgttaatgctggtcaacttcttccaaatattggactacctgtttctgtgccaggtgtaattggtctgtctttacctggaacagcagcagcggtgcctggacctgggttgcctgttgtcgtcaatgatggtgcagcacgggcagccgcaatagctgctgcaatgaacttgcagcataacctggcaaagattcaagctgatgcaatgcctgaacattatgaagcagagctggagataaatgatttccctcagaatgctcgatggaaggtcacacataaggaaacattgggacctatatcggagtggactggagctgccattactactagggggcagttcttcccacccggtaaagtggcaggaccgggagaacgcaaattgtacttgttcattgaaggtcctacggaacaatctgttaaaagggctaaagctgaattgaaacgtgtgctggaagacatttcaaatcaggccttatcacttccgggtggaactcagcctggaaaatattcagttttttaaaacgtaagagactgatcccttttttctatattttctaatatttgcaaatgttggcctttgtatccaagttatgtttttttttggggttgggggcgcagtatctaacaatttagttacccaagaagggtacctcaaatggtcagggcatgtggtttgctcccctcctcgataacatagaaattgttatagtttcctagttaccaaatattgtagttttaggcagggatccaagtttcaaaaacaaaaaaaaaaaagaaaaaaagaaaactatctaacaatttagtacttattttatcacttcaggcttgaggtagcttcagaaagaaatgaaatgttcaagttctgtttaccaaccttgtagatagtaaattttttctgttgtttctttctggtgaagcagtggctatgccatcacttttgtacagattcttgctcgacctcacttaaatgataaaagactgttgtccttgtctctctttctctctttttcgttatttttgattttctgtgtttctttcttctgtgtattgtttccacttaccaatggcgcgagggatgttttaagcatcgcatgttacaattttgtctctgcccatcattattgctaatgccgtctctccagggatgcaatcatggtgcgatactgtttccttatttcctgttttattgcaacaacggatgagttcagggctatttacatacacacacctgtttctttgctttgctttgcatgagttgtggatttttattatttgatcaagttgcttatacttcggtttgcctttgtcatttacaggttttgaaattgcaggagcaaacagtaatttagatcccaagtctgagtaaaaggagtgtattactaattgaacatgatgatactagtaaaaaggggttatactatcctggatttctgcatacatggactgcctaaaggtgaccccgaatttgaaactgatgtagtgcctgcttggtatttggtgccattgtgctatatttgagaaagtacagctgagccatttcactaaagattttcatgttttcctgttaggaattccttttttgtggtggctgatggcattgtgctatattattattgttattgttattnttattgttattgttattgttatgtttatctaaatgattgtcttgctatatgaatgaacagaacaattttaaaccagaaaccgtggatcctcctactgtgttagttaatagtttgtgctgtgttaacaaattcttaaattttcagctgatgatgcagcatcgccgtaaccataaaaggcagggggagccaagccgagccgtccatccccttaaatttaagtttgtgagaaggaaatctcaggggaggtttcaggctcaggaaagaaaaacaaatgagaatcgtgtacgtttctgagttacaatctggcggggcacttggctcattcatgcattgtgattggaggggtcggtgggactgactactcattcaaatcaaatgtttgattgttttatatttttaccttataaaagtgcaagtgtatgcaattctatattaaaacattttctacttgataatcaagcgaggaagagaagtataatttggctagaagcatagatgacgttccattttttaataatattaataaggttaattaggttttttatttctcgaattttaatacgtactaaatcatgtttcttgaacttttaaaattgttaaaatttccttgaattattaatattgttggatttaatgatttttgtttaattttatcaatgaaagtctaataaaagtttaagagatatgatttgacacatattaaagtttgagaggtataattatagttatcgaattactaaatttgaatgaaattggataaaaaaatttaagtctatcaattttaatagttcaaaaagaatttttaacgatcagggggacataatttggtaaatgttaaagtttgaagggtatgatttaatagatatcaaagtttgaggagtataatttagtacataaacaatatcaaattagtaaatgaaattgaacaaaaaaatttaaattaaatataaaattcacggaggataatttgttacatgtcaaaagtttagagagtaaaatttgtaattagtatagtaataataataatgagtgaataaaagataaaactagtaaaagaagagtgccattttatagaaagaaagatgaaagaaggtgaaagttagtgttggtgcatattcgtttgggatgagggtgatgccatgacattgatatgtgtggcagcagcatatgttgtgtgtctcattctagttatctaattcattttttctttgtgcacatgtggacttttagtaccacatttaaaatatattagtaggttgtgtgtgtagcggtgtgattctttacgcatctatctaattattatataaaaaaatcatgctttctttcaactaagtttttcccaaaaaaaatcctttataaataaaagataaaagataaaagatctttcaaaaaaaaataaataaaagataaaaaattcatgataaaatataataaaagaataattacataaaatactttcttttataaaaaaaaattatatttttatatttaattttttttttatattttcacggtattttataaaaataataaaaaattacataaaaataatcaaaaaataacatttaaacagtatcaaaataacatataaataacaaaaattctactaaaagaataagagtacaacataaaaaaatatatcaaaatactgtatttttagtaaataaattataaaaatagtaaaataatttaaaattaggtttgtaaaataattcctaaaatagaaagtaaaagaccaagaaggacatgacattaatacattaccagaaagaggcttcaaatattccaataatgttcaaaaccaatgcccattttagtcgatgtattatatatattattatttttgctgaactgctattttaacaaattaccatatttattcaacaaaaaaaaaacaattactatgtaacaaataaaaagattaaaaacagtacccccaatttgtggggtcagtacgtaacgtagtcctaattcaaatcaaatcagagactaataatcacagaagggtcatccgataatagcgggataaactcttttttagctattaatcaatataaacattttaaatatgcttaagacatgaatgatgaatgactgtatgtatatgcatgtaatgtataataatattatgaagaattattagctgctgcgcacagaaccagccgttcccgccacgtggttttgtgcatggtttcattactctctctctattgctaaacctactagtcttatataaagtgtactctcatcgctgacccttaaccctttcttcttcttcttcttcttttaaggtctaagttgcagaggaaggaagtatggaccttttggggctcttcgtgacagcatctataccagtcttgaaagttctattgcttaccggacttggttcctatcttgctttagataaagttaatattttggggaaagatgccatcaaatatttaaacacagtaagtcaaaatctatctatctatgaaaatatatatacatatataattaattgtgtttgtgttgtgtttaactaataattaccaaatcattaccacaccatatacagattgttttttatgtattcagtcctgcgcttgtgggatccagcctcgcaaataccataacatatgatagcatgataaagttgtaagtaactaaagaaaaacgaagaatcttttgttggatttgctggtttgtaatggtgaatttgattaagatttgtaattgtgtggaatgtgttaggtggtttatgcctgtaaatattctcattacatttattattggttcattacttggatgggttgtgatccacttcacaagaccacctcaacacttgagaggcctcattttgggttgctgtgctgcaggtatgtagatcattattcactcactctcaagtcccaatagagattagtgttttttatttagaaaagatttaagataccaagtcttgttttgatttaaacatacaggaaatttggggaacttacccctcattataatcccagcactatgtaaagaaaaaggaagcccctttggagactctgatgtctgctatacttatgggatggcttatgtttccctttcaatggctgtaagcttctttcttatattgttttctgcaattaattagaatgttattgatatttactgaaacaaaaactaaaactttctgctgttctcttgtcttaaaatcgaaatcaagttaggttcggggacctgttttgttgttttttcttgtaatatgcgagttgatgatgatgatgaatttgcagattggagcagtatatttgtggtcatatgtgtataacatcgtccgtgtatcttcaatgagtataaacgacatcaagtcttctagtggttcattagaagaaccactactacttccttccccagaggatgttgcaggtgaagaagaagtactgccaaagaccgtacatgatgatgaatcttcaactgctaaggttgtacaacaatactcttactaattcaaaatcaatcacattattcatcttcttgagctgaattgtatgcaggtggggaattcagaaagttcagggataaaacaacgtttggttaaactgtttagagggttaaatctcaaggcattgttggccccttcaactattggagcggttaggcaacaaaattctgttctgtatatttttgatcatttagttatggactctctctactcttaacacacttattttctgttatgtagattattggatacataattggagtggttcctttattcagaaaatctttgataggaagtggtgctccacttagagtgatccaagactctgctgtattgttggggtacaaactatgtttttccgaaaatctctatataatatacatcttattaaccatctaaactgttctcccaaactctgcagggatggggccattccagcactcacacttataattggaggaaatcttcttagaggttgtagatacacatagaagcaaacaacatttaagatgactaaactactaagaacttcagtttaactttgttgttgttgttgtctttttaaggtctaagagaagagggaatccagaaatctctagttgttggcattgtagtagctcgttatatagcgctccctttgacaggcatattagtcgttaagggggcagttcatttcggtctggtgcagccggaaccattgtaccagtttgttcttcttctccaatttgtagtaccacctgctatgaacataggtactacaataaaaactcttttatttcatatatgttgtgtgtgtatatatattaaaacctttgattttccctctctcaggaaccattacccagctgtttggagccggagagaaagaatgctctgttatcttgttttggacatatgccttagcatcaatttcacttactatttggtgcacgtatttcatgtggcttgttgtgacatgatgataattgagaccatattgagtccgtccaagccacttttggacacagcaagagtcatgccgtgttacaatttattttattatttatgtaaaaacaaattaaggatttatttaatcttggcagctcttacaggctcattaggggtacatgaattgaatttgttgatagttaagtcagtgtttaaaatatctagccttatgtccttgttctatgcttgtgaatttacttgcaagaatctcattttatagtaaaatggaaatgagtcccacaacttgagggaaataaaatttgcgtaatactttgtcttcttactacacacaagtttatcaagttgttacaattaccagtacagtaccaccaactattactatcacgtaactagaaatataacaatgcttgagaaaagcaaaatcaaatagcaacccctcagaaagcatatagcagcaacccccgtctccaagtcaatcccactcttgtggttttgtttagttattagagagcatccttgttgagaccatca

SEQ ID NO: 257 - DNA, 5703 bp, Cannabis sativa
tatgaatacaattttttagcgcatgtatatattttatgttattttcttttaataaaatgatgcatttgttaattcttctactgaataattatgctatttaaccttatttccctttaagttgttttttttagtattcaagtttaatgattgtagatttctcaaaaaaaaaaaaaaaaaagtttaatgatcgtagtatttctcacctctttttttaaaactcttgcgataagagttatgcaacactcaaaatttacacgaccacagagtcgtttttgaggggatgaaaaattaaaatgaccacgttttgtgtttgacctgataatttgacaggccccaaaacaagcacatggtgtttttctttttcatttcatatacaaattacaaacccatcatccacatttgagtcggaaatgtgaataacttttacatgttaccaaattaacatatgctatcggcaaagttttcttaacaaccacttctttcgtgcttttacatccatggcaacaaacattttggccttactttcatcttctaaaagttcacaagcttccaagaagacctcctcattcatatctggtactgtttcaagtgcagctacaatattttcaattgagcagtagtagtccttttcttcttcttcttcactactttggaaccagtttgtcatacctgttttatcatcaattgtttctttcttcatttccaccttgttgattcttctttctctttttctaccttctgtttttgacaaactagtagattttcgcttatttcgctgatcagatatttcgaattccttctctggcaattgcaggtcatgaaatgcatcatcatcatcatccatcctcatagttgggaaattgctttccatatccctttctgtactcacatgtgatcttccgctagggacaccataaccgatagccgcccataactcattggagctattataaccatcccagtacgaaactgcatcaggatacacctgccaaaaaatcatgatcccgtgaattctaccaacattatgaattgtcagaaaagaagattcagtaacacaaaacagtagccagcaacttgacaatggttctccaacctcatattacattttaagttttacacacaatcaccaactatattattactacccagttgctgtagtgagaaagataaaatgtcctcatgccaaaccgtggaatactcatgactgactttcaactaaatataggctgagcttgctcacataagtcatattctctatgcacatgctgacaatagaatactgaatccctggacttgccacttaccatgggaaaagtatcaactggggactgttgatcttcttcacctgaaatttatacaaggggaaaaaaaggcagccttagaattgatataatgttttacaatagttaataaaaaccttatccaatatacacattactgtccattggcgattatgtaaaaaaattctgaaaggtcctagacatgacatataaatagtcatgcatcgacacaatgcttaatgtttacaatatcaattttctatatgggtaatatggaaatttcagacatccagagcaacataaattaaggtagaaagagaagaaaggtacacaccgatattttcttcgaggtcatcgtcctcactatgcattgagtgactggaatagctgtccttttgcattgtgtctgcttctccaaatatcaagaataaatcattgaaatttgggaaggttctataacggtatgatctcaagtcagggtactcctgcacgtgcttcatataagcaggctacatatttatgatgtgtgttttatatagacttgaagataccaaaaaagagtacctcgacataagcatcccagagatcatcatcagcaactatcatttgttgcatctcatcccaaacaaaaccattctggtcaagtagacttttcatgtcaataaagcgtttcctcaaattcagagaacggtttattaagacatctctgtcatactgagaaccgaattctgcactgaactttgcaattatatcagcccagcctaacttactaaatttatgattaagcatgcttccattgcggacttgctctagcattaaatcaataaaatatcgatccttcgctggggtccaatcagttttccggtggtagctattgttcagtttggctccttcagaattcagaaagagctttaataagatgaaagaacaatgtcttatttatcatattcaaatgtgtgtgtatataaatttatatgcatatatacacacactcaaaaacacctataatatcattagacacagaaaaaagggcttagacaacaattccatcctataaaatacttaatcagcaaactccatcatatgtctgcatcaagagcaaaattgacaaagtttatggactacagaatatgtattgttagtcaaaatggaaagcacccataaatttgtcagatgtagcctcattaccagtgcaactaacatattggtctgcttggctacatcgtctgttagctgttgaatctccatatattaagcacaaatcattgtagttaggcttggatatgtctctgtataattttgctccagggtgttcctacagcaattctatgttagtcaccacacacaaaaacacaagttcataagatttcgttcatttgagagtcaaaaagagaagagaacacctcaatataagtatcccaaacatgatcataagctgtgaccatttgttgcatttcatcccaccagaaacccctctgtgcaagaagatccttcatatctaggtattgtttctccaaattcttagatcgactcctcaaaacatctttatgatattgcaatccaaatctttccttgaacaatgccactatatctatccacagttggttgtcaatggagtgattgatcttgttcaacttatgaacttgctccagcataatatcaaggaggcaacggtccattgaaggcgtccaatctattcttgaatgatcatcattaatatcactctgaacttcttcctcatctagtcatcataaataatgtaagcacaaaatcaattattaatcaagacaatactagaaacaaacacaaaacaacagattgacacttctatttatttatgactatttataatagttaaggtcttagatacttatgttttcttttctgttttgcatgagtctgcagttattttagcctgactagaccaatcagctatcttagcttggtttaagtgaacctctggatctggaaatgaatactttagaactaacatgcagaaaatgtagaaagaatagttgctctacaatatatttcttgaattatttgagactatgcctatgaaaataaagaagtatattgaataattatattctaattaataaaaataattagaaaataagtaggtcatacccaaggaaacttcgtatcaaaatgaagaagtgatttcaaattatggttccatagaatcagagaaagtgctgagcaatgggatgttgttagtacaagaaaatgaaaaagaaaaagtacagggcaatcaaacaaatagaactaagtaatgagagacaaggagatgcttatcattttcctgactcaagcttaataagcaagcatttcattaatgtgattaacctaaattttatgatacttattatactatcagtaaagtccaaaacattaaattttattcatcatggcttaagaagaatatactaatcatcaagtctggaccttcactgtcaggatccttttcagagtacgccaggtgatcatcacctgcacaatgcccttccccatcttcacctacatcaatttctccttgcttcaggatcatgagcttacattcataaaatataaacataaagtggcaagtattactaatgttactagtaaacataagttaatatctacaagtaccacaaacttattcaacctgtaggacgtggtaatctaatatagaatggtaagtttcacaaagtacaaactaaaatgagataaaaccaacataagtcttaccagcattgaattgtacaatgtcactgtcaatgtatttccctttctgaatgtgaactccattgctaattgcatttccatatattaatcccaagtcttgatagtttagcaagggtttcttcctatagaaacgtgcatctgggtgtgcctacatcaggaataagtgtcagatatatcgcaaataataaaaataataataataataataggcaacagtaatataccctaatgtaattatcccaatgaatagcatcagctacaatcctttgttgtttttcatcccaatagaatcctttttcttcaagtatgctccttacatcagtatagtacttgaacaatttcttatatcgatgttttaagattcttttgccacactgacagctgaattttgtattgaacaaaatcaacacatttttccatgcttgtctcctaaaatcaatgtcgatcttgttgcccttgttcagttgatcgagcataagtttcaaaaaataatgatccatggctggtgtccaattaatctttgacctctctttagttgtaggaccaaggttactcacaccaatagctatgagaagatattcagtcataaagaaaaagtgatcacaacattttattagcaatcaaatagaaagtaaccaaacctattcttacgtggcccaattagttttgtgaaatataagcacaccaaaaacacaaatgcgaaaaaaaaaaaggaagaagaagaaaaagaagaatgtttagaagagtaaacatgtctcatggcatatatgaattcaactattcaaggctataatagagttttattaaatataaaacagcagccaaaacaattatgacaacctaaagatgaaagaagttaatcagctcatgttgacacagaataaccaggctttcaatgattatccaacatagaactaagcactctcactaaggaaaaacatctcccaaaataattataaattgcaaattaagaaaaattatatcaattgaaatgataagcattcatgtaagacgcaccgaaacccacacccatattcatcggttgaatttcatcatcaaactctatatcatgacttgaaaggctgtatctcccatctgctgttgtatgtgaatatatcaagcacaaatcattgaactttaccaaagctttgttcctaaaagattgtgcatccggatgagcctgcatgcattccacatcaaattactttaagaatagtgacaaaagtttaatcaaattaaacaagcagagcacctttatgtaggcatcccaaacatatttttcagcaaccaccatttgtcgactattgtcccaagaaaactcgttttgatcaaggagattcttgacattgttaaatagcttccacaaaattgtgtaacgactttttaacatatttaaatcataaggagatccaaatttggcattgaacatcatcaacatatcattccaagcttgtttattgaaagtatgacccatcctatttcccctgtgcacctgatccaacatcatatcaataaaatagttctccattgctggtgtccagtgtgtccttaaatggtctgggctttccatctctttccctgacaatctttaatatcaggataatagtaagcaatagacaaaccataactggtaactgttaactgtatagaggtgcacctaacaagttaagtatgtaatagcagactatataat

SEQ ID NO: 258 - DNA, 5322 bp, Cannabis sativa
tttttttttttttttgtgaagggggtcaaaaagtaagttctaaatattacaaaataagggtattcttcctgtgtttgaacccttgacctttaagttaatttaaccattatacaaaagctagtgctatgtttatatgtatcgtctttaattttaaatatatgtgagtctgcccttgtgtacaagatagtgaaatcatatcttctatggtctattcataggaccgaatcactcatgccatcgagtggcgtcttagagaaagcattatcaaaacaagtgcaatattggacaatagcagcatcaaaatcaaaattaaaacctctgaagagcaatgcaagagttcaaaatcagttattcaaacccgccacatcaaaagggttcaaaatgcaagaaattagaattggtacacaatacgaaacaaaacaagtctaaactaaataaattagaccaacttacatatctccagcccagaatctgttggcaggaactgcaatagatgtcattcacagtatgcaaaccactaatgagacttcgctcttcggtaggcccaagtgatatgtttaccctggaaatgtttagtaatgaacacttagacttgcaggccttggtcaatgcctggatcacatcatttcaatgcatatagagtctcacctagattcttacatggacacccaaaaagcaatgctgtcaataaatgagaggtgttgaatgatgccaatccaagaactcaccattgaaaacagaaacacccttttaatatgacacagttaaaagctcaaaacaaagtatagccaaattaaaatacagagcttgcaatacaacatgttatgtgtttgtgatttcatacaacaagaaatgcggtcatacatgttcggtaacaacattgttaagcatcctaaacaaaaggaacgaaaaaccacaggcaactaacgaagatgaagaaattacacaatgaaacagtcacagaacaatacatggtgtacaattaaaaaacgatgataaaaaaaatcccaattcccaaaatcaaaacttgctgtatcaggtaattgaaagaaaaaaaaaacgaggggcaaaaggggcttacgcatgcctaaagaggtaggctctaccaaaacgaccttgaaaatccttggaaacgatgtcttcgtgggaggcagagtcaaccttgcaaaacttacacttgaagatcttgtgcccactcagcgattcaatatatagtctccccatgattgataaataactctctcctcacctttgccctaatactaaaactaaaagtaaaagggatcacgacgagctttggtaatggtttggttcccctctttttctaatctaaaagactaaaacagtcaatatcccttttagaatatcttatttaaattaaaaaatttatttttattttttatatataaaattaaatgtccctctattgatttttgattgtgctggaaagggattatgccttttcggtcaggtcagacagagagtattagctttgggaagttcactgaatccgtgacttgactgtgccatgaaagagttaagaaccactaatacaacgacatgtccagatcaaaaagagggtatttctgtcatttcagctttatgtgtgagccaaatatactttaccttaacccccattgtcattcctttcgtacagtttggttcccactttattatttggtttccaagcaatcttcccccattggctggaacgagatctaattattcattactcttttattcaagtgcttttctttttcatctccaagaagatatttcacaccaaacttccaggtcaaagagaaaataagaaataatttcaacaacaaatttgaagtttcagctaggaaaaaagaaaaagaaaaatccatactatatttgactttgtctttataatatctgtaaatagtgaaaaattgatacaccctttgaattgttctatttccatagaatcacttcaaagcaaagcaaagcaaagaaaataaatagtatgttctttcctcacattacaagcaatcctacctaagacacatttaagaaacggacttttgtactccaacacaagcgagatatcttattatgcaagaaatgaaaaaaaaaaaacatgagaggtgaaacacaagaacctagtaatgacataagcaaaaaaagaaaaacttgtattgtatagcatagccttcttaatacccccttcacttcatttacattttctactttaattctcttctacaagcatcaatcacccacgggaaaaagaaaaaaaaaaaaggtgagaatgaattaaatttgaattaacatttccatgaactccgagaaatctggtcccgtggagaagaaggaatgtggaatagattaagtggaaagagactagttagaaccagcaaaagattgttcagaaaattccatggtgcatagctttaagaagagcagcaccaaccctttttaagttcgggccctgtttctggagttccttctgcctgtaaaaccacagtctttccattccctgtccatgtaggatcctgtttcttaagctcttgagaaatcataactttacggcttaatatgtggtagatctctttcacaaccgtctgaaaggcagcaacaacattagatgaatcaagagccgatgtctccatgaaaaacaaaccctgtgcttcagccaaggctttgccttcagcggtggatacctccctagcatctttgagatcagacttgttaccgacaagtattgtgactacattcatgtcggagtgagctgttgaaatattacaccacaccataccaattaatacttttttcatcacgttataaaatggatgcactgggtgttaaaaccaaaaaattaagctatatatacatcaatagagaagtacaaggcaagaaaatcacagttatggatccattttctaaccttctcaagttgagaacaaaatttcatagttttcaaaaatatgactagcatcaaaagaaaccacaatgtgagctatagagaaagaggagaataaaagagaatttgtgtgtatgcaggtgagcatatgatgtaaagccagaacaaagacaagtcaagaaagatttccaggaatcttactatgaagttcattaagccatcttccaatgctatcaaatgtttggcgtctacttatatcgtacaccacaagagctccgaccgcacctctataatatgcagatgtaacagctctgaaccgctcttgaccagccgtatcccatatctgtgctttaatttcctttccattgatgtcaatcttctgtgtttggaactctactcctatagttgattttgaattcgggtagaactcatccctagcaaatcttgcaagcaaatttgattttccaacagctgaatcaccaataagaacaatcttgaaaagataatcttcagttttttcctcagaataaaaagccattgtcagccttcacagaattgtcactctataaaaactaataaagagtagccatctgtagtttgggtctttaaggactcatatttaccctacgagacatcaagctttaccatgttcaagaagaggagggaatcactcatacaagaagaaaacagctgacacaagaaacttggatgccaaggcaggtatataaagaaacataagctgccactcagtaatcactccagcgaaagaaaaaagggcacagagcacaattataaaagagatggggaattccctggctccactttcagcttcctgcacagattttagtctagcagatcacttcctcttcagttaaaggaatagccctccataaaagtgacacaggtctaagatccctgttttgtggtaagggcatcaagacttacataataacaatacataacaacgatgcaacttttaataaactaattctataggatggctgagggacagtgcattttgtgaattgaccaaagttgcatacatgtgcatactgcaataactataaaacataaatttctacagaaataggtaatacctcaattctttgtttgacttgaactttggcctctttctagttcctactccagcttaatgcttcaatggtcaatcctgaggaggaatgatgtttaatagactatttcttgaaacaacatatttcaatacgcatgtgagtgatgtcacaacatccgaccatcaaatcagaagcttcttgcttcattgaaatactaccaaacccttaacatgatatttcacgtattcaaatatgttgccagcattattacatgacctgactagctgtgttgaattatatacatgcaatatgatgagaatgcagggaccagatgaaaattaacttgtaaatctgcattcttacgttataaaaattgagtgatccccttcatatagcttctttgaaatcttgctttgatgaaggtttaacaaaaaatcaatttaagtctcaaattcagcttattctaaatatgctgagataatatgttaagatgtaagttgatgagtcaatttcttccattattctattattgaatttttttaaatagatttgcaataattgaggtcctacatgaatgattatatggcagtggctagataagtataacaaagtagcagaggttactttcaatatcaccagtgaccccaaactattcaccctcacagaaagaaaagccctcccttttcaaaataaataaataaataaaaataataattaaagaaagaaagaaagaacagcccttctactgtaagaagtaataatagcattatgacaaatggcataagttctaggaaccaatttacaaacatattcataccataccccaaccgctagtaattttcacatgtcttgtctacttcatattgtaaaactccattaacgagtattaatcttcaaaaaccagagtcagaaagtataacactgtaaaccattatataaatcttcaaaacaatgaagagaatagattctaattaaaaccaagtaaactagcttatgttctggttactcaaaagatattctccttagaagccgggaaaaaagcaaggtcatgaaagttcttattccatcttaaactaatagacaccaagactcaagagcgtcaaccagcacccccctctgacagtcacccaaaagtctaattgtattatactccactttaacacatgaaagaccattttaaaaagtaacacgcctttaatttcctatcaccagaatacccttacagatgaagaatttcccttcttccaactcttcgaagaacaaaaaatcaaataacaaattctgaagtttctaaatttctattgggaaataaataaatagcaccgttaaaaggacagaatgctcataaaaaaaaaaaaaaaa

SEQ ID NO: 259 - DNA, 2493 bp, Cannabis sativa
atctgggaagattaggaggttaaactagcagtttaggaggagaagtggaacgccaaataccggtagatatgcttagatcacaaagcaaaaactgagcaagaagttgaggggaccgtacgctccctttaagaggccttagccaaggccacaaaggagaaggatatagccgaggcctgcgtggtacttcagtcttagattatctccaccaaaatccaacgagtcattaacttccaagaggacatctgtcataaggacttactcatcgaaaaccttcatgccgaacacgacaaggagaagaaatgggtgaagtcctaaataacacaacatggaaatctaagccttcttctcaaaggagcccatcgtaattgtgaccttcgatagaagaccatcgatagattgcaaaagaaagtcgatcgaagtcgagcaaaaagtgtaaaggcgtacattgctttagctgccaggcgtagaataagggaaacttcacccagctcatttaggacgcagttactaaggtagagaaatatcccctgaattccttggagatgtcctatgttgtggtccttcacaacttgtggaaggaagatccttccatacttaggctcattgacaaggaagatagggaggatttttctaggggagtacttgctattaaacataacatgtatctcaagcagtttcctctctccgttgatagcgatagcgatgaagaaacaagtgctgaaatctcgagttcttaggagtttgcaaaagctgaggtgtgtcctggcatggataaggaggagcatgttcgggacatcactgggcttaacccgaatccggaggtgccaaccgattccccaacccaaatcgactcagtagcaccttcccctgtccaagatcaataggggccacctttgtttcttgttatctatctttttctttaagacaattttgattccttttggtcgcggagttgtatttactttggcctggtttgcgaggctgtataaaacacttgtcttcaggaacaccttggtttgcctttctaggaggcaccatgttttgactttaacatttcgtactgttttcaactcttagctttgtacattggcctgcatagttattttaagggctgtcatcttaggccgtttagaagttgtggttccaacggccaatgcttcaaacctttgacattggttcaccttctatccctctgctaagttaggaggcacttagaaagtacctgtttcctattgccaggtaggatggtgtttgtttggacctttaaaaaatttccttagccaagtaaagttgcagaaaacgcgaatggtcttctaggctattatcggagtactacatgatcacgaagccttgatatttttttggctgttcaagcctttttataatttaagaagttcgatttcacatgctacaaacttcagacgacattttcctagtcatgataaagccaaagtctataggagttcaagcaaagccttaataatttcaaatttttaaacaactctttctgaaagtttctcagaagggattcaatagagtatttcctatttcagggaattttcgccgaaaacgcttcctctttcaaatggtgtgtgtttattctaggtttaagaaggaattcaagaaattttcctttttaaggaatttaggtgaaaacacatcttattttaagcaaaaattacaaatattgaaaagcaaagcaaataaataatgaatcacggcacacggtacgttttttaggggcacaaatggctaggcatgatacccccgaagtgagctgagaagtgtggacatctccaacttcccagtcacttattttaaactagcttgtggccaaaaaatgcgaagtggaaatttagatgtaaattgtttctgttttcattacatgatgcccgagggcctttcgtacaaaagttaattacatagatttttacacaaaacaatccagatattgtcaaagtctagtttaatccgcctattggtagtatcgatgaaagtaatctgtgttccaggcgtgagggaccctcaatccatccatccttttcaattgaaaagtaccttgacccactttctcgagtatctcataggggccttccaagtttgggccaagcacccccactcttggttcctgtgaagctgggaatactcttcttagaacaagataaccaacatggaatgtacgaatttttacctctgagtaaaagtgtcgcgtgatcttgccttggtacattttgagctggacttccacctgttcttggagctcttcaattaagtctaacaactcctggagtagggaatggttgccggaagggttgtaagtgtctcatcgataagaaggaaccgtgacctgtactgggatcactgtttcgcacccataggccactacataaggtgtgtgtaacgccctaatacttaagcgcagtacagtgattttcaaattaatgtgccacctgtgctaatcaaagggttttacttaaaaatcgtgtcaaatta

SEQ ID NO: 260 - DNA, 3320 bp, Cannabis sativa
ttttttttttttctcaaagtaatatataaatagatgattaagaactagaatacaaattacaattttcatggaaacagagatttgtcatcccattcacagaaaaccctagataaagacacccacttttaatagtgacagtatttttttctacaatcatttttttttttttggattcttgataccatttctattcttttcccctaaaataaatattaattctgggtgtagaatatatgaatataaatccattcatatattgaggtggtagaagaatctgaagacctcacattcatcttttatctgcttgaatctttcacctttccgagccaataatccggcatttggattcaaggtctccacctctcttcactctcgttatttatatatatttgttatctacttttcgaattactttcctttttccgaatcccaagatgggatcctcaaataatattctatcccaacatgtccatggctgatgatagagattactgggtttttcttgtatatgtatataatatatatataaataaacaaatacccaacatttataaacgtgggtttatccctgtttataagacttcaattgtaatctctttttttcgtgagtcctcttgccttatgatttcctatatgtttttgaaaatcattcaaaaatattgttttgtgtttctagaaccatctacaccgttcttttgattaaactaaataactctaccttgtttgttttcatcttatgctattgactcacgctgatattccaacgtaggaagtcaatgctaaaacctgttacttcttctaggattcatattgagatttttttttgtgaatatttggaattcctaatttttgttttatgtatggactaggttaggcctaattacttttaggtactttctgatttcttagctctctacagtcctacaacgagtacaaagcttacagctttgccctcttttaatattgctctattaatgtgattgttaggaatttgtatgaccattaattggctctttggtcttcctttcaccagtgtttttgcttatttttttttctaggttctttaatctaagggctggttatcaaattctttttcttccaagctatttgtagttgtcatgtgttaattgttggctcaattagtaaaccaccagttgttgatttgtgtagaaagcttgctggtagaaatttacttgttaggatacttatacatggttttctctggataagcttaggaagttgtcaacaagagtggagtaggaaattggttttgctaattgtatttatataatattattaatctcattagatattgtattcgttttacacacacatgacttactcttgtgaaagattagacaaaattttcaatactagtcatcaggctatgtacggatttgactttatggaacctacataaaactttaaattatgtatattttaaaaataatactgaattacttaaaatttaagaaattgtgttcagtattttatgccaaagacatgatttttataagctagttgtttataaattttcctctgcgacatgaaataatgactgcttttatatagttctgtttttgttctagcaattgcaaagatgtgggaaattgtgttcagtattcatttttctattgcttgcttttttcagatggaagtgcaaaattctgagcatgggcatattattgaagtacgaggaaatgttccagctgaagacagaagctttcgtgggattaaggtgtgtggtgaagcgccttgtgggtttgcagatgctaaaacaagctctaaagatgcagaggaacgatcagcctcaatgcgcaaacttttgacagcagttgttctctgtgtcatttttatgagtgtagaagttgttggaggtattaaagccaacagtcttgcaattttgacagacgcagctcacttattgtcagatgttgcagcatttgcaatttctttgttctcgatatgggcgtcagggtgggaagcaactcctcgtcagtcttatggtttctttaggattgaaatactgggtgctcttgtatccattcaaatgatatggcttctggctggaatccttgtttacgaagccattgctagacttgttaatgagactggggaagtaaagggctttctcatgtttgctgtctctgcatttggtttagtggttaatattgccatggcactgttgttgggtcatgatcatggacacggggggcacgatcatggacatggagggcatcaccatagccatggggatcatggcgacacacatcacgggataagtgtgaccagacatcaccaccaccaccatgggagtccatcacatcatgatgatcatggagatgatacaactgcacccctgtttaagaatcactgtgaagatgaaactcaaactgaaagtggagttaaacataaaaagcaatggaatgtcaacatacaaggcgcttatctccatgtgctaggggattccatccagagcgttggagtgatgattggtggagcagttatatggtataaacccgagtggaagattattgatctgatatgcacactcattttctcagtagttgtgttgggaacgactatcaggatgctgcgaaacatcctggaggttctgatggagagcacccctagagagattgatgcaacgaaactcgagaaaggtctctgtgagatggatgaagtcgtcgccatccacgagcttcacatttgggctattactgttggaaaggtcttgctggcttgtcatgttatagtgaagtctgatgctgatgctgacatggtactagataaggtcattaactacataaagagagagtataacattagccatgttacaattcaaatagaacgcgagtagatctgtagggctgtatttaggtgagacagtctttcaaactggatattttactatgtaatttgaaatattattgaagcaggcctattgctttaaataatatttatccctgatttcttgtgtatctaatatttttggcagaaagctctttttcaagtgcatttctttgtgtgacaagcattcacagttttcttttctttactcagacaaaaataattcacagaaagaaaaattccggttaactttaaacaaggagctctcttggccgaaaactcaaaacggatctctgtcaaacccttgatctttcaaacaaatttctgacaatttggttacaaggaagttgagaaaaaaaaaaaaaatttgctccttgactgtcttttaaatttgctttgaaaaattctatggtgacgagttggccttggcaagttgtttagcttgtgttgccagcaatgatgctagtttg

SEQ ID NO: 261 - DNA, 4785 bp, Cannabis sativa
  modified_base (3360)..(3360): a, c, t, g, unknown or other
ttgtctttttcttgatgcagaacttgaaatcagacctgagcttgtggcagctaggtacattaccccctggcctaatagccttccacggtcatgttcaagtaattgatccattttggcacatgttggggcttggatatcaagagaacacaacttatgttgatgctgaaagtgctggtgtcattcatttcaatggcagagcaaagccttggctagacattgcctttccagaactccggccgttgtggtcaaaatacatcaatttctctgataaattcatcaaaggctgtcatattagagcatcctagactttgcatttttgagaggaatatcttgatcttactgattataaagaatcgtattcgttgtatatgagaaagaaaagagaagatgacacagtcttccccaattcaaggtcttcaatgctcaatgcaagattaagataaaagagagccgtgtgagcacccacggctccactttttccagctctctttgctcagttggaattctctcatttagctcactttttttagttcttgtaatatttttgtgttgttaaaaggtttcaaaaacaaataaaagtaataatactttgttaatactctgcattcatgatgcagaaatcacatccaagcttgttaatattttcattagagaaagcatgttacatttccattgaaaaaacttagacagagatttaaaaattgggctgtatttggcacaaagaatggctttgtgaaaaagatacattttggcttgtgaaaaagataacaaggacctctcaaatgacatctccaagacagcttagtcttaccatttcatttttgttttaaggaaaagatataaaatactgaagttcgtaacaagtaccacaattatattttggaataactcattcgatattccatgttttaacaaaatacaaattacagatactattttatactgattttcaaattacacatacctgatgattattattttactccatatttttacgaaatacaaatttcagctactattttgtattcacatacatgataaaatctgttcagaggaccggttactggtacaagaatcactccaatctaattacagagactattttataatatttcaaattacacataccttatttattgaaaaagataacagattcatgatggtttttttgtttttttgttttttggaaaaaggatgccataaagatatatttccataaagtaaattccctaaattttcttttaatgtgcaacaaatattgatatttaagtcttatcaaaaaagaaaaaatattgatatttatttcatgtcactgatcctcatcaaaaggtattgttattttccttcagttcactctttcgagtcgatctcatcatttatgattaaataatatattaaccgtaggctatatttgcaatctcaccacaatatcagttaaaggtaaacaattgaaactccaaaagcgaggaatgaaaccaaaacttgaaaatctatttactaataattacacacacttacttctttccagtgacattagacaccaaatctttcaagaacttcacagacttggtcaccggtgagttgacggccatcaaattatacaaaacattctcaacttcaccaatcgatggccgagctttgaacttggagatgaccctcaactctccatcttcttcttcaacaagcacagaccacttctcaccactcacaactccatctcttacgcacttgaaaatcactcctcttcttttgctcaaaattcctttcacctccaaacccatgaaagaatacaccacttcaaaagaccccacaaagctactcagctccccaaactcactctcctcctcaaaagcccatctggggttgaataccaccacgggcctcgggtaaaaatcatccgaaacactcttcacattccccaaatcttttacctccggagctagaaacactgccacgtctgcagagctcaaaccaccggtagtgagggaagaaaagtcaacgtggtcaactgggcatgaagggtaagactcgaacactctcaaagcagcttctttgtacgaatcattaggccaaatgattaagatgttcactggggagccttttcttttgaacggtagttctccaaacacctcgaaagataatcgggagagagattccggggagtcatcaatgaccggaatctcgacccggaatctgggttgcttcactctcttgagcttgttggtgagcttggtgttattgaggggtttttctagtgtgcttgagaggcatgtcttggcttggagaatggccgattcttttgaggtaggtgggcttgaagaaggtaaggagcttctgatcgggaccttgatccacggcgaagagtttttgtggttatgaaatacgcttgtagtagaggaggagaggtggcagtgatgatgaacacgaaatgaagatagagaagagaatgcatttgcgagttgggattcgaattttgtgtttggagttggagtagtgtgcaattgaattttgagaagattggacgccattgtagttggttataggtgtatcaatggatgaccagtacagtagccaagaaaaaaaaggtatataaacagataagatttctccacagttaatctcttgtgaacagaatctagtcaagtcaaaataagttattgtttttcaacagtaactaagaggagacaaaccatggtagtttgttccttcttatttttattaaataaattatagttttgactttaggtgttacctcaacaacaaaattttatttccactagtaattctttactcagtattgatccaataaaaaaaccgcaactacgccagattacataattcctcctatatcgatcgtgattctcttttcgggtttcggtctcaagctcgagtgtattttgaagatgtattttggttgaatttcgactagtgtggtgttataaaaaattctcctttttttgaatgatagagtctccaatttattagtaaaaatgtatataatattatatatatatagggatacgattttatctcatgttgtacttttatgtaatgaatttcgtagtacattagatgaatctcgggtattatcttagatcaatctcagctgtcaaatcaaataagtctttcatctgacggttaccgtacatcacagaatgcatttcgtgaacgtacaaaatcatatccctatatatatattattgaaaatttatttgtgatataatttgtatgaaaataatatcttttattgatagtgaggagataattggttagtgaaaattttctaaagatagttaaagttgtattaattgttaaaaaattataatattttttaaaaaaaattaccccatatactatttntttaactttttttttctttcaaatttatagtttaagtttctaaagtactccggtagtttttatgtgaattgctatacgaatttgggttgcaattttgtcattgaataaatgctatttaatatttagtgtaattttataaaaataaaaataaagaggcatggattgaacattttcacaagttgcatagaacaacaaattatagcacttagtctagtattaattttttttttttcaagcagcattagctattctaaatgtagattcatatttaaagacaaatagtgattacattaatctaataagagaccacgcctaaatagtaaataggctaattttgcattgcaattaggattacgcctaaaatcccacctatctctacaaataatcagaacacacagctgtgggattgcgaggttgcaatctcatctgccgagtgaggagcaaaacttcacattgcaatgcctatacaaattcacccaccaaacattttccaagttgaaacacaagttgacagagattaagcttattgccatttacatgaaaataccaccaccaatgcatagataagtatccaggttgcaaatacagtcaaatcacaaccaaattcagttagaatttagaagactacatttaaaacgattaaaagtcaagaacaacgagactactgacacttcttcggttgggtagggacacagccaagtgccccaaatacaccagggcttaggcaactggtgggcggagaacatgatcctgcgaggtatccacagaagcgggtggcatgaactgccacatagccaccccagggtaaccaatgaatggaaccaacttgttgccaggagcctggccttgggcagcggcaaatgcagcagggattgcaggagggggggccaagaatccaggttgggcattcatgcccttcagttgttgttccaacttttctttctcaaccttgagcctctgcttctcatcacgaagctcattcttttccacctaaacaatagagatcacttttatatatgctttgttcctttgacataccagtgacttttaggaaatccttgtttttgtcacacagctcaaagttattgagaaatgtttatatataataataataaataaattaataaaagaaacattcaggtcaaaaattgatcatttcgttttcaaataaagaaaattaagaaacacttgccttcaattccttgatcttctcctgcagactcgaatttgagtccttcaacttctgggcttcaccgcgcaactgatgcaccattcggacggcatcaattaaaatagcagccttgtctgttttaggaggccttccaggctccaatatagatcccaattccacaaacctattttcaattatgttagcacaaagcatatttgattcacatatatgataaataagagagagagagagag

SEQ ID NO: 262 - DNA, 1646 bp, Cannabis sativa
agcattgaagctttgcatctctggattgcattacagagagaaaatcaggtgaagtagatgaaaatagaattggcttaagatttgagtatgtctctcatctttggctacaagttttatttttgtcgacatgtgaatttgctaattgttgatttgtattcaaactatggatactctcatctttccttttcttttctttagattttttatagttgttctttttctttgttcaataatatatatcaaagtatatatatttcaagattttcaaccagtattgaataataatattcaactccaataatattgacaatcctaacctcatgcatcaaattcccttagtacaccaagccagtataattcatttaacaacagaacaaatttcgcacatagaaggtaattaatttagtcctacaatttatttgtcattgcctttgattggacgatccatataaaattaagagtaaaatcatgtcaacttttcttttcatattatctcatcaaatttgaacgaaaattttatcaaattggatacttgaactaaatgtatttaagaatttaatttagcaactaaagatgaacataatgatgactaacaacagtaaagttatagaaagcagaaaccaagtagttaacaagaaaagagaagcaaaccaatgacactatctatacaaacaaagcaaaaaaaaaaaagatatattttaaaatcttatgcgaggtttgttttgaattttagaactgtatggtttgttttgaatttaattgaaaccaaaattaaactgagatcaatttattatacaattgaaatgtaactggtgagacgttctttcagattttacaaaaatattattttaaatcaaagtaacactctgttattaataatttagttatataaagataatgtcctcttaaaatattaacttaagattgtttaacaaaaatttttgaggatgaatttcttttgttggaattgaaattaaatttttgtaactatcaaaaagataaagtaccagataactttacctaacaaaacaaataattagtttaaattaaaatatactcttttaaaaaaaaaaagtaaaatagatcaaaatatataataacaaaccaatttgagtgagaaaataaaaaatatcttaaccacaattattaatgagacgtttatgaactcaaaattatttttagaaattattatatataattaaagtaaatgaagtaagttgttaaaacataaatagctttaataatttgcaaaataataataaaatttgtgtagaaaatatttaagaaattttaattattataattattgacattttaaatatttgtaactgaaattatttttaaggtacttgaaagtttaaaaaatattacaataataatagttaaaaataaaaatttaaaacatttaaaataataattagtccaatcttaaatatttatatttgtaactagacatgttttcaaaatttaggaaagtcaaaagttctcacatccccataatttgtttaaattaatcattttatctaaatatttatataaaaaaattcaatcactaatatttttatataattccttatcttcaattttcaaaagcaaaaaatattgtgtaaaccaattattatggtacatttacttttgtagaaaag

SEQ ID NO: 263 - DNA, 4609 bp, Cannabis sativa
aaccagcaagatcttcttggtagccaaatccttgacacaacaagaggtagggaaaaattcaaatgagacattattgtctgtggcaaattgggagacactcataagattcttagtgatcaatggaacatgcagaaggttatttaatgctaagaattgagagtgattaggggagtaaaaagtggtatgaccaatggttttgataggcaaacctgatccatctcccataagaatttgctgatcaccatttaattcagtgggatggttgatattctgagcataaggtgtgagatggtgagtggcaccggagtcgggataccagctattatctccaagaacttcaggataggcatagggagattgtatttctgcaatattagcactaccagcaaaggtttgaaatgattcagggccttgaaagtttttatcaaacctgtagaagcattgcttcaccgtgtggccaagcttgtggcaaagctggcactgcaccttctggccccaggcagtgtattgtccccgtccattagagtagctgcctctggaattggactgatttccacgtcctgatgaggaaccacggccttgattgaatgatccaaaaccaggtggagcatgtgtcatagcatactggccataatgaggtgcagatggtctggatagaggagatacagttgcgtgagtagttgattgaagataaggagaagagaatgtacctcgtccaccagtaaatggcttggtatgagcaagattcgcttctggtttggcgatgtcgagttcgtgagtagctttctcgagacgaacctcctgagccattagtagtgcttcgatctctgccacagaatattcttcagttctggtattgacagaagtgatgaacacgttgtaatcacttgtcaatccattgaaaatcgcttcaatatgctctgctggtgtgatctgatgcccaatcgaagcaagaagatcaaccaatcgtttaaccttgagtagataatcaccaagggatccctgcattttagcatttcgaagaagagttctatactggcctatgttggcacgattgagagccgagtaatactcacgcagagtactccagatctgagctgccgtatcacatccgaccattcgagttaggattttctcagacatggaggagaggagccaggagacaagaacactgtcctgttgatcccagtcttcatactcagggctgagccgatttgcagcgcgatctgcttctgtgttgaacatcatcggagcttgagtagaatcaagaaatcgctgcagtcgagctcctttgattgctgcaaacacttgttatttccacggtagataattgtgctcatctaatctgactgagagagagtgtgagaaaactgtaggagaggtttttggaagagaaggatttgtaggatttgtattagcagcggtttgagacgaacctccttggctttgaacgaacgccattgctgaaagaaatcagctctgataccatgtagaagctttgaaagaaagagttcttttgtattattgatgtgcaaagtaacaaactgaaagcaacagagtatatatacaggcaaagaacacaaaaccagaaaacagaaaaacagttacaaccgtaactgactaactaacaagcaacagaaaataacaaccaaaacaaaattaagtgacagttggactctgtaagataggttcactaacagcccccttcaaactcagtgtgggaagacatgaaacactgagtttgtctctgagaaatgtgaatctgttgctggaaattggttttgtgagcccatcagcaatttgctggtcagagggaacatgatgcacctgaatctgcttattcataaccttgtcgcgcacaaagtatagatcaatttctatatgctttgtgcgagcatgaagaacagggttggcagccatcataacagaacttaagttgtcgcaccagatagtaggaggagaagaatgaggcagcttaagttcagagagaagagattgcacccaagttagctcagtaacaacagcagcaaggcttctaaattcagcttctgatgatgatcgagaaatagtggtttgctttttagattgccatgtgatgagatttgggccaagaaagatgcaaaaaccagtggtggaacgtcgatcatcagggtcagcagcccaatcagcatcacaaaatgcttgaatggtgaatgaaggagccttttgaatgtgcaaaccaaagtcaagggtgccagcaacatatctgagaatacgcttgacagcaacccagtgagattggaggggattgtgcataaattggcacactttgttcacactgtaagcaagatcaggcctagtaatggtggcatactgaagtgcaccaacaattgatcggtatagttgtgggtcagaaactggttcacttccaaactgggataaccgaagaccagaattcataggggtgctttgagtttttactccttgcatttgtgcacgacagagaagatcctgaagatattttttctgagatagaagcaaaccagtggcagtggaaacagcttgaataccaaggaagtagtcgaggttaccaaggtccttaagagcaaatttattgctcaaagcagagataagggaggtaacttgagtgggattgcttcctgttataaggatgtcatcaacgtataccagcacataaatgcaactgtgtgtagtgaattgcataaaaagagagtgatcggattgagctgaagtaaatccaagatctgtaagagctgcagaaagtttctcaaaccaagctcgaggagcttgtttgaggccatataaagccttgtttagcttacaaacatgtgtaggattttgaggatcttcaaagccaggtggctgaaccatataaatctcctcttgaagatcaccattgagaaacgcattatcaatatctagctgtcggattggccagtttcgagagatagcaagagtaagaacaatccgaatggtgacatgttttaccacgggactgaatgtttctgtaaaatcaaagccggcttgctgatgaaagcccttagcaactagtcgagctttaagtttgataacttcaccttctgcattttcctttacccgatacacccatttgcaccctattggagttctgttaggagggagaggcaccactttccatgtgttatttctgataagagcttgattttcagtgtccatagccttaaaccactttggatccttgagggcagttttcacagagagaggataaagagaggccatgaggactttgggtttccttataccattcttggatctagtttgcatagggtgagtattggttcctgtgtttggaatagtggggttggggacaacagtagatacagtaggtagatttgggggttcaggcacgggaatagactcagttggagtggaggtttggggcacgggtgtgggagatacagtgggggaagcaatttgaggagatggtgaaggtggggagggtggtggagacaaaggaattgtgccttgtgagtgtgaagactgggaagatgtgatgataggaatattagtatgagaagttgctgcagaaagtgagtgagcagcagtggctgctgcagaggcaaaaggaaaaacattctcatcaaataatacatcccgcgagatgtataatctaccatctttagaaaggcacttgtatcctttatgagataaactgtatccaagaaagacacaaggaagggatctatagttgagtttgtatctattgtatggtctgagatttggataacacaggcagccaaagactcgaagtgaagtgtattcaggtttggtgtgaaaaaggacctcaagtggagacttgtaagcaagtgtgggagttggcattcgatttataagaaacacaacagtacgatatgcctcatcccagtatttcaaaggtaaagaggcttgggcaagaagagtgaggccactctcgactatgtgtctgtgcttacgctcaaccactccattttgctcatgtgtgtgaggacatgagactttgtgaatgataccacattgttgtaacaaagtggtaaaggcttggtattcaccccccaatcggtttgaatggtttttattttatggcccaattgcagctcaacttgagttttaaaagtggtgaaagtaggaagtgcctcacatttagtacgtaacatgtatatccatgtgtgcctagaataggcatctacaaaactaatgtagtacctataaccactagatgaattaaggggagcagggccccacaaatcagaatgaagtaattgaagtggttgagtgtagacagtggtggagtttgagaaaggaagtttatgatgttttcccaaacaacatgcagcacatagatcagaaaaaccagactgagttttattattgatggttatattacaagattgcaaggcactttgaactattctagcagtgggatgtcctagcctgttgtgccaaagagaaaaatcagcattatgaacaggtaaggagtgtgaattacatgctggaatacaagaagaaatgctggaacaattggttcgagtggactgagctggtgactgactgagagattgcagtgggagagagtcaaacttgtacaagccat

SEQ ID NO: 264 - DNA, 1268 bp, Cannabis sativa
gtgctgtgtcgactgagatcggagatagcataatgtatctcgagaattcttcttcgatctgggtagaactacaggaaaggttcagtcagaaaaatgcaccaaggatttttgaagctaaacatgctatgcagcttcttcagcaaggatcgaacaatgtcacttcgtactataccaggctcaagtctctttgggacatgattcaagagtacagacccacacctatatgtaattgaggagctatgaagattatctaacagtatcaagaagaggatcgagttcttgagtttcttgttggattgaatgattcttacagtcaagctcggtctcaagttttaatgcaggatcccctcccaagcattaacaaggcttttgcttcgattatccaggaggaaagacagagagaaattattgatgtccatgttgatgttgagaaacttgtttctcctcctactagtgagtttgttggaggtgttcaaacttagagacagaagcttgtttgtactcattgtggcctcaatggtcacaccatggctaagtgctatcgtctcaatggatatccatctggacacaggctccacagtagattcccagacaaaggaaacatcacaaaccagaacaaacctacacaagggaaagctgctgccaattttagtggaggaaatgatggtgttgctgaggaaaaacctggaggaagtcaagatcctttttcaactctcactcccaaccaatttcaacagataatggccttccttgcacaaaaattccatagtgacacatctccaagtccaccatctcagcctatggtatccaacttttctggtaagaaaaattttattccaaaaaatcaatagataattgataccggggctacacatcatgtgtgtccccatcttgatttatttcacaatactgattataactcttcattatcctctgtcattctacctgatggttctactagaaaagttgtttgtgttggttctgtgttcatttcacccttcattcaattaaccaatgtactttgatgttcctaattttcaatacaatttattatctgttattgatttgataacattagctcattgttcattcacatttcttgaaaatcattgtgtcattcaggacatcaagaagaaccaaaagattgggatgggtgaaagacatgggaatttgttttacctgaaatctgattttttttttcttgttgttatgtcattttttgatttgaaaataagtgtagatactttgtggcactatagattaggcca

SEQ ID NO: 265 - DNA, 5246 bp, Cannabis sativa
tatcccacaaagcaatatccaaataggcaaatccaactcaaatccttcaagccaaataaacgctagcacttgttctcctacaaatcactctgaaaccgttggcctatttcgtctcgtaataactctagatattctttaacaaggctttcgttgctgcacaactcatcaacaagttcttcagggccatttacaattccagataacctaagtgaattttcaactagtgactgaaagatgtcttccggttcactcatgttttcaatcttttgagtcacagattgaaggtcaccctgtaaagcctggtcattgttctcgtatccacttaaattccgttgattgtactgtggcaatgcttggagccctgtacttccaagggctcgagacacaatgggcatcatctgttgaaacattcttggaaaatcaaatccgccaccttggcctcccagtcccataaacatgtttccaacatcctgaccgtcaacctgttgagcaatttgatttactacatttctcatttgtgggctttgcgtgaactgctgcaacatattcctcaaggcatctggggatgccacactagtttgctcagaaacgccagacagcataccatttagagcaggactttgcagaacctgagacataacagcagcaagatcatcttggctggcagaacctagcccccccaaaggttcaccatttctggccaactgaaccacagaggaaggatgtcctgaaacctgttggttggttctcgtttgctgactttgattagcagaagtactagttgtcacactgtctacactttgggccagtggtttttgtggctgagtgcggacacgtctcttgcgttccaaacctccaagtcctaatccaagaggaacaacttcagaagcatcattcccatctggcttctcaatgtcccttggacaattttctttatgaacttctgcattcatctctatttttcgtccactggcagaactctgagaatctttatccacaagtgacaaatcaatcctcttttaaatcagaaacaacacctgcatctaaaggtccaggctgcaacacaaatactacagttaccatctgttgcaccagctgcctgtgaggtgagataaagggcaaaagtagttttctccaagtatttgaaaaacaaatataaataaatgaaaatattcaaaagcacaagctaacattattgagagcagttagtcgttctatttatctgtgttgttttctatggctacaaaataatattgaccctggccaaactcactccctcttatggataacataagcatctagtggaagcttctattgattcaataaacaagtagaccttcccttttcaacagattattgatctatgctggagaaattttgatatgaatggtgacagataaactccttattacaatggcaaaaacaactgctctcacttcggaataaaaatatgccaattataacatggaattggaaaatacatactaatttacattaccaaattcaaatggacggtataatatcccctgttcacgaataataatgcaaaaaatacatatgcagttaagagcatgcaatgcatatgcatataaacaaaaccagacgattctcacgcactcatttcctattcagtgctgcagattaaatttttggtctgaaattacaccccattttatgtttttgcttaggagataaccccatttcatgagttgacaaggtcagtctctctatgtaaaacgggcttcggaagccacatttttaaatagaagaggttagacccatttcatattcctcttcttcaaagaacatatacatgaatctttgctcaatagccacattttggggttaaattacagtcttttaaagagtaaagatatgtgcatacacaaatcacacacaaacgtgacaaacacaaatgtgacaagtcacttctaataagcaggactcctcttaaataaggataattgattaaaatatttgtagtgcaatatgtgtcaagtttgtgtgcacatatcattactcgtatccaccttttcttaatccaaattgttgttaacaagcaatgcatgaaaagtttgattgaggcatacttgaaatgatggataaaactctaggtgccacttctaattctagataaaaatggagataatggagctaagttgtcacaagcaatacatgccccataatactggcaaatcagcctattgataggttgagaaggggtactaataaaaaaagatcaagatcaatcaagaaaaatcgaaatgtgaatgaagagaaaatcaaaattgcattcaatctcattcccatgtgttctcatcacacaagtgcggtataagtgcttatcattagaatagtgaactagatttttcttttcttggcagtaagaaatcatattttgataaataggatcaacgcaaaggtattgcccattgattcaattcgatccaaaatgagtaacccagaacttcttcgcattattattcctctcaaaagggatggatgagattcgatcccctcctcagaaaaacagaaccctgggacaattctaaactgcatgccaaatcccataaaaacttgtaaacgcaattaagagcagggcagttttttgattgcccaattttttttttcagttctttaaattgcatgttgggatctgagatgattcagatgaaccctagctgttagaattctatgcttgctgaactctatattcaagtagaaatgcaataaaaattttcctgactaaaacatcaatcagcattataaacagaacccataaaccgacattgaaggttcaactaagtaattatatatataatagaatccaaacgaatacggagagaaaaagagaggtacctaaagaacttggggaaggagaagattttccgagttcaagagaaggccaaagcatttgttcttagtagtgccacaactttttggttgtttccacttcgagaaggaaaagatccgaatccacacttgtcacagacttcacacgaatgtagaatcttgtatatcttatattcacacctcacacctctcttttagctatttcagaaagggcttacatagtaattttcattttgtttcttctcagcctattttcttgcataccatcaacaaattgacacgaatcaaatgcaagccctactgcttgcttcaccttcttcacaccttcattcaaagtttcactttctaatgttaaaaccaaatatccataagttactaatttgtttgttggattctttcagcctcttccatctccatcctttcgactctttgctatagaatatgagtttttactattcggccattggagatgcagactctagatttctagctcttagttaggagtagtaattgttagataaatcctgattagatagttttgatctgtaaattaatttaaaagaaattattttgtttgattatcatttgataaactatgttattattatttttcctttttgacagaacacatatttaatttgatgaggactattttgtggttaatcatagtaatctgtaagtttgaaagactttgatatatcatacgtttcaactcttgaatattaaatatgtctctcaactctaaactatgcttcttcctttgtggaaatgtagagatgtttcaagaatcacttatttatactacacctattttttattattatttttaacaattgattttagtttccttttccaaattatttttattgaagtgttttacagagtaagacctttgtgtgggtgttcacattgatatatattaaatatatatatccacttattcaactacatacactgacttcataataagatgagttactgctggtttctccattcctttgttgtactactactttcttctacttctctaataacacatgcatcatttcattctttaccttctaataatcatcagttgtgtcattctgctgacaactatgctttgctcaaattcatcaattcattttccattaaattaaaacacaactccaatgctttctcttggaagaatggaacagactgttgtttgtgggatggagtctcatagcctcgaggtttagttttcttaaaggtcctcttcactccagcaatacccttttctcacttggtcatctccaataatttccatggctctccaattccatctcagtttggtagtttgatcaatttaaaaaggcttagccttgataataacaatttttctggttatattcctgttgaattctcccatggatctctctaaactcactcatctcaccattaatccattccgaagagataagattattgtggagacttatgtctctcaaggaactttctcttagatatgtcaacatgatcttattggttccatgcctacatttgattggagctcttacatctttccaacaccaaaatctttgttgatttaccatacttgtctacaactgtcaggtctttgaagacttgtcatatcactaacctcacttgtttagacctcagtagcaacaatttcggtggccatatcccattgcattatctcaatcttcaacacttaatctatttggatcattctggaaataattttctcgcagattccagaattttcaaaaacatcaaactctacccaaatttcactacctaagcatttagaatccctccacttatctaataactttctcagtggggcaataacttctttggatatattcccttacgggttccaataaattgaatagtgagattccaaactcactctttcaactactacattatataattaatccactttgcgaaaaaataaatatacagtatatagtctagacatagacatattagtctaagaaagagtcatctcaattatctatgtgagattaagtgaaaatacaaagactcactctctgctagattgttccgagggcaaggcaggtttggaagcattctcttttatattacttttatcttttgcataaaaaataaagatgttagggaatttattatatctggttttactaatttaaataaagatgatttctctctactaatgtgtattttatggactatttgggaatatagaaacaataaacttttcaggaatagtcatttggatgcaggggatttagtgcagtgggctagcaattacctattgcaatacaagaatgcacaatccaagagaattgatgctgaattagcctgtcattcgcatgctgcaacagatcagagcctaccttaaaaagggtattatcaattgtaca

SEQ ID NO: 266 - DNA, 1379 bp, Cannabis sativa
gttggccgacacatgacccccttacccaagtttctagctcgattcttaatcgagattttatgtctctgcccattcgagcttgattttcccaaaatctcccccacccaaaactcaccagaagaaattgcgaaaagagtcgcatctttcttctcaaccagcacttgtttccctttaataagagctattctttctctctcttcctcaacctaaaaagcttttcccccatttttccttttcttcacctcacagtatgtcccattcgaaccctgtatctgattcaaatcacttctatcatcaccctctatatgactaatggaccccttcaaatccaacttttcattaaaactattcgggcccaagacagttggcccattacaatttaacccatccaatctcttagtagacctcctatccaattgacttttctcccccaattttccacctggcatgccatcatgggtaatcttatcacccacgatatcaatacggttacccccatctgccccactactctatgcagttacaacattctccatcgttggagtttcctcctcagcagtcgcaaaaggcagagcaacaaccgttgggcggccatcattatcattagaataaccccgtttaccaccgtcacctctatcatctcccccattactttctagaatttgttgatgtgattgactatacggaacaaaacaatttagagtagtatcttcatcccgcaaccacgaaacatacttaggaacaacctgaccattttttgatatttctatctccactgcactagtacaatctctcctctcatggccccaaacaccacacccaaaacagagtgtttgtaatctctcaaatttaaattgaatctaatattttttttcccaccacacggtacatatcttccaactaaaatgctcttgttcagtggaaagccaatacgcataagcacataaccattaagaaacatccgattctcattactccaacgtagttctttaatttcaccagccatttcccctatccgagtgacattattacgagtaaaagcttttaaaggcaaacctttcaattttacctaacagcacatcttatcgagttttgcatccctccattgtcccaaatacaaccattttttcaacaaaaggagacctccattgaagatcttaggttgtttgctcaacactcctacagcctcctcacttttcttaaacgtaattcttacaaacgagtcatccccatcttcctctagtatcttcacctcccaaccaactatacctttccacattcgacctaatatcgttgaaaataacaattccttaatttcccttttcgcaatcatacgacctaccagagacagagcaccaaatgacgacatagccgcctca

SEQ ID NO: 267 - DNA, 677 bp, Cannabis sativa
aaaaaaaattgtgttttatcccagaagtgaataatttatagaatttatattacacatagctactaaactttattaattaaataaatgctattgtgtgattgaaatttataaaataataatcaataacaataaattataccatcatatagagcatgaaaatatgaataacatgtttaagaaatgaaaaaagtttggggaactctggcaactgagaaaaataagcaccaactgaaaaagcactcagatattgatgcttgagtgtgaggtcattatttaaaagttaggtcaatttggagggctccaacaatttttttcactacactaataaaatttatattatatatatagagcaattaattagttcaaataaaaattaattaacaatattaaaattgtctccatcaaagttggatatatagggtagaatcttcataaaaagttgtttgtttttttcctatttgactatatattttagagttactattattgcatgaaaggacacaaaataaataaattaagtaatgaatagtaaaataaaaccaaaacattatccaaattggcattcacttttgtttaaccgtatttgtcttttgcttttgactaggttctcaagcaaggaatagatttcatcatcccattatcattagtgcttttgtttcaaccatatatatatatat

SEQ ID NO: 268 - DNA, 2461 bp, Cannabis sativa
tacgcaagcttattacgatcacaacatgaaagtaaaacaataagaaaaacgtcaaactaatgagctttatattattattacaaaccatatcaactattttaatttcattgagtggatctcgaagtagcggactctgaaaacatatttgctgcattattactttctgtttccaccgtaggaaagctcaatccagttgtgtttgaaccaaacgaggtcaaaccggtcgtactttgcaaacctgacatatcatcgtacctagcaacatttctatccgaggcatggaatgagagctgtggatacgaatacaaaccgccgggatttctctcctcattaacattgtctgcttgttcttgaagtgtcaaggcaaactccaaattttccatcacatcgtgcatcttgggccgttggatcctctgttcacgcacacaactttgtgctacctctacgaatttcttgaagcattctggggcaatcttacccatcaaaaacgggtcgattatgttttgaagtgtcccttcgctgatacacttttgtgcccaatacactaagttgcgttggtcatcttccaacttcacgtctaccgcttttcgcgcacacaagacttcaaacaatacaactccgaaagagtacacgtcagacttgtctgttaactggttattcctggcatattccggatccaaatacccgaatgttcctttgactaaagtattcaccacagtatcagttacaccaattcgggataatccgaaatctgaaaccttggctacccaattatcatccagtagaatgtttgtggttttcacatcgcgatggatgattgtgttcgtaacgcctgcgtgaaggtagtgtagcccacgcgccgctcccacacaaatctctagtctctgcttccacggaagcgggtcattatttgacccgtaaatatggtctcggagggtcccatttgccacgtattcatagacgaggatcatctcgccgccgtcgtcgcagtaaccaatcaaggagaccaaatggacgtggcgaagctgagagagcatctcaatttccgtaacgaactcgcgtgcgccttgtcttgaatcaggattcaaccgcttgaccgcaactgttgactcgtcgtctataatccctcggaacacattgccgaagcctccccttccgatcaccaactcatcatcgaagtcgttggttgctgttttgatctccgagagtgagaaacggcggcaaatctcttcgggcagcgatgaagcttttgaaaatttgttggattttcctttgtgcgaatctctggctcttttcttctgtactctccacaaagctacccaacaaactatgcacaatataattgtgagtaggcccatgccactcccaatggcaatgaatagagctgttttcctctgcctctttttttctgtgccggaagatgggtttgctatgccgagtacttctgggtttggtccagcgagattgccgtgattgcttattttcaacacttcaaccccgttcaagatggtattagtatatctacttagtctttcaagcgggactaaatcaatggaaatagaatcctggtcttgaatatttaccacgtagtctcggtagatcggaattccattacccccgctggaggaaataacatcaaagaatgactcggccacattattggctacgtagatgctgaatgatctgtcgttgggcctagtgatctcttcctgaaactcacaaaaatgaagcctaaccagatacttgaatcctctgtccacaggtaagatggaagtcaaattgtggagactgttgtaggtggagttatttgtcatgaaaagagcagactggtagacctcatcgggtgcagtatagtttcttattaattcagagtatttgagaggtttagtataatttgtagtaacaaaaggtttatgatcagtcacatgggttttattgcgagtcagaaaggttgttctacctacatcggaccattgtctatacatgccagtgtcatctcttcccggtatcgatctccctcccatatttattctcccaatagtctcgagtgccaaattatcattgattcgaaatatttgattattattcatgaggccgacgtatttcggttgatctatagaatcgtagtaataaagatctttcggcatagaaacaatctcgattccattgacaaaagcatatgaataattatcagatgatgacgaaggaataaaagttaagctcaatgttttatttggctcgactacgtaaacgcagaattctctcatgaaagaatcttggtttaagctttcagcaacgagactagcactgaaatttttgagtaaggtaaaggaggaaccggctttgacgtcaaagtaagctttagaggcatcgaaatccgtgtactgagccgaatagaaatgcaaacgaacaaattttggaccagactccttgagtggaaaggtgtaagtaaattgagagc

SEQ ID NO: 269 - DNA, 1148 bp, Cannabis sativa
tgataagattaaaatcctgttttttctcttctactcttctatttttttttctctgttttttgattagtttttcttaacaacctttcagttcgagccaggcagcagccctcctcgtaacttacgcttttcactggcctcggtttaccaaatgcggtttcgggaattcgttttctgaaaatcgttttctaattttttttgggcaaatttagaaaacgaaagcgtgtttttgagttttttttttttgtcttagttattttctctttttctgatgaaagagtttgaggagttagaaagaagaacggtggttttcaggtgctctgttttggagttagggtttttggaatctttggttttcgtagtgaggtttctaatttgagcttttggttttttgggtttgggttttgaattctctcgtagaatttgaagtttctaggtttaggaaacatgatgttatcggcgtcgccatcgttgatagttcggagctcgttggaggaaatgttggattcgctccggcgtaaggatgaagacgagaagcccaaggacttgccacccgcattgccggcgcgtccaacttcgaggggccgtcttcctccggcgaggcggtccttgcctaataactttaaggtccaggttgttgttggtggtagcgacggcgatacagagtcgccggagtgttttccgtgtgaaattgaagaaactaagagaaaagagaatgattggggtgccaagagaagtggttttgtgagcaagaagatgaagaaataccgaaatgttgagtcgccgtacgcagccgtactggatgagagtaaaactgagctgacggggatctccgatcagccatcggcctcgcctacgaagatacgaggaacagattgggatgacaacatcggctacttcatgaaaaaggtatatatttttttttaaggtgttgtagttggctgtgatctcagatgtgtccttaattgggttttgggtggaagttttcagtttgcttaaattggtttcatggtaatctctggttaaagacattaatactttagttttgacctttgagccattgagagtgtcctcaatgaacacgtggagtgttgtcctgtgggcctttcagtgtgagggtgtttgaattttagccctgtaatcttaagatt

SEQ ID NO: 270 - DNA, 1613 bp, Cannabis sativa
tgtagacttatctttgttggcaacagtttctctgtgtgcagaaaataaaaactaaagagtggaaaaagaaatgatacaaagcatgagaataaaatgtcctctaaattttgaaataaaaacaaaaagattagatcatcaaagctaccccgatacacaattgcaatatgaaattagcacttcatcttaaacttgaattataacacgatatatatatcaagaaacagaatcagaaaccagtatcataaaattagaaaggtgaagaaaattacttagcaaagacacttgagtaataattaaaggatcccgcgtttcaacccctacatccccaagctccattattgcattagaaacagcactgacagatacgattgcatcatttgtaagtgccagaacgctgcccgtcattgtattagtaacctaaaagaacaaaatgaaaagaattttgaggcttcggggttcattcattacattgcaatggaaaaaatatgtatataataattatgtccattcaaaaagagggattgtaaaagttattatcaacattacaagaaatctgaaagaaaacctcattataaacattgagactaaaatgtagcagaccaagaagaaaaatatagtgaagaggaggaacctaaagaaaagagtagccataaaaatcaaaacaaatgctagattgatctaatttcttctatcaatacgcatttattcaggtagtgagcatccttctcaaagccaaagcttgaatttcaatagagttcaagctagcataatgtaatttcggaattttctaaattctaccttcaagtttctttaattattgtgaggcattgtaactcttaatgctactcatactgactgtcttaatctcaatgtttcctcattcaattatacttgtatacagctaaatatccagacaagcagctaataaagatagcaaagccatcacttttcaaatgccccatttcaaaacaatttttcaaactaggtcactccaaaatatattgaacaaaccagcatctaatgcaaaatgacaaggcagaattcaagaactagaacttttaaaaaaacaacaagatctgtaagaaagtgcaaagctgcaaaaacatgagactattacttattttataaaaattctcctgaactcatttcattgagcatcagcccaaataacaaaaaaatcatagattaaaaaccccaaaagcacaaataaacaaaaagaaaacgaggaatgactcgaatgagcatttccattgttcaacactggtctgttatgaagttcttcaaaatcttaaaaatgaaaacaaaatgtgaaccctaaacgaacttgaagaaaacccaattagcaccacaagacaataaaaccaattccgatcgtcacaacttcaattcacacgtaacaaataagacattccagtcatatatgtagagacaacacttgatcataatacataaacaggaaaaaaaaaaacaccctaaacctaaaaacaacaagtagtaatggaattgatccagaaaggtctcctatgataaatatgaaatgatcaaaacccaaaaaacaacaaaaaccacaacaatccctaaccgaaaacaccatcaaacatacatatacttta

SEQ ID NO: 271 - DNA, 3382 bp, Cannabis sativa
atagaaaatacttagattttctactatttttaatgctcttgtttaattgaggtgaaaaggatttttcttagatgatcatgtgaatggaatctataactaattattaaaatactacaaataatttcttttgtaattattcattttccggacctagctataaatggttttattatcaccaatttgtttaatatatatttgcatgtatataattatacatcaatcacaaatcatgtatctatgtatatttatatattattatactagtggataagaaaattcatatagtagatcccatgaattttaataatattccaatttatatttggtagagaaaaagatttaaaagaaaattaggattcttttgaaaaagaaagaaagaaaactcattcgttctaatcattattatcatctttatcaaaaaaaggatgtattaaaaatacatcactaaaaaattataaatcaatattcatatggatatatatcacattaaatttttagaaattattacaaactttagtattcaaactacaaattatgctagacttcaaattttgaaccttttttttttcttttttaaggaaatttttgaactattcaagacacctaattaactttaatatttaaggaatcaaattttagtgagaagtgagtgatcaattcaacccattgagtccaataacaaaaaacaaaaacaaaatcaatgaagaaaaagggaagcaaaaaaaagttgaaataaatactaggaaaaaatatttaaggtcataaaaattagaggttgaaaattgtgctctcctacaaggttaccaaattttaatgaaaagtctagtgatcaattaaaccaaacatatacttatgtccaactatataaaacaaagagtgctatgagtagtaaagaaaaagttggtgtaaataaagttgtatggacaatttgattagtcaattattgaaattttgggatatgtcatacccattaagcaaagtgtcaattggtgaagaaaagagcaaatgtgaaaaggcattttggtatggggtaccttgtctacactagtattactcatgtttaaacatctatcaaatcaaatgtgtggatgttataataataataataatgataatatttattttctatgtgtagacacaccatttaatgtggtaattgtaattttcacataactaactcaaatgttttaactgtgattgattttcggttagttagtttgtatgtttaccaactaattttttttatctagtttcctgtcgttgagacatctgttttatctgttacaacttgatttgttctttaggtaggcaattatttattttggctatctatttaattagagcttttaagtcattttttgactaaagttcagaaaggttgagaattaggattggattttaaaaaacacattaagagattttgtaagagtagaaggtgagagagggagaaagtttgtgagttgtcttgatgttcaagaattcgagttgtaaaagtgtcctattgttcttgctcgagtgaatctctatgttgggtgtttattgctcaaaaactctcgagccttccattgtaacactcccattgtagacatgatttcatagcaaaacctattgaattggagtaagccaatttgttagttgaattagtataattggttcttttattgttcatgtagaaacatcaatataaatattttaattttgattcagtgttcttgttattctgcgtatttcatttatttttctttaaattttgtgttttcgaaatttaattattttcttgttggttaattgtgattgaaatacaattttggtacattgtgtttttaatcatatttatatcgtattttgtaatttgatatcatatgtattttatgcacataaatttaatcgataaaatttatcaatataattaaatttgatcaaagttgagtatagaatggattcaacaaaggctcctcacaaaaagagattagtattattcaccttagcccattttttgatagaagtttatcattaagttggattaatctaattaacatggttcgattcaaagttcaagcactcgaaacctgcaagctcgttgctaggtactcgagtgtgttgccagtgacaacacataaggtactcgagtgtcatacatgctcacgctcattgcgatgacagcatgtatgcatacctcattaacaccatgaagtaaaataaatctcatcagaaacaacaaaaggccatcagaaacaatccaattattgttgttaaaactagttttgagtctttgacattatgcaaaggaagataatctaaacaatctattgaagagacacacaatcttcatcctgatgacctgcaaatcgaatcgttctttagccaggtggccagttcatttgtcgtcccccgagcaggtggacatgaatatgataaacagattgacctgcaaagcaagagattaattgttgtgttagtttcggatatacatattaagacgtaatagaattatcgtaaaaaattagaactctaagaatacagacatccttgtggcccgtcgttgatcacaattctgtagccatcatcgagtccctcttgcttggcgactagcttagctgtgtaaagaagtcggccaagaatgtcacagtgtctctcttcagcctggtaagcaaagtacagagaaagaagatgatacttattgatctaatccaatacttgaaagaatgagaaagttttaaacttttcgagacagtttggtatctcacaaaattcagcataagaatttataggctaggggaacaaagacactcctaactagccaaccaatagcgatctaagtattagctacaattaaacaatcatcttggccactacgaatttgagaactcagcctccaaaatcctatattgagactaatatcaaggcgtaacagaagacatttttcatctaatttttcgcttaaataaagaaaatgaaattacatttgaaaaaaaaatccatatgtaagtagatagaaatgataaagatctcaacaaattccatccatagaacattgtgaatttctgaccataaagtgagatttttgaaaatggcttgagcttaggctcaccaccattcacaagaaaacacaaacttggtcttgttcacgatttgaaagatcccgtcagcaagcacatgaacatcctaactttctctactctatttccatttcgggttaaaccttcatcattttgcaccattaaaagttctacatttaaatgcatagagcattttttttcccttttcctttcattacattgtaatatcatcttacagccaaaactagcaaaagaagaaactgccagaaactctccgaatactttgagttcttacttcgaagtataaacccattgaacatatc

SEQ ID NO: 272 - DNA, 1771 bp, Cannabis sativa
  modified_base (1002)..(1009): a, c, t, g, unknown or other
atatatatatatattattaaatatatcacctcctttaatatatttctctattaaaaatattcttacactttagtaagggatattattttctgtttttttaagggtaatccttacaatttagaaaaaatatattatatgtatatatatattcttatataactgtataaattatagttacagcaagcactagacatctggtatattttgaacaattttgaaaaatttatgatatcaaatataatattcaaataatcaattgtatttatgtctgttttattttatacatacatagaccatttttaattttatttttgcgctttgtaaattatgcaaaattttttgaaactatatattacagcaaaaaaaaaaaaaaaatattattgcattttgggcattaatgttcctacttaagaaattttctatatatataagagtgattgatggccaaatttttttgtgttttaatttttatataggttaccctatttatttttttttatagtaaaactctcttaagatactttttttttttataaatttgagtcgtgaattaaatgttactgtaaaggtaatacaataataattcagttgtatttaatggtgatataatatctcaaatttgtaaaaaatatatatatatatataaaaattttgacactaaaaactaaaaaaaataagtgtataaaaccaaaatataaaaatatttcgccacaaataatcctatatattaatcactaactaaatactagttttttttttggcagtaactaaacagtagtagtagtagttaatgaaattgataatgatgagaaccttgaaggcgggacaagacttggcaacaactatttgttgtgtttataaaccctgcaattcaatataatccacaacttaattagaataattaatttaatttccataacagtcaagactctcaacaccaactcaaacatttaataattaatgtatcttatatatattctctctattattattattattatnnnnnnnnttattattattattattatcaaaacctcacatttaagctaccaagcttgacaaaatatgaggtatttgacaaaatttgtttctataattattttatatacaatagcaaaatataaaatattttgtcagaaattctccacacaccaataccatggatttcaaacaaagagcaaaaaaaaaaaaaaaataaatatcaaaataatgttatttaccaaatgatatataatcattttgcatacaatagtcttattttaacaattctttaaaaaatgatatttcaaacacttaataattctattaaaattatcgatatacatcttatttagagactgtagacaaaatattttatacattaaaaaaaatccttaggatgcaattttcctatataatatattcaaattgtaattatataccttcaggagcgggatcggataagatttgattgagaatgttataagtattgatgataacgaagtgagaaccgggcattagggttcttaattgtgccaccattgaagccaaattggtgttgaagagttgagcagcttggtttaggagagtgacacaaaaatcacaattaggcatgtttagctttaccaatggataatttcccaatggaaatactcctgttaatacaaatttccttcctcctaaattgtacagcttctgcattaattcattattaattaataaaaattaaataattattatttaatagtagaaaaatgtactttgttaaataaagagtattgctattaggtac

SEQ ID NO: 273 - DNA, 10004 bp, Cannabis sativa
aaataaaagtgttaccaaacggtatcataattaattagtcaattcaaagccaaacaaaaaatatatcaatgataataatatctttcaaaattatatccaccaccaaagtatttcataattttaatgaccataaaatctagttttcttgttattagatgaactttaggaaaaaaaaagtattttacaattttcttattgagagcctattagactcgaagaattgaacaatattgctactgtttgtacatatcttatcacactaccaaagtttatgctacatgaggttcaagatatggtcgactcaagagtaggatgagggggccaaactattatataaatttaagtgacatgaattcataattaaaattaaaatacaaaatgatgtctatcttgcatatcacaattgataagtgaatttatattaattttttggtgatttttaaaaatacttatttgtatggtcgcatgcccgcaaatgattagaatatggctctgataccatgtagagaattatgaagttcaatatcttagaaccaattatagttcatgttcttatatatgactcaatattttaccatttattcaatgtagaaaattattccacaataggcaccatgagtgctttttagtatttcttttttttttttaaaaaaaaaaaaaataatggccaaaaaatattttttcttcctatggcccactaaatttcgaaaccgaccttgagtactagcaaacaatcacttaaaaattgatcttccatcttgttgggaagtgtagtcttcattatattcatacctgaaaaaaattattttgtggtagctaaaaagaagtttagctactcagtatcattctaaacaattgataacaataactaattaagaacatgaaaaataaagaagtaagaaattgtcaaaaaataattatgatagtttccagagtcgctttattaccaatcacttcaatataacggtaaataaagatcgatcccacgagtactatgatattattcactatcaaataaaaattaaagggagagtttgagttgcagtaaaatagcttaaaaggaaaacaaataacgaatgacaattacgattttaaaagcaattaagaattattctccacctttaacaatcaatcttgaacaacaatgatacatatttttattttattctagaactgaactattaacctcgcagataatcacttatcacagtctccttatcacaattaattatggcgaagcactaaatcattaatttttttttactaagcaatagacccataaagcagacaatctatttaacctacaaaaaatattaaattctatggagataagttaatttaagcaacaaattgatttaacatataattcatttaaaataggttacattcttcatcataaactcatcacaatataattaaaagtaatttatcacttaaacctagaatcctagactattaggtgaataaaaaattctaaaatagtagaataatataaaatttaatttagcggtcgtctaaacaagattaaaatattaatcataaaattaagtaaagaagaatataaacaattcaatacgaagaaataaaataataatattaataaaaaaaaagacaagaaatcatgtctcgagttttgaaataacccttaacttaaaagaggactactccataatctcaaacataatcataagcataattataaatgaaaagtaaaagaatttaagaagaaaaactagatatgaatgtagattctcctcttctcttgagttttcttcttcaaaacgcaatgaaaaatttactgaaaataaactctaaaagtcttatttgtagaagtaaaaccctaaaaataaacctaatttaaacttaagaactaattttttcgcaaattgtacagacacgagtgtctgggcggagtttaagtggcactagggcgctacttcctggattttcactatcgtatgctcagagaagtattttgcccataacttcctcaatattatttgaaatttgacaatttaagatgttctgaaaagctgagaataagatctaaaactttcatgttgagctccaagtccaattctgcctttaaaattgtcaaaattttcatttaagttctggcttataaaaccgaactcacttacttttactattttctacttaaatgtgctaaaattcctctaaataactctaaatgcatgattagtctttaaaatagtctaataaaatataatctcactaatcaataatttaaaaaatcaatttaaaaatattaatatataaattaatcatatttataaaataaaatatcaacttgctatcatgaaaaaaaaattaggaggactatagacatttaagagtgtaatgtagacatacccaaaactttatatcttaaatcattaacacctaactgatttatcatttatatttgagtcatcatctatgataattatggttaaagtaaagaggagaaaggattacaattaggaaaatattacacatttctcaacttctttagtagtaagtagtaagtaaaaaccaagtaagtcatgatcttatgaagtagtttttttttcttcctttttttcatttttgacacggggaagtttaatgtattttattgtctaataattaactaattatgccttaaaatgtttgaccatcttttctgttctgtcggcagcaaaactcttccaaaaactatactctcatcaatgtcatatggtgcagatctacagtgattgttagagaccacagttcagttcagtcaaagctctgagctttaacaagagtgagagagagattgactgaatcgaagctttggtttttatatatttgataatccaaatctgtaactgtaatgatggtccaacaagacccgccatttccatcctcgaaaaagcctccaaaacctcatcgcaagcaaccccaagcacaaccccaaccccaacagaccaccaccattctctcagatcacttccctgagcctcaatctctcggtttgcccaaatgggtttccttcaatctcttcaaagtcaccacctttacgatcctggctcttgtaattgcagccctcttcttcctccacaacactaatgagtcttcagctactttcttctgtttcaattctcacactaagaagccaatcccaattcaacttcccaaagtggatttcaattcggttcgacccatttcggataaagattcggtttacgcatctttcacttcccgtcgatggattgtggtatcggtttctgattacccttctgattcacttcggaagcttgttaaaatcaagggttggcaagtattggcagttgggaattcgaggactccttcagattgggctcttaaaggtgcgatttttatgacattggaggaccaagctaatctgggttttcgtgttttggattaccttccttatgattcttatgttaggaagacaattgggtaccttttcgccatccaacatggcgcgaaaatgattttcgatgctgatgatagggcggaaattgttggtgatgatcttggtaagcattttgatttgaaattgtctagtgtggatgtaatgcaggagaggattttgcagtataatcgtatgaatccaaatagatcggttgtgaatccttatgttcattttgggcagcgttcggtttggccaaggggattgccattagagaatgttggtgaagttggtcatgaagagtactataatcaagtgtttggaggtacacaatatattcaacagggtttatctaatggcttacctgatgttgattctgttttttacttaactagaaaattgggttcagaatcatttgatataaggtttgatgataattctcctaaggttgcattaccacaaggtgttatggtacctgtaaattcattcaacacattgtttcattcgaattcgttttgggctttaatgcttccggtttctgttagttcaatggcttctgatgtgattaggggttattgggcacaaagggttttgtgggaaattggtggttctgttgtggtttatcctccaacaatatttagagaggataagattgaaggatacccttttgcagaagaaaaggatcttcatgtaaatgttggtcggttgattaagtttttggtttcttggagatctactaagcgaaatttattcgagaaaatattggatttgagttttgctatggcaaaagaagggttttggactgaaaaagatttgcagttcacagcagcttggcttgaagatttgcttgctgttggttataatcaaccgaagttgaagacattggagttggatgggattcggctgggaaccactgtcaaccagggagagttgaaggagtttgttcctcaaaaactaccttgtgtgcatcttggagttaaggaatcggagactgtaaattatgagattgggaaccttgttcgctggaagaagaatttcggtaacattgtgctgatcatgtttgtaagtgggtcggttgaaggaactgccttggagtggagattgctttatggcaggatattcaaaactgtggtgattttgtctgagaaagccaatgaagagttagctgtggaagaagcttcactcgaccaaatatacaagtaagttgttgtattggattattgacaaatttttcatttgatagcttgttattgatatattacgttctaaatattggcaacctaaggaatatgtagtatagaacaatggctgatacagtttgagtcatttccattttttgaaataaatcaaatgaagaacttttcaaattaacaactgatgaattgcttttaacatgttttaatggtgtctaggtatttgccaaagatatttgaaaggtttactagtgcagaaggattcttgtttctccaggacaatacaatcctaaactactggaatttagtacaagcagacaaatctaagttgtggatcactgataaggtaacgaaatcccaatcacctaacactgacttcggtatgatcaatcatgtctgatttactttgaccttgttttaggtgcctcagtcatggactacagtctcaagtaagaagaaaaattcagattggttttcgaaacaagctcgaatggttaagaaagttgtaagcactatgccggctcaccttcaggtcagctacaaagcaagtagcacaggtgaaaagagtctcacaatctgtagtttggaggttttctacatccctcgggcttttgttggggactttgtagatcttgtaggccttgtgggaaatttcaatatgcactacaaggtagcaattcctatgtttttcactgcaatggattcgccacaacaatttgacaatgtcttctttaagatgatttacaagccagagttactgtctagtaactcttctcgctcttattctgctcaagtacctgctgtatacccttggaccgtttccaatgaggtcggttttgtagagctcataagagtcatggcagctggggacccccttctaatggagctggtttaaaagagcagttcattagaagtgaatctctaagtgcaagaacaacactttcggttatgtggagaaagttcatacaacacttttgacattgaaaattcccttgtctatgctgctctgaggaaaatgtcttatcttcattattcatcatatttgatatatattgtagatttttttaaatctttttacaccatagtttccactgtatgattcattgatgtaaattgtcattagaaattgtatttactcaaggttatatcataaaattactctcttcagtaatgaaatggttagagctggtcttcatgcaaccaagtttcacttaatagctggtatcatggtagttaggggtggcaatctcggtatacacaataacacgactcgaaacccacacaaaataaatgagtttgaatttgccttaaatagatttgggtcattttaaggtcaaacacgccaaacccgtttattaaactggttattttcactgaagatgacatgtaataatttaggtaagagtattcactcttaagtttaatttattatatttttttaagttaaataagataaattgctcataatttgtgtcatgataaaattgtaaacatgttaaaacttattagttgataaattaactaaaattaaacttgatttcttatataaacaggtgaagtcagctcaaacccgtttataaactagttgagtttgaattttaattattgacacgattaataaatgagtcgagtttgagtttgacatttgcttataatacttaagcttcaacatgacacgaatatgacccacgaacatgaattgctacccctaatagtatgtaaaaactggttcaatttaaagcttttacggtaataaatcacttatgatttaattttttgggaaaataatgttaccaacttagggtactaaatattaacaccctcaagtttgatagcaatattacaagccgaaaccagtcattttcagctgaaatacttttcatacaacattttggaaatggcaagtgcatctcctttggccttaactggataagtatttgtgcctgtttgccagttattagagaacaatatccattcttgtctccattcttccaattggaagttctcattttcgtgcaagcttttcgagagtaagttgaaataggcagaagctcttggtagatagtagctttgcagcaggccactccagaatttatttgctacattgataaggacaaatgtaaagttaaaacaactaaaattgttgatggttaaagaggtaacaaacattatggtgattccattttatgacattaccataatcatgtagcttgctttgattagtttttgttgtgtcataccacattgttacttgtgtccttgcattccactcatactgaagaaaacaaacaaacaaaaaaaaaacttgttatgagatcaccaccttgaatagaaaatatcatatcccaaatttgttgggagtgttgatatgtgtcaaccatgaaagaaatctttcaaacttacctgccgtttttcgcgaggattaacagcaagatttttcgcgctttcaagccaagttccaagcaaaaaattatcatcagaagcaagaagcacatcaatatcggtaatgagttgaacgaatttctggctatgaagtttataagcatcttcatccttctgtcgaaaagcaagcactgcatcgatgtatacttggtttgcatactttgagagcacttgtcttgttagatcaaccaaatcatatcttccacaatggaatgcataattagaaaatgatctcagaaaaaaatagtgataatgaaagaaagcatattcgaaaaatcgtcttacctataggtaaggcttccagcaaattcactaccattgtcaataaataatttcaaggcattgatcacctcttgagtagaataccataaatgtgctttgggcaaatcagagctagtttcttcgagtaaaaatcttctttttccatctattctcgaaatcatttccatccgattatgtcttgaaatgtttgatctttgttttggttgtggatcccaatctggaaattttactatgaagtctgtgttgtggtcctgaaagaagttattcaccattattaagatgccttaaaagcaaattataactgttaaaaacagtgagataaacaagaattgatatggttgacataccgcgattccatcagtacaattgtaaattgtttgatgaagaattttccaagctgcttcgacttggtgaaccgctttaccataacgtctatgagtataggacttcagccattcctttagaagcatttgatatgcaattatgatcagaaagaaaactgttgatcagaacagaaataaagtaaattgtaaaggaattaaaagtttctacaataatgaatagaaaggctgacatgggtacctgaacattaactttttcacttcgaaaggccatttcggacatcaggtcatatacaactggattgtgctctattccttccatgcacataccaacaccaacctattgcaacatcaagttatttgaatagcaagaggattgctacttgcttgaatataatgtctaattcagtgaaacaattaagtacaggaggaaattgtaaattgacatataccatagtagaattctcactggtgcgagcatcgattggtcctgaagaaactgaatccaatactccatacatttcgatatttccaccgaaattgtgtaatagacacctgattgctcaccaaaattataaaagagagactttgttgcccatcttattgaaatgtaaagatcagttagttaccagacataaggtgtgccataaaattgagaagatgtcttccatacaggtttaacatcagcaaataagtcaagaactatcattttcccaaatgggacagaatgtagaagtgcctgcaaatatcagttgtaatgaaatcaatcaacagaaggtatatcattatggatccaatcttctttctcaaacacactatgcgtgtctcgtatcaatcttcctccaaagtcgtgacgcttatgcatatactcaaatattaaaagctcatcctctcttttgtatgtcatcatcaaaactattcttgtttaaaataaccttatcaatattcaatgaaaaatacaaaaacttaagcaacaaaattattaagtttcgtactttcatttgaggcggcttccagaaagaagagtctgtatagaagagccaaccctgcaaaattacacaaatgtcagcaataggatgataaatgtcaaggtcaactcttcatcaaacaaaatcatggttattgtgagaaattctaaaatattaaatggaactggcgaaatgatttcaatgcaaaagaactttccaaacaattctaatgtcatgtttggggaagaaggggaaacatacttgcattaaccaaacagcatccttgtcaccttccgacattgctttatacacggcagctccaagcgatgaaatatacgcagtgtcatttgtcggtggagcattttcattaaatgtatcactgcatgcattgtattatcttattagtgaagttttcaatcactaatcacatctaaagttgttaccaaaaaactactagtaaaatgatacatgaaagtatgatgatgtgatgaaagtttaattttctccaatcctagcaagttaagtattagagagtcccacattgataatgtgttaaactaaatttcatatatacgaggaatgggttactcctcccattgcaaattggtttttggatgaaacttcattcaccttatcctaaattctaacatggtatcagagcaaaaacaaacaaaaaaaaaaaatctctagcgactatgtgtagaatggtgagcatataaaatagacaccatcttgaggggatgttagagagtcccacatttagaaagataatagaatatataagaggaatggactactcctcccattgtcaattgttttgggatggaaccccattcaccttattctaataaaatgcaaatgcgaagaattaccaattatagatatctgtcacgtctccatattctgcagcattacatgcaaaatgttaatcaccaaaaattagtcaatggtaacacaaattaatattatttcacaaaaaaccaatataccttcaatttgttttttaatgaaagcagctccaagttcaacgaacaaaggatcagaaggtccaagaaggtaagtacaacaccatcgcttatcgccattgacagtgttcctaatgataacaaagagatggaattcttagctgagaaacataacttggaagtaggctgagaaaaagaaaaaaagaacaagaactgtataaataccaatcgccaagtctagtaatattagctgaaggacgtatcttcttcaatgttgccggaacatttccagagaacgatggtagaactgaaaaagaagaagacatcaaatgaaacgagacatgtcaattcatcgaagtgaaacctttttaatataatagattcatataaagaaagaaacttctataaacata

SEQ ID NO: 274 - DNA, 6714 bp, Cannabis sativa
ttgaactccatttcgaataatcataacctcactttagaatttctctccctttgatcgtttttgctcttttgggttttattgtttatctgagttttccattaaaaaatgtaaatgtatcttttttttttttttttgaaattcagattcttggagcagaggcttattccagtacgattcttgatttgtagaaaaaggtaaattttatgaagattttgtttaactactaaattttctttgatgttttgtaatatttaagcttcttgtttaacatatttgcagggtttgtttttgtgaaatcttgcaaagatgaatgatttgatgacaaaatcgttcttaagttatgtggaactgaagaaacaagcccagaaagaccttgaggggaatctggatatcgaaataggccaaattcttaacccaatagatgaagaaaacctttttaagttttaccaagaagttggtgaagtcaagtctgaaatggaagagattaccaatctcttgtttgatcttcaaaccttgaatgaagaagcaaaatccactcacagtacaaagattcttcgtgggcttagagatcgtatggattcagacatagtttccatacttcggaaagtgaagatagtcaagacaagacttgagaatcttgatcagtccaacattaacaatagaaatgttttagatgcttatagagaaggaagccatgttgatcgaaccagaatttcggtaaccaatggtttgagaatcaagttgagagaaatgatgaacaatttccagactttgagagacaaaattgttgaagatcacaaggaagatctgaggagaaagtactattgtgctactggcgagttaccgagtgaggaagtgatcgaaaagatggtttcgggggctatgaaagttcaaatgtttgaagggaaaacagaagttgatatggagaataaagttaggcatgagacagtgttggatattcaaagaagtttgaataaacttcatcaggtgtttcttgacatggctgttcttgttgaaattcaaggcgaaaagattgatgatattgaagagaatgttgccaatgctggtgattttatcagtggtggcactaacagtctttactatgctaaccagatgaagaagaagaacaaatggttttattgggtttgggctgtggtggtgatgatacttctggtctgtcttatatcaaccttagcctcttgaaagttcaactatatctgaaatcttggtatattgggattttgttttgttttgagtttttctattcatgtcttactgagctttctgagctcaagagggttttatgttcatctctaatggctgctagtgttcagttttagtatatcttaatgtaattcttgctttgatacattttgacttaatgctcattaaataaatagaagatgattgagaatgtagatttggttgttctttttgtttttactttgcattttatatattaaaagacaaaacaatagggaccacacaaaagattttgtactttttcaattgaaaaaatatataattggaaaagagcatatcaaataaccttatctgaattgctttaataataagaaccatagaaaataagtctcctaagttctcctttgcaatgttgtctttgcttgagacatgttcaaacatggtggaactaaatcaaatccatggccaaatgttgaaaacaggccttgtttcagataccatcttagccaacaagctcctaaccttttgtgttttaccaaattctggaaatttagcctatgcccagatgtttttcgatagatttcgcaaaccaaacactttcatgtggaacaccatgatcaaaggatactcaaaaaataatcaagctgaagaagctttacttctttatcatcaaatgatttgtcaatcagttccacacaacaaccacaccttcccttctttgctcaaagcctgttcttgtttatcagctttggaagaaacaaaacaagtccacacacgcatcataaagatgggttttagctcagaagtctatgctatgaattccttactccatgtttacgccataacaggctccatcgaagcagcgagtcttgtgtttgatagaatcccacaaaaggacattgtgtctttcaactcgatgatcaacgggtatgcaaaatgtggggaaatgagcagagccaacgagcttttccgaaatatgccagagaagaatgttgtcacatggacaacaatgatttatggatatgtcaatgctggttttgacaaggaagcattgaacatattttcagaaatgcaaattgctggcgttgaaccagacggtgtaactctagcaaccgctctctcagcttgcgctcgccttggtgcgttggatcaaggtaggtggattcattcctacatcaacaagaagagaatccacattgatctaattatgggttgtgctcttatagacatgtatgtcaagtgtggcaacatggaacaagctcttgaaatattcagagctatggagaggaaagatgtctcttcttggacagcaattattgaaggttttgcaattcatggacagggaaaagaagctctaaactggtttatacagatgcagattgaaggcattaaaccaaaccatatcacttttacttcaattcttactgcttgtagctatgcaggactagttgatgaaggaaaatcattatttcaaagcatgaaagatgttcacaagttgattccttcattagagcattatggttgcatggttgatcttctaggccgagctggtcttctgaaagaagcacaagagttcattgagacaatgcctataaaaccgaatgcagccatatggggtgcgctgcttaatgcctgtcaaattcatagacaccttgaattagggaaagagatagggaaaatccttgtcaaacttgacccttcacacggcggaaggtacattcacttgtcaagcattcatgctgcagctggagaatggaaccaagcagtaagagtgagaaaacagatgacagatttaggagtttcgaaagttccaggctgcagtttgattagcatgaacggtgttgttcacgagtttttggccgggggaggctcttatccacacatggaagaaatttaccaagtgtgggaatcgatagtagagagactgagacaagaagggcatgaatttgcaacaagagatttgttacttgatcttatggatgaggagaaagaaactgcaatacagcaacacagtgagaaactagcaatagctttcggattaatgagaagtaaaccaggggtaactattcgagttttcaataatcttcgagtttgtgaagactgtcataaggtggctaaactcatttcgaagatttatcacagagatattgttctacgtgatcgagttcgatttcacatttttaaggaggggaactgctcttgtggagattactggtgaacagattagtaacaagaactgaattagtttatttatgatccaggctttaaattaatgatttcaatctaattagccattggaggaataataatataaggaaaacaactgtgaccaaataattatcaaataagcaatgttgctcaaaaaatgacattaacaaaatgactgaagattatactattttctttctgaataaacctctgattttgtatttccaaactgacttttattgtttagcaagtgcttctaatctgttaattaagcttaaacaaactagccctttaagaggatttacgaattgttatcacttaaatccatcacttttggaagattaagttgagaagaagtggtagttatgatcttggccaaccccaattattttattatatagctgaaacgctcgaaggcaatatatatgttgttttaaaaaaatgaacaacaaaagacatatctacaaaaattggcacacttcactcgacgctgagaagctgtgtagcggtccaagattgtcccggctccaactgttgggttccaatctaaaagtatccataaaagggaagtaagaacagaaaaattagcaacaaaaccatgctcaaaaactattaattgagaaaaacaactcaatacaaactcggtttttgtttgttcaagttttggttggtaggtactaatatgaaggctggaattttgtgtaccttagcattttctacgcaaacgaaatctttgtagcacgcttccatctgcagatgtgggttccacaacacagcatcggtccaactacaaggatgaaaaaatacaggcgagcggagaatgtgaaacgtatccatagtgatattgattaaaagaattttttagccaaaaccagagttaaccaaggttcaaagttcacttaaactcactttgtattcttgatggatattgtatcccccaagccattatcaagatgtaactcattaggggcatcaagatatatgcaatcaacaaatcccggaaaagtgaccacgtccctgtgtatttacgataagaattagaaagaaagaaccatggctagaatattcaaaaggagattgttgttatttaagcaatggtaatgtggaataaatagagataatcaaactaccagaatagaaatagtgaggctagttctttacaaaacagttatatttttggtatgtgaactcttatttcatcctcagtcaaaaatgtatagattaaagatatgttcttgtcctagaatggaaaatggatgtgcataacagtactaaatttataagttcacatgcattgatgagtctagctgtgtaagaatcaaagtgtagctcaaacctcagccaatcaactagcctgttttcctttttcggtttttgctattattgtatggtaataaaatcatgtctacacatgaaaatgatgagatttgacacaaacctttcttctttgccctccaatggattctctggatcaggttctttatttagagttttgcaaccctttaaacctctaactgatgcacctgtgactgaagcctgcatgataagtattactgtgcaattagagatgcagaatacaatgcacaatgaaacttcttttctaaaccttttacaatttattcctaaattcttggtcccttaatatcaaatcaattcataagaatattctgaatttagagtcaaacaaatgaaattgaaattacgaagcacgaagaaaggctacttacgcggaagtatgagtgcagggctgtactaaatgaaaatggcttgttgtctgtatttgtaattacaagttctgtggaaaggctgtttgttttcagaatcacctggatgaacaaatagaatgattgtaagaaaaatttcagtaaaaatgatacacattgcatattactgtcgagttgtcccaaacactatagctactagctactgttagcagagttgtctaaacattgatcactcaccaccgtctgggtggggcaaacaagatgcctagtgagttatcggtatctctttacaatagcattattttcacaactaaccttgaataaagcctgaaagctaaaatcccacatggaacgactgtaaggctcatcctttagctctaaagttacaacgggatttccttcaacattttcggaatcaatgatagaccaatccatatttcttgcaaatccatgctgtaagcagcataaatgacttcaaggttaagtacacactcacacctgttaaggctcaatacacgatcataaaatgaagaagaacacaagacattgataaaatactatttgaacgtgcaagtaattagtaatatcaatgtctctaatgaaaaatctttgtgctattacagataaccatacctgttgtatctgaccaggtccaaactgcggaaaacaatggggaagacctccactatcccaaaaaaggatacattgttagtatctgagataaattatgctcttcagcacaaacaaatccataactgcaggtattaagaaacctttgtcctaacaatttttcaaaaagaaaaaaaccaacctgattggtttcttcttattgaatacagcatctggcctaacaaaaaggaggtccttgccatttggaactttccaagatgtaatgcaaccaccatataagtatatatcagcttcactgcaaccacaaacaaaaaagtattatctttatctatccactagtgaaagtctaactaggaatccaatctcaaagctcatattatcatattattggctacactttaacaagttctaaaatttatcatcttgaaatgaaaagaagaaacaatgcacccaaaagaaagcacaaatgaacaaattgagggaaaatggattcacatacctaccctgagaagaagtcaggacaaccttgggcaatttcccttctccttctgtgaccttaactccaacagaagtagcctcactgcttaagcttgcaaaagtcatacctttatacctatcacaaacacaattcagttgtccccaaatgtcaattcaataattttcataataagaatatcgatagaattgaatctaaaatccaaaatgaagaaataaaacaaaatcaaaatggtcttcctgaaaaatgaaatgtaaaagtgaatagtgagtaaaaggagaagctttaccggttaactcggcggaaggaggaaggggtcggagttgggagtgaaatgggcatagaaagcatcgccatctctgtctctacgaatggatcagtcacttcgttagaattcagccaatgattcacccaatattctctctctaactactcgttcagtttttttttttt

SEQ ID NO: 275 - DNA, 6587 bp, Cannabis sativa
aaaaaatatatatttaaaaactaaggaaaccaatagcttgatttcaaaaaaaaaaaaaaaccccaatagcttgtaattttttcaatttctctattagagaaaccattgctcatatattaactaaaaatgcttgagagtctaaagtatctccaatttagaagaggattactattttgtgtggttagtacagttgtgttaactattacaaccaaatttttgtattaatttttaaagattcttatctatttttagtatattttattttatgattatgtatattgtagttatttaagattatttgtaaatttaaaaaaaaaattaaataatttatagtatcaaaaataaaatttaaacaattaattactatggtgcagcacacactgtatggttataaaaaaactaataagagaactttgtgaaagaaaacagtaataaggaaatagatatagaatgctaaaatttagtccgttgtttgcgcatttgaattgggaaacaaagtcgattatatcatcattatagattcgtgggtattttgggaaataaaatatttgatctgaagggagggtgtttttagaattaaaaaatagaaataaaggaaatgaaatgagtatgaatgaaaactccaaaaaagtctctccattttggatttttgccaactagcatgcacttgaacacatcaacacgttttcaaacatttcaaacctatgtaacgtttgcttattaattttaaattgaaaccaacaaacaaaaggaaagcgtgttaccaattaaccaaatatatatttattgatttcggcttttctattttcattaccttttttacatttattgtagttgtgcaatgcccattataccctttttcccattttaatttttcaaaaaatataaagggtatattaattattattaatattagtataagatactcaaaaaaaaaaaaagaacaatgcagctcagctaagacaatggtgagagaaaataggaaggtagataacactatactaacactaaaaagccagcaatacccaactcatacatacaccctttctttctacacgttcttcagaacactcataaacactcagaagaaccttctcacttccttctttattaatttttgtttcaatttttttaaaaaaaaaaccattaatatttactcgggtagagcttaaagggaagaaaaaaaagtgacttttgttctagttttgggggtttgtgttttgggttgaagtttttttctttaatattaaaaagacttgaatcatggcctcttagtgctttgtagtctggaaaaactcgtttacttatctctttctttctctttttcttctcttctctaagatttgtcatcttcatgctcaatctcatggatagccaacaattcatagttgcagagcaaaggaaaaagctacccttttgaattggcctatttccaccttcatcccatctaagaaaaaacgccttctttcattacttatctcatagatctcactatatacactttcagcattacatatcaaaacggaggtaaatcttacttttttgtttttgggttctcttttttatttgtatttatgtatcttggcatggtaccaggatattctgattttgatttcttattgctctgtttgtttggatgctgagaaaaaaaaatgtctgttgtgttagtgaaaacgactctttttgtgggactttgatttgtattggtacttacccacttactgtgatgtggggtattttcaagatcttctttttctttttgaaattttttgaaacatttcaaacttgtacctgggcgggttggtttggtaataaatgataagctttatgctttctcacgattaaagggaaaaaaagttgggatcttttatacttttatttttcaagattaagatgatgctccttaaatttagtactttttttttcttagacaagtagcagatttgtagattagatcagccattattatgtttatatgttctgtttgtttgattagtcctagactttgatgaaatttaaagttgggtttttaataagttggtgttttacagctccaattatgagcttttaaaagttagtgctgaccagctcttagatatggctttgaatggtgttaatggagtttgaattaatgtcttatgtcaactttcaggatctaaaataggtggttgaagatgacatccaagtccttcaaggcgagccgatctaatatatcggcgagttctgatgtgcttgatgggaagcctccattgcctccacaggtgacatttgcccgaagaacatcctcaggccgctatgttagctactcaagagatgatcttgatagtgaacttagtagccaagactttatgaactatacagtccacatacctcccaccccggataaccagcccatggatccatcaatctcacagaaggttgaagagcaatatgtgtcgaattccctatttacaggcgggttcaacagtgttactcgagctcatcttatggacaaggtgattgagtctgaagcaaaccatcctcagatggctggtgcaaagggttcatcatgtgcaattcctggctgtgatgccaaagtaatgagtgatgaacggggcgctgatattctcccctgtgagtgtgatttcaagatatgtcgggattgctatattgatgctgttaaaaccggtggtggcatttgtcctggatgcaaagaatcatataagaacacagatttggatgaggttgctgtggataataatgctcggccgcttccacttccacctcccaacgggatgtctaaaatggaaaggaggctgtctttgatgaaatcaaccaagtccgggttgatgaggagtcaaactggggactttgatcacaacaggtggttgtttgaaactaaaggaacttatggatatgggaatgccatttggcctaaggaaggcggttttggaaatggtaaagatgatgaatcctctgaaccaactgaattgatgagtaaaccatggagacctcttacacggaagttaaagatacctgctgctattctaagtccatataggtaaaaagaaaaagtcttttcttagatatatgtcaactagtattcttaacattcaatgtagggagagatcttgtatctatatatgtatttatgctgatgagtgttttcatttgccttgcatatgtgttgtgttaccaggcttctcattcttattcgtatggtggtccttgttttgtttctgatttggagggtcaagcataagaatgaagatgccatttggctatggggaatgtctgttgtttgtgagatttggtttgctttttcgtggctccttgatcaattgcccaagctctgtccaatcaatcgtgcaactgatctcaatgtattgagggacaaattcgaaacaccgagcccaaacaaccccactggaaaatcagaccttccggggattgatatttttgtttctactgcagatcctgagaaagaacctccacttgtcacttcaaacaccatcctctccattttagctgctgattacccagttgagaagcttgcttgctatgtttctgatgatggaggtgcccttctgacctttgaagccatggctgaagctgccagctttgctaatacttgggtcccattctgccgtaaacataacattgagcctagaaatcctgaatcttacttcaacttaaagagagatccttacaagaacaaagtaaagcctgactttgtcaaagatcggagaaggataaagcgtgagtatgacgagttcaaggttcgcattaatggacttcctgaatctattcgccgtcgttctgatgcctatcatgctcgcgaggagattaaagctatgaagattcagaggcagaacagggatgatgagccagttgaaagtgtgaaaattccaaaggcaacatggatggctgatggaactcattggccagggacttggttgactcctggacctgagcattcaaaaggagaccatgctggtattatacaggtatgtacatggtctggccccatcaagttactttcctttttggatttggttaacacaaattttgagtggaaatgaaaataaagcaaacttaatatgttttctctccccattgatgcaggtgatgttgaaacctcccagtgatgaaccacttataggaactcctgatgattctgggttccttgatctcactgatgttgatatccgccttcctctacttgtttatgtttctcgtgagaaacgtccaggctatgatcacaacaagaaggcaggagctatgaatgccctggttagggcctctgctattatgtccaatggcccattcatcctcaatcttgactgtgatcactacatatacaactctcaggcaatgagggaaggcatgtgtttcatgatggatcgtggtggtgaccgcctttgctatgtccaattccctcagaggtttgagggtattgacccgtcagatagatatgccaatcacaacactgtcttctttgatgttaacatgcgagcccttgatgggcttcagggtccagtctatgtcggaactggttgcctctttcgtaggattgccctttatggatttgaccctcctcgtgctaaagaacaccatccaggttgttgcagctgctgctttggtcgtaagaaaaagcatgtttcagttggaaccacacttgaagagcacagagctctaagaatgggtgattctgatgatgaagagatgaatctctccttgctccccaagaggtttgggaactctactttcctcattgattcaatcccagtagcagagtaccaaggtcgtcctcttgctgaccacccagccgtgaagaatggacgccccccgggtgctttgaccattccccgcgagcttcttgatgcatcaactgttgctgaggctatcagtgtcatctcctgttggtacgaagacaagaccgagtggggacaacgggttggctggatttacggatctgttactgaagatgtggttacgggatacagaatgcacaacagaggatggaaatcagtttattgtgtgacaaagcgtgatgccttccgtggaactgctccaatcaatctaaccgataggctgcatcaggtccttcgatgggctactggctctgttgagatttttttctcccgaaacaatgctcttcttgccagcccaagaatgaaggttcttcaaagaattgcatacctcaatgttggaatttaccctttcacctcaatcttccttattgtgtactgcttcctgccagcgctttcgctcttctcgggtcaattcattgtccagtctctgaatgtcacttttctcagctatctccttaccatatccgtgactctatgcatgctggctgtgctggagatcaaatggtcgggcatcgagctagaagaatggtggagaaacgagcagttctggttgattggaggaactagtgctcaccttgctgcagtgcttcaaggtctactgaaagttgtcgctggtatcgaaatctctttcaccttgacatcaaaatcagctggtgatgatttagatgatgagtttgctgatctctacattgtcaaatggacatcactcatgataccgcccatcacaatcatgatggtcaacttgattgccatagcagtcgggtttagtaggacgatatacagcgtgataccacaatggagccggttgatcggtggagttttctttagcttctgggttttggctcatctctacccatttgccaaaggtttgatggggagacggggaaggacaccgaccattgtttttgtatggtcgggactgattgcgatcaccatttcccttctttgggttgcaatcaatcctcctgctgggactaaccaaattggaggttcattccaattcccttgatagaagaaaacaagttaaaaaagtaaaattattctttgttgttgctgtgaaagtaagttcattattcatcaaagatattccttcattcattcatttttcttcaattcaaacaagatttgatgttatgctatgctagtgttcttcatgttcatgataatggatgatggatgggataggaatcaggggaatgccatgaagaagagaaagagaatatatatgggaaaatcttgttttcccggcattttgtaattgttattatattaaatgacttggattgatttagtttttgattttctttttttatttattatattgaacaaaatttcattgttaggatgattcttcttcttcttcttcatttgtaattgataatcagaactaaatccactgctctgccaatttactcctcttcagcatcattttaatattcttgcatgtaaaacttaaaatcgttccacttaataagcatgcaaatgttacgaaaatgtacatcttgtaataaataaatgtaataatgaaaaatattatgtaatagagacactagatagttttgccgtaacatcctaaataaaataaaatttataactaccattttcaaaagatggaaaaaaaaaaaggtagagtatagtggtgtgcaaatatttgaccatttagctcgtaatcaatttgaattggttggtttcgtttttaatatctcattatttgtcttgaagttattttttttt

SEQ ID NO: 276 - DNA, 2061 bp, Cannabis sativa
accgaggaaatgacactacggacatactggcgtgccattgtagcaacgttatcctgcagactactctcgaaaggaaattggaaggcaatagtcaataacgaccttgcattttgacccgatgagggatctccacccgtgagacttgttgctggtcccacttccagactggatgtaagatccaatgtccgatgtgcaggcaatgcatccttcgaatcagactgaaaaatgaacaaaagcactaattaacgaaacataaaaatggagcaagtggaaaagttgtcccgaaaccagaacgatttgactcttactggttttgattccaatgggatgatgcggaaaccagaaggtagtaggggcgcatcatctgggaacatctcgtcaattggagcaaaaactagttctgaacaggcaccgacggcattgtcatcaactccactgcaaatctgtcgaaacaaacaaaacaaggatcttaacattttaaaccataaactatctgatatcatgcccttcaccgtaaacatacctgcaacagatgaatgtccctcgaaaggaaagcatcttcttgagccaacgaatgtccttctaaccgaacaacttcaagcaactgaaacataaaaaggcaccgtaagcaaaaaaaagatgtaaagaaattttcctagtgaaagggtgcgttttcttttctaaaccatacctcttcatgtacaattgtgtggccgaggggcattatgatttgactcccggtaaatcttgtgggcctcatacccggataagcataagagccagctttcagtgcagatgcagtatagccatcaacattaaagtcggcccactctgagcgatgctcccttagaaaccgaaccaggacagcaggagggacgttctggtagacgacaggaaatatacacaacattagaatcaatgtgacaacatatgaaaacacgaccaacattgcgaagttataaaattacttggagtagcatagaagcctttgcacaaagaacccctccaaggaatgcaagggagttagcaggattggctatggtacttaaattcttccccgagttaattgcaatagtaacatcttcggaactatcaacagtcacaatggaccagccgtcatcattgaatccattgacagcatcattgaaacctctgaaagataaccgatccacaagttaacaacaaatcttccacataaaagacaacaaccgagctaaatgaagaaaaaacattcgataccttattaatctttgactaaaagtccgtagaacagcaggctgcctgcccaaactatacaccacctcaccactcgtctcttgtgctatttgcctgatgtagcgcagtgcctgtacaaaataattctagtgaataccgacatcaatccattctaagtgttctatctttagattacacatggacgcgagaacattctcttccaaaaatagaattcaatgctgaaaactcgatgacacgacacgggtttgtgcctatagtatgctattaggcttaggacaccatccccactaacacgtttctaccaaatgacaaataatttcaatagaaagacgaaagaaattgtacgaaaccagcaagaatcacatgaacacttgtttaaagtttaaacgcaacgcttcattacagaaaaattgtactcactgcaatagtaactttctgtgctactactttagatgattcatacagagggcgcaaaacttcgggcacactccatgcctgcaaagcgagaacatattatataaatgttatacaagaaactaaaaatggattttaaacgggctcgtctaagccttcaaaattcagaaaatcaactaagagtttttacaataagcctagaagtaatgacctcaagttttagatgatcaactatatggattatagaccctccaccctcacatggccgaatcaaatatccactaggaagcatttcgcctcttacaaactgagcagccgaagctgaatcaggaccagcaccagaaccagacagagatctctcacaaacctataagaaagcaatgtaacattagtctccttcataaccgatac

SEQ ID NO: 277 - DNA, 4198 bp, Cannabis sativa
ttttaacaaatcaattatattatattaaatgtactatattttttaaaacaaataaaatctgaaacatataatttaatactttagggtataatgactttttttctttttcttttttacaaattattttaatcacataattttttttaatcctatttcgatcagaaataaggtattatcttttttttttttatcagaaataagatattatgtttttgttttctatttaaaggttggaaagcagcataacgataataattcatatgttttacaaatatttacaggaaagcaactaatacttcaattttcaccatcttctctgttctattctcaattaacacaattttccatccccactttctcgggcaccaaacaaagtgaacccaactaacataaattcttattctctaagattttggaaaaccctgacgaataaaaataaaaaaaaaaatacaatctttctgagattgatttcgaatttctcctgcaaattcgaaaattgtgtttgcgagtttccatatgaagaagaaaccctttgaattagacccacactcagtctacttccaatctcaccaaataaatcccaaatctttgctgttcgaaccctaattctcattgaccgccatggatccccatcagctgcttttggcagtatcccctttcggctccgcgaaccaaaccctctctcctcctccgtcatctgacgatggaagcggcggtttcgatgattacggagcgtggtatgggaatatccagtacttgattaacatttcggcgattggggcattcttctgcgtcttcatattcgtcttcttaaagcttcgcagcgaccaccaccgcatgcctgggccttctgcactactgacaaagcttctagctgtgtggcatgccactggccgtgaaattgctcgccactgcggtgccgatgcctcacaattcctgctgatcgagggcggtagctgcggattgcttctgtcccttgctgtactgtcggtatttgtaatgcttcctcttaatctctatgctgggaaagctgttttagccgatgaattttcgaagacgacgattaatcacatcgaaaaaggttcgcctttgctttgggtgcattttctttttgtggttgtggttgttggtttggttcactttggtatttctgctattgaggaacggttaaaaatcactaggtttagggatgggtatgggaatttgagtgacccaactgcaaattctactgcaatattcactataatggttcagggtatacctaaaactctaggttcggatagaacagtgctgctagaatactttcagcacaagtaccctggaaaggttttcagggtagttttgccaatggatttgtgtgctttggatgatttagcttcggaaatagtgaaggttagggatgacataacgtggttagtagctagaattgactctcggctcttgccggaagatgggcaaggtgaagattctaatggtttttggggtcgtttacgttacctatggaagaaattgtgtgattcgtggcatcggataatgtctagcttaggttacacgtatgaagataagctaagaagattgcaggaattgcgagctgaattggaaactgaactggaagctttcaaagaaggccgggcacttggtgctggagttgcatttgtagtatttaaggatgtgtacacagccaataaagcagtacaggattttcggaatgagaagaagaagaggatagggaaattcttctccctcatggaactgcgtttacagaggacccaatggaaagttgagagggcacctttggcaactgatatttattggaatcacttgggatcgtccaagctttcactgaggttgcgtagagtgtttgtcaacacatgtttactgttgatgcttttgttctttagctctcctcttgctgttatcagtgctgtgaagagtgccggtaggataataaatgctgaagctatggataatgcgcagtcatggttagctttggtgttgagctcaagttggcttggaagcctcatctttcagttcttgcccaatgtcattgtatttgttagtatgtatatagtgatcccttctgctctttcctatctttcgaagtttgaacgacatcttactgtgtctggggagcaaagagctgcacttttgaagatggtgtgcttcttcctcgtgaatcttattctccttagggctctagttgaatcatcattggagggaactctcctacgaatgggacgatgctatctggatggtgaggattgcaagaggattgagcaatacatgagtgcatcattcttgtcaaggtcttgcctttcttctctagcatttctgatcacaagtactttcttgggaatatcttatgatctccttgctccaataccatggataaaaaggagactgcaaaaatttcggaagaatgacatgcttcaactagtcccagaacaaacagaagaataccaacttgagaatcaggaaactgatgatcttcgaagacccttggtagctaatgacacgtatgattctccaagggagattcatatcgattttcagggacatgatctttctgtatatccaatcaacagaacctcaactgccccgaaacagacatttgatttcgctcaatactacgcattcaatttgacaatattcgccctgacaatgatatattcttcgttctccccgcttgtagttcctgttggtgcagtttattttgggtataggtatgttgttgataagtacaacttcctctttgtttatagagtaagaggctttcctgctgggaatgatgggaagttgatggacacagtactgtgcatcatgcggttcagtgttgatatgttcctgatttcgatgctcttgttcttttcggttcaaggcgattcaacgaagctccaagctatttttacactcgggttgttggtagtgtataaactgttgccttctagtggtgatggatttcaaccagctcttatgggaggaatgcaaactgttgacagcatagtcgatggtcccattgattatgagatcttttcacaacctaagtttgactgggatgtatattatcaatgatttaaattgtattgttcctcccaattgtttattcaaccctcttaaagtataaactgaattaatgacaaacacgaaaaattgataattcttcccttgatctccatttttgcttactttcttcgcaattattttcatcttattatttaagaataattatataaggcacaattttttgtgaaaaaattatatttttacgtttaaatttttttttttttacatttttactattttttataaaaagaacacgaaaataacaagaaaattacataaaagtaacataaaaataacataaaacaacaacaaaaaataacataaagaggataaaaaattaacaagagtacaagataaaaatcgtatttttgtaatttttttattgtttttgtgcatttctgaaataggcaccaagttgttagttgtttgtttcccaaggctatacatgtatgttagataatgattagtgacattcacatttatcctgcaagtgaaacaaccatcattgcaattgaatttaaagagtagaaataattataaagtgtaaataaggagacctttatgattctctgaccaattggtcttaggcataaataaacctcattacaagaaaacacaccatcttcaaaagtgggtgacttgcttgtaagaagaaatgcctgaaaattagtatagtgtgaggtgaaaagtggaccaaatgaattgtggttagtgcgagtaataagagaaacataaggaaatgaatgaaacaccaccaacccaagcaagtagtgaattgtatcgtccctatagtcactcttaaccaaccaataagctctctattattcttctttcacttgaacagggtcttctattcaatttggttccacatgttaatcattttcactttccctctgccacatatctattcctatatatatatatatacatacatataatgcatgcatggcttaacttataataaacccatttaataactaaaacaaacccatttaaaaaaatgcatcattttgttgtgaaaagcaatgttttcgattcagattcgaactcaaatccaaataagcttaagctcggctatggcggcagcagcaatgaacggcctctttgtcccaagcctcgccgaccagttggacct

SEQ ID NO: 278 - DNA, 1096 bp, Cannabis sativa
taaaaattattccattaatggtaatatcagttatttgaattaatattgcaaaataaatattaaattaagtttatcagaatatatttaatttaaaattaaattaaattaaataacttttaaaagaaaatattattttaaataattaaattttatcttaattatttaaaataaatatatgaaaaaataccctagaaatcttcaaaacgttaactaataattttttaagtttttcttttttgattagttggtgaatatctaaacttaatttaaaatattatttattaaaacctaaacctaatatgattagaatatttaatgtaaatatatataatcctaggtcacagaaaacattcttattattttctaaccttaaaagatgtttaggaatctcgacatcttaagtattgagaatatttagaaacatctatatgttactttttatcttactagtacgtagattgacttgaagattgtgagaaatttctattaccctaataaaaaagaaagccaggaatgtttgataaacttcaacaggtattctttaattattgtaggtcagatttaccctgtgtttggtagagagaaaaaatattgaagggaaagaaaatctgaaaaaaaaagagaaaaatattttccattaagttgtttaatattgagttacaaaatagaatattattaattttattttatttcaaaaatgaaagcatgttttagtaaatttctataatcttaccctaaacaaaatatttctattcacttttgtcttcaatttaggtgagaaattttcttagtggtttttttctctcatcttttaccaaacaatctcaaatttagtttctatccatttttctcctctaccaaattaatgaatatatatttattaattagtttttaaaacccacagcctagtatgcttttcaccttgattttgatcttttaataccaacaaaaacaaaatggtgtggaccttagaaaccagctgacgaaataggcatggaattgaatgtagtaggactaggatattcctttcctgtattgttgtaaatgaatattaaaactataataacatatctatcttttacaaaaataaataaat

SEQ ID NO: 279 - DNA, 7804 bp, Cannabis sativa
  modified_base (5113)..(5114): a, c, t, g, unknown or other
tttatttagggcatcaaatccaacaacctccactatgaggtggctccatttctctcgaacaagcttttggaatagcaagatccttgagcgtcatacgattttgtggtggagcattctatctgaagctctctcaaccaggtcggctctaaataaacgttttcatattgaggacactcgatgcccaatttgtggagtagaagaggaatcgactgggcatctctttcttcattgcaaccttgcctatcacctacggtgctcttttctgtggggaatctttcctatttctgacaccaatattaggttatgggtatgggtttgggttaaattcatttgaaaccttcaatacaaaggtgtaaacgcagatgaggtgttcttttatgcttgtgttgtagtggagacaatttggagacttcggaataatatggttcataaccataaaatggataatgtgaagcactatattgattcaattattcactcttttgcagattacagatcttccttcatccatcctacccctctgagccactcccttgtttggtgccatcccccccaagactgactcaaaatgaattgtgatgtcaaagtgggtttagagtacatgcgcatagcagttgttactagaaaccaccttggcgatgtgatttgggtgaatttggcaaaattggatttctcagacgcacattgtggtgaggcggtcgctgtttgcttggcgttagatgtggcaataaaataagaatacaaatttattattgtcgaaagtgattctaagatagtaatcaataccataattggtgtggactcgaggtgagatattaaaaattattcctctttttgcaatagaatcatgtcctttttcgttagttgtttattttgtaatatttctagaatttgtaattttgtggcctgtaaggtggtggttaagtgagcttttacacataccagtttggtcgattgtctacctcctccattcctaagaatatattttgtaatgaccgtgaggtctaatatttttatctgataaacttttttgtttttttttttaaaaagagaaatttacataaactgttattttcgataatttttttgtacttttacgtttaatttttttttatatatatttttacaatattcataaaaataacacaaaaaactacatgaaaataacacaaaacaacgtcaaaataatatacaaataataaaaattcaataataaaataacaagagtacaacataaaaaatacattaaaaaattatattttatgtaaataaaatcttaaaaattatcattcgcaaaaaaaatcttacaaattataaaaatatttaaaattttatacaagtaatatgtgtaatatagtaatacatatatatacttgcgattaaagataaaaaaaatgaatagtcaatttttatattgaaagaaaataaataaaataatattattttttcttaaagaaaaaaagttgtgttttgtggtactgctcgtggtttcggttcctaaatattattgtactacacatttgtaaggacactgaaaatttataaaactatttaaatcgctattttttttaacgatataattttttgaaaaaattagtaaaatatttcaagtaataattacttacaaattagcacagaatctcccaataatattttataatttaattttaattattgaaaaaataataaaacaaaattatatttaatttatttgagagtaaaaaaaagagtgaaatttggagtttgggtaaataaaaagggtagacttggtccccatttccatggcgggccatatctacggcttcggagccgcacaatctgctgccgccacttctggttcctacaccgagccctacttccccgactctctcgcttccgatcctcaactagccgctactatgtatcttggccaggccgatgccctaaacgcttacgccgccgcctctcgaaccaactcgcatttagtttccctcgcttcctggactgccgctgccggagcagcctccacagaggaccccgtcaccggtatcaaacgtacctctgaaggttccttctgcttgcttttttgtttttggtcttagttacttctgtaatctgttcctcttacaggaaaatagtgagatttctctccatttccttttcgtatgctttgatttatagtttttttttcgataaattgaattaggcatatttagcatttctttcggtttgtttgtttgaattagaacagacggttttggatttcttgtacattgtctcgtttgggaatgaattttttggtttttggtagcttcgtattatctgttttgtcttaatcgcgcttcactcgcgaagagatttcttttttcctttttcgcctttagtgcggatttgagaacgcgcttcgtttgtaatgttcgctaattttgactatttaagtgatgattactctttgccttggaccacattcgaattggggtatagattgtcaaggattatctattggttactcttaagaaccacactgggagttcttgtctttcgtaatcattgtgtggttgagaattcatcttgcttctttagatggctctctaagattttctggagactggtgcgacatttattttcctttcttcaattaattttattttacaataatgctctttttccttatcttgccgatcctggagaagcaaactaagttctagatttggaggaaaagttctataatcgtttccctttatgatgggcattctgattccacaagaatgtctccaagccgttatttttctttctttcagcgaggcatatctagttattttaaggagtaaattcaagcataagcttcatatcttcgtccatgatagatggcttttgacccttgaattttctgttatgattttattttaaagcttgtttttgtgtgggtggtattgatgttcaattcatctttatcatgagaagtattctacacactgaactggtattagaaattaaatgaaagaggattaactattatgttttagattttgggtgtttgggtgctgaatgtaggaaatcttgacagtaactaggctatgttgccaatatatgtttttatttttattttttatgataatttataatatatgtttactaatatgaaactaactagatatttttaatgaaaaggtaaaaaggggatggattcactacatagtttgctattatattcctaaatttaaaacccagttattaatatatgttttctgcatattcgtaaacaagtcttatatgtttatgtttatgtataacaaagtatgttcttctctattaagtactttttaactatagctatatagtaactatattatatttcactggtttattttgtatacttgtctcctatgtactatagcgctgtatcatcctactgttttgggtgcccataatacaatggggcaagaagcctggtattctgcaaatgctttggccaagcgctttagatatgacggtgcaggcaatttgcctatatatccacaaaggccaggagagaaggattgtgtccactatatgcaaacaagaacctgtaaatttggagatagctgcaaatttgaccatcctatttgggttcctgaaggtggaatcccagattggaaagaggtgaccgtttattactatacttatttctatgaaaattaatcatattagagtatacatatatatatatatgttaaatatattactttttccttttaaatgctcttctcatatagctattgccttttgtgagaagatagaccctatatacaattttagatgttacattttgttgaaatattatattcataaatattcataagtatcaatgtatatatgctgtgtgaaatgaaagggaatataatatatccagttaaatttttctttccctatattttctaaaactatacaatgtaatgcttgtgtataacagttatatatctatatttagtatatgtaaactataatattctacataaaccctagttttgcaaaccttaaaaaggtcactgaccgaagtacttgaagttgtttgtctttttctccacccgcctatttgttttgttggggatgtggcagcatcttttgccgtcctagaggggtgggggtgttgatggatgtatacggatgaacttaagaataggagaggagtaaaggtatagaacttaaaggaagggataagtagaattatgacatctgaatacagcttagaattgtgacatatcaactaatatttgttctggccccttaacattaagttggctcatatggtccttaaacttataagcacaaatttaacatcagacagtttttttcattttaatattggtccctgaacattgaaaattagtttcatttagttccttcatgcttaaaattttgacagaagatttagaaagcactaacagattggacgagtgtttaaaatgtttacagaattgaattgaatggaatttgaaaattttgtaaaacagaactttctcaataatttggggatcaagaaggtagctaatactaattaaatatttacattgagaattttataatccaacaagtactctctttattgtttgtacctgtgaaagtctgtaacagaattaatgaagttatatatatgatgtgttaatgcaacatagtgaatctcgccttctgctgtggcttgtaatagtggagtattttacttttgtttttactctttccctctttagacatacctcactgttgtttgttgttgactagattctcattctgtagtatatacccctagttactatatcacatttctttgataatttctcactttcctaaacttcaagatgttgaactataattttgctttctgtactatataagagcattttctttgtagtatcagatctaagattgttagctatgttgcttacttgcaagcactgccacacttgaagtgtttgcatgtttatgttaattatcattgtatgcattatgcacttctgttaagcatcattcaatgtcccttgttttcccagtttcatgagactgattctttttcatgtttttcttgtctttttttttttttatttcaagtgagagctacaaaattgttatgcctagttgtttttgttgttgttgttgnngttgttgttattattattattttgcatagcattctaatgattgtttattatatggatgcttataaagagaactaaaaacatagtttgtattcttgtattatatcaatttgacttgtgggatatattagcttttggaattgcagtatatgtctattttccttttgtttttatgtttgtaagtcactctctatctgtaagctgtgaccaggtcagttcctgaactaaaattacttcattctaatgaggaaaacatttaatcttctgttcatctaggttccacttattggtagtgaagaccttcctgagagaccaggggtgtcagattgcccagtaagttccacactgtaatccttctacagaaatttgtatatgcatttgtgaacttgaagtattcaatgctttttgtaactttattcgttgcagtactatgtgaagactcaaagatgcaaatttggtttgagatgcaaatttaatcatccaaaggaaactttggctgcagtaagtgcaagtgcatggaggttatttatgaattgattcttatgtgctttttttttctcttagctacactaataaatttgttataaatttaggctgctgtagggaatggtgatccctctgccttacctgagaggcctactgaacccccttgtgctgtaagataattatagttgtttttcagttatacatctaaattcattgttgatgtagttattcaccagatgatatgtttcaaatcctaaaaaataacttgacagttctacttgaagactggaacttgcaagtttggttcaacctgcagattcaatcacccaaaagatattcttttaccatcaactggacaagaaaatggatctagccaatatgaagcagctaagatggagggagcacctggagattcaaagtctgtgaaatcttctgatccattcaccccggcactatattataacactaaagaacttcctgttagaccggtaatgtagatttttagctagtgtcccgtagtcaatgagtctcactagttgtgtttccattttatattactcaattttcattactttctatttttcgggaagggattggggtttatgaacagtagattatactttccatagtagatttctattttcactactttctatttttaaagtgttgcattttgcgattccttttcctttggtctcttaacttatgaacatggtcttgtgactcgtctgaaggattgggtataggattataagttcctaaataatcttaaactaatattatggattaggctgcaatggtattgaaatctcaaacatatttgtgaatgaaaatctagttaaagaagttacaaaattatctaccaacaaatcagcaaagtttcttgcactatgtgaagttctctacttaaaagtttaggctgaagctaagcaacactgaaaagatacagaatgtcatgagagagacttggaggaaaggaattgaggaaaattgaagacaggtatattagtattattgtcaagaaaagagaagaaatgttcaaacttggtatgtaaatggccaagcattatctcgggggtgcttaaatcctttaatttatagtttgtttgtatcataaactacccaactttgagtgaacccagtaagaatgaagtaatactaatggcctatgaaaataagtacaagtatgatctccttttaatttagcaaataataattatagttatatgatcacccttttctggaatagaaggattgtcatgattgtggtcctactcttcccttatttttcacttttctagtcctgatctcaccctgaatccagctattcattactacgatgtagattgtgtggacaaatctgatgccacagtcacatgaatttctaagtaaatgctttatggatgtgagaaacatagatggcttaatttggctttggaaaaatatagtttaagttgcgtctatttttgtttgagttggtacttgccaatttttattctttcatttgcacttagttttcacatcattgctacttttgttgattgcatctttcatccttacagggtgaaccagattgtccattctatctgaaaactggcaggtataagatttcttttgcttaaataatttatgatggaagcatgtttttttctctctaaattattacgttcttctgaaaataaacaatgagttaaatgctttaattgctttcttacacagctgcaaatatggtatcacatgccgctatagtcatcccgacaggaatggtatgtatatttttatggtttttgttgcaggaatctgtttccacatatagtagttcattgaatagcatgcttaaagcatttcatgccgagatattatgcagccatttatccccctgcagctgcacttggacatgcccttgttgcttctccagcagctggtctgaacatcggagttgtcaatccagttgcttctttgtaccaaacaattgaccctagattggctcaggtagctttaaattgaatttcttctacatttgttataggtaattgggttgtgtcattgaaattactctcggggctatgttactttctctttctgacacagaccaaacataattaggggtatatgtttccttactactgttttagttcatttaacctgattaaatgtcatggctgatcactgtaaggtgcaccattatttctctctctctctctctc

SEQ ID NO: 280 - DNA, 1910 bp, Cannabis sativa
gggggggaggaggggtcactgtcagtaaaatctttaagctagataaagatcgtcaatgaaaatgaatatagaagatatatatattaaagaataatggaatgtaaatgttgatgatgaatatttaaattttgtgtttctttgggtgtttattccatcaaataaactaacaacgttctctcaatcagcagaagctccacaaaggaatgtcactttcttcatatggatcttccataaattgtgggtcaaaacacccattattgaatagcatctgatcaaagcactttggcgattgtagaccgtcaaaattgtaccaagcttccatcatagccgttgattgatccatataactatttgtaataaaaccaccctgagccttgtgctgttcctgattatgatgatcatagctattagacatatcgatgtgggacccaaatgatgaacccctcaataaaaaggcttcatcaatatcattatcaaccagatcaaacggcgatgacaccgccgaagacgacggcgacggcgagggagcagtggcagcggcagtggcagtagaggtagtggcagcattattgatactaataatgttgtcgttaaggaaagtggttgttgtagtatgggcagcggctgcggcgactctctggatggactttggggataaaaggacgtcgtttgggaacatggtgtgatgatgagaagagatagtactactgctgagagggaagttgagattggccgaagatcctttaaggcacaacaaagcggcgtcgtatgctctggctgctgcctcagccgttgaataagaccctaaccatattctcgtcttctgattaggtgcccttatttctgagacccaagagccccaggttctcattcttacacccttgtacttctttttcccagttgtcaatgtcaatggcgttggctttgatgggttttgctccattatcttcttttctgtcttcaccatggttcgatcgattcagaaattaacttggatccaaatcctatattgtatactcttgtaataataacaaaaatatataaacactatagtaatagcagtagcagaagtagtagcagtagtagcagcaggagtactagtttggagatagattattttgtcggaagtaatattaaactttcgtgattaaggatttgtagagtgatttaaaagagtgtgttgaaattttctttgaacaaggcaggaactcattttgatggtggaaatgttggtatttatagagatctctctcctaccccagtggagaaccggtaatatagaaatggtagagtaatatatatatatttatttatttttgcggtatatgataatgcgtgacagaaatatatatatatattttttagtttatgtaaatggggaatggaaaataatttggaaaatgactttgatgtcctcatgctgatgaaagtgaaaatgattcattaatatttgctgcataaacatttttttttaatttaaaatggagaaaagcatggtttggataattacatacaatcaacttggttgtgtaaaattactgtcgtattcattgactccaataaaatctatgatcactggcaatttcctttttctttctttaatataaaagaaaattactgtttgtaatttttctggtaattaatcacattccatgcagtaattttttgttattattattactacaagttattatccttattaattgtcattttggtcttattatttgctgtttaatcttgtatgaaatagcttgtgttggtcaaaacattgacatacaataaaatttttaatttgttgggcagtcacacaaatgcatgatttaaagagaaaaaacagcttaaaagcgtaataaattccaaaataataactgtaaccgtgtaaggaaaactgaaaattaaaaaaaaaaaaa

SEQ ID NO: 281 - DNA, 794 bp, Cannabis sativa
tgggaagccttgacttaatcatagtcagggatggcgggaactgttgagtaatctccattgtccaagaagtaaagcttgagagcaaatttattctcaaaattagagcctttgactccaccaacctcaagattatggttctcgaaaccatcaatacacttgtgataaagtgttctttaattcaactatgtgtttcactaccgcttctcctgaaagagtggattccaggtcatggcttcccaaaactgccgtctaagggatgttggaggctattgcgggggcaaatgcaatatttagagacttaacagcatcaatggcatcatacccgaatatattatctcctgttgcacaatataaaaacagttccccatattaaatatcatatagctacatacatcaatataatattatccttagtaaaatatgattattatttgcctcctatagctttaatttaaaggtatgtgtatactaattctttaggcagagggatatggctctttcttcagctacctgttcatggaagattaaaatcaaattaaaggaaacaattcaagagaataatgaaatgaatcattatttgcttttggtcaaaccttcacaatgtcactatgacaaaaagattcttcattagtattatatactaagagaccacaattcatatataagttatcatttttcgtataaatatgatattaattaagaggttaaacatataaattatgaaaggaacaaatgaactaagctactgtgcaagaagataaactccagtaaaataatattgttactatatatta

SEQ ID NO: 282 - DNA, 6312 bp, Cannabis sativa
tgattggtatactataagtaaattaacccatttgagacgaaagtcatcaagaatagtggaaagaatcatcaactcacatacagatcaagacaaggagatcaagtctcacacaaagaaaagtgaagaagaggaaaaatttgttgatgttcttttgagatttcatgagcgtgaagatcctaatgataagttcacattaacaatggacaatattaaagcaattattcctgtaagctctctttctctctctctctctctatgtatatatatccatatattactaaaaaaaagcaacatttagtgacaatcttttggtcacagcataaatttttagtgacatactaattaaatgtgacttttggtcacaacaaaaacttacttgtaatgaaaatatagtatttagatacaggttgttactaatttaattttagtcacaacaagtattgttattataaatacatttagtcaaaacaaattgtgatttttggtaaggaaatcaattgtattaacattcttaatttgtaaaaaaaaaaaacagaacatatttggagctgggagtgatacatcagcagtaactattgagtcggctatggcagaaatgatgagaaatccaagagtgatgaagaaagctcaagatgaggttagagaaatctttggcaaaaaagggttagatgaatcttcaataaatgagatgaaatacttaaaattagttattaaagaagttttaaggttgcatcctccagcttccatgttagttccaagagaaagtagagaaaagtgtgagattaacggttatgaaatacctacgaaaactcggataattgtaaatgcatgggcaattggaagagatcctaaatattggattgaacctgagagttttatgccagagaggtttgttgatagctctattgatttcaaaggaaataattttgagtatatcccattcggtgccggaaggagaatatgtcctggtatatcatttgctctcagcaatgttgagcttcctctagcatttttactataccattttgattggaaactccccgatggaatgaaacctgaacagttggatatgacagacagatttggcattgtaatctatagaaagaatgatttgtacttgattccttcaaaatatgatccaccttctatggacaaagcaaagaagatataaagtagtttgccttatgctgatttctcttcttttttactatgttgaactatatatatatcagaatacacaaataatcagattgaagtaaatcctaaaagcatgtatatctagtagctttgtaatataaagaaaatttgtatcactttgaaataattttatcaataaatatttactaaataaaagcactgcatatgttttttttacctttttttttttatgaatcagctcatctgggtttttcattaacataaaaatgtacaatatctatgtagcacttttttcacatataggctgcatttgtattctattacaaacactaaaaccaagttaaatctgtgctaataaatttcataggcataatatagttgtaattctaattctaacatcaacctgtatttgttttacaattagtggaattctttgaacactttgattccaataggcttcattattctgacacctccaaatatggtataccaatgctgctaccgcaactcgatatacctatttcttaaatttttacactttagctcttttaatcccctttaaaatcagtataagggaaaatgtcaaagtttgccaccctaaacacctttggatctcgtgcaggtcaaccctgaattgaaatgagctataggcaaaaaaaaaattatttggacacttattataaagataaataatatttttaaaaattattaaaaaaatatgtataatttttaaaaggaaattttttaatgtggctcccaaaaatgagtgggccctaagcgcgggcctagccagcctatgcccaaggccagccctgcctgtagcctgagtttagtcaaggtgcatttaaacaacaaatgttctcttgtttatctatagttcccacacaaaacacatagttcatcttaacatatattatacttgaacaatctgtttttcaattgtaacttatccaatgaagcaatccagagtataaatctatgtttagggattgaaagtctattccacacctctccatgccaatggacatttggggaagaacatggaattactttgtagcattcttggttcttatatatggctgaatcataaacctcgaaactatgctaaggattttaaatttctctttcactcttattatctgcctcgagtactagctattgttactaggggcttcataataccactcgtcattatctcctaagtatacttcatgtacccatttgacttataagttttcaattggctactacccaaacaaatttaccaatggttgcctcattctatatttgagtgtttctaaaatcagagcccctcacactttgttttgcacatgttttcccaggaaatatgcctagaacaatgagaaatgcaattcatttccaaagaaagctcttgcaaattgaggtcactctcttcagcactttcttatgaattatcattatatctgccaagtacgaatgtatagcaaggattgagaaccgagttaactaaagattcactttctatatatgataagtgtctcgtactccagacacaaatcctttgaaccatcttctctatcatcacctcacattcaactgcggggagtaacacaaattggtgtacgtataccaagataccgaaatggaaatcaccctaagccagttcatgtccaatccgagcattgaacattggaaggccttaaatggttattgagatattcgaagggcacttacgattatggtctgacatacgagaaaggaaaaggaaaattagagttaaaaaggtttatggatgctataactatgccacaaatagagataccaaaaaatcaaccacttcttacgttttcttgacaaactggaactgtataagctgactgaaaggcccagttacaatctgtggttgctcattccaccgtgaaagtagaattcatggtgacaacggaaggatttaaggaagcattatgacttcggagagttcttcacgaattgaaacaaattaaagggggagtgactgtgtattcagacagttagtcatccatccatctttgtaagaactcagtctatcattaaaagatatagatataagactaaataggattagagagaatacagatgaatggcttgttaatttagagaatgtcagaacataagataatcatgttgatgttgggactaaggtcttgacagtaatttgttcaagcattgcttgaacttgatcaatcttagaagttagtatactgagattcctggaacaccaaccatgatggctgcattctttcttcaccatcatcatactttttaatttgaaaaaactaggtgaaatttgtggtatatttcctcaaatgaaaaggtctccaaaagttattatctttctttgaaaattgttgactcgaggaaataagtcctagaaggctttcatatcctttcaagaaggatcttcgggaaagctagccttcctccagaaaggagttctggatggctatatgttcctcctagaagggagttataaaaagtcgactcaagatggctctttcctatctaggaagtcccttgagcaagtgacttggttcgtgatttatacgctcccagatacacacatacttatgctggtgtggagacctcgctcaaaggagagttggttaagttggttattatctaactaacttaacaacctcgcttcttacagccaccaactttaggaacttgatcctaagcctataaatactaccattgcttatcattttgagacacaacgaccagattaagttgatatatatatatagagagagagagagagggagaagattgagaggtagagagaaaggtacccataaaatagagaaattgggttagggttttgtttaaaaaatcttctgtagatgaagaagattcttgagtaaaagtgtgagagttgaaacacttttagagaattcattacagaatcgatctcgactgtattgtgcatgttcttactcaatcaataaagagaatttggtggtgtggtgaactggagtagagccacagatcatatcgatctatcggaactagtatatcttggtgttaatattgttttattgctttaattgttctttgccttatttttaaattagaaaagctttcactaacttttaattccataaagctacattcttggcacccaaacatcttattgtttttcttcttaccagttttcttcaatacattctttccttttactcttcttctacctaacatacccttaaggtctctattctctgtagcactgatcaacttagactctcgtagatattttagtccttttgtattttaaaaatcccactctgtacatttcttccaaagaatcttctaattgctcatttcttctacattattattaattttgttagacaaaaataacactaaaataattgaatgctgtaacctatagactaaaacaagtatatattttcactcataaaaaacaaaaaaaaaaaaaaaggttataaaaatgacctaaagatctagtgtatagggatagggtggttgaagggtgcgagaataacgttttgaattgataaatctaatgtgcataaaaaagcactagtggtgtcatatcactattgatataattaagaatatagtgtgagacaatttaaattaataacaaatatgaaatatcactaatcatttgcaagataccatctgaaagttgtgcaaaatatatagcaatgctcatctattagttatagatagtttatagatttttaaatatgactactttatagctcaatatatatagttcccagttgccctaaccaaaacgttattaacaaccattttttaaagaacactcttcatttacttatttgaaagggaaataaacttttttttttttttaatgaatcagaatatattcattactccaaaaactactttgtacaacctataaccacctacatttagaaggccttaaatttatctatacaatggtatatttacaaaagttaaaaccattcatctttttttatttaactttttttggtaatacaagaattagactatttttaactaacctaacctcaagcttacattctagacttaaataactatagtacaaaagtgaccaaactctcagggtaattagtaccactaataacatattatatacatatatcgaacgaagtattattggtgatttcacaaacaaataattaagctcttcaagccctattatcactttctacaataaatggagttccaacaaataataccctctttccaagtccttctcttttcattttttatgattattgtggtgagcatactcttgaagagagctcaaacaagcaataggtcagcttcaaaactacccccaggtccatggagactacccttcctgggaaacttgcaccaacttttgggccctttgcctcatcacacattcagagacttagccaaaaaacatggaccatttatgtacctcaaaattggacaagttccaaccatagtagtttcatcaccagagtatgctaaagaggtcatgaaaatccatgataatgctcttgcatcaagacccaataatcttgttacgcaaatcttggcatataatggtacggacattatatttgctccatatggtcagtattggaaagaggtaaaaaagatttgtgtgcaagagcttctaaccctatctagggttaaaacttttcaacccattagagaagaagagtcgtttaatattgtaaaaaatatagcttcaaaagttggctcacctatcaatcttactcaaatgttgaaaagtttgtcttatagcatcatagctagggctgcctttggcgagaaaagaagtgatcatgatgacttcgtatatattatgaaggaaactgtgaaattgtctgcagggtttgcatttggagatgtgtttccatctttgagttttcttgattggtatactataagtaaattcaaagatttgaaactaaggtcttcaagaatagtggacagaattatcaagttacatatagatgatcaagacaaggagatcaaatcacccacaaagaaaagtggagaagaggaagacttggttgatgttcttttgaggtttcataaaagtgaagatcctaataagttcacattaacaaaggacaatcttaaagcaattattgctgtaagctctctctctctctctct

SEQ ID NO: 283 - DNA, 1638 bp, Cannabis sativa
acccaacccatgctcagccctagctaaaggactagcgacacagggaagcaccccagtccaacaagcaaatgctttcgactctaaagcataattagcgatacaatgagcaagaaggttcgcatctctacgctcgaaactaagactacaaccaatcaaaacagatcgcaacttatcaatatccaacaggatactatcaacatctctacaacccgtagaattagaattaataagttgaatagcagccaaacaatcagacacaatagagacattctgcaacttgagctccgccaccatttgcagccccgacatgatcacagcaaactctgctgccaaaagagataaaagttgttgtcagtactccatctttgcccaaagaaccctaccaagatggtccctaacaactgcaccatcactgcttgacttcaagcttgtacacacaccgacatcaacatttaattttagcttgttgaattcaggtggacgccacctttggggcgcctttagatcctttaacttgtggcccttggatgacaaagcaagaaaatcaccaagaaaactgaaacaccactcggtagccatatctgccttcgggaaggattccccatgaatccatttatttctgcaattccataaatgctaagaaattacaacaaacaagccaaattcctttagagacacaaacgatctcatgtattgaaggaactccaatgggtcgtttgagcttgcactccttcaatttgttccaaaatctactcattttctaggtttctaatgtcaccgaacacttccaaattacatgaacattgtcttcaatagcactcacaccacacctggtacaatttggataaatttgaatcttcctgcaacaaagaatatggttagttggtagccacgaatggctaagcttccataaaatgtgtttaatttttggagggactctcaatctccatagatggttccaaaaggatttagttatcaacatattcgaagcctccacactttcttttaaatccagtgccactttgtacccacttttaaccgtgtatttgccattgttagaatagtgtcacaacaccttatcctccgaagcatcaaaggatgaggggatggacaagattaagtttgcatcttcttcatgaaagatattcctgatgaactcagaatctcaatcacaattccatagcttcagagcaataacataaatgtctctcgggatggaaggcttattgaagatcttgaagttttttggtctattaatccaggggtcttcaataactctaacaaaattatcagaattatcctcttaaacaagaaaataataataataataataaaaagaataacaataaattagatgcaactaaaaaaataaaatattaatgaaaaaatatacaaactaaaaacaaacttaaacaaaagaataaaaccaaaaatcaaaacaaaaataaacccttaatatgagggtagaacaatatttttttaggaaggaacatttcgatcatctctttttcactttttaacataaatattaagttcatgtttcttctccatcttcaatctagattaaaacataaaacaaaaaaaaaaaatagagagaaaaataaatgaaatcagaattacacaaaaaaaaaaaaaaaa

SEQ ID NO: 284 - DNA, 1413 bp, Cannabis sativa
ctcttccctttttccatagcctaactagtctaagaacacagcattaaaaatggctttgtcaatgcttctgctgatgcccatcaaaccctctccaattccttccttcaaattccaacattcctctctcttctccttcaaaaagaccctaaccctaaccccaaatccaaatcccaatctcaggccaactactgccaccccactcaagatgtcgaccacggtacaggcgctcaaccttcacaccctcctatccgatgcagtcaaccttattcaatcctcccctcccacgtggcactccgccattctcagcaacttcgtcatcttcgttttgggttccccgattttggtcactggcctctcactttccggcattgctgctgctttcttgctcggcactctcacttggcgcgcttttggctcctctggtttccttcttgtcgctacatactttgtccttgtaagcgagacctcacctgtttcctgaaaattatgtttttatacgaatatattatatttaaagacaattggttggtgggttttgatagtatatataatttgattatggatttgtcattttcatttgttttttaaattttttttcggatgaagaccaccagcatagtgaatgatcgaattaggaagattgcctgggtggtttgtcatgaaaccattttatagcatgatccatgtggagatctaacacaaagactccaaaaacttaacccttccatatcaaatatagtgattaaattataatcttgattcatttgattgctccgaatataattgctccttcgtaaaattgatgcatctcataatttttaaagaattatggttaatttgaagatctaaggtaggctgtggatattcattggtttagtggtgatcaaagactcgtttgattttaagaactttggcttgccatagctgcacccatatacgtagaagtttgtaatttttgttcttgatcacagccaaactaatttgttcattgctattaaatttggttcactcctagaagttttcagagttatattaggattcattgctgagtggctccaatactcaagcaaatagttggttcattttgtgattgtgtgacctattccaacaggggacagcagcaacaaaggtgaaaatggcacaaaaggaggcccaaggagtagctgagaagaggaaaggaagacgaggacctggcagtgttgtcggttccagcactgctggctgtatatgtgcttttctctcaatatttggggtagggggagtaggctattctcgactttggcaattagggtttgttgccagtttctgcactaagttaagcgacacagtttcaagtgagataggaaaggcatatggaaaaacaacgtaagttacctattgtattagtatttagctaagctctcttatttgcaa

SEQ ID NO: 285 - DNA, 1079 bp, Cannabis sativa
aaaaatacatgccaaagtattttcttgccatcttacggttggtataaatgagtgatatttgttggtgtagaaagaatatgttaactacaataagcatcaccatacaaattattgtagtcaaaagttgagcaagtgattgaaataaaaaattgaccaattatactcgaaagccaaaagcatatttaaccctctttgaatttttagcaagtaaataaagctatttaagcacctgaaacataaatgtcaactaccacatccaaaaatcaaaatttacagattaacaagtctaaaatgggggtggtggctgacctatacagactacagagtgtcaaacagttcagcagaaaaactatttttactcaaacctttccattaaaaatgatgcttaaacctttttttcacattttttttttggtccctaacaagggtaatccaacctgacttgagttcctaacaagagatgggtaaaggttaaactaaagaggtcaaagtgtactggctgttgtttcattatttactcctaatgacgatagtcttcgtttagcaaccttggatctgtaacaccagacctcaaatgcctcagtcaggtctggatattgaacttgctgatttcctaaccattcagccaatatcccagcctgctcgtaggatggcaatgcgagaattatcgaaatgaaggtggattctaaggattgccaaagctcactatctacctttggtgtaggcgtagtttcatcaccatcattactgtgagctgtgaaggaatcaatcagaggtttagtgatcctcacaaaaggaagccataccttcaccccatgaagccgccttgcagttggcaatatgacagtgccgtaacctatagcctccaacacttttgcagccacctcaataacttttgactttgtctcaataatgtcatcggttgaatttccttgctccacaatcttaactatcttgtcagatgcatccatccagttatggacaaagtccctcataatttccaacttattcaatatttgacatgcccacgataaatccgataagagggactgaaaattttgcattttcccttcttctgc

SEQ ID NO: 286 - DNA, 5824 bp, Cannabis sativa
ataagaaatgtgtctcacagcaaaggagtagagcagaatggcaagccccaaactccactacttgaaaaaaatatatataaatgttaatgcaggtgttaaagtggggcatggtacctccgggttgggaatagtggtccgaaatggtaatggtgaggttgcatatgttgttgcaaagaagattaagcaagagtctttcccattgattgctgagttgcacgctatccgcgaaggcctccaaattgggattacaagaaggctacagagattccaagtggagtcggactgccagcaagctatcaatctcatttgtaaccagggagatgcttgtcatgactgtgatggccttctatagacccaaatccagaccgggacaagggactcgggcctgaattcagacttaacgcgaacccgggacctggacacgggatcccgaaccctagacccgaactcgaacaagacccaaaggcaggacccgaacaagaccccagaccccagacctcagacatgggaccccaaatcctagacccggactcggatgcggacctggacctggacctgacgcagacccgggacccaaaccctagacctgaaattggtgttgaagtcgagtttattgaaaatatattataactttacacaacttattaatacaagtcaatatcaaatatagtattatgctaaataatataataatactaatataatataatataatacaatataatatcatataatactataatacggtatactaaacaaattctttcagtcatattttgtacaagtgactatactatacaatgaatttaataagtcatgaaaatatagctcgatcaagtgatttctcttcatatgcggctcatcttaggttgtccgatctttcagaataacttatgagacaccgaccaaatgtctcatccctatgctcgtaatgagtttttcattttgggttcgtttaataggtcatataattgtcattttgtatcaaataacaaataacattttatatttgaataaaacattatattatattaattattacgaccatacatttatttatatgtgactcgtactatttagtacataataaataatttgtattagcttgtattataatatttagatagagtatggggtcaacctcgacccctaaccctagcccgattctcaaacccggacccataccttgaacgtggatctgaacctgggcccggacctagagctcggatcctggaccccgtactccagacccgaccctatcccagacttaggacccatatcccaaactcggacctgaacccggatcccgaacttggacctcaacccagatctgcacatcgacccaaacctgaacctcgaacctggtcccagccccagaccctgaacctagaatcaaacctggatcccagaccagaacctcggacttgggcctagacccaggacatagacccggatctggaactcgaaccctaaacacaaatacggacttgaaccctagctagaccaaaacctagacctgtactgaatccggactcggactcgaatccagaccccaaacctagacccaaacctagacccgaacccgaacctgattacccctggatccaggacatccaaatccaaactccggaccccgttttcattcttgttactaatttttaaataataaattcaaaagatcccttacgggtttgacctgtatttaccgttatacagaagtaattagtaatacataattaaaaaaattattaaatttattgtggtaaacgacatacatcaatatcagctttttacttttgttgctcttctctgaagagcacaacattgattagctatattgcttatgattgctaaatacatgaagagctattcattaggtatgggtgtcgacaagactggtagagagattaaaatatttttgagatgctcaaacgcctccatttgctatgctccccataattcgtttgagctctttttgatgcaatcaaagaaagatttgcacttgtcctatattccttaaataatttttccgagagcagctatcttccctatcagccgttgcccttctcgtacatttgtttttttttttctaaaaaaaataactaaataacattgcattccttttgacaactaaaatatatgttgaattttttttatatgtagttaaaatatcatctaattttaaaaaattcgaataatatacagtaccaatagagtttttgatattctaatttactatacgtgtttaaaaaatttcaaacatattttcgacactataaactatttaaaaattttaaaatatttgcaagaataacattgtaacatataacgaactctgccatgatttatttatttatttatatatttgaaaaaaggaattttagtatatattcccgaacacaaaaattaattaaaagattgtaataaaaaattaacaattattaccatctcataaaggaaaatagtaaggtacactttatagtatcaaataccataaaaaatgacatactgttatcaatacattttaatatttgattctatattatttaattaaataaataatataagaaaccgtcaactaattataataaaacatatcggtattgtgtgagacaacttaagtcaatcaattatctttctttatatctaggtgccactatgttggcgttatcctaaatctatggagacaagatagtgtgagtgtgactatgacataaaacattgcattcttaattaattaacccttctctacacttcttcttaattttcttttcctaataaaattattctattaaatatctttctcacctatattatcagtagtgatgattgaaaataagtcaactcggttagtgacaaaatatgagaaagataataaaggaggatatataaatatgaaattatatataactagatttttgaccagtttatttatttaattaataaattatagaatattactaataatatctaattaggatatctctcggttaaacacacaaccaaaattaaaattataaaaacaaattatataatcaattgtctaataactcctatacactaaatattgttcagtaaattaacaagctcaactccttaattagattaatactatatttatataaaatatgctaaagggcatcatggttcttaacaccctagtaaaatatgatatttattataataataattgaatagtgtttactatttaaataaatactagagggttaagaattaataaatataatatcactcaatttaatattagatttcatttatcttaatttaatatagattataactcttagccaattatacgacatcatgtcatagtagtgatatgtactttagtgtcctataataatgcttaatttagagaaatgctaaaaggtaccagtaatgtattactctagtatcttatacatcaatattattattagtgcaattaagtattgtatataatttaatataatgactttcaaagtatatctctaaccaattgtaaggtgacacatttataaaatactaaatatcattaatatatccagttcctcaatagtttgccccattagttaattaccactaagtataaatatatatatatataataaatatcatcctttccacaaatttttttttttattgtgttgttaatttactaaatagctagtaactttaattattaggattttttattttttatttttttcacttcaaaataattatttttttatatttttatggaaattcatatagaaactcacatattaatcaacaaagcaaattaaattgtaatcaaaattcatataacaactcatatagaaactattggagcaactaaaaccgtaaatttaaacaaaaaataaaataaaaaataatatacgaaataattcgctttcatttaaaaaataataattttcttaattattattattttgtagtgcactgataaaaatttattattacatatactctttaagttaataaaagaggacttgtgttagaagggcaattatatataaatgtatacattatattaatttagtggaaataatcaacatcaaaaatatgaatatgagaatagacttttcagctttattcattaaataattggattttaggagaaggtggttgcttgtttatgtaatccaaatcacatcacacataatattatatattcaattccatccacatctcttttcttacatatatattgtgaacggttgggatggttgagggttaggatatacatatatatgtagttattatttatatatctttatatattaaaagtgcctatctaacgacaattcttggtttaacgattctttttgggttatctgtttattttaacagaatataccattctttaacagaatatccataattaattttttattccgttaaagttaactcacgttaatgtatagacaaaataacaaattgattctgttaaagttaactcacgttaatctatcaacaaaataaccaattaaataaaaatatttaataaaattaaaataaacgatgaccccttccttcaaaaaataaataaataaataaacgatgacccctaaaatctttcctaaaaaaactctaaccacaatccaccccaaactctctttatcgaaaccaactccaccaatattcatatattcaaattttattccgatgttttcaacatcttaactttattcttccaattttctttcttttgtatacgtttagggttttgaacactatatattttgacacgatcatagaaattcaggtttggattttctccggctaggcttgaagactctatcacaagaaaccgaaaaggttgaaccttgattttctttttcttttctccgatatcgattgaaaatttaggtttttctttttcggataagttttgggtattgatcaaaagtcttgccctagaaaaataaatatatgaatatatgaacatcggaaataggtaggcgaagaaaaagaagatgatttattcgggagaaagaagtggaagacaaaaaggattattaatataatagaagacttacgagtttaggtggagctaggttgagactgaaaaatgggaggagttgataaaatgtgtttctataggttatagcgtgggtgtggcctccatctgcactggatggtacaagagcagaggggttagtggactagcggtaggaagcctcgtaccagtaagtatttattgtttttgatattcttatacctttatttataaaaatatttttagtggacaatatttataatttttatgtaattttaattattaaaataagagctatttatacacatctactcatatataatctttaatacatataaagtagagagataaatacttaaaatatagaataaaatttgttgacggagaaaattatcacccatcacctatcaaattttttcctcataattatagttccaatctgtgaacatcatagttccttacagtttgggagatatgcgtgtgcgagattgtatatatgatgatatctatttttatttgtcctttaggttccttgcgttatggcaatagtgctatgctcaaggctgtttttttttcaaatgataagagtcaattagatttattattttttaaaaactaatttatattcaaactgtttttttaagttgtttttgttaaaaaaataatttatttattaaataatttcgtatccattattttgttgaatttaatctgatatatcaaaagatctaatcttttatgcaggtttgtatgtacttgcaaactctttctcatatttctgaaattatctacagataattaatttttcgtttgatatgc

SEQ ID NO: 287 - DNA, 2512 bp, Cannabis sativa
tctctctctctctctctaaaataattttcttaatggtttaatcattaaaaatccttgacataagaaaacataggccatttcttctttctcttactctcaaaatgtagtggcagctcctaaaagttaatgtaacacatgtaaaagagtaaaccaaatctgggtagtcttaacatttcaaagtgttgtccttggttttacttaaaattcactaatctcaggttttcaaattagaaaatactcaaaatcatagagacccaaatcactaatctctttctctaaaaattcaattctatttttttagatcatttattctcataaaggacaaagtagttttgaatttgaattttttttgttttttggatgtcttctctgttttgttgttatgcacctcaaattaatgcttgcagagaccatagaattttgtcaatattcatttgaaaaagactcttgtttgtgaaaatcttaaaattctcttgtcttcttgtattttattctcctacaatttgtatttgtaaaagtcttaggtgtagattctgcataattagtattatttggctcttagtgttgtgatttccatttctttaattatgttttactgactttgatgatgaaatttgtttaatgtaggtgaatgaaagagtaaagttccatagccaaaaaaataagcatggccaggctaacaccaccaaaaagccctttagtgagtgataagaacaaccactcaggttgtatgtggagcttgtacagtctcttcgaatttcgacaaggaaattctagaaggaagatgatttcagataagaagctgttcaaaagagaaggtttttgtaagattctatcaatgataagtacttttttctttttttacattatgtaagatagttaatttgaacattatgttttacaggtgatggaaatgctaagcagcatgatttgcataccagatttgatgaaaaatgcccaggaagagctgtagaagtatgtttaaccaacctaattctatgatcatattttgttttttgttttctttttgtgacataatgtgatattgtcaaattttatagaagtcatttcttagtaatgattttcaattgtttcaggatagaaatgagaactttgttagtcctaaggaaaacaagcttagaagggaagagactgagaagcagatacataacaagtatatgcactctacttcagaacttgatcatttagctaggaatcatgcaaaggcgaacagaacagatcaaggacattgtcatgttcctactcacggtcgggctgattcagcaaaacagaagcaacctcctcataaaaatccagttactaaaactgtagataaggtagaatcaggaaaaggaattggtgaaaaggcacatctcaagaaaaggagaggctgtggttgcaagaatgttgattttgtcaaatatgatgagcttaacaaggtcaatccaaagttgctaaaggcaaatgatgtggctgaggcaattgtgaatcagaaatttattgaagggaagtacctcaacagagatggaataaaccagcagtctaatcagttattggatgctttagagattttgaattcgaacaaggatttgttcacgaaactcttgcaagatcccaattctttgttagtgaaacatattcaagagttgagggattgtcaagaacaaaaacagcagacaaaatcatccagtaaaaatttgacacaatgtgatgatccacagagttctgacacaatagtagttctaaggcctggttcaacaagcttgctagattcttcttcagacaaaatcaagcattgcccctcaccaaagtattgtcatggtgtggaaaaacatgttcaaagtgttaggcctggctatttttcccttgttcaaataaaaagaaagttcaaacatgctatgggagtagccacaaaagaggaggacttgatgtcaattgatggtgttcgagtgcaaaataattcttcatctcccactgaagatgggaagaaagggaaaggaatggagaacataagaagaaacttccgaatagaaaataaagaagtcaaagattatacctttgatatcgcgaaaagagacaagatagcgaaattaaaagatttcaaagacagaattggacaagaaactgcttccaccagagaaagtggtcatgaaaactcaaatttgttgagttttcgccatcctaaaaggagtgaatctagaatatacattgagggccggaggcattactatgaatctgaattgttggataacaataatgaggatggaagtttttttccaaaagaggtaccaatgtttttgcagaggacaatctcttctcctgactatgactcattgcctgtacaaagttctaggagtgacttcaaagctggctgtgttaatgctcaaatgagattctccccctacagctatagccaagtggtctatgaagatagttggaggcatgagaaagaacatgaaagtagctactcaagtttgctgaaccgaaacatagattcgacaactgataaaat

SEQ ID NO: 288 - DNA, 6335 bp, Cannabis sativa
  modified_base (6128)..(6130): a, c, t, g, unknown or other
ttttttaattttttttatataaatcattaaaaaaaaaaatagaaaagaagaagaagaagactagtttggaaaaagaaaagaaataaatatggagacattgccgccattaaagaccttcttagataattcagttaagttttcgtagtcatcaagttattcatcgtatgaacccgcttcgccttcgctgctccagaataatggccgacgagatcactaaatccgccaccgcctctactacttctacaccgtctatgtcaaagtccagatccttttggccctctgtacttcgatggattcccacctccaccgatcacatcatcgcttccgaaaagcgtcttctttctatagtcaagtaattcattaatttctttccaaaaaccctaacagttttaattgaattaactggttttccattaaattctctgtttacttgcgatggggcctttttaattgtttggatatggcggaattgattcaattggcaggactccttatgttcaagaacaggtgaatattggttcaggtccgccgggttcgaaagttaggtggtttcgttcttcgagcaatgagccaaggtttattaacactgtttcgtttgatagtaaaagtgattctccaactcttgtaatggtgcatggatatggtgcttctcaaggctttttcttcaggaattttgatgctcttgctagtcgtttcaaagtcattgctattgatcagcttgggtaagtttttctttctttcttttttttttttgtgtgttctgaactttgacatgcttgaatttcatttgatttgtttcagttgttcttactccaaaatatattttcttaaattttgctggcagtataattctatgtccaaaataaaagcttgttttttttttttggataatttagcaaccttagatgaacttttgtggggtattcagcgtgttttttgtttggtcttttgtcatactatggatgttttttttccttttttttctttctaatatatgaactttgcacttagaactattaaaaaagtgtgatccctatttgagtttttatgtaagcatttggtgatatgttctagtctgcttatctccaatttgtgaacttagcccatacaaagctatatgatagtagtaccaagtacttcttcgtgagctctaatatgatctgatttataagtaagcacctcttgtacaataatgggagcaggtttgaaaaaggatcttgagaacaatttggtagaattgattttgcgaaatgccttgtaatttctatgtttttctttgtattttatactgcttttgagactttggttgttggatttgatgtcttgcagttggggtggatcaagcaggcctgactttacatgcaaaagtaccgaaggtagtttcatctacaatatatgtaggctttattactgtatgctagatgttgtaacataatcagaaaacaatatattatattcatgctgtaaacttgcaattaaatgtcagaaaccgaggcatggttcattgattcccttgaagaatggagaaaagccaagaacctaagcaactttattttacttggacattcatttggaggatatgttgctgctaagtatgctctcaaggtaaattctttcttctgtcaactttgaagtctgtgtatgctgatgtcatttatcacatcactgatctcttgttcatcttcgtaaagcatccagagcacgttaagcacttgattttggtaggatctgctggcttttcctctgaggcagatggcatgtctgagcggcttactcgtttcagagcaacatggaaaggagctctcttaaaccatttgtgggaatctaattttacccctcaaaagattatcaggtgtatttcttttcctttgtagttttaactgcattatttgcatgaacctaatgataggtcaattgatcaaatcttcaatttctgatggatcagtttcctccctcctaaagattgtagggttcagtgtgaggatagttttattttcagttttgaatacattatttgcattttcagggattaaaattgaataaactctttgtttccattatttcaatctatctttgatgtcttccttttattttgttgttggacgttacatacatggatgtgacaccaaatgcgactgtgctgcgggaatagaattgtaccagcgtgttaatcttgtgttgttggtattttgtagaggcttaggtccgtggggtccaaatcttgtgcagaaatacacaactgctagattcagttcgtactctacagggaatgtgctgactgaagaggagtctaaactgctaactggtaaataatattcactttatggtttaatacttatcatgtaattaactgtctctaacaatttattttccaattgaagattatgtataccatactttagcagccaaagctagtggggagctgtgcttgaaatatattttttcttttggagcatttgcaaggatgcccctacttcacaggtttgatgatcctgtttctctcaaaaatttctttgttgctttttttttgttaattaatatctttgttgcttgttttcgtcaatttcaacctgagaaagtaataacagagataagtgaagtaaaattggtatccttttgtgcttgtaattatgtcgtttgaaatgtcctttgggctctagaatgtttttttttcttgcagaaatgcttataattcaaccaaatgttgaatcaaataagtttatactgtgtttctattctaaaacttgtgtggggcaatagagttttaaaaaattataatctttctctacaaacagtgcctcagagtggaaggtgccaactacattcatatacggatatgaagactggatgaactatcaaggggcccaagaagctcgcaagaatatgaaggtcccctgtgagatcatcagggttcctcaggtcctctcttcctctttcattctttctatatgtatctatatattattgttataggacatgcccaacaccaccttatgtacggtgtaatttggtattggccccacacaccaatgacggtttagcaatattgtgtaaggtggtgttggacattattgatgcccctttagcaatattgtgtgcaacctacggtcgttgaattgaatggttttgtgaaatcaattgcaggcggggcactttgtgttcatagacaaccctaacgacttccattcagctgttttttacgcttgccgaagatttctctctcccaactccgataaagaatctcttccggagggtttgatacctgcctgaccagagtctggtataattcttttactaccattttttctccatctcatttctatgtatgacaattacttaagttaatcacacaaatagtgactcgtgaatataaaatatcattcatatcgacttgtatatttttttcaactttatcttgatgatgttgtaaacccgaataaattgatactctgtttataagcacattgttaatagcacaagttttaagattatttagtttattattgtttccattaaagtagctgaacccttattattactactacttttaatgttcaatagatttaagttcgtaggagttaattgaatgtttcgtcttcaacaatggcgtcaaaacacaagcacattgtcttagatgatgactgtgtgtggtgccttgagcatgtattaaatagcttggttttgcttgagcatgtggtggcttgagcatgtgttaaatagctttctagtttggtcatggacattttctttgttttctaaaatgtaataagatttttttagcatatgttttgttgtctaaaatttgtagggcttcactttccttgctagccatggatttaggatgcttttgactaaatgataaacttatttagatggaagattttttttaatgcatatttagctaaaaggtatttgcggcataaatacttcatgtttctttgtttcatatatttatatactacttgttttgttttttatcgattcattacccaatgttacatttctggtacatttgtcaatgtctgcatcgttaacttaaatgttgaattggcaaatagatgatatttgtcagtataatattggtttacattattattttttattttttaaatcattatgttgaagcggttttttgtcactgaaactaagaagattgtaattgagcaagatgaacacaagcaatagttaatcaaagcaaacaggtttgtgaaagaaaatttgacaaagatgaacacgaggattttatagtggcttaccccctttcggtggtaatagactagttcacttggagtgttattgatcttgatgcttgaggagagtcttcaagagttatgttcttcaagaattcaatcttcaagtgagttttgaaaatgaaagagtgggggatcaagagaatgattttgtgagaatcaaaattggagtcccctctacaagtgacttcactccccttataagtttttatataggatttaaaattttttatctacagaagcaccttaccgtaactatggttgggttaggtttaaaatacaaaaatcacatttcaaaataaatatctaaaaattaataaaagattaaaatatcttataacttcacgtgttgatatatttccatcacgaggaacacatgctaaggccatgttgttagtaggttgcaagaagaatcgagatactcctcattttgggttgagataacaagcacgctgatgctcatcttgggctgaggtgatgagagtgtgaggccctatttaggtcgagatgatgatgaggctaagatgaccatgttggtccgaggctttgggttctgagttcggggttgggattcgggttcgggtctcggtctagtcccggtctaaggtcgagggtcaggttcgggttcgggtccgagttcgggacaaggtccaggctcgggtccaggtacgagtcggggcctaggtttgattggagtctaaaatattgattattgaaagtgacttttctttattttcgaaatttttaaaattttaattctcaattaaaaaatgaaaaagtaaaaaacagtattaaagaacatattttttaaaatattttcacttttttaattaaaaaacagaaaactgattaaaaaaatattaccaaacgatgaatgaaaaattcttatggagattatttaccccaatagagattctccaacccgtcctgacccgaaagaaaatatgtgagaatgagagtggagacaagaattaaaaggtacgataatataaatgatttatttagttacgtttttattttaaaaataatttttacttaattttaaaaacaattaatcaataaaaataccttcaaataaaatttttaactgtcaaatcgttagttttttgggcagaagtgacaaaagtctacaattctaaggggtagaagtttacaagtactataattcgggagtaaaagtttttttttttttttttagttataattttgtatttcttttttcctcattaaaaatttatttagtatcctgtctcaaataatattttttgcactttagccctctcacatactttatatccaaagttgtaaacgggtgattgttgtgctaacccaatacatatattttttgggattttaaaaatacgagtcgtgccgtgtcaaactataaataaaaaatatgggtcatgtcatgccataaaataataatggtcgtgtcgtgtcatgcaacaattttatagagtaggctcgacacaacccgcaataggagtgtttgcagtgcgagtagtgcggtttttgaccattttttcaaactaacccgtacatgccggtttttcaatttttcaaacggcactggcaccgcgaaacgaaaaaactatagaaatgcacttcaaaaaatagtgtggtgctgtgcgatttatgcaatttctgcggtttgaactatcactaaataattaaactatcacaaatacaataaagtttgagtaacacttgtcaaaaataccataaaacttaaaaataaatatgaaaaaaaaaagtttcaagtttcaacaatacaataattagtgggcttaggctggactttcacatattggacctaaataaatataaacattgatatttttataatatgctgtgcggtgcagtttgaaccgcatattnnnaattcaaaactgcaaaccgcattgtaccgcccagtttaggaaaaattcaaaccgcgaccgcactgcaaagaatttcaaaccatattttttttgcggtgcaagcgtttgagcagtttgagcgatttgatgaacacccctagcccgcaagcccgatagttcgtgtcatgctttattcagagcgacttgtttttcttaaatagaccaa

SEQ ID NO: 289 - DNA, 1308 bp, Cannabis sativa
gtcccagttgcctgcctcttttattttttattagtagtgcacgtccttatttcaaagctatgcagtaaattagcttttatcaatcactatttctttattcttttcaggttaagtcgagaatgatgggtgatccttcttacaaaagcacacttgactgtttcatcaaaactttaaagactgatgtatgtcatcttctgtaccttccatttttatatccaagttttctaacttcttaccatcattgagctttatacgttcaacatctggaattaacaaaggatcaacaatcaaactcatcttttttgttagatgataatcatattcaacttacattatttgttgtctgcagggtcctcttgctttttacaagggtttcttgccaaattttggacggctaggaacctggaatgtgattatgttcctcacgctagaacaggtaagcgttagattagatgtggatctgccaatcaatttgaatttcaatttattagaccaaacaaagacactttatagattgagatttacttcagcatcatcatatgaccatgttgaagaaaatgaaataaccttctgatttttcgtttcctaattctaatgtttttgttttgatgacaggccaagaagcttttcaaaaaagattagagtcatcttgattgatttctttggagataatctgagcctacaatttgatttctttagaacaagccctactgctaatggaacttttcgaatagaataataaagctttaagccattgtatttctctcaattttgttaagagggaaagaagacttcttcaatggagtggaaaaagataacatttttaattttattaaaaattgagtttacttgctaaaatttaaataatatatattaataatttcagtccaaaataaatatgtaacaaagaaaaattttattaaaaaaaatatgtatttaattttacattcatcacgtgtagtgacacttttactaaattgttatatgaatctacaaggaaatgcataatcattttatcttgtttgttaatttatttatgacataatcttgtttattaattttgaaactagtttgaatttgaaatgttaaacttgacaacattggtcttataaaaatcatataagaatttagcaccaaagaaaaataatgtaagagagttttatcttgtttacagaactagattgaaatgttaaaattgacggaataaaaattttgttattaaatttagcaaaaataaataaattatataagagctatataaagtaatattttgggtttcaaaagatatatataaagtaatattttggc

SEQ ID NO: 290 - DNA, 1534 bp, Cannabis sativa
cactagctctattatttctgccactttttgtcataggaatttatctagaactataaaattagattttgggctttattagctttttccttttttttatccttaaatgagtgatgaaaaagtagttattggtatttggtttttaggtgtttgacatgctcagagaacagcctttctatcaccctaaagaagggacttacatgaaacttttggttctccttggaagatctgggcaaccccatcatgctcgtaagctttttgaaactatggtggaagaagaattagaccccactgctgaactgtatacagccttacttcaagcttattgtcgaaacaatcttattgatgaggcgttctctattttaaacaagatgaaaacccttcccaactgccagcctgatgtttttacttatagtaccttgataaaggccagcattgattcttcacagtatgagttagttgagtccttgtatgaagaaatgaacgaacgacaaattagtcctaacacagtcacccagaacatagtgttgagtggatatggcagggctgggaaatttgagcagatggagaaagtgttgtcaggtatgctggagagcacaagttgtaagcctgatgtttggacaatgaacattatcatcagtgtgtttggaaacatgggccagattgaaatgatggaaagatggtatgaaaagttccgtaactttgggattgaaccagaaacacgcacttttaatatattgattggtgcttatgggaagaaacgaatgtatgataaaatgtcatctgtgatggagtatatgcggaagcttcaatttccttggacgacctcaacttacaacaacgtaattgaggcgtttgctgatgttggagatgcaaaacacatggaatgcacattcgatcagatgcgtgcagaaggtatgaaaccagacacaaaaacattctgctgccttattaatggttatgctaatgcaggcctcttccataaggtaatcagcagtgttaagttggctggaaagtttgggatacctgagaatacttcgttttataatgcggtgatatcagcgtgtgcaaaggccgatgatttgatagagatggaaagggtatttcagcggatgaaagacaaggaatgcgtaccaaatttaacaacttactctataatggttgatgcttatagaaaggaaggtatgaatgacaagatttactatttggagctggaaaaacaggaacttgagaataaagctaacattcctgagactaataaggactttgaatcaagttccatggacgaatgattgagactcttagatggacttctttagtcaatgaagcatcggtctcttttgtccaaattgttgactgcttagggggtacaaagcttttctatcacaggatggatgaggaaacaagtgtaacctcctcagtgaaactactgtagagtcccaaatagagacatctgatactttaggtgacataatttcaatgactgatgtacatacgagatttatacatggggttgatcagtgaacaattgcacact

SEQ ID NO: 291 - DNA, 2579 bp, Cannabis sativa
ttaagtagagatctaggtttcatcttaatgtttctgtgtgtttatatacttttaagatgtgaaaattgttgattgcatttcatcacaatgacatgcttcctggaacattaagtgcttgacaatttcgtggatgtgttgcagattgacatggtcattttggttgtcaactttatgattttctatctttgcatctcttgttattgtagtttacattttattgcttggtctcttaactgacttctttctcacaaaattaggcatcatatccaagggtatccatccattcgcatattccgaaaaggaagtgatttgaggtgaggtaatgttgcattttttagttttatgatgtccctctaggcattcctgctatgttgtgtcacattaaagttttcatttttcttttttaaaaaagtgttgctcatggtctgcatacacatgccctatattaaaactcatagtattaagaaatgtaatcacctgtccacacattcttgtatcaataatcaatctaatgtcttgaaggattgttacattgtcatctaattgtttcttgcatggtgatcgaaatgtgtaaagagtgactaggtttaatattgggttctagagtgagtgtgattctgattgctgatgtgatatggtggttattttctgccacaggcttgatcatggacatcatgaccatgaatcttattatggagatcgagatgcagacagcttggttaaggtatgtacatatgcataaatgttttgagttatccttcatctctcataaaactttgactgattgctttgaaaggttgatagaattttccttgagtagaaatattttatcagaaatcaatacacagatagtgaaatccctcaaagaattctttgttgcaaaacattgacaaagtatacaaatcgaacttgcaagaggcttgtctttcctattccaatctttcgagaggtttggtctctccacaagagtctactcttctttaatttcaagctacccttacaaaagtataactaattccaactaggatccactaagaacaacacaactcagccccaaacttcacagaaactgccagcaaaataaaaaaaatgaaataacaaaaaggctacaaaaacaccaagtagtctatttgcttggacaatctcctattaaatataaagcctacagggagattatcaatggtcaatccagtcagtgatgtgaatgtgattaaatagcaacacctacaatttagaatgaatgatgtcttcattttgtcgactaatgacagatgatggaaggtttggttgcacctattgaactggagtctcagaaacagcttccaggaggtagcaatacaacagaaaatgcaaaaagaccagcaccaaaggctggtggatgtagaattgaaggatatgtacgcgtgaaaaaggtttgtttccaattgcgatagaaacactacaaagcttagaactgaaacaaatgcttaccttttaacatgaacaattatttgatttcttattgtactattttgcttcacatttattgacagcgtcaaattttccattgtcatgctaatgtaacaataattaaaataagagttattgctggcataaatttatgcatgtgttgcacttaaatatctaattagtacttttaaaggaataaatacctaaatttcaagttttgtggctactattaatttttatttgcggctgttgacagcaaaaatactatgtgtactcaactgttgcacataaatatctaacttttaatttttgtttttaaaagaacctaactttttgttatgaaagcatctaattaagttaaaactaaagcttgcaacagaaattaaaagttaggtatttgtactgtcaaaataaaatgttacttatttaagggcagcacatacacaaacttaagtatttatggtgccaataacccttaaaattattattatttttatgtaatctaatcaaaatatcatttcatcttgcgttagttcttggcaacctttcattgcttgtccctttacttcctcaattctaaatttgattttcctttactgggcaggttcctgggaatcttatcatttcagctcgttcaggatctcactcttttgatgcttctcaaatgaatatgtcacatattgtatcacacctttcatttggtaagaagattacacctaaagtcatgagtgacgtgaagcgattgataccttatcttggaggaagccatgatagattgaatggccggaaattcattaatcaacgagatataggtgcaaatgttacagtaagttttccaatacgctgacacataagacaatcatgaaaataggcttaactgtatgataataacattctcttatgtttctcttatttcttgttctgatattaaggccccataaatttcttaactagttttattggtttttcattcttctcgatatagaaacttctgttttcattgggttactttgtttagtagccgtatttgtccttaaactatcagaaatgtttccttgggtttttgaacattagtttttttgtttcggtttctaaaccataaaaagtgtttcagcttttcaggttaggcg

SEQ ID NO: 292 - DNA, 2161 bp, Cannabis sativa
ttttttttaactatttcatctgttccttataaatagaagaaaactccatccaagagaatctaatagaagaaagaataatacaactcaacctagctttattagacgtaatcttcctaaattccgtatccatgtaaggaaatggtcccagacaaagtttgttctaaggtttatcatgtctctaacttgttactcttttcatgatttacttgggggacacagccaatgatatgcttagttctcaagcactcttcattgcaacaatccaaaatataataccctttttcatgtttttatggttaaaatacccatacaccttttctttttttaattaaggtatgatatgaaccggttacacccatacgtacctgcttccttgtaccttgttaaatattgattaaccactcagatgaaatgaaaaaaagcctacataatttcataacgaagatgcataaaaaaaaaaaaaacactatatcacggcaccaaacattaacattttcatatatcaaagccatttcacagtacatcatcatacacatattaatcattgataaactaataatataatagaccttacaactcacaccacacccaatacaagacagtatactttgcagtataagagaacagaaaacccaatgtctaaaaccttctgtatacaggagaatactaagcctcgttgcgtttcacctcacaacctgtcctacatttcccgtctgcgtctgcatcttcttcggctcaatcttacttccatcagctcttagatttgagagcaaggcatctcttcctgataatactatttcaaaaaagccatctacttccttcgtaagaagctcaattcctcctgaaaagctatcacctactgttcgcaattctgtaacggaattctggaaaacatcctcatgatcagaggcagacccttcttggatcataggatataatctcttaagtgtaacatcaacagcttccagctctgtcaacgcaatgggtttcctgttagaagtatttctaatttccttatttacactagtctgcaagtccataaaagcttgtgcccacaagtatgtctcggaaacatttaaattgaacagcttctctgcagaaccagagaagacagcagtaaagacgctatacacaaaaacaatctccaccttaactccatacatagcacgcatcaaaatctttcctttagcagagttcttaacctttggaagatcaagtgattcaaccagactatctaatattgtccagcacttgtcaagtctaggattctttgtatgaatatgctttctaaatccatcaactgaagagcaggcacgtgcaagctgctttgaagggggtgactccagattatgcatggcacactttaggaaaagctgtccctgattcaaccgtgagagctccgagttgaaagcattgcatatgtcaagcaacttcacgctgatgtccaagtacacatcaatccatttctcatcccagtcacaaacaggaagatcaagattattaatgagggcttttatgtcattgtaagtttcagaaatggattccattgccaacttcatccacgacaaactgaatatatcactcttgttagttgggttcagcttaatcattctctgagccaaggtttcctcaaaagagttcaacagctgaagaagcttgggagacaactgcgagcccttaggtgatatcattctaaagggatttccaaaagggaagaaagctcggtgcggttcctgtgggcgactcatattcaaaagtagtatctgcaaagacaatactgtgttagaaatcctactaaaaaaccaaggaataaaaatactggccttgccattgtaggataaaactcaacacaaaataaatttggcttgccaaccaaaacaatcagcaaataataaaataccctagctggttaagttctaaccatgaatttacagggaaaaataaaataaagaattcaaaggaataaaaaacgagctcctaaggagagcagaaaggaatattttgttactatgtttgcaaaacattgtagcaatcagatggttgattgggtaccggatgagactgctaaggagagcagaaataatttcaaataaaccacctagaaaacgaaaactaattgtaagatgagtacagaatttcatgaaaatagcctttatgaaaa

SEQ ID NO: 293 - DNA, 8764 bp, Cannabis sativa
ttttttttttttttgtaatttgcaatcaaattacctaaattttttcttgtacataattattttttaaaattgtgatgttttaaattttaattatattttataatatttaataggaatttttcttcactaaaaaaaatagcggtttttttatttttacaatttttttttttatttttactgaattctacatagaaatcactataacaattaatagagtaacttaaatcgcaaccaaaatccatcctctattctgtttcaaaaaaaaaaaatccttcctctatttaatattaggtagatcaataaaaaattatggttaatagactaagtatctggaaaaataaagacggtaatagaattgaagctcaaaaatttagtatagagggttgttcttctgaaaactaaaattttagatagtttggccataaattacctttatctttttaaaattttaaattacacatgtggcactgatgtgacattgatataaatattctcgttattattatgtttgtcacgtgaatactattttagaacatctctaatggtagcattcgatattgtcttgttgatatcggacttattagaccttatattggacccatcgtgtcacaataaaatttaaaattacgaggatcatcgtcgagcccactatcaggctctatatcgaacctatcgggctatcttcttcaaccttcaaacccttcaacattaaactaccatcgggtcctatatcggacctacatcgaacctgcatcggaccatgcaaaaatcacaaatttcatcccaaaacacaaatccgaatctaaaagctacaaaaatcacattctctactaaaactactaaaaacacagacttaaccctaaatctaattactttaaccctagttaaaacttcatgaaaaaaaattaagaattacttttgacaacgacggtggcccgtgtgtcgtgtgggtggtgtggtcgtaaggtcgaggcgttttgtgagtcgttggtcgagtaggtaatctgattatgtgctcctccaaagagagggagagcagaatagaatttaatttaaaaaatgactttttctattaatattgaataggagaacaattttgacccaataaatacataattaatcaaattttcctattattattgttgtaataataaaagaaaaacagaacaaatgattgaaaatggaacacattactttgattgaagctattacttaaaattattgggatcaaaatttgaatggcctacatatgggacattacgatactatagataaagaataaataaatatacaaaaagaagccaaaatcaatgccaccatggtaaaataatatggtgcctaagcaaaacaaagactctaattgcttctctaaggctaagctggaagcatgacagcaccaaaaacttggtcaaaatgtccacacagttgttgaagcaggccatgttggatcggagattactttccgagaatcaacagcttccccgcaaaatgctccccgagtgttcagttgaagcaaccgaatgagaggtagcttcatccaacatcatgtattattattagtcattgtcatcgctgtatctatctacacccatcgcccgtatttcattgtcattattttctttttcttgtgggcacgatgtttagcagcgatcctcagtttcctctttgcgtttcgcattggattaactacagccatgattttctcttcttgttttctcttgtctcgttttgtcttcagcatttttctgatctcgctgtagacttgcacaaacgtttggacgcccaacatttgtctaacacggtcgcatacttcttgtgctagttgcttcatatcatctgaaaagacaattaaaaaataaaaacagtaagtgaaagaattgtgatgtcgaattaggatccccgcctaaccctacaataattggggctcgaacctcttcggtatagcataaacactctattgaacaatgtatatacgaaaagctagagtaaagagggagaaatcaccagatacgagtcttccagcgaacccttcgcaaactttatacaagggtaggagtatttcatatgcataaagttggcggtcttcatcggaaaattgagaaaaaatcttgccataactattgaagacaattttcatctgcaagcagcaataagaaaatcataagcttatgatacactgagccttaatacagcaacaacactctggtaatacaaacctgaatagattccatttgaagggcgatttttcccatcttttttagcatagtggagataagtaagttcctgagggccttagaatgtccattgtcttcaagagtaagagacagaaacgaggtttgcactttccccgaatcaatcaactttaatgctttaagaaaatgaccttgctcgtgctgctcgagggtagaccaaaatctttgaggttgttcgtgctccggttgtcccatcaaagagtgcacaccacaaacagtaaaaacgatattttgtacaatcaggttgcttgcggcatcatcgctgacttttgtcttcagttggcaacaagtggaaacagcaatcatgaatagtctacttggcctcgtaaggaaataactttgaagggaaagttcacgattcttcttgcatagttctgtcacggcagagaagtaaaatgctactaggcgactcgaaatgtctcgtaaccatgtgtgagggtgcaagagaagttcacatattgcatcccatacatcctatttgcaagcaacagaaatatggttacaaaagcaaatgaaaatttaatgtaataaaaaggttaaaacttttttgagaatatatttccatcagttcagaattcgaaattacttgctaattcataagaaataactcccatgaaaacaggacaaggttattctagtctagaaatacaaataccaccagtggcctaaaaggcaaacccgaattcaggaataaagtttaggggaccccagcccccactagttttttatttcttctgtaatttttatattaaatcagtccgatttttttattattattataatgtaaaattttcaagaaaaaaaaaaaagcaataaagctacaattttcataaacgattaagccccatttcaatgaattttctagccccatgactaatagtaataaaatagttaaatacagcaatcacaagaaaataacaaataaactaataattaataacaatatatcactatattaccattagtattttctcttgattataatcaaaagacataaatgaagaataatacatacctcaagatcctcttcaaagcataaatcatgaaactcatgcagaattttctctaacattatcaatgaatagtatgcctccttccagaatggaatagtagcctcatcagaataatcttgtgatctgtcattatagtcatcgatggcagatttcaaaatagttctagctcttggcaagacactacttctgatgtgtttttcaaatcctttcttttgcccttcaactaataatcccaagacctgtacaaaagcactcatgcccattaaacaagaaacaatttcctaatataaggtctcattcaatacaacagagccaattacatgtccatttcttaatgattcaaaatcagtgacatcaaatagtatgcaagagatcaataaaatagaaattgaaaagaaaaaaaaaaccgagttttctagccctttggggtagtaattttgtgttgtggcttatcagagagatattgtactggatatggtctgtgctacttgttgaatgaaatccttgtttttccttaaatttaatatttattaaggaaaaagaaagttcttaagctaactagatacacgatcgcttaaactttgtcattgaaaatagaaaactgttcatttatttcaattaaaatttagttctttcatcttttcatgtgaaagcaaactagcatcaaatattaaagaaaatgtaataaagaaaattgtaggggaaagagaaaagcatcctaatttgccaaacaaaatgtttacattatcaacttggatttaatgaaacagtgcagagaaatttacctgtgctgcagcactccacagttttggcttctcatccatataccaagatagactgctctcaagaatagaatgaagtgaatgtgcacttacacaaccgatgagacgcttaatagctgcaccactcatagcacgaacctcactatctagatcattagctaagcaagctaccaaatgaataaatagtgtttgtgattgatcatccacaacacttttcggaaacttaacaataactgcatgaagcatttcgagtgcagcttttcttccacttgggtgttcatacctgcaagacaattcatgttacattacatcacaaactaactcaaaaatgcaaatatcaaattataagatcaagtaaagacttgcctaagattagaaagcagagaatccaaatgttgttgcaggcgtttccctgaaagacgataatcgagtaagaactgcaacagaatctgactgcatttttgacgtattggttctacttgactggtaaccatcaattccgcaactcgagttacaagatcatatatttccggaacaactagcttacggctaacaattgcctttaaaagtgaaagtgcaacaaaagagggatttctttctagctcaacaaaaagtggaagctgaattagtaaatgtagctcttcagaggaaagtgtggtattagttcctcccaatataacagtcaacaatcgtaggcaagactgcattaaagaactgtcgacatttatagtactttgggctatatcaaacagggaaccttttatcgtatcaacttgggattcgatggatggtaaaggcaatcttacaagtggagtaaggcacctaagagttgcagacaaaacatcttcgtatttggaattcaagcagtttccaagcaacgggataaaaggatcaagcattgctaatacttttacatcatttttggcattctttaagctcttcacacttttatgcagtatcccgagagcgaaaacaattataagatgtgaacctaatgactttacatgtttaactcggactgaggaaacattttttccacctgcaccctttttacgatttttaggagtgttcgaaattgttgagttctcatccttatttttaatcccatcttcaatgagaccaaatagaaaaataaacaagtcagtctgatctacagaagggttggatccaataccagcagctatgtgattcaacatgctttccaatttcgctttgattttgggagtcattcggttttgcaagtgagatgcaacaggtgacaatactttcaaagcatgggttttgaatgtaatgctctgagcaattaattgtagtgtttcgaaagacttcctcttcctagtttctttcatttttgaggcaatcttatccacctctttttcctcggcaacttctccaagaatatcattctcaactatcgataggagatcttccaaacaataatccagcttgccacaaacaggaaccgagagaaacttcgataaaatgaaatttaaggtgtaccccaacacgtgcatttcatatcctcgctttaatgtggtccgaagaaccttgactagaaactgcaagtattctaaccccagctccttcaaacatgcagccaaagcagacctagcttcatcacggatgctttctaaacgattcttcagaaagtttgatacgcgatgtacaatagtagggagctgcgagtccattatgtctccaggaagcaactttaatatcttaagtgcagcgaggttgacgttaacattaaccctatcagaatcggattccagtaacttctgtatctttggcagcacagttttctgaagacaaatttgtatctcagacagcacagaagagccactacacttactaagtgtaatcaaagaacttgactcaacggtcccggaatcagaaggattgtcacaagaggatgcagtggctgaaaaatggaactggtctaaaataaagcaaattagccgtactaaactcttctgcttatcgggatgcaagtttatctcattgaagcatctcaataacagagaataataagaatcccacttcatttggccagaaaccgaagcaagggcatctatgcatgcatctctaacatgttcaccctttccttcttgaacttcaaaaagcatactaaaaaagaggggtacaaaaactttatttattattccctgaaagtaaaaggaaaaaaaatcagtaacttggaaaatggtctggaaaatcaaaataattaatgtgaaaaaatattacctctggcatagagttagaaccgatagcgttcctgaagcgtgccaaagctcttgctcttctgtgcctctgcaaagtgaagtgtccatatatgagaacaataataatatcaacaatcatacaagatgcttttctagttggataaaagtattgataaagatttcaatgattcctcttaaaatcaatcaatgtattagaatttagaacacagcaactggtgattatcaaacaatatctgaaatttaaacaataaaaaacacaaatgcggtttcttttctttatgaaaatgattaaactgagcatgagcataataagcatgggaaatggaatctcacctgtaaatgaatgatattgttgaaaaaatctatttcaacgtcttcatcacagagaacctttaacgaatccaggttgcccatattgggaagtttcatcaccatttctcgtagtaaattaatccattcctgaaaccgcatcaatttatcatgaaattgtgataaaactgagtgtttgagctcttctccatacaagaaaaggctaaacaagatttcatacctttttcaaagaagcatctcccttcattgcatgcccgagatgcttcaagagaaacttgtttattatgcgcttaatggatcctactgtccaatgatcaccaattttcttcggaggaggcgtgtctagatcattttctacatgactgagaacttcaccagcaaattcgagaaacgagagtaacaatccataggaactatgccttaaaattaactctgtagatgacatatcgtatacacaatgagacaaaatcagtaatgcttgatcctccggaacagtatagaagaagtttgcactatttgcactgatcttttcataagagttgattataatgtcataatcaagggctccaatttccacagtagaggttgcattcaagtcacacacaagttttgcctgcattccatgcaataattaaacgagcagttgtaatacaaaatctatcaaatcaagatatttcgtcagaagcaattcttaatgaagatacggaaatgaacaagcattaccacaacagttacggagggatcaacttgggcaagagtttcaagaagatcacagagagatgtgcgcaaatctcgatcaccagaaacaaacaacggagaaataccattcaggattgttgttgtaatttcacttcctagtattggtataatcccctgtatgacttgtacagattcacgacagacatctgcaagtccaagaacaaactttcaagcattaaaaatatttcttaaaattagaaaatatcataattttaaagtactaaccagaactttgaactccctttgacaaaaatgggagcaaaatgtcgatgaacttcctggcagaaattggatcctttacatacttggaaagaaacttgaaaattctaatctcaccctccccagggtctttgatcaatttcctgaaacatcaaacaacagtggaaaaatcaagaccacagcaaatcgccctgtaaacaaaattttgcaaacaatagctgaaaaaattcggtttagtcaatctgacttaaatctagcataaatgttacaaataatcaaagaccgcaaggaatctagcatataaccttcttattaactatacgttaagaaaaaggaacatggcatacctcttggttgcacattcgctttggaaaaacccatgcaagctacaaataagtgcatcaagattgggaagtagaactatctttacatcatcaccatccaactcactatcaagatacaataggttctcaatgaactttagaacacatcttacaatagcttcagatgctgatgtaacagttagaattgagaatatgtcaggaacaagactcttctcccgacaaagcaggggcacaagtttctgacttctagtcattgcaacaaagcaagagaagagtgaactaggcttttcaccgctagaaccttcctgcttgaaactttcaaccaaaggcttcactgacttaaagaagaggtcccagaaatcataaccaaaatcatgatcttcgtacttgttgagaacaagagaaacaattttcaagcatgaggaccttaaatccttgaattgcttcacagcggaaatggcctgcaaacaataatattttttagaaaagcttcaatattatgtaaaatattgaattcacagaaaagaaattgaaaaatggagcaagtgagcagctcttggcgcaatagactataactagtaacgtataccattactaaaataggaactcatagatgaacataaccacaaagacagacataaatattttccatgtctagacttttgaaaattatatctgctaaataaaatattagcctcttttgggaatttaactagaaactaaatgcaatgaagaaacatctaacatgaaaaattagacactctaacaaaatagtcaatcaacacaaaaaacatatggttccttattttttttttaaaaaaa

SEQ ID NO: 294 - DNA, 1622 bp, Cannabis sativa
tctttctgagctggctcaatcacttttgacttgttagatttcttcttagctgctgcttccttagttttctcaagagccttaatcaagtttaagagatatttctccggatcatcctgtggccatttcggcatgagattctcagcaacatcagctggagtcatcttagtttccccaatcaaactctcaattctatcaaacatttgatggttttcaaggctcaaataattcttggcaagaactttgaacccttcaaagctgcaataagaaagctcaatatgcatgtccattctaccccttcttatcaaagcagggtccaacttttctatatgatttgtagtaaacactatcaacctctcagtcccacaagaagaccaaatcccatctatgaaattcagaagaccagagagagtaactctgccattgtttccttcctcttgtggcttcttatggcttttaggcctttccttctctttccttttctctttctcttgctctttctctttctcttccactttctcatcttccaaacaagatttctctaccttctccttcttctccttcctctgtccagttagatcaagagagcaatcaatatcctctataacaattatagacttactagtagtctcaatcaaaagccttctaagatctgtgttgtccttcactgcagtcagttccagatcatacacatcatagttaagcaaatttgccattgcagcaatcatggtcgatttccctgtccccggggggccataaagcaagtaccctctcttccaagccttcccagctctctcataaaactctttgttcatactaaaagcctgcaagtcctcaacaatctctttcttcttagcataatccaaagccatcgtttcgaaactcgccttgtgatcaaacactatgtgactccacataccacttgacatcttaatagaattagcacaattagtataaagcctcctctgcctattcctggttttaatttccttcccttgcttcataacatgatccaaataagacttggtcaccaactctctatgccttctgtgaaaaatgagcttgtaatacctcttcccctgctcagcataattcgaccttgaagagtgagcaatttttcccaaaccccaccaaacttcaacaccttgaaactcatctgtgatcttctcatagtcatccatactcaaaaccaagctctctccatcggtctccaggtcagctctaagtctcttagcactacgggaagtgttacagctcaagtatgcttcaaccaagttgtaaccttcactacgtttcattctgtccccagtgaattcatggattgaaatttggatgtaagggttgagatattctttgatacttctcttgaaattttcgattaagtggcggacttcgtgtggggagtactggcaaacaatggcccatgcaaacatgatgctggctatggttgagcttattgtggcccatgtttctcccatggttgatggcaccatttgaaggttcttttgtgaggtttttgaggatttgctggttttggctttgacttttgcattgctgctgttgaaacggttcatgaaagacatgaaaagagagagcatagagagattcatggtttggaattgtaa

SEQ ID NO: 295 - DNA, 6784 bp, Cannabis sativa
aagtggagcaaactctactccttctcatcatgcactagacctttggcaaaagaagaaaacgacaactcgtttgtcggttcaagttgctgtaatccagggttttcgaggctagtcttctgcaacgaacctcaacggcacagtgtgaagccgtacaagtacggtaaaaacgacttgtccacgacgaaatacaatgtcgttagcttccttcccaaggccttgttcgaacagtttcggcgagtggccaatctctactttcttttggccgcggctctgtcactaacgccgtttactccgtttgacgccgttagtttgatcgctcctttggttttcgtggttggagttagtatgctcaaagaggctgtggaagattggcacagattcttacaggtaattaattaatacttttattttacattaattttattttgtaggtggcacattaatattacctgaatcagcaaattttaatgattcatagtggtgtgttttttttttttttttttttttggttcagatcttgcgcgtctatttaagatatttgtgaaaatttctaggttacattgctttttttaaacaatttctctaatgagacatgtattttcgacctgttttgagattttcaatgtcatcaaatgaaaatatgtattaagattgtccctttcaagagttcatgaggggttatgcttgagcttttttgtaaccaaaatatttatattgtatttatataaagagttaattttgtctttttcccttttaaaaatggtttaaatatttatatagaattaataaaactcaaagatacattttgataaagtgggggaaaaaggtacccgtttttagtgaaaataaggttttataaaaattaaaaaaaaaaattattgcctattatgtgaaaacggcttttttaaaaaaactttttaattggtctaatgacataacattctacataatgacataacattctatatttatcataacttgttcaggaattgatcactaatcagtacagcgtttatcatattcctcaggtccacattgtgttcttgattgtatacattacatatcatttatacaataatagaaaaatttttttagtcccctacaataagattactggtgtattctttgtgtttttagtatttggatagttctaaacttaattgtttttacatgatggtgttagttatagatttcctactaatatttagaaattttaaataatttagtgcatcgaaatttaactgcaaatgatgttagaattttttttttagaaaacgacagattgtctgctatataagatgtaccgatggtcacttttttttagaagactaccatggtagaagtttcctacaataagatttatgtatatcatatacaaatctttgtctgtttgtcattgtatattatctaagctttggtattagtgtgacatgtattgatccttatttatttattatttcaacttgtatttaatttataaaacgactgttttcctttaaattctgtcattgaaggatattaatgtgaactcaagagcagtagaggctcacattggaggaggtacatttgttaacaaagcatggaaagaagtgagagtaggagacattgttaaagtaaacaaagatgaatacttcccatgtgatattctcttgttatcaacaagctttgaggatggaatttgttatgtagagaccatgaaccttgatggcgagaccaatctcaaagtcaaaagatgcttagaagcaacactatgcttggacagagaccaagaattcagccattttcgagccatgattcgttgtgaggatcctaatcctcaactctatacttttgttgggaacttggagttcaaaaatgagtcattttccttgtccccttaccaacttctcttgagagattcgaagcttcgaaacactgattatatctatggtgttgtgatctttactggaaaagacacaaaagcagtaagaaactcaaccatggttccatctaagagaagcaaaattgagagaaagatggatcatgttatatatgttctgttttcattgctgcttttgatttcattaatgactgcagccggtttttcttggcttctgaagtctgagatggttaaatggtggtaccttcgtttagaacaaggtcacactgacattgatgaactgcttttcagaccatcaaagcttatggtgtctggtttacttcaatttttaagagcactcatattgtatggctacttaatccctatttctctttatgtatccattgaagttgttaaagttttacaagccatgttaatcaataaggatatggagatgtatgatgaagtgtcttgcaactcagttcatgctcgaacttctaatttgaatgaagaactaggccaagtagaaatgatactttctgataagacagggactttgacatgtaatcagatggagtttaggaaatgctcaattgcaggagtttcatatgggggtgatacaaatgaggttgatcttgaagcatccaggagaattgaaattgaggcttttcagtttagtatagatgattttgacactacaagaagccaaagatttgaaaaatttgacttctcaattgctgatattggaactgaaatggagtttttaggtggccaaaaaaagagtaatggaaatccaagtaaagaaaacgcaggaatgccttctttatctaaagtatctaatctcaagggtttcaacttttgggatgatagaattatgaacaaaaaatggattcatagctccaatatggatgatgtaacaatgttcttcagagtcatggctttgtgtcacacaggaatacctgttgaagatgaaaatagtaataggctcaagtatgaggctgagtcaccagaagaagtagccttcctaattgcttcgcaggaattcggattccaattttttcaaagaactcaatccataatacagctcaaggagttggatccttcttctagaaagaaagtcactaggtaaagattatcctcttactttcttatttttggattttatagtgcttagacatttaatggaaggttaatttcagggaatataagcttttaaatctattggagttcagtagttcaaggaagagaatgtctgttatagtcagcaatgaagatgggaaaatctttctactttgcaaaggtgcagataggtatgcctttgccattgatgttaaaaattttatatatttttgtttcttctccctttttaatattttagacaaaaggaaatattttgatttttagcctctttaatttatttgatatcttacatttcagtatcatctttgataagctgggagaccatggtaggaaatatcaagaggaaacaactatacacctttcaagctacgcagaagatggttttcgaactctagctttcgcttatcgactacttgatgtgtctgagtatgaaaattggaacaaaatatttacacaagcaaagacaacaatcggtcctgaaagagatgagttactagagaaagcatctgaaatgattgaaaaagatctgactttgttaggagttgctgctattgaagacaagctacagaaaggggtaatctcttataagatgtatatttttctcaattcttatatttctttctagtatatattattcaaataaatgtattcgaatgaatttgtagaaattagatctaaaatatatatggattttaaattcatgagagattattaaggttattctatgaatcaataagataacagacatggaatcagagatgagatcttcttgaacaacattatatttttatgataacataatttcccttctaaggacatatatcaattttaaacaatgtatgttatacatagttaggataaaatgttcattttctttttctttatacacatcaggttccagaatgtatagataaacttgcccaagcagggattaaaatatggctgctcactggggataagaaggaaacagcaataaatatagggtgaggataacttttagtttcaagtcaaacaggcctaattattgcaatttaaagatgaactgaaggtgttgctcatttttttgttttgtttcttgtttgctgaatttcccatgctggcagattcgcatgcagtttacttcgacaggatatgaaacaattgcatttgagtttgagcaatgaaactgaaagaaatggccaattaaaggtgaaaatttgcttaagataataatccatcatatgcttattttgcattgtaatatttcaattctcttccaaagacctctcaatggacttctaacatcacaaaatcttactttctttcacttataatcctttgaaagaccatagacatttttttgggtgatatggtcgggttaaaactattctataaagaataactgtttggtataatatgtgcttcattacagattcaaataaatgtggagttggtgattacagattttgtctttctagttttcaggctatgaaagaagacattttacaccaacttgatagtttttatcgagtcatggcaaaagaaaataatcaatgttcacccttggctttggtggttgatggaaaagctcttgaggttgctttgaaaagtgatgtgaagcatcatttcttacaattggcagttatgtgtgcctctgtcatatgctgccgggtttctccaaaacagaaagctttggtatgtctatgatattcaatttttgtggtaaagtaaaaagattatgtggcactatatcagagctcagcataatgcaattttaacctttcaatgatttcactatttgtttcaagtttaattgagtcaaactttacatgatatagatcatatttcaagaattgagttgaccttacaatctatattacaagaaatgattgcatatttgtttaaagcttagtttaattgagttatactttatatttcaagtttaatgagttgacatttttacagattactagattagtaaaggaacatactggaaagacaatcttggcaattggtgatggagctaatgatgttggtatgattcaagaagctgatattggagttggaatcagtggtatggaaggaatgcaggtatgatgaatcttcttctaaaggtgacattgttagtcaatcttctttatcccattgtagtaattttcttcaacccatgatatcaactcgtgtattttgagtacttgtactgcaaggaatatgatgaaggaacctaaaattttcttaaaaaagtatttctataatgatatttcatattcatatagattgttatccctagactcaaaatgtatagtatgttatcatattcagttttgagctgcttgtattcaatttctttcttaaatatgataaatgatataagagatgcatcctcaaatacttcaattttcatgaaatttgaatatcaggcagtaatggccagtgacttctcattgcctcaattccggtttttagggagactactaatagttcatggccactggtgttacaagagaatttccaaaatggtgagttgttactacttctaatatatctccatcaacaacatctctatttttctggagtcctaatataaatttaacatctctctctctactattgcagattctctatttcgtatacaagaacattgcatttggcctcactctcttctactttgaactatacacaagtttctctggggaagtcttatatgataattggtacatgacattgttcaatgtgatcttgacttctttgccagttatatcattaggagtccttgagcaagatgtttcatcagaagtttgccttcaggtaaagagaaattgtccattttcttccaaacttttagctcccttatttcacatctaaacttaatgaagccatgattggacatgagaatattatcatacaagtctagtaatggagtttctatatcttctttatgtacaaaacagtttccagctctttaccaacaaggacaaaagaacatacatttcacatggagtcgaatcattggttggattctaaacggcgtcgtttcttctcttgtcatcttccttgccaacatctacatcctctgtccgcaagcctttcaagagaacggatttgttgctgatctcacacacctaggtgccatcacatacacctgtataatatggacagtaaactgccaaatatctctcatcatcagccacttcacttggatccaacaccttttcatatggggaagtattttgttttggtacattttcttgtttgtgtatggtgcactctctcctccctactcgaaaggaggatttcgtctcttggtggagtctctaggaacttcaccattgtattggttggtcacattgctggctgtggttgtttctcttcttccttactttttccacattgtcatccaaagattgttctgtcccatggatgatcatgtgcttcaggagatgaaacattgcaacaaggatgttgctgatagtgtgatgtggcaaagagagcaagacaattctaagaagtcaacacaggtcgggttttcggcaagagttgatgcaaggattcgagattttacaaataacttacagcacaagaaaaaagtaatatataaatcaatattaacaaaaagcccttttttcaaataagtgtatatttttgttgattcatttaggctaaggagttgacttatttagtgtcttttgttcattatgtatccaatgtaatcttgtcccaattagttgttggcccctatgcttatttatttttaatcctttaatccttgattgaaatttatcttccaaattagttgcatatattaaa

SEQ ID NO: 296 - DNA, 2934 bp, Cannabis sativa
tatctactatttatatatactagtaccgtaatacttattctaacccaaacccaaaaacccgacccgacgcgtgccagcgacactttctatgccctctctttttccttttataaactaagtcgcgtgcccccacgcgccaccactaacccctactctactctctactccactttctctcatataacagttcgagctcactctctctctctctctctctctctatttatgatctcatcttcatccgtgtccgaatctcaagcttcgattctgaacaaaacaaagggaaggtcactcaacatagtcaatttcaggttagttttctcctttgaccccatacacatgcaaatacaaagcgttttcaattttagtgccgttgatttttgaaaattctagggtttttggtgttatactcattttgtcagatttttttaagtacatttccctcgtttcccaattcttcgtacaaatattgtttaaaaaacgtatttttatttgattttggctacttgggttttgaggttttgagaatgtgggttgaattatttcagttgggttatttttgttctctgagaaaaagaaaagggttttgttcttaacacttgtttttgatcgtttgaaggttttagtttggtttctgagaatatagggttttctttttcaagggtttagagaatcgacgatctaccacctatttttttttttttggtattttctgatatgtttgtaacaattctttgtacttcttttactgagatttgaccacaggattagcattgactttgtggtaatcgatatctataaatatacaggtatcttttgatattgagagcaaactctaatggctccgaatccaagagttgttaatgctttccgagctatgaagggtctaggtattgaagaaggaaaggtcaaaagagttttgaaaaagcttttaaaattgtatgacaagaattgggaactcattgaagaagagaactatagagctttagctgatgctatatttgaagaagatgataccattgaggaggagaagaaaaaaggaagtgatcataatgtgagtatattttctctttgctcattttgtttcctatcatttcctgtatgtgaatatgtgtgcttattagttggttttcgtattagcctggacaccaggacgatgatatggatgaagaaacactcgtaaatgaacctgttcggcccttcaaaaggttaagaaaaggagggcacgaagtgaatcaggtttggagatttctctagttgccaattttttttattgaaaagacttgttcttgatgattttgcataaacataatgaaattttgttttgcatagtagccagggaatgtgacagaatcgcccgtggctagagctgaaggtagctctatttcaactcagcgcgctgttataaaagacaaaggcaagcggcccatggtttcggatggtggttttcaccctatgcagcagcaggttactactgcttttcaattggttatgcctaaagatgagccttatacagaggacatgtttgcttcgggcttaccacaatacgagcctccgattggggtgcttaatccaagtatatatctctgtccctctcacttttccaggggtgtttagtgttttgtgtttttcgggtgcatattatatttgttccgtgattttattaactgcatttacttgtaaattcatttaacttttgcagagcctttaacaattagaagcattccagtgcaaaatgatgggagtggtggagaaaatggcaagaaatcttctgaagaccacaatagagaagggagaactgatggtgttgcgttttcaccaggtgaggttgtaacagacaatgagcttgcaaccgtccaatcttcttctaatgtagaggttgctacctcacccacaggagaggtaaagctttctctaagttgcaatttggcttcgaggagatccaatttccgcttgcctaatatagatgatgttataaaactgacggaagctaaatgtctgcatacatacaaaatcaatgacccgaatttttctgtcatgaaattgttaagaaatatgtgcgaaagcttcctcgaacttggaactgatgagactgatgaatcacaggatggtacagtaaatttatcaactttagatgtattgaaaagatctcctgcacggaatgctttgggggctagtagagaaaatgtatccatttcatcgtgtacctcaaatggagttgtcaatggtgaatgccatatttctgtggatgcttctcaaattccaattggagtgcccctgactagcctggacggttatgctgggaaagataaggacagggatctggaagaccacaacaccacaaatagtaagagtttggtagttgcttcaccgtgtgaaatggatcctggcgatctaagatctcttcattatattaatgacattagcaaaggtgaagaaagagttagtattccttggctaaatgagataaacagtgaatgtccatcgtcctttcattatatctcccaaagcattgtttttcaaaatgctgagattaatatctctctttctggaattggaaattctagttgctgtccaaattgcttcggtgattgtctatcagcggttgagccctgtatctgtgcccgtgaaactggaagtcaatttgcatatacaactgctggtgttgtgaaggatgtctttcttgaagaatgtatcaataaaacacgtgaccctcaacagctctgcacttatttttgtggagattgcccacttgaaagatcgaagaatgatgtttgcttggaaccatgcaaaggccacataaagagaaattttatcaaagaatgttggagcaaatgtggctgcaataagcagtgtggcaaccgaatagtgcagcgaggcataacttgcaatttgcgggtgagaagttctctctccatttcccacttttttttt

SEQ ID NO: 297 - DNA, 4427 bp, Cannabis sativa
atacaaaattcataaatacacacagagagagacgaataacatctctacaaaacaaagactcttttttctaaagatataaatacaatttaaagtgaatgaaaaagatacaaaacctagctgctataagatgtatttataatcaaaatacaccttattgagagctcatacacggtctgaaaaagaccataactcactagataattctctaaaataaattttcaatcaactcaggaaaatctgcttccgtacctatagaatcgtgagcagtaagtgtgactgtccttttatagaaaaggaaagtcttggttcagttttttgcccaagaaatctaatcaaacattttaaaaaacttacaaatgatcggatatacacagtaggatagatagatattagttaaatcatcaaacttactatttatggcttactttccataaatagaaaagcaaatcatatttcttaccttatataattcaatcaatataaatacaaaattatagaaataaaatacacaactcactcgaaaatgaataatcaatttataaaatagttttgctaatctaaaaatgccaaaaataaaattaacaataataaataatattatgtatataattttaattttcttgagtatgttgaacttattcacaaattagtacttataaatatttttttgtatctaagttaactgtactataaattttttaatatgaatttataaaatattttaaatataataagcatgtatatcatggtcgaccatatagttgtgtaagttgggttactggatagagctcctaaaaaataaatggcccaatatattttttctttaatactttttaagtttttatttaactttattcttcaaggggctaacaacttgtcacaaagccttttatagtctattttcaattttcaaagtccattttcaattccattactgcttttaagaaaaaaaaaaattcattacttctagttattatttttttgaaactttattggaatcactaataagtttaataaaatagttcgtgttttttttgtattttgtaaaatatataaccgtatgataatatttaaaactattaaattgcattttttttcttagagatctaatttttaaaattaaaacaggacttcgaaaatgtttaaaacggccgtgatgtatatattatttaaaataaaaatatataaataaaataggtaggaaaaaagtgtaagaattttatattaatatataacttaatattattatcctcaataataatatataatatcttttttaaaatatattttttgaaagttaaataatatgttactttaatcttaaattatattatttgttgaataacaaatagtacaacactttacacttgcataattatccgatacttcctcttttgtgccgtgctttcatgtaacatgcatctcatatgtgaagactgaaggtgaagcaaagtgaatggggattttggttgttttttagtaacaaccagccaatatcaaattggcagcgttaaaatcacgcacaagtatcgagggatttgcatgtgattggttcaattttctgtaaaatttcatgttacatttccacattttatcacatagattggatctgtagcgtaaattttgatatgtttccagctcatgcatcatcaccttgacacaaaccactttttttgtcttccaaaaaagtacttcaatccaataaataaagaaacaaaaaaaaaatacttgtgaatgaaaagtttacgagcactttcaaattttttttaatatattctttaaaatatattattaaaacttattttatgtattttaaaatatacttttacataatattatatataagtttgtttaaaataaattactaaaatcttattttctcaaaattttattatatttttttaaaatatatatatataatatttgtatgtacacatatctctatacaaaaataattaataaaatatatttagactaatgaatagtattctataaatataaagtatgaaaagtatattttaaaaaaatttaaaatgtaaaaaatgttttgagtatcttctgtagcctatttttaacatgattctttaaattttgtaaagtttctctattttaaaaaaattattgtgagtgatctaaagtgaggtctatacaagttttcttcaaataaaagtgtttgagataaatatgattttttttatttattttaacaatgtttgataaatatgtttggaaggttgtgattatatgagaatcgtgataacactctaagtagggtttatttagcgtatgagctaataagttgtaagtaggctggtccaaatgatttggagaccttatttttaatatgtttactgagtttttcggcaaccaaataactattgagtttatgcaagtaataaaaacgcaaatggcaggaatatagacaaccaatttttacgtagttcatgcgttaattatccttagtccacgatttcttttattgggctcttgaccggtgaatgttgatacaaatacagaaaagatggactttactctgatctaccgtgttcctctcgaagaagaggaagcttagtagcaatattctggagttaataacagggttacagtaatgtgtttacaaaggattcccctttaatcttaaggtgaagagtcaaaaggtgagtcaaaggagaggaagtcgaatttcggatcccctgccttgtgtgtcttcataagggagaacccccaccgttggattggtaggtggcatattttccatgtggtcttctactgatgtcgtaatgcactagttgtatcggcagtactttggatgcatgtcgttctacgactgttcttgtttgaattacccccgcacctagtcgttggatcattctacgcggtacataaggatgcacattctctgcatggtagcgtggtgtaggagacaatctctgacattatactagcaattcgtagcatgacacgcgtgggctgagcttcctcggatcaaaggcataccccggactgaggcatcttgtcttgaaaagatccattcccttcgaaagagcaaaaggtttcgtcttccagagcaaagcgaggcattagcccacgggtgactgtggccagtatttagggagactccctttcacggagacctctctcgcgaggttggcgcctttatccacctggggcgttgaatgaggctctttggcggcctaatgactccttgattaatatcctcgtgtcatccttgtaaaaaatacggataacatttacccctaagcttccaggacataccatggtccgggagcttgcagtaccctctcctgacggatctctgcgcacatgggacttatgaaaagtttttaatgcactacgtcaccagcagcgaaactaaagtgccattatgtaggaggcatgatttcttctgtctttttgtcagggttttaaatgttgacctttgggtttcgcttgcgtactggatgcgtattctataggaagctcaaaacggcgatgattggactcgggcaattttttaatttattgagtattctttacgatgcatgtaatgatgggagtcatccattgggaagtgagatctcctttgaactcctcacgtctaaatgtcggatacctcttagggcgaatcgaaatgtctgcttcgtgtggaatgtatcccttctagtcgtcccataaatactttcaatagtcgattcatttttcactcttcttgcccgtcaagttataacttttgagttttctttttcttagttgtgtttttccgtcacttacactgcaccagagactttgattatgacatccctcctgcaattggtaagttcttttgtttatctatttaagagctttggagggtgccttgaatggtgcgcttgcttctaggatcagcgatgttgctcctaggcattctggggtcgagccatgacctttttctttttgttgtgccaatttgtggacaggtacaccatgtctgttccaaataaggtcgaactgtctgagacggcagggagtagctcttctgccagaaagaggcaaaagctcgtggtattggacttcggcatagggggatcgagggatcactctgctccccttatgtctaactgaggtcgggccagcccaagtctcttcccccggcttcgtccaaaacgcctaccgtgtggttcaccttccctaggagggcagttcccttaaaccttcttgaaatgtagagggagaaggaggcaaataagaccctgaaaagggcatctagagtcgaagaggctacaaatctttcgacaaacggtcgtgatgtcggcagtctgcaagacagaactagcggaggagatgcatgtagtgcctccagcggggcagattgtagaggtcgaggctctagagagtcgattggcctaaaggttggggcgagaggctgctccttttgctacagagctctt

SEQ ID NO: 298 - DNA, 1847 bp, Cannabis sativa
ttctgaaaatagccatattagaaaatactatgcccttgctgattatgattggttttccatccatgttgatcaaaggatttttagtaaagtacgagtagctaaactggtggagtgaagagaaatttactggatttctcagggaggaccccacgtggtaaatattattgtaattagtaatattattattattattattgctcgttctactaggacattgatttgcatgggcaaccatagctactatcattgcatttatcaacatgtcaccgggtatctgcaatacatatatatccatgtcaggggcgccattaatggaaaacattaattttattataaaaaacatatatgctaatgtcatatgatgacatacgtgtattatatataatattttatttttacttattataaggagtctataaatgtagatatttatagttgacctaccactcatcaactaaatgatgacgtttgtaaataaagaaaatgttagttgatcatcaatatacttgcgaatcgagtaaagtaacgatcgagaattactgtgagaattatttgtgatgtgtttttaaaataattaatatacgtacatgaatatggtgatggagtattaagtactacacttaccatgtccatgatacaacttggatcggcaagaaaacatgttatcttccctttaccgtggccaacaactacactatcaacagtcctgcatttatgaacaaacatacaatattaatattactatatgataatgtaaacgtaaatatataataactaattactgtagctgtaaattacctcaaaccttcaatccaaccaggaaaaggttctttgtaagtgctggtaatcattgtaggacgtataataacagttggcaagctatctttgtactgcccaatacacatttctcccagggccttagtgaatacataagtattaggccaaccaaatttctttgccctgttcaaagttcgatattatatatattagttaaaacttaattaattatggagcttttatttgtggtaaaaaaaaaaattaacctttgaagtccaaaatctctcatgtctgatgcaattagtggttctgaaataccctgtgacctcaaggcatccaatttttgagcagccagtttcatctcaatttcaaaatctaatttagaggaagttgattttaatgtttctccttggtatacttctttctccattatcactccctctccttccccgcaaacataagctgtaaatttataatattattcataaattgtttttatgcaaaaaataattgactagagaacgaaaaagagagtaattaaataaactttattgctgcgaaaatcagtatatatatacctataatataaaaaaaaattgatgaacatacatactaattttaatggatatgatgcatcttaatttgtcgttaaaaaatgaaatgaggttgtaaataaattttaattgtgtttttagagacacgtgtgccaaattaaaggcagtctttaaatttgttcattcattctcattaatgtagtattatatattgtttgaaactaataataacaaatgatataataataacaacaacaacaaatgcaagattgtaaaacttagacaaattatttggagttcatgatcattgcaataatttaccaattcttcaacattattaatgaattcatcacattttttcccttccaaataatttcatttattttacagctaatctgggaggcaaatcataattgtaatactgatcatatataaatttattctctttgttttcataagccatataaatatattcttatatatataaataattattgtaaaaatacaaaaaaaaaa

SEQ ID NO: 299 - DNA, 3170 bp, Cannabis sativa
ttgatttcagaccttgaatcgcatgtttatcattaatgctggttccgggtttaggatgttgtggaacactgtgaagtccttccttgatccaaagaccgctgcaaagatccatgtgaggattatatattatatgtagtttttattgttgaaaatttgagctctgatcaaaatcttatcttttatccatgaaatgtgtcacccaccaggttcttggaaataaataccagagcaagttgctggaaataattgatgccaagtaggtgtttgaaaattgatttgtaactttttgttatcgtcatttccattgtactgatttactgttttatttgcaccagcgagttgccagattttctcggtggtacttgtacttgtgccgaacatggaggatgtatgcgttccgacaagggtccctggaaggacgcagaaatattgaaggtaccatgtttaattggaatcagtgttttggttggcatcttaagtttacgttgaactttaattcatgtttgttcataaatgaacttacagatggttcaaaatggtgatcacaaatgtaaaagtaaatccgagagcacagttactgaggagaagacagtaattgaggaggagatagtgcaccccaaggtacatttttggaggctccataccattttaatcaatatctattattgaatgaattgatttcatattctcttcttgctgccacttggtattgatgagttatctgttaacttaatgttcttaaaccagggatgtgattctcaccatatggagactactttagaagtagctgacatagcacacctcgctccaattcttgagaaagtaagtaaatagccgtcgagtttcttaattgtaatcgcaataattaaacagaatagaagaattataataagaacattgctattaagtaccagtaacgatatgaaactttgggtttcagcatttctcttatattaactctttagtagcacctgaaatatgtatgaagtagcaatatagagttcatttaagtgggttgcattaacagtactcatatcccacgttggtttgtgacaaggtaagtatttgatctgcaatatgtaacttgtcactgttattagtaggcctcctatgcttatttcaatagatatggttgtcattcatatgcttatttgagaaccaaatctcatactctttctctcccttcctttttttcttcaataaaatatctctaactttctttttcctttattgtgctctgaaaagataaactctcagattcatgttctgagaaaatcccaaaaatttcgcaagtacgatgactttgctccaatggttgacaaaactgttgatgcaacatggcaaaccgtggtggataataataatttttcccaaggtaagtttcattttctcattgttcttcaaacataatatttctacattatcatatgatcaacctaacaaacatgaatgagaattttgtcaacagaaaattgcattaccaggcaaggcagtagcagaacatcagaagggcttagctcccatattttaacaggtgttatgaccgttgtcatgggaatcgtcaccatggttcgtctcacaaaaaacatgcccaagaagctcacagactcaaccttctactctagccccacttactgtgatgatgatagccaaatagtttcacaccagttgcagggcaaccccatgtccaatgcagactgtatgtctgtgttgaaacgaatggcagagttggaagagagagccggtgttttgagcatgaaaccggttaccatgccaccagagaaggaagccatgctgaacactgctttaagcagggttgatgctttagagcaagagcttatggcaactaagaaggtatgaaaattgttattctttcattgatatttcttaacacaatactgaggctatgtttgaaagttggatttaggtaggaaaagaaaaagtttaaggaaaaacaagtgtgaaaaatgacaaaaaaagaaaagaaaatcaattttttatgtttgatatgaaattttttgctgattaacttgctttttttcacacaagtttttccatatcaaatatgagaaattgatttgttttcttattttccacagttttttctttcctacagctcccttaccttttttttcccattaaaattcaacttccaaacataacttaagaaaaatggaaacccaattgttgatctttattttgcttttttttggtttaggctttagaggaatcacttgccagacaggaggaggtctttgcttatcttgaaaagaagaagaaaaagaagaaattggtatatttatatgtcaccaacaataaccatgaaatttctctgttaatttttataataattaccattaaaaatgcattattgttaaattgaaacttttatgttgttaatgcagatgatgatgccattcggctggtagattattaatcaatattattgggaagatgccaaagacccttataattttatctccaagcaaagttacctttattattattttttttttctttctatttatgttgtttattattccttaattattaaggcttgtatgaatcacaaattttggtcaagtatatatcaaaagtatccatttcttcccaaatatatatatatatatttaataaataaaaatggccatcttatatggattttttaatttgcttagatttcctcaaacttatatatattgatttcttattatgtattcattagattagaaaacataacaaatgccagaaaataattggggtttaatagatttattgcaaagttgattactcatctttgataggtacatatataaattagtctttcacaaattttaaaaattaactaaaaatctcaatgaaaactagtaacaaaccattaatttattaccaaaattaaatttatgtgtatatacaaagaattcactgaaaaacaagcaaccacaatctatcaaacaaaagaaattaaatcttgattttggtttgtcaaaagtacaatattactgatcagtaacctagaacagaaaagaaaaaagaaaattataaccaaagttgactttaaagtttgaaaccatattatgcctacttctttgtatagtattatatattgactgtcaattgaggtgagtttttttcatgacaaatctcacctcaatagacaaccagtatgg

SEQ ID NO: 300 - DNA, 2131 bp, Cannabis sativa
ttgtaattttaaaactttaaatatggtatatttttgtaaaattagtatagtaaaaatgtaaaaaattcagtttattttttttaataattttttttctaattttagagtatttttataagtttcctatatttattaagtaaattatattgtatgttaactttattttatttattttaatatttttgaagatatatttatttttataaatgatatctttttataatataaaaatatttttaattcatgaaaatgcaaactgacacggaattgggagccccatatgggatggagccgtgtggcacaaatcagatgattgtcccggaattgggcggacggccgaacctagctcactaggacacgtggaaatagaataataatagttttttttttgagttatccttaggctcggactatccgaacctttaggttcgaaaatcatcgtttttttcttcctttaattacccgtttctgtccccatttttgaaaccaataaattatttgtcgttttccttcaagcttgggtcccataccacactgaaaacgacaccatttatgtatatcatcacttataattcagaactgtttgctttgccagagcaaatcctgtacgtgctttaatttagtatcccaaagattatcttcttttcttttatattctatctagtttttcttttctttttttattattattatttatgtttgataatatgaagcaaagacagatggtattgagattaacaattgcaattttggataatgttaatataatgacttggtgttttcgatagtgctttgtttcaactatgatggattaatcttttcgtaagttgataacatttttcgtattttcctaaggagactttgtatgttttaatgggtacgcaatatgcatgtctttatttaattgattatgttgataaacaaaaaaatatattagtggttcatgataatttattttatgtggccatatattagtgtcacatgatatacttatgtttttaaaactacgtataagtctagatatgtacatatatataagaaaaaaaaacctagatcagaagagaaatgagattcattttctaattgaactttttttttttttttttataaaaaaactcccatttacatatgtattgatatgtagcctaacttcaatatgtttgtatagctaattgaaacgtagtcaagataaaaacaaaagactactaataataattaattagttaattatattggtaatcaaatcatagtgataaaccttaatgaaaagaaaagatatacacaccaattgacaaagcaaattggataacatcaactactacaactagctattattactttacacattaatattcatttcaacagctgaaaaaagagacaaaattcaaaatgaaaacttgatgagtgagtgtcttatgtaaaactttgcacgtacgtactacgtgttaaccatttcatttttaattctctatatatggctgatctttttagagcgatcgaattcttttacctttattctttaattcccactttttaatattttcttcctcctattaaataaaagcctacattaagaaaagggagaataaaagtgagaacagtaagtggatgatgtatagctgactttatctttttaaaacagaattaaatttgaaaaaaaaaaaacaaggccactaactttactgaaaaagaataaataacaaaataattaagaaagatacctacaacttattttactatatgtataaacaaagagagagaggcaaggtcggcgcgtgggagtggaacgttctgccgcatgcgtgggtaagaagggtaagggagtggtacgcggggatgtgtataaaattgacgtcgtttgagtcataagtccttgtgagagtttgtcgttttgatgaaaaagtctcaccctctctattctctctctcgtgaatgaacttacacgtaatcccacacgctcctattctgccgtggacttcactgctgacgcactcacagtgctttctcacgtgtcctattacacaacctctagctaccttacccttatatttctttcggtctaatcttcatatctgtgttttctttttcatttggtgctcaccgaattaatttttggtatctaccaaaatta

SEQ ID NO: 301 - DNA, 1033 bp, Cannabis sativa
tttttttttttttttgtgtaaaatgcaattggtctggtttgaatgctagcattatgggttgaaatattgcactatatttcttggagagccaaacaaattggcagtcatcatataatagcgatagtttgtaaagtcgttggccaattctgattgctttcagggaaggagaactcggtaattcattgggagattgtatgaaaaaatgttctttattttcttaacatgaaacatagttacatacagttaaaataacaaccttgaattctgccatgttaatatcgaaggacgattggagtgcagagatgtcccatatcaacttctaaagaaaatatgtgtacaagtagctaacagtgattatctttgcaattttcttaccctggttatgatcatgtttctttttcccagacattaaagaactgtggctgggacgtgcttgaaccacagggtggcatttccatggttgccacgccctcggcgtgcctcaacaagagtgttaaacttgagctatcctccaaagcaggaagcgtgaatgggactgttgcatcttctgaagctcttgatgactcaaatatcagggaagtcttacacaagaccactggtttatgcatcaacagtggctcgtggactggaattcctggctactgtaggttcaccattgcactggaagaaagccaattccaacaggcattggattgcattaaaaagatgaagagcgctattagtaactgaagttacttgttgattcctcgtccaggctctacaaatgtgaaattatcttcttaattcagcttcaaatttggattcttcttcccttatctacacacaattttacagcaattgtttcacaagtccaatatttgattcaggactctctccgagagcacacacaatctcagtgtgaaactctccatgcatatgcatatataataatataataatttagtttgtgtctactgtttgttgggtattgagttttgctttttcttgggcagttggtaaatattggtctgtattgtttgcaagaaaatctgcc

SEQ ID NO: 302 - DNA, 2473 bp, Cannabis sativa
tttttcaccatccggcattgaaaaaggacttgagtgcatgattttttgaacaagaaaaattctaaaaaaggaaaatcgaacagtttttaatcattactgatcccatcccaacatcacatcggttgtacaaaaacacaagacatcgatttctaagcgaatgacatctaaaacatgtcaaccgacacatcatgtttttacatcataactattctctctacatctccaagactacacacctaaacatttttatacgtgcacaagaatctttagatacatcatcacctagagacaactcccctccacaaaacaataccaccacaccacacacactccctagatgaatctaaatctaaaataccttcactttagccagacatgagcgacatggctcgtctgaaatccagagatttcagggctgagcccggaaaatgcttattaggaacccatagttcaccatcaggtggcaacaatatccgaggttgcttagtcttcttgccttcatctccagctttctttgtagggtcatcttctttcttgttcttcacatattcaaagaactccgcgacttggcgagcatactgtctctttgcatcaatgtctttactgaaatcaatgttgggttcacagtcaagaaccaaagcaggtaccttttgaatacttgaatgcatatgatttccttctaagaagaacactctccccctaatatcaggatgcaaagaattgtctgaatgtaaaggtaatttattaactgacaagaccccatgattgccactttcataagggaaaagccagctctcatgcttttcgtgcaggtcactgagatactctaatgtcactcctccttcctcgtttcgttttcgcagcttcattcttttgtgacaagtatcagggcttgctctaaggtatatgaaagcatcaggaataagcccaggtaagcatgaaacaactggatcaaaccatgagtcataaatgctaatctccatctcattcatccattttgcttcatgcacagctctcacaaacaccattctatcactaaaaacactcctttccatcaacctaagtggcttgataccactagatgactctctctcctgcataacccttgtcacaaaaacatagttctgaaaagtataggcatacctctgaggctcagcataaaaagcatccaatatgttgaaatggtctggtccaacatcttgccacttgttaatgggttcaggaacaacctcaacaagatcacgtagctcaattgtttcattagctattctttgaaggaatgttgtctttccaacactgatatttccctcaacacagaaagtaagccgtttcttcttctggttttggcctgaaatcttcatatcttcttcatcaacactctctttgatataagtagttatactctcggcatggttacggtgaataattcctacagaatcctgcaaaaactccaccattttttgactagattttccgaagaagttatctttatacaattgcttcaactcagcaacaccagaaatacctttctccaccagttttctcaaatttcttggacccactcccggaatggtcaacaagtccgggttatcggtcaaaccaccaccaccggacgacgaacccctttgcctcctgttatgcgaccgcacaggcggcttctcctccgaacccttttcggcttctccaccttcaccatcactaaaacacaccaaaccctcttcagatttcttcgtaccctcaacggcagtttgaagccacgcggccctgtgccctggacgccggccgttcttacacgctacccacgcccgaaacggtgccctgttcccggttgagcatcggcaaatgctgccgtttctggaagccgcggctgcgacggcggcaaaacgagaagaaacggtagaagcgcgtgtcttggagaaagagccggcgagggctgcgccgctagcgaaagaggaagcggtgggcattgggaaaacagaggaagataaagaagaagaagaagaagagagagaggggtttttgaaagccaaagggattgagtttttatggatggagaatgaaaatggagctagagtaggactagtacagagaggagtacaaagaatggggcttttcctccacagtttctgcataactctcaagcatctctaaaacccttttaggtatactctctaatggtaactctacagggcgggaagaagaagaagaagaagagagagtattatctatagtctacagtggaggagggtttttgaaatgaatggggtttgtttgttttgttggttttgtcagggttttgagaatgaatattattcattattattagggtttttcccattaagaagagtattgagttgtaatttgttgtgttgagtttatcccacatggataagagagagtaatgttttggtgagattgtaatataaaacaaataggaggtggaagtgtaggagtatctttgcgcttggggcaa

SEQ ID NO: 303 - DNA, 3627 bp, Cannabis sativa
agcattagttttgctttctaacgaaaaagaaattaaaaatgaacaaaagtcaagtgtttggaacagtattgtttattctcatattcatttggtcatatcatgaaaagtggaaaaactattttcagattcatagtcaaatggtttgcaccttctcatatgatatttaataaagtgtgtgtgacttgtgcagggtttggattcatcagtctttggtgggtttgaaattaattagtaaattgagtgtgcaataacaaggcagtgacgaatattaccttcatttgaaacagcggtatttgttgcagtatcatctacctcggaaccatttacgctaatattatctgattcagaagtacgttcacccgcagaagagctgttattctttctcccaaactttaacagtcgtctaaatccctttgacgattcctttacctgaggcttctccagggtttctggaatcttttccaatttcaggtttctagtatccaatacgtgtgctttcacagagcttgttgctacaggttcggggtttacattgacagcagctttactaataacaacagatttctcagtacgatcttcaaaagaagaaacccgagcatagggggcttggtactgtttttcagcaatattaaggcttgagagctgtggcagcactttgttcacatcgacagtagcaacctaaacattaatgtagtgatgtcaaaaagattccagcgaaccactttgatgaaaattggtctacaatacataattacataatattttcatatcgagcacaacaagaaaagcgtgtagtcataaccaaagttctcttgctgtgttgtgtcatcgaaagaaagtaacaaactacactaaacaactcaacttttcgaatactactaaaagtgaaattattgaaaatttccaatgcatagctacttgcattgcaaccattcatacctcatttgaagtaattttatcctgtatttggccattcaggggctcttcatgaactgtgtttggtgctcggatagttgcataatctgacaccaccgtgatgttgtcctcctttgaatatacatcaggtacagaaggtttctcacattcaagcaccaaaacagtcttttcaaccactggattttcgtctgcttcattatgatgtgagagctttccattgtctttctttacttcagtaccttcagaagttgtagatgacttggccaaattacccttctgtgtcacttcttttgttgtaaatttgctcggggtagtattgggtaacttgggtgttctaattttcagttctggaagagtagcagccttgcttttatcatagtttactatggcagataattttttgctatcagacccatcagatatttttgatttcgactttgactttgacactggctcggtacctcgtgctctcagcgaagaaattggatggctactaatcattttaggctctgataaccttctaatgcgtgacatagatgcttttgttccattctctttctttgcctcgggcaatgaagtcgctgaccggcttatcctgtttccagctgagtgacttcctccaattaacctgctgctgcttttggatgccttttgtgaatcaatggatcccatagaagaagttctagtagggaaccgttgtaaaggtgatgacggtcctggctctgaatcactaaactttgttcctttgtatgagctcggtgaagtcttcgttggaacttgtttccttgtttgctgagcagggacagtactagcccctctggcagcaattctcttttgcctttcaattttcaaagcttctatccgcttcatctctgcctcttcctgtagatacaagtgaaaacgatgaccaatgttcatagaattacagatatgttatgaaataacagcaagtagtaatgtaccttctctttctttactttttggagatcagctttaaagcttctcaacttctcagcacgtgcccgtgcttcttccaaaggactcaattttgaaggcttacctctccttattggcccaacattcttcttcttatcatcttgaagcaatttagatttcgggcccttatctggcttcttagatgtctgattagcattagttgccacctccttacttctcttattttgcgaagcaccctgcgtttcataatccaaagcagggtcatagccaaacgccccgatttcatccccgcgttgaggcctcatacttaattcttcaggttcataatggacttggaccccaccgttctcttctttgccagtggctgaccggaattcagaatccatatgaatagggttgccatttccaacttgatctagtgaagctgatcttaaggcaactatataggaatcatcatccatattttgagaggacctcctgtccatatttctttccacaccttcaaatccattagcagaacttgtaaaccctgattgtttttgcctattaatcataaaatcttcattggatgacctcctatagctcacccttcttccatttacttcagaatagagtacatcgccttcaccatcgatatccccatttatgccatctcttttagaaatcatagcttcatccatagaatttttcggcaagcgagtcatgtttccacttatattttgcatgtccattgcacccccatttcgaactacaccattatcttgccctccaaaaaatataggatcttcaccaccagtattttgacgttgttttgaatgaactttgccgttctccatagagtacataccttgatcaacatcacatttttcatcatcggcgtctctaagtaagaaattctgaaatgcttgccaatgtcctccatctgccaccttcccataacttatttcttccttatcagctgaattgtttttatctgcagattttatattgttgtctttctttcttgaggaccttcgagagttgtttctatcctcgtctgtttcagagcctgaggctgattgtgattcggaatctgaataactgtgtccctttgaaatgtaattaaggtttcgaataacaaccgtgcctgattgttttttacctgaccggctacctctcttacgcgattctcgactttgtgaattttctaactcaacatcatccgacgatcttgttctggaagcatccatatcacatgtttctgattcagcatagctataactactgtccatggagtgccttttctgtcccattctcttaccagaatgcaatcgaggatcctcagctgctggataaggtgactgaaaatatgggctaccagggtaattctgatagtaaggcatgccttgcatgggatatggttgatatccaggcataacaccaggaggagaatgaataggccatggtgggaacatttgatgtggaaactgaccttgtggaggaggaagctggttttccattggagtcttttcatctggaagaaaggtagagaaaacaaacaagtatgttaagcaataaatagttttggaagcttatttttcggtattttctttcatgttgaggagatttgtaatactattacctggtttcccattgctttcagcagcaaattcagcggccacattaggaagcatgacacccgatgcattcatggcagtgaagtctgcacctctagccattgcttcagctgcttca

SEQ ID NO: 304 - DNA, 1093 bp, Cannabis sativa
ccacacaactagcccaggttcctgactcaggcaccaaggtttctgagaatgagttcctcactgtttctgagctcttcactaaccctgacatttcctctggtccttccctccatgctgcattggacaagacaggaatcaagctcgattcgagtttgttacaagctgtgttcgaacatttcgattcgtcccctaagttgttgtactcactgtttctttgggcgatgaagcaacctgcgtttcaaccctctgctgcaatctttaactcgattgtcaatgtgcttgcgaaatcaagggaatttgactcgtcctggtctttgattcttgatcaaatcgagaaaaaggacgaactcactttggttactgaagatacatttgtcatcatgatcaggaggtatgctcgtgcaggtatgcatgaatctgcaattcgagcttttgaattcgcgattacaattgttagttcgagttcagagatgagtttgtttgagattgtgttggattctctttgtaaagaagggcatgttagagaagcttcaagttattttgataggaaaaagaagttggactcgagttggattccatccattcgagtttacaacatactattgaacggttggttcagaatgaggaagctcaaacacgctgagcggctctggatggagatgaaaaaggagaatgttaagcctactgttgtaacatatggtacattggtggaaggttactgtcgaatgcgtcggtctgaaagggcaatcgagctactaagtgagatgaaaacaaaaggaattaagccgaatgctatagtttataatccaataatcgacgctcttggggaagccgggatgttcaaggaggcattgggaatgatggagcggttttcggttctagaatcaggaccaactctctcaacatacaattctctagtgaagggtttttgcaaggcgggaaatcttgttggggcaagtaagattctcaagatgatgataggtaggggatttgtaccaacaccaacaacttataactatttctttaagtacttttcgaagttgggaaagattgaggaagctatgaacttgtatacgaagatgatcgaatcggg

SEQ ID NO: 305 - DNA, 2102 bp, Cannabis sativa
tcttatcgttccaatacttccattgtcacatgggaacgtcatgtacaggtgtcaaatgaaagttaccactctaaaatccactaggaggggccgtccgagaatggcattataggcacttggacaatctaccacaaaagacgtgcagtacgttaatgcataggaaatatattacttctggctatacccccattcagcgtaactgggagttggatcttccccatgggtggtagagaatctctattaaagccttgaagctggatcgggcaaggcatacgatttgcttaaactaacccaatggcctgaaaagcagccttaaatagtatgttaaccgaactcccattatccacaaagatccaggatgctcttttgttgcaacctaagcctcgatcaccaattgatcattgtgggggaaacatacatgtttaacatcttcttccgtgaaggtaattggaaaatttaacatttgtggcttttgtactcattgagatacctttcttgagtgttcttggtgcttctagagatatgcatgccttcaaaaatagtggccacatgactgtccattgaaggtggagtggcacctaggggatattggttccctagtttgggagcttatgcatttttggcctggatgtttggaccccaaaggggactgtattctcagaggttgttggtaaaccactccatgaggaggatttattgctccacgctatccaggaattaccaattgtccctgggctaccctttgtcctagatagataatcaaaatccttatccacttggaaagatggccatccctgatgaggttttctatttcattcttcaaataatcacactcattttttgtatgctcgacatcaccatggtattcacacccttcatttgcatctcttttatttctacctcccgtgtacattggaggcgacttccagtaatgaactgtgtttcagctagctcggtagacattctcatttgtgtttactagattggtatattcgaaagactaggctttatacccttttctctctttcttcagagtttcattctagctttgactttttttttacttctcttactccaggactatcttacaactgactctgtaacttctgtttattggttaatttgtatttgttcgggacacttcatctagtctgtgcctctctaaaattaagaaaattttctacataggcacataccttgaggcagcatgtccgtagacagttggagttgtatattttgttatgggaggtagaatagatggaactgggagctgcgatgtatatgtaaaattactgacatattaattgaagttagagaagccacctcgaaggcttgagtgtaagaatcctccaacttaataaaaccttgggcctttgtcaagatgtttgacaaagtgtcacacctttgtctttgtatttcattccagaataggaatcctactaaaatccccaactgtagagccactaacttcatgtcatcattgacttttgtcttggcagtttcctccatcatccgttggatataggccttgaggctttccccaaattactacttgatgttggtcagtgagctgacctccatattaaagtcctcagcagctacaaattgcttctgaaacatggattataaatccttttagttttgaatagatccagatggcaaccttttctaccagtcttttgcggattcagacaaagtcaaatagaaacacagacacttcccatcatcatttacttgcgccacctgtattaatctattgtacttggacagatgggccttggggcccgtcctaacctcgtacaactccatttgcagtattcgaatttttttttggcagttgtgcctcaatgattcttttaacacatggctctagatcctcatcctttgagttggatacgactccactttgtatttaggccaagcaatttgtgagttttattaaaaaagtaatttgatcctctagccgtttggtgtgatcatttgcgagctcacgtccacgaattctatagttggtgttgtttcttaaattgcctccatgaggtcttgatttctcaccctttgatttgtcccgttttgtatttagatggtcctagaggtctatt

SEQ ID NO: 306 - DNA, 7761 bp, Cannabis sativa
atatatatatttttttttacaataaaagatataaactcgctacctgtttctacataaaatatagtattgagttagagcagttaggaattaggattgtcctgtaaataattaatggtattttatatttattattgaaataaaataaatgatataatattaaattataccaattacaataacttaattagtatttgtgttttctaaattttaatatataccaaatcgtattttttgaatttttaggccactaaaaatctctattgaactatttaaattgttgaattcaaaaattttcttctaatcttacaaacaaaaagtaaataaaaattcaaataacaacatttgtatatgttaaaatttagaaacatgattttgtgcatattaaaatttaaatagtacaatttaatacttagataatcatcatattagtataattgaactaaataaaaattcttaaatctgatcatctcaaaataaaattttaacaactaaataaatttgagaacataatttaatataagtgaaaattccgaagtcaaaaatcctaataaccataataatttaacactaactactgaggcgaagagacatggggtcatgtgtggacacatgtttcccactcaacttttaataatttagttttttgtataaatttttttgtatatttttaaatttacctccataaatttattttttttaattttgtcatcacattttttttttctttataaatttatatttctcattttttttcttcacataatttcatatttaatttttatttttcactttattttaatatattaatttttttcgttataaagtttatatttctttctctaataaaaatattttttttattaatgcccatttatatatataaaaaaaatttacccctaatatttgtggctggctcctccactgagtagctaagtgagcaccgttagcatttgtagttgagttagagcaatgctattttgtagttatgtatatagattgtgtatcaaacatttcatacgagaatctagtggaggcaatttccttggttgatttcattacatgggccaaacttatttcaaagcccacaaacaccaacactaaccacatgtttctagaacctacacgtggcagattacaagaaaacaaaacacaacacaaccctctcttttttctcttcattcaaaatctccttctttctctctcatctcatatcagctgaagtttctagccacccagctgtccactcagtacgcacgtgaccccagaacgccaagtcggccaactatacaatttcgccacgtcatcaaggggacccacgtggctccctcgatgcgcttttacagacgtatccctcctcatcccagtatttgagtttgtggacgagaattgatgagacgagctacgacaagttttagaaaattaaaaaaagaaatattaaagaaatgaaaaaggagtagggaaaaagcgaaagggtgcgctgatgctgtgtatctagccactaaattcttgccacttggcatcatcctaagaactcactcgtttcaggtctgggcttgtagcctcaaaaaaataaagaaaggtacaattttttatttttatttaaaaaaatattattagaaaataataaacccacaagaaatagttgtggctgagattgatcgacccagaaatgcttgcctgttgatggtgcttccttcctttactactaaaactctcttctttcattcttttccttctcctacccttgatctcttcccctattcatcttttctgattttgctttactacaatttattttctttggtcaattttcgtctctccatagccggaaacaatgagtttaaggaagatttcacggtgagctggctttcatgcatgatcgagcaccatacgatttggttgggagttgtttaatactacaccatgtcgttaccagaaggtatggagtaattttgatgcatttatttatttcttttttaaaatttactttcagtttggttgctgaggagcttggaggaaaaaggaaaactggtttctaaatttgattggaaaatatatatgtattttttaaaaataaaagctggatcgactaagtaagcctgccaattgagctgttgactctgttggagaggttttgtttagttggctatgtgagattcggtttaaatttgatttgaaattttgtttttccttctcttcctattttcctggcaaccaaacagatggttaaacttaaaccacgaagcaaagcactgtatagatgcattgtttgaggggtggatgtagaaatggttgttgttgttgttgagtactgattcaagttttctcttatcttgtttgttttgtgtctcgctcttaaaggttttggcgtcttcgggttcgttttggtgaggattctgaaaaaggaatttacttttacttctttcggagaagtatctctctgcatctctctttgcggtggattctgaaaattttcaaaatcgtattgtattttgtactaatataattcaaaattagtaacttcgctgctcgggaaaatcaaattgcttaatcttcttgaattaagaatttgagacggatctctaccgattgctgccacttgttttcttttgcagtgacagttctttatcaggcgttgttgactacttctacaaccacggctctactggtaatagcttttgattccgtccgaaatcatgggaagttttctttttacccgttgctcgtcagggaggatttgaagcagcggcagctgcccaggtccgataatggacacatactcttccggagaagaccttattattaaggtgaaattgatgtgccattcaattttttttttttttatctttgtgataattaaacattatgctgaacttaaaaacgtgtgatgggtattaaagttggacttataaaacttctgtaatggcagacacgaaagccgtatactattacaaagcaacgagagcgatggacagaggaagagcataataggttccttgaggccttgaagctctatggacgagcctggcagcgtattgaaggttactatttggatatacttctaacttgttttttcatatttgttgttctttctcttccttacttatggctattatgctctaagtcaagttttatagtttaaggtagtatatgcatatttacactaacttgaaaaaaaaaattgagttcttgtaaaagagttcaacccgcaaggcatctcctgttagcaatgacataaatgctagtttctgtatatttctcttaatcgggcgcctgcctctctctcttcctgtttttgtttctacttggtggttcgcagaacatataggaacaaagactgctgtgcaaatcagaagtcatgcacagaaattcttttcaaaggtcaattggtaccttcttaccttattctcctatgagatatgttttcttactactaaccatttggtgatcagtaatatcagtcttataatttgcaattctattgtctgaaatatagtttcttagtttgcctgagtgatgttttaccaattttagatttgtttttgcctgtttgatgtttgatacaattatgagaagtatattttattattccttttacatgcagacatacattaaggaaaaataaatcttggtcagtaagtagttgttgtagtgggaaaagggccaattttttggatctccttgaaacactgcaaaggcttatactggtgaacataaacatctttcttttatgacatgagtcagaaatatatatgtaagcataatgttgtcacagtttttaatggtccatgtagcgtttctattatgctacatgattgattgggtgccttttgcatcttactttggcggtagctacttatacagctagtactaatagggtaagaatgagaataagaaaaagttagctgttccatttactctagcatacaatagttagcaagcttatgaattacataaaacatctgcagagattgctaaacttcctagctctgaagttcttattttggacagttagcttttcctctgtagactgaaagattatttggttttcatatcagtatgaacgaatctcccttatcataatatctcaagagggaatttagaagacgtaaaatttggaagataaaataaagttatattgaggtacttttgatggataggttgggcacttggtacccagtagagatagatttaaaattaaataatagggttgtcattacactacctgaggtttgtattaccttctcaaaattgcttgaggatgtttttacttctctcaccttgaatgaagataaataaattataggttcagaatatcatagattctatagtattctgcaaactcttggtctgaaagggcctaaccttttagcacagtatatgagttgggttagtatgctcttgtgttatcttagcttgtgcagctgttaaggtaagttaaatcttagaggttccttgtaatataatatttttttccgatagttgtattattgatgagttgatttgacagtctgatagatctgggctttgtggtcatatttccccatcaagtaggcacattcttatgataatggagctttaatctaaaaaatgttttaccgaatatccttgtgtttctatccctatatcattagtgattctcattctataatagaaggggggcttggccaaaccagccataaccccgcccctcttttttgtatattaataagcagccaatgtttgaagaaatggtcataagttcaaatcaattgtacatggagattatacagcttattagatccaaccaccactttagttttggcttcatcttgtacagtctgccagtgaatttcttaacatttaaacaaggagtcagtttactttttggcaatcataggcattgttcagtagtgttttggcaagatcaaaaaaaccttttttggtaggttcttctctgcagatatgccttgtattaaccaacttcatgactttgtagtagatcctttatgcttccttcttagtggccttttactgggatatttttcatcattaggctagtggccagcaatgtcttgtggcttagaatgcttagttatctggaaagaagttttaccagttatgatacagtatttttatatggatgatatagtcatgatatgaataaactagttaggttttcggggtagagaaaatttgggttcgtttgagtcactgaagaagttcgctagattagtgaagtatttgtctttccagagacatcggctaacagtgaaatgctattatagtagagttggtggaactaatagaagatgttctcctacatacagagacttaaggaagaaatgtcaaatgtttccatcgccttattagttctacaaagagttgctttcttgtggtgggcatactgagatggatcatgggggttaaagcaatgaaaacaaatgagttttatgttaagtacctccactcttggtgagatcagatttacccgtcatttggtcaaaaaataagcatgattttctgttttaatgtctgtaataggagtggaggcattgcagaatagatcgtttacagaattatggataggtgaagagactggaactgcagccacttgtttagcctattggtagttgatagaccgtgagttataatctcacatttagcctatcagtaattcacattgatttcaattttggaggcgtacattttagatcccttcactcccataatttatatctatgtgtgtatacatatacatatatactaaagggaaataatccagtattgacctactttgatattgcttgattaagtatatactctagtgtcaggctactttgatattggttaatcatgtaatcttgagattagaattgttaggattgtgtataacatctattcttaccccatttaaatactaaaagaaaaaactactagcaggagtttttctgggccatgtgggtagctgtttctagggtagtccaaacggtttaacttgatcgattgttgtcaattggtttactgatgtgattgaccttttctgcttttttgttttttcttttccttcatagaacttctaggattatataaaacgaaattaaatatgcactaataactgagggcagtccctggtagtccttactattttttacatttcaatttgttacattatacatttttttttttcttttttaaaatggctttgtctgtaaattcaggggaaaagctttcacacatcattggaagttttaaacatgatttgtaatggcatttcatggaaagccaccaatttctaattccattcttctcattaccatcacatctagtcctagaccaggccacaggccacaatctatttattcccacatgaacttgtaagaattttgagattttcttctactgcatcaatattaaatagctattttctgattttaaactgctgctgtgtcataagtaatttgttattctaggaaggaaaaattttggttttgtaagagatgatctgagttatggccgtttattgtgtttgacgtgacaatggactttgtttacttcaactgatacatggaatgctgatttatttattgattacagttggaaaaggaggctctcgttaaaggtgttccagtagggcgcgccattgatatagatattccacctccacgccctaaaaggaaacctagcaatccttaccctcgaaagactggtgttggtcctctcacatcacaggtaggaggaaaagatgaaaaatatttatcagaatcatcttctcactgtaagcaagtactggatttggagaaagagccagttcttgaggttattgcctcctctccctgttatctgaaacattgttcattcaccccagttcttacttcagttcataatttttgtgcgacttctttttctcaaaatcagggaccggatggagatggcaaaccaacacaggcgaaagaaaaccacgatgacgattgctcaggtctcacccagcttcaagatactcaatgttcttctgttcacaaaagctccctacctaagccacctgtggggcttggaaatgcttgcacttttagggaatttgtgcctttaatgaaaaaggcgaatcaggatgacacaggtggatcttatgtcactgttgaatttgacaggaatgaaaacaagcagaagtccgatgccgaggagatggcacaagataatgacacaagcaaaggcttaaagttggaaaatcctaatgcttcatatgagaaattggttgaaggtgaaaaaatgaatgacttgaataatggattgccaactgaggagatgcaaaccactcaaaactacccaaggcatgtgcctgtgcatgttcttgatggaaacattggaaattgtactcgaactcctactgacaccacatttaatccaataggagagattaatggccacactaattttttcacaaattcagcggcatctactactactgagcatcaatctaatgcatcaagatcttcaatccatccatcatttccggttttacatcctcaatttacctcaattcgccccaatcaagaggactatcagtccttcctccatatgtcgtccacattttacagtctcattgtatctacacttcttcaaaacccagtagcacatgccgcagcaagctttgcagctgcatattggccctattccaatgtagaaacttcttcagattctcttgcatgcaaccaaagtggattttcaccaagagaaatgaactctgctccaagtatggcagcggttgctgctgctactgtagct

SEQ ID NO: 307 - DNA, 3294 bp, Cannabis sativa
  modified_base (2151)..(2157): a, c, t, g, unknown or other
gttcgagttcgggtggaacagatgtaggtgggcatggtcaaggtgcgaattaggttaggctaattgaactttttttttctttttttatgtgaaaaattgttaataaggtgatacatgggtcttaaaaatatatgttttgtcaataaaaaccacacttctaaattatggaaatggaaggaaatacttgggaaaatttaatgcagtatttacaaaatagggtcaaaaaacaaatagagaaataacataaaatgtgtctagtcacccaattttgaaaactctccaaccaatcaatagctaaaatttgaagcaataaatacataaatgtacaatgaaatgcactaactcatcttcttcaatccctcacttccttctcttgagctggttctataccttgcacatatggtaaatgccttaaataaataagaaataatatttaatctatacatgtttctcacatcacatatttgaatctaatttctcaagtttatactgttttatacttcgagtaatactaaaagataccagtgatatcaaacaccattacaaaatatcatacagttattagtgtaattaaatatcaacttttacatattttaatttattaactattgcaaaacatttaactgatacctaatagaaatgctcttttgtctaaataccaaatattcaacacactttcttataataataaaacccgaatcaagaaatcacatgacaaaataagagaaaaaagtgtgaatacaagtatttgaaatgaaaaaagatgtaaaaaagtagcaagtttatggtagaaattttcccaaagtaatttacaaatctttgtagactcaccagttttgcccttcttggggaaaatttcgattgtagagaggaagctcgaagaggaaaattttcttgaaccacgatggcaagttcccgtaaacttgtggaggcagcggaatcagagggctgaaatgaacaaaaaaagtgtcaagaactcggttttcttaaacacaacagaagagaaagtaacgatgaagggtaactaacctcgttgttttcttataagtcgcgtatccagccacatttccaaacttcttatccgacgaggcctaatttcgaaatgtacatgacttcacaaacaagttctagaaagtagtaagtagaccatgaaaaaagagagagtacacaaacctctagcaatggaattccgctaatgaaaagaagcaacaaggtaagaaagataggaccgatgatcacgagccactctgcaccgtctagtatgggagttgacgccacaaaaatcccccaccataagaaaatctaagcataacacctttgtcaatgtcacaaaacacatataccgaaaacaattgcagcaatagtaacaagaactacgagcaatacagtgagtagccttattagcagatcatcgttgtacatccaataatattcccaagtaactattgaagatacataatttgtagcaatttagtggcatgacaatactactaagtactaacctctccaaagtaattcggatggcgagtgtatttccacaacccgacattgcaccacttccctctattttccggggcgtttttgaattgtaatttttgttgatctgctgtggcctcaattaaaaatcctataagccaaatgatccaaccaattatgtctgcagcttcaaaagatggttccctattgctagcattaaccactgtaacgggtaaactcacagtccacacccacacagcctgtaaaaaagacacgagttttagttgcgaaaaaacttagtcagaaggtgaaaagagagaaattttacaaacctgaaatatccagaaaaccgccaatttcccaagattttgacgcatttcatcgaaacgcctatcctcgccccattgtaaaatcctggtcaatgcatttagaatagataacaaaatcaagattgtatttagtatcagaaaatcaacagcctataagctacattataaagataattgacttcaaaacataatgaatcaatagaaaagaaattcttccatatagcagttgacatactaggaagaatcaatgttttggagacgaaaaagaagaagccaaaatggctataaaacatagcacagagtggagggagatccacaaggtctagtttcattcaagtaacggatnnnnnnnaattgaaaggatcttctgatcgatccagatatcattttgatttcattagtaataagaattcagaatatcacatattgatcaagaaattttacaactaaaataaagatcaattttttggtatccttccttgaaccaaaccgattccttaaatgtctttctttctgggtattcacgaaatgtgagaaacgatgaaaaatggagaaattctatgcaaaagaatccaagttgctgagatatgatagtttcttaaaatttacaaaatatcaaagagaatctgtggataaacaagaaataaacatatcagcttttaccttaacaataaaaacagtccaaggcgaagaccccatactactaccagacaactcaaaacaacctgaaagaaagagctgacaaagtcatatacatgaatgaagtgataagcttgaattgaaggacaatctaacaaaagatcattttgcaagtaaacaaaatcatattaggccttaatgttagtctcactcattagaattatggaggccgagttatcaagtccttagtggttgtgttcggtgtttctaaatttgtgtcttctaatttggttggctagtttggattatttgttagtttagcctataaaaacagagagtatgatattccgagcagaatgtctcttgccaaccaagcagtaccctcggcccaaaaagaccaagtttctcgaataacttaggattttgtatttgttctcgctcttatcaatcaactaccttttcgtagttctttcaagaaccgaattggagcacaagtgtgtatatcattgtcacaataatctgaacacacaagttcaagtcaaataaggcaacacaataagaacatcaacaatcatgctccataaacacatttctcagctcacacaaggagttaaggctcaaaaaaatgaactccaagtggttctctataactgtagagacctccctttacttttctattatttattatttcaatgccaatatttattcaatcagctccaacagcacaaaggactagggtttaattacagatgcaaaattgaagctaaagaaattcaaggaaagctttattaggggaaaaagaataaaactttaccaactgaaaatgacttaaaattcaattactatgtct

SEQ ID NO: 308 - DNA, 3465 bp, Cannabis sativa
aatgagtggatttgcagaactaaacattccttcaccatttactagttaacaacagtcaagaaatttgaggtaaccattattagttgaacagcaatgccgtgaattggttccaatacaacagagtcccattctacattggattcaagtcaaaactatataaaagagagcaactatccatcattcttactctctatctcttaccaaacaaagtttaaagttccatcatttggaaacaagaaatagtcaatagaaagtatgttacaaggttgcaacaaagaacaaaattcataaacattttagcaataaaaagtaaaaatcttagattatagactaaacaattctccacagaatagatttttgataaaataaagaaaagaaagagaacgagaagaatatgtagggaggaagtggtagaaaccaacctgttcaaatccatgatggacaattggcaaaactattggggtaacaggagcacgaataataagactggctgttccccattttaatcttcttataggtgtatcttcttgggaaacttttccttctggaaatgtgtggagctgccaaataaaggctcgactcagaaaacctttacatgaacactaaaaagttgcctttcttataataagtcaataaatcttgtaaatttccaattaactgataatgatacaaaatttctttcagaccagcatcagtaataaagttcaaactcttttgttcctacatgtgacttggaatctatggaatgtacattgtgtttacactaggtttaatggtaagcagcttccaacagtatcaatgaatttgactacgatgatcatgaggtaaaagtattttgcttgaatacacacactcaatagtcttaagacatttgaatgtgtaaagtaggcattacggatattgataattcaatggatttttccgaaggaaatgaatccatccatactcaagattcacctatatatgtgtccacattgtttgaacattttaacaagcttcacttaggttttgcactaattcaaacatcattacataataacacaatgtacttacatatgcacataccagaaagcttgtataagaaagattcacagatcattgttaattttaaataaattcacatctttattaccttcgtccaaactgcagtataaattttataaaacttaagaaataaaaataagaagaaaaggtaaggggattccagactctcatattgcctatgccaataggaaaatcaatataaaatttcaattggtgtgacatttgagaattcaaaagatgatggaaaaagtaagtacccatcccccattgcttaattgtgcaacagcttcattcatgtgttgttgatatatcccaccacctcttgtaataggtatgcacttccctgcatattattccgtgctataaacaattaaaataataattacgtacagtaaaatagattgatcaaaacttctagtacaacatatacatcagctttcatttttgcaaacattttgaaccatgctaatgttcatgtctacacgcattcagtacacattcaagtttcgaccccttccataccatatgtacctgttagactgaatccacatcaacatatccacctcccttcatcaaaattttcttataagttaacatgatttaacataattcagtccaatagcccaaatttcctcataagttacgctcttatatgtcattaggatctaaaaagcaaccccttcacttctattgcccacacttgactatgataaagaaaatggtatcataattatacaataaatatcacattgcaacctgtaccttgacaaaagaacctacagtatcgtgctaaatatcagaataataaaaagacccacaaagttgcatgtacaatacacaaacattttgagctccaaatcaaatcacatgtaacttatagcctatagggagcatgccatggggctgatttctctagctaaatgttattttacctataagtaatacttatttgtatgctaacccataatgctaaacggtatcagggcagaaaaaccactagcacagtgataacaagaacaaaaatgaagatacagaaaggattacaaattaacatatctgagcttaacataagtgctaataataccataacaaaattattaaaacatccacaaagttgtatgtacagtacacaaaacattttaggctcataaacaaacttgctgagctccaaatcaacatcccatgggactaattgctcaaataaaggttattttgtaagctacatcccagctaaactgcaccagaacagaagtggaaaaaaattaaataagaattggcataccaagtctgaagatataagaatacagcggattcttaaagcagatgtcttcagctgcaagaacccagcgagcgaggttaggatccatggtgggaaagcctttgaatccccacataaccggatcatccaaggtggacatgtgattgctaacagtgataagaggagtagcagggggccgagatcgaacgagagaaaggagggcgtcggcattgcgaacagaggtggagttgagaaatgaagctaccaatttggcaaaggttcctaccgctccgatcaccatcgtcctgggaatccctcggaggtgagtcccccgacctgcccactccattttccgtggtcctatcttcttctgtcaaccatggaagggaatggagacttaaatgccttgtggtgtagttgccagttaaactctactctttaattgtaataatcaagcaatatagttttaaaaaacacaaaaataaaatagatgcaggaatgaaaagggttcttcgtaaaatagtattaactattcggaaattctacaacgcacccctaaaaaagatacattaatacacttttatttattttagcacccaaaataattttttagtcaaatttcttttcatggtcatgtacgttatagttatttaagacatcttacaaaattttaagaaatttagaaaagcataacacgccaaaaactacgttcaaacaatgtgttgcatgtgtgactattttattttatacgcgtgtaaaatagactgtttaaacattgtttactatattataaattattcggaatttttcaaaaatttgtaggttatcttaaatagctataacgtacatgaatatgaaaaaaaattagactaaaaaatttttttggatgccgaaacaagttaagagtgtatcaatacatctcttttaaggaagtacattgtagaatcacccctaactattttgtttgactaatatattattatattgtcatgtatgtattatctgttcttacttatgattatttattgattattttcattaatattctgagaaagaatttaaacaaccatgtctcacaggatcgttataataattgaaaaacaaaatttcttctctaggtatatactatgaatggaggcaaaatgctattttttttttttttt

SEQ ID NO: 309 - DNA, 6760 bp, Cannabis sativa
aaaaaaaaaaaaaaaatccaaaacgaaatgaccaatcttgtaacatttttcaatatgttttcaaaaaaaaaaaaaagtggttgacttttgaaagtagtgtcattatagtaaaattatacatccatatgtttctataataacgtctagtaaatttgacattaaaataaattttgttttgattatgtccctgtgaatatatatagataaactgtcttatcagataaattacttgcaactcagcaagtattgccatcagattggttacatagaaaagaagagagaaaacaacattttggggattgtgtctgatgattccaaaaatgcaatggagataatatttttgtttaattatgtatagctagcaatacatgaaacaaaattataaacttattaaaattatgtaccgactccattaaataaaattcatgtaggacttgttgtttaggctcacggcctaactgagtaaagttgaatgtaagaacattttaaatgtgttaaagtccgagtaaagaaaagagagcattctactaggaaatactaaggataaatgccaataattattttttttttattattattagtagaatgaaaagaaacaaattgaatgtcaagtaaaaagaacataccgcatttgaatgtaaaggatttgaaagacctgatagaagggctgatctctccatcagtatggtcagatacatggtgggatgcgattttggtccataaaagtccatcgccttttgccagttcctttcagcaagagatgcatactgcttgacccgtacgagagtgttgccttcacctttaccaaagttacttttcttgtgacctgactctaaaaacttcaaacaacaatccctctggtaacaagctagctgaaaataagcatatgcagcctcttgtttgcgcaattcacctagtgattcatacatggacaaggcctccctaatggcatcattagctgaaatctcatgtttttgcacttcttttcttgttcgtctgccattactgaaacacaaatgctcatcttctgtggctccacttctgtaaacttctgcagttacatctttccttgccaaaagcatgccaagcctcagatatgtatgaccaaattgtgtatatacctctgtccgcagattgcttaacatagcctcatcttctccttccacggtatttaattcagactttgctgctccataaaatctaagtgattcactgtattcaagttttgcagtctctaaagcatggctgtatgcattatgaaaaagtccatgtacctcaagatcattgatttttgacaccatggcttcagctaatcctctcctaccatgacctaagttacaatttattaatattatattagtgtggtcagaaacttctctaaatgcttttatagcatctgcgaatgcaatttctgcttttttcagttctttcctttcaagtctgtatcttccaagttcattgcatacccaccctatctttttaacaacaggttgcagttctcccaaaccagatgaaaattcagtcactgcttttctggcttctttataacaggttaaagcagcagacaaatggtattcgacatctccaactataggacctcgaaggtacttaaatatgccaccattttttcctctaggtgtttcacttggaggaatatctgattgagaagtcatagatgatcccatgtcatgcattttcgaagtgtcgccagttttttcagaattggtagttgccacttcttttacaacaaattcatttgcattagaaacatctgctaaaagtccaaaatctctattgtggtgcaattgcccaccatcagcagtttgaatgttttcctttttgccactagtatttccatcttcatgatctgccaaaagtgaatagatgttattctttgcataagattttttgttatgcttcctgccataagctgttgagtgcacatctccattcctactacttgcgctgcttccactgtttgccctatcactctggcagctgcagtttaccagagaacatgaactgcagttcttcatatactgcccgagcttcttcttgagccttttaacttccttaacgacctcagatgatactttcaacactgcagtagaagattttctctctgtttctatcgagatctcatcacccttaaccatatagttttcaacatatatatctccaactagtgtccatgctttggcccagaataagtatgatgaagacaactgctcagcagtaagacttccatttgagctagatagcacatctttcccatcaccattgtatgatctcatcctgtcattttcatagttgaattttgtttgcaacaatgagcaacctatcattgatgagatgaatctcgagtccttaagatgctgaggcattgatccataaacagaacatgccaactctacaaccttcaatgcttgatgcaactggccatcttccttgtatgcatgcccaagtgccaaataggattctcccagcaaaagaacaagtttccacagcttatgatccaactttgatcttggaagccattccttaatgtcacaaacttcaatacaatcagcatcaccgcatgcacaaattgaaagatccatggatggaggtggtgtatctggagtttcactatcctggtccttcaactctgattcagtgttctgcaattggcgcatccacctaagagatttaattgcctgagaaacatgatgtattgcagctaacttagaagagattggatcagcaacagtttggacaacatgtgtggttgatgcagacaaatcgtacaatgcacagcttccatcatcacaagatgttggtacaacatcttgagaatctccaatatctgttgtacttgatgttataggttcaattggagaagatgcattcgcctccaatgtcatctttattgaagtgtctgttactaattcttcaaaacattctctaccttcacataaagaccgctcttcagctaccacagaggaaacatgttcactgatatccaaatcagaaacgttgttcagaaagtatgaggactcttcctcagcatcagagacagtaatttcacattctacaggaaaagctttagacatcatttccagatcttcatgatgattcaaaataagccttgcaaattgctcatgtgcaaatgctcgtacaacctgtaaagatgattacaaagctcacttgtaatggtgtacctagaaatgacacgtgaataataattatcaactgttcctgaagctaaagttaccaaatgatcgggttcttccagaaactctagacatttcttgatgaattttgcacattttgccctactatcaggtgcctgccaaaaaaaaaaaaccacagaaacttgtaattcaagcaacaaatatggtaatatgcatcaaagacaagatttatatctcctccacaccattgaaagtgagagtctgtgagcaattcgatataagagagtccccaaagaatacaaggagtcgcttcttcctttatgcactattgaaggcagggaacttgagcaatcatcacaatcactggatgaatggtttttgggaatagcagaaagatcaaaaagttgaataacatcttcaccagcacttttatacagctgcaaatttttggagagacggtcaatgaacaattgaaaggattaaaccttactgaaaggaaaacatatatcgaagctcacgaaaaaattgtatcacaacagtacccaatatgctccaggttcttgtttgcaattttcttgaaggaacctcaaaacagaaaggccgttttgttggacaacatatggatgaaaagcaggggtaccatcctcagagattccttttaataaaaatatatcatcagttttcagaagttcataaccctggacaacaccattttgatgataacaaatcgccaactctggtacacttgccataacattgtcaagccaggcttcaagccatgttaatggagtaatctatgaataaattaaaacgtgagaaacaaagacaattcaaaatcatgatatcaatgttaaggcatgtcaaatagtttttagtacctctcttgtaacatcccacaaatgcaagctaacagcgacatatttttcattactgaacaaaagcaagtcactaccaaggagcatccggaaattgtgaaattgccaaaacaaaacccttagaaatccatcatcactaactcttttatgtttatcagagtcttgcactgttgtcctggtcttctcactaacttgtgaaacttttttcataggatcaggacccttattccttttattcttcttattaccccaaaacaaaccatcatgcttaaattgtgcatagcctgaagaatgatttgatccttcatgttgaacaacatccggtcgccccacaaactgggcacttactcctggaagaacagaagaatttgactgctcctgtgatggcacgtgatgagctggtggacaatcacaagcctcaactcttactgaatgcatggcgaagttcaaaaacaaagaatctgcagattttgtttgactgttatgtcttctaatgagcttttcaccctcttcaacatcaggcctacactaagcaaaatcatacagttacaaatttaaacaaggaataacaatattaacaaaatagcaaagagaacagtcagcaattatatatacaaacccagcatttagaacaagtgtttgtccaattcgttgaactgcaattgacaaacgagccttggaatatggaatcttgaaaatctgcttcagaatatcagctggagcaatcacatctatctcatctccatactcagccaaaccagttacagcaagagcctcacatttcttggtgagatttgatgaaacagtgtcaacatcccaggataaatctgacatgtttcagcagcaataatatccttagattttcaaagattcaaatagaaagaaattaatgtgtcactgattattgggatgatatttctgagcacctgccagcaatttgtgcataaagtagtatttgctcccagaaaattatttatgagatacttttatgacagtattaacacttcaatcaaatggaaatttcatctccaacactacttaatcataaactaaataatttgcaagctaccatgtaatatagaaaggaaaaaaaagataataaaatggtgactaaagtattggaaaaattgatcataaacattctcaaaagatttagataaaccacaaactatgctatgtgtttatatagtcatgaaaaacgaagaaaagtattaatgattttaatatactgatacagttattacagtaacaatcataatattcatggttataatatgtgaaaggtttaggtgttcttggagtcacagcagcttcttctagaactgacctagtgctttgataaaagcacaatacccaactcctgtaattaaagattacttatctattgtcaatccatatgccccctccttttttcttttttgaagcaaaaaaagactacttttatcattgataacaatccctataatacaaagaatgagaaagtgtacatgaagagtaattctcaaagtagaacagaaaatttatattgttttccaattaagaataagtggagaaagtggagtatttacattcctttgccgaagcccaaagtgaagcaaggaacataatttatatattaaaaaaaaaaaaaaaagtacattagaaagaggggaaataaaaacgatgataattaacttaatattctcccacgaagaaaataaatccattcctttttcttaatgtttctttccaacaacctaaagaattccctacaccttacagttctacataactatcgtcattttgggaagaggtaactaaatggaaccaaatggtattttccaagtctaaagtaacttgactgttccaactgtgtgaagtaacacttcatttaatacatttaattagtggttatactttctgctactcaaaccaagagcttcaaggagccctgtacgaaatttctaatgggaaaaagtactaaaatctaatcggtcaaattacataaaaactcaataatcctcaagaaagtaacctaaagtcatcatcaataacgcaaacaatagttccaaagaaagtttcctaattaatttgttagtttaacacctcaaaagatcgaatttgtaactcatttcctaattcctatgcacacaagaatgttgggttagaggcctaatctagagttttcactgcccttggctttttgtccctatacaagcatcaagctgtgacgctgcctgctcgagagtgagttcaataaccaccttagaatcatggcatatgttaaaaagctcataaattttctaaactccccactacttcctcctcatccacaatcaacaactatatcttcttgtattgccacagacccatcagcactctagttaatatccaagtagcttcataaagtagcacaggcaaaactaacagctcacccattcatcctaaaccatgtgaatgagagtgtctaaatagaagaagcatagtttttgttgataagcatcaaattgaatgtcaatatgaagatgaaaaatacctccttcactgggcctgacaattggaagaaccttatctggaaaagtggagagtagaggagggctattaagatcagtctccgttggaagcatgcgataacgaggagcagtcacactgtagaaagaggataaagaaacaaactaaagcatcatcatcacaaaaacttcatgactccaattcatcaaacacgtatatata

SEQ ID NO: 310 - DNA, 1585 bp, Cannabis sativa
atggtacttttttttctatgctgagaaaattataaactagcattaacctatcactttcacgaagggtccttctcatcatttctatttggagtttccttttagcttttgaggcctgaatgattagaaaagtggacaaaaatgtgtaaatgggtaatgaaaatttggaaaatagaaaatatcctaaagtaatggttgccattgttcatggccctaaactaatatggcctcaataattcagcatttcttgtggattgggtcgcctggatgtcttactcttacacttagtcactggactttggcattttctgaataattggctttcttggttcatattcataattggtgcggcctagcctacctaagcactaccagccacttatacttaagagagcaacactaaccatatggacaccgcatgctaatcttatgttccaattccaccacgctaaatattaatctatatagggaaatttcactttcttttgttgaaagatctcactaacaaataaaacccccataataatactacaaatgtatgttaattatactcctctcacaaacacacacgacgcccataaattatggcttctaatacttcatttctaatacttttttgtattgacaacccaaaaagtgacctctaaaaatgagtcttagaggcgacttttgtcatccctataaaacaattgaaaatcgctcctatttgaaatcaatatttgggatggcaacttatactttttagaggcaacttatcgaccctaatagtaagtattagaagaaactttgtcgcctcgaatagtttttaaatttcaaaaacaataaattatttaattatttttataattaatatatttaacattaaaatattaaaatttgtgaaattgacatcagaagtctactccgagcaaactcagtcgtgtccatctccattcttagttcaaccagatgtggaaaaggagaccccaatatcaaaagagaccaaagctttatgaaaaaagaatagaagaagattgacgcattacaatgtataaactaattgattttgggccaaatctaccaaaataaaagctgcaataatattgaatctttaagatacataaatgcgcttatgggatttctctttgcagaggttttattactatataaactatattcattttaaaaataaataaaaccaaaaacacagaaaatcacacatacatatgtatgtacaagaggtttccgctaagaggtcgagcttcagtatgtggcaaatgttcgacatatttgctcgacgaagctcttttattcttcccattgatggaatatgaatttgtacttggtgatcatattcttcttcgttgttttggctgaagtttctcaattcaatttgaattcgaatgtcccaaattaagattttgattaatttatttaggagtaaggattgctctaaggtaccaataaaataaagagacaaattttaccaatttctgaaaatggcagaacctcttgaattcgttgattactgattaggataaatctttacatcacactccatcaactcagttttccgacggcattgtctcatgtagtgatcgattagggc

SEQ ID NO: 311 - DNA, 2422 bp, Cannabis sativa
taaccatatattttatttgtgaatttcaagtaatgatgaaaaacattcatttaaaacatgggatcatctgtacttttcttcaaagacaattagaaatggttatatcctgatttgaactttgagtcttatctatatcagtataacatataacagaatagtatatttcagtatattcatatcatgacatgaccaagtttcattttctgggtgtggttcaaaacaggcaagaaaaagagagaaagattcaagttgcaatattttgatacaaaaggaatctggtcatgatgcaggtactaagaaaacttttctttttaattattgaaaagatgagggatataactgcaaaattgaacaattttcattgccaagaaagcaaccaatcttcttcctttttatcaacttttctctttagaatctcactttcatcattaaacctttcacttattgactcactctttcatatcttcatagccaaaaaaccaaagcaaaactcaacaaagcataaaacaatcctatatccttcattatcctcagtcagaagaaataaaaaaacaaaagtcacaatccaaccaaactttcttcttaacttacaatattttttgttactatcttttgttatatcaaatagttactaataataattcacaagaacacttttctagtaacaacaatatacaattcatactaaaactcactgaagaagattgctataagttagttttcttagtttcaaaccgaagtagaacattgagtcccttgcttaccggtcgaaagagaaggtccaaaagccataacagcgacacaattcacattcaaccggtatttaccagagacccaagttcctaccttccaccgaagacgggcattgagtttaagattcagaactaatcttccaacattcttatcgcgctctacttcataaccgaaggaaggtgcaacaggtaagccaattcccaccagagaagctgataagagattagtatcttcatgtccttggtagaaaggaggaagagaagtgtaaagagtaatctgttggcctttgtaagtggcataaacttgtaactcgtcgtagtaaataccaattttctgattcgggtttttagagaatagagtgagttggattgatgagttgaggagattaacatttgagaggtttaagaggtaaatatcagcttctttgagtgaaaactcaggctttgttgggtgaaggattagccaaactaagagtattatggagaggattgtagtgaatagagcagagccagcacagacaagcttcttgtaagccttttcaacgttcactccttgtttgccacagtgtttaggagattttacagatattatagacatttgcagatggagagaaagagagaagagagaagagggaatagagatgaggaggttaacaaggctaaggaagaagagttaaggtttgatggggttttataaagggaggtgtatgaagtagaaagcagcaataatttttgatctgatatatgcttttgactagcagctcctaatggtaatggtgggggtagttgttgctgagatatttagtatttacttggtaacttctggaatgtgcttatatatatatatatataggaaagttttataatagggacatcacttttgttcatactcataggtctatttatagcatttagaaaaattagaagcgttttttcatttttacagtttaaaataatttttttttgtatttttacgaaaatctacatagcaacctataaagcaacttaaatcgtaattaaaatttacatagaaactagcctagcaacccaaattgtaaatttaaaaaaaataaaaataaaaaatagtatatgatgtaattctttaaaattatatgtatgttgtagttataaaagataatcatctatctgttttcaaaaaaatattatttattaaaataatttataatgtcgaaaataacgtttaaattttttaattcatatgtccaactactctattttttacattataacttatttagaatttttcaaagtgaaatatttactataattataataatttcttgaaatgtctaaaacatactatatttatatttatatatatatgttcaatctctttggaccctttgattgttggactaccacttgataagaaagtttgactggaattccatgcatgcatagatgttctcatcaccttttcaatcatgcaatgcaatgcaatacatatgttgatctcaatgtgagttgataaaaagacaaggtgagttgaagtgggacgagtttggccttttttgaaaaagcaaattaatgagtttcttacacgttcatatcattaattaattgacttacaattacattaaagttcacatttcaagattgattaaagttatataaaagcctcaactaatttggtgcaaggccctattctt

SEQ ID NO: 312 - DNA, 2925 bp, Cannabis sativa
gagagagagagagagagaatacttggacaacttattgaagaaaatgaagagtagggaaaaaataaagtaagattataacaatcattatcattttgctatgagaatgagatacatgatcagcaaaaatgacaaagttaaaaaaaaaaatatgaaatttatttaattaattactctcatttacttatgtgtatatatttaacaatgtatagcttatataaattgttacgtgcacattttagagttctcacatgccatgcacaattaattgacttttcttaccataaaattagtttattagactataaaacaggcagtgtcacgccattattggtgggtgagaaaacataccttgaaatttgattgatccaacatgaaccatatatatttatgtatataccagctctataaaaaatataatataatattatatgtatcatataattgttgtataactatatgacaatattattattctaagcagatttgtgtttatttgagcagatgcgagaaagtcttatcatcttgtcatgtgagctggctcagaaagttttaattatttatttgtaatattgatatgtcaggtcagccttcccaaaagatgacccttttttttcaacttaaatacccaatttttgtggtgaagtaattaataattgttcgccaatgcatgtaccgccagggaaaggaggaactcgattttctttatacattataatttattattcttagctagcttaaggggatgtgtacaagatcaataatattcaatcccaatatcacaaaacataacttaataaataagcttattgggccatcaacatgacacaaaaattattggttggtgtgcaaataatgccgtttgagggagttacactattaaaagatgagtaccttatttaaaaaatacaaaacgttatatatgtaccaaaaaaattgtgtatgacagatttgtgaatcttattgatttcactaagtaaatttttctacccaatatcagaaaaataatttatgaactccaccaatatcatatctattttaaaaaagaaaaaaataaacatcatcatataattcattgtccataaagaaaagagtacataatatcatattataaggtcaattagtttcagtttcaatgttacatgaatattaattgtggttattatacaaataattagtcctactaatttacaaaaaaaaacaataatagtaataataattaattaattaatgatctagttaattagcaaattaatgtcatttttttagagtgataaattaatttcttcctcatcaatctcattaacaatctcacctctaatatgatcagaacaacacattatcgaagtagaagaattcgaattcgaattgactgaaaaacaagaaaccgccgaagagaaagatgtcgccgctgcagtcgtcgtcgtcgttgtagaagtatcagattccttaatacaaacaccagaaccgccgttgccgccatcccctccggcgccggagatatcaacgagcaaatcgacaaaagctccaacgataaacccatgattattttttccattgaccctcaaataccatcccaaaagctcttccaaacactcccaatccttaactccatgaatctcaaccatctcctccatcgaccgccgaaaatctccgtaaggatcgtcagactccatagccagaaccacgctctccttgtacggcagcgcctcgccggaaccagaactgccgcaaacaacggcgccggagccaccatcggagcttgtcttctcgagaatcgagctggtgtcggaggttccgggctcaaagaaaaggcgctcggaacgggcggcccggacgacggtctctagtgactcgccggcgtagtattcctccgactcggtagagaagctggctgactcggaggagttggtgaaccatgactcgggggtttcgacaactgcagtggggatggaaacgacgtcgtttgagtcaaagaaaacggagttaaccgtacggtacatgtcgtcggaaaggcgaaaggaaatggtttttgggtggttacatgacggccattggcgccacgtgttaccgttatgtttgttgctttgatgattttcaattcccttcttattggtattactactactattattattgctggacttgaagagaaaagttgggagcttcattctcttgcccattttttttttgtttggaagaaaaatccaagaataatatattattttggattagggttttgggggaatttgattgaatgtttgggtttttggttcttgggttggtgtttggcattaatgagatcctaactaagcatttgctccagagagagagagagtgttatatatgtatatatttataaatatttaaagaagagagtagaggaagatgggaaggaaatgggagaagtgggacctttcatgtgtgtgtatttattgttttttttttttttgtggaatttaatgtgatttactatatccatcacttttgtcaacattaattcattttccattcgttcattcattttctaaagaaaactaacaaaaaaaaattcagtgtaaaattgtgcatatttattactgctttctgttattggtagagttgtttaccagatattcaaacctattctttgacctttcttaaaatatatgtacatatgtatacatgtttaaggatttgaccgatttatttacgaatgctaatactaatttcacatgttaaaattaccattactgattttataatcgctcatcaattttgtgatatacgttttatcttagttccgggtcaattgcatggttgaatataggggtggttatatattgataaaattcgatgcatatgaacaatccatccatctaatttaaattaaccaccaaatattagatatctaattgtaattggatcagattgaatattatttttaaa

SEQ ID NO: 313 - DNA, 1485 bp, Cannabis sativa
ataataataataataacaccaaataaaataaatgctgcaatgaatgaaacttgttttcacattttatacaaagaaacaattgtcacgagtttaactaacggtataaaggtttgtcttcatatacattattctcaaataaatataatcaaatgaaaacaatacatataaaactatatctttcgaaataatgttaagtacttacttaaattatacatagtattttcataataagtatttaattttaaccctatataatttaactagagatcaaattaattttacttgtattattgaaataaattacatatcttgaatatttgtgaattggagaattttctattaaaatgtgatttggctttttaaattttggttttttttttttattattgagagtgatgcaaattacaaagcttgttgtttacttcgctatttctaagaatttaaatggaaattccgatgtatattttccccataatttaattgatatattttagtcaaaatcgttaaaaatatttattttagtcctctaaatatgatttgatcaccaattatcataaataaattaggatgatactttaattttttttatattcgtgtatgagttatatttaagacatttcataatagtgtttaaatatcaagatatgtgctaaataattataacataatttttttttaatattttattaaaaaattaattcagataacaaaacacattagtagtattaaaggtgcattataaaattttccaacaaattaatatatacaatatagattaaataataaagggaaagttttataccacagctgatttttctcgtgaaaagcttgttagttactcaaaaattattattattattataatttaatttcattatttttattattattacccatttttgtgaagtaagacttgagcgtcaagttatatatttagaacaagataacacatcctaattagggttttcttttaccctagctatataaataaataaaatatacccacaaaaaatcaaaaaccaaattaaagaattagatactcgaaaagatcgaattttgagtgagggcttttcaaacatgaatcttcacgatcaagatagcaatggcgattgtggtggatctgccgccgtcaatgtgattactgatccgtcgtcggaagcttcaaccagcagcagcaacaacaacattattccgacaggtattccgatgggtctccccaacaatttggaatggacggacatgattcgtttcgcactctacaaaatcaacggcccatcacaaagtcaactcttaaaacccttgactgaattacagacagttttcgcagatcggataggcgatttcatcgatcaaccaattgagatggttaaaggtaatagatatggtcgccgcagtgctattgattatcttgaagaaagagataataagaagaagaagaagaagcaaaagattgagtttatgggaaatattagaatggaaaagaag

SEQ ID NO: 314 - DNA, 3283 bp, Cannabis sativa
gttttttaatttgagtttttggggatatttatatcggaaaattcgaaaacgacattgccacgagtgctttgctgacgtcatcaccactagttttgattagccaatcagatcactctaatcagccgcctaattttgccacgtgtcaagatatggagttgggagtggggaccaccactaaagaaagacaactaggacagagagaaacgtgttcgttactttggttgaaattacttaagagggctcaataattgttatccttttgtgattagagtaggggtagtttcggaaattcggattttgagtggtctgaatttgggtttgggttgggcctgggctttgattggattaagtgggccgagttttggtgttggtggtggtgtgtgggctgtaatcattataatagcattattttttgaataaattgttattaatattattattattatttattatttattataaatatcattttctttcgtcactaaataatatttggggtgatgttttcatgtgactcatcaatgacgctcttcccattttatttaacaaattaattatctttttttaaaaaaaatatatatattagttaattattttttttttcaaaaaaaaaaaatcactaattagtggcatgtgaaaataaaagtggaagtaagtaagaaagattattgatcatgtgaaatgtgaatacactttgttaatttgaattttgctatatgatactttatggaactttattgtaaaaaaatagtaaaaagattccattttaagacatgatttcttttataccactttatgtgacatatgctttatataacatgttgtaacctttttttttaaaaaaattttttaaaaaagtttgaactttattaataaattcgcagccaccgatggcaacaaatcataggacaattattcattctaatattctatacgatggtggagataacaagatgctctagcaagtcaatgagcaactaaatttactgacagattaacataacaaatagacgcattcataagagaatttatagacagtttaacataacaaatagacacatttataagagaagcaagaagttcttaacaatcatgagtaataataccaaacggtaaaaagcatttcaatataaatgacattattgacaacattgatgcagtcgatttctactttggcatgaacaacagggttattctttaaccaacttaaagtttcttttacaccctagccacctctgcacgcacaagaccctcgacacagtaaactcgggtctcaactagcacaccatcagtgtcacaaatgactaaggaaaaactatactttcttgcactgttaaatattgcaacatccgtgttacttttgatcgtatttggcaaaaatttcgaccaatactcaacctccctaacagatccaaaagaactttgaggaacaaaatttttatcttcttgagcaatattttctaaactatctaatattttttttttttcatgttttagtattatagaattgaagaatatattaaaaatatctaatttgttcatctatactcatatattatggtgaaataaaaatttataattttatgtacattatttttagtgtctactatatatccatctttgatagagatgctacatctacaaactttatattagtttatatacatgttttgctataactatttttttaaaaaataataataaatatttgtttattataattcataatttcttatataccatgattttactaagtgcgtatatttttttgtaacaattttattctcatatatgattatacactaattaccaaaattattgaaaaaaaaaacctcaagtttgcctctttttttttttttcactaaaagtccctacataatagttgaatatttcacttaaaaaaaaaagagtcaaagtctttcttttgtagtctaaattatatgattggaaacgtgaatattgtgatttagttcaaatgtgattgacatgttgtcaccattattaatatagtattgaattaggattaatttttatcttttttctatttttttttaaggagaagcttcttactttacaagttggtaagtagtaagtagtaactatataactttacaaagttggaaaaaacaaatattaaaaaggatatgatacactcatatacacatatattattagaagcttttattgtatttgacatctactattgagcatattaggtactggtgtgtttaatatttttttgtaggtgatgctttataattagttagcgatattttttaaaaattatataagacctgatacttaattacactataacaatataataccgagaaaggtgctagccactaataatgagtcctagcaattctcttattagaagcttctattgtatttgacacccactatgaaatcatacaccatatatattatctattaatttttggtcgatttggtgttaaattctccattcccactaattattttggtggattaaatattgtgttaagtgaaaggacaattttcttggcatacaaacacaactttcttaccttttgaccattgtgagtcctctccaaaaaatcaaggtcaacatgcatgttattcatgtcttctcatgcatgcatgattcatgttgaaggaaatataagaaaaaataagttgagtatttctatgtgagatttagttaggatgaataaaaatataacaatagaaatagaataaaataaaatttaaaatgcataaaaaattaataaaataaatattaaattttttatatatattatattggaatgatttttttttttcaattttaaaataataggtattctattaagataatggaaaatacattctattattaaaatgatattctattactttaaaatataactaaacaaaaagaatataataaaaattattttattcctattttattttattattatatcgttttgataaaaacaaaaggacaaaactacactaatccgagtaagagaaacaatcattttgtacatgttttgatcgaaaatatattaagaaaatttgagtaagagactcaatcactacatacactttactaatctaaacattttttttttctacaaaagaagaataaacttatcaaataatcaaatcgttcataaatatatagaaatgaatttcaaaggagcattacccactcgtaaaaataggatcatgcttgaatttggattaagtcaagttaggtcacccaaattcaaggtctaaaatttttatcaagtatacttttatgccttaaaaaatg

SEQ ID NO: 315 - DNA, 4438 bp, Cannabis sativa
aacgatcacaagatttttaaacatgtttggccagtagaaaataaaatacggatattatgttgccacatgtctaataggagtagatgtaaaatattaatgcatgattagctgttattagctacttggtcattatctgagataacatgcaatcttggcagagcacctacatcatttgtaatgtcttgcttagtacttgttttgttcaaggtcggatactcatttgactttgttgtacatttcaatttgtgaacaacagagcatcgacatgtcgggtctacaaacttcaatttacagagtagcaggagccatacaatatttacactggtatcttctttcaatcttaattgaatcccgaggcagctttttgatttgttttaatatatttaatctctttctgtttcatggttatcatattaaatgcttatcaatttttctatcatttttcctttgacacacacaatgtcacattaaatgattggatttccaatgcttaatcgtctgttttctttgtagtgtacccatctaatgccttagccagtattttgaagtatcccttgcctcgtctctctttggtcttaaaatttgttatacttatgactattaccgtctgttcccatgaattttagtttgcatgcatgtttatcggtccaattccgcccctcctctaaatgtgactctttcactctttttgtaacagacgatagagagtagtccctgcggtgaaaattgtgaaggggaagctgtgaatttgtcacaactggtaaatatgcaacacttccatttatgcctgcaatatctctttaaattccttacaggcttgaaataaaccctactaagcttctttcatattcatattttactgaagttgatgatcataaaactgtttacagtatatgtccacgattcttccgtaacttttttttatatctttcttatgcttgcagaacctcattgatctggcaggttctgagagctctaaagcggaaactactggtatgagacggaaagaaggatcttacatcaataagagtctactaactcttgggacggtgaggctaccactgttaatatttatattttaagttttcatatggtcaatggcatacatttaagaaagcacaattttcagtttgtatctcaactggttctcatcttccatatcgttagcttaacacaaagaattccagagttaggtgtatatatcatatacttttatcagttatactaagatattcttccatacaggttttgttaaaaatcagtagaaaaagcatactgctatcttagaaattagaataatagagaatggaataagggaatgtgtggataatatcattggttgaatactctatgtaatgttgtttggtgagggaagagacattgccctgaactgcagctattatgctgcctatgctacatactttggaaagcatgagtttgggatcctccttactttcttgctgagtttagctttattaccttatcatatgttcaaatgaatattaataaatcatttttcatgcgatttatatgatgatttatactaaaccatccctcctaaacaacttaaatcaagtactttagttgtatctaatatgagggagaaaccccaggggcattggactctaactcttctattacataacattacaacatggagaagtccattcttcttgtcatggttgatccacctcccatatttcctggattggataaccacacttgtcattttaacgactgattatggttattgcttgcatcagattagtcttatgcctaggtcgagcaggagaaaccaatgttaggaaatgcagttctgataatctggttaagtagaacaaactcaatgtacccccttttaacccaagggctggtgtagtggtaaggtggagccttggaaagtgctggtaggcatttgtttcaaggtttttatcccctataggctcaaaaaaaatcttccggccactgggagatcttctagttgaactgccagggacaaattaaaaaaataaacaaaagtgtacccgcttttgcttatttattttagttttaccttttgttttacaattggcgggattgtcatccttcttgcttttttttctcactctcgctccatccttagcttctcatccttcttacttcccctcttcctaacaaacttagccttaacaattttctttttctgtttctaggggtccttttgaacttgcactaacatagctaataaattgttgaaaagaaaataatctgtgtttctagttaaagtttaatattaatacacagaattctaaaagaaatcacttgtgttgacataggttatatcaaagttaacagatgcaagggccacccatgtaccatacagagactctaaattgaccagactcctccagtcttcattaagtggtcatgggcgtgtttctgtaagatttcttctttatattagttcaaattcaacgtgcctacaacttgcattgtgaggggatgatgattattgtcacctctagtgctctatgtaatatataattttcttatatatctttacggtcgaatctacagctcatttgtactgttactccttcatcaagcaattcagaagagactcacaatacgttgaaatttgcacatcgagctaaacacatcgaaattcaagcagcacaaaataaagtttgttttattgtttcttccttgggagtgtgtttttcaaacttttttcctctcttttgtcatttttggaagcttctgtgtctgcagattattgatgagaaatcgcttatcaagaagtatcaaaatgagatacgttgtttaaaagaagaattggaacaattaaagagaggtatagtttcagttcctcatctgaaagatattggagaagaggacctcgtcttgttgaaacaaaaggtgcattcaagaataaccttcatggagaaactgttgaagttgtctgtttatgtctagagtgtgttatattatcttctaattaacaatgtcatgtggcttgaaccccgttctttggtgcgatgttttagctagaagatggtcaagtcaagctacagtctagattggaacaagaggaagaccaaaaagctgctttattagggagaattcaacgattgacaaaattgatcctggtctcaacaaaaacatcccaatcatcaagattttcacaccgacctggtcctaggagaagacattcctttggcgaagaggaggtgtgattatgttattcaaaaagtttgtttatattttattttaccgggatttcacttggatgagtacaatgtaactattaacttacaccttacagcttgcatacctgccacacaaaagacgagacttgatcttagatgatgaaaatattgactcgtatgtgccagttgagggaaatgctgaatcacttgatgatactttaaaggaaaaaaagactcggaagcatggattattaaattggttaaagctacgagtatgtgttgtttcattttatggttcttttttagtttgcttgttagctataaccaattcagttgttttgttgtttaactgtgtcccttatataaacattatgttacattacatattattgttttgctttattttgaatctgttttatgcatatactacaaacaactaaattttctgtttggtgatatttaacataaatttaaagctttgtactttattatcagaaacgagatagtggtgtgggaactttgacaaataccagtgataaatctagtggagtgaagtctgtcagtacgccctcaacacctcaagcagtaagcggaaactttcactcagaaccaagaaactcccattccatacctatggagagccccatgtctggggatcttttatctgtgtcaagagacgacagagaagatgaggataatttgttgggccaggagacacctctggtatgcgattagcttgtcttgtctctgcgtatccattttttttgtattgttcttgtattctcatggcttttctttcttctttttgggcatgaattccatatgttgattaaatcttacacttatctgagcacgttttgatctctaaagtagttgacaatatgtaggcttggaaaattaccagcattgttgtaagcaggaagatgtcaaaataatatccagctactatgctggcttaatttgatacttgcaatttattctaattttcctttattttagatctctttcctctcttttttattttctttcccagaccagcataaaatcaattgaccagatagatcttctaagggagcagcaaaagatcttgactggagagctagcacttcactctagtgctttgaagcggttgtctgaggaggctgctagaagtccacagaaggatcaaatcaatgtatgtatttgttgtctaatctctattcaaatgctctaaatttttcttagaccttcactgttatgctatttctgtt

SEQ ID NO: 316 - DNA, 5395 bp, Cannabis sativa
ggattcttcaccatttattgacctgcaaataaatgacactacactgccccaagtatgttatgttaatttaactagttgaaatagggattaacattaagtaaattacagttaatccactgatatgaaacatgtttgtctcagtacttggtttacatatgagatcttaaagcgtgtaaaacagtgaagaaccattcatgtggagggagatgaaacaagtgttcacatgaataaggctcacttagacacacatataagtgaggagaagggcatctaagtaatttaaccaatataaatgatcccaatcctgttttcctaatttgggcatgacacaaccgacatttatgattttgtaggtcgagaaaataagctcaaacttaatttggtcacaacattttcaaaagaatcataatcacaagggcaacacttttaatttttccggactacggaaataccttcaccagaaaccacaatgatttggttttcaataaaatgaccaaaccaccaccacccctgcccctctatttcatttttctttcttttcttaataattattatatgaccaatgtgcccctagactaaaacaaaaatttgtcggtaggccgacaaccgctgggccatgatccttcatttttcttttcttttctgttaaacaagaacaaactggttgttaccaaggcgataagtataaccttcaaatcaattggaaaacgacaagaccagcccacggactaacaggaactgaaaattctactgccttcaaaagattctattcataaaaataaagctacctagtttcaaaaagctttaacataatcttacttccctatgaaaaattcatacaaaaaaattaatttttaaggtatttaatgctacgaagttgtacacaattaggtagttaataccactaagcacgtattattgtttcattaatatgaatgtacaataattgtacggtaatcaaagagtagtggaccatatgccaaaagtcgagtcttttctttcttagatatatgattctagtttgcatattaatttttactactggggacaccgtttattgttggggatagattaatagggttttaatttctagttcatgaaaatttgcatttgctacagtttctatagtattttatttttttagttttagaaagttttatatatggttgagaaaatcttaaacataacgcataaaaaacgtatctttatagaaaaataagttaagaaaagttaggaacatggttaaaccatatttttatatattaactataaaaaatcgattatttgaaaagttggatttttaaacaggcattatacgagacttgagctccaacaacttatatacacttactcctccacattaaactatcctcaagtgttaatttttgagcattaacataaatgaaaatactaacctttacctttttgttgttctaaactttgttggttggtacgctttgtctttctatgttgctttgggtgtagcttgtttgaaagcgacagtgggagctattctgcaactcctcctctgatgctccaacactagttccccagcaaaccagtccagcttctcgaaattgctctgttcatcgatcctcttaccaccaaaaaggactgattcaacattcttctgtttaagcatctcgtctgctaatccaatcagcatatttacattgctaggacgtgagtctgtatcaacgttcgccccacaccgccccaaatttgacccgttagcctaacaaaaccaaagtccattgacacgggaaaatcccaaaatcttgttaattcattgtcctaatatgaattaccaataaagcacttgaaaggaacaccaaaaagcgaaaagcaactaataaaaaatgtgttttcatcaatatacaatttcctagtcaactttcaattaatggaccctgcaaactaggtcccctcaactataaaagtagtatttgcatcaaacatagaaaatgaatgtcaccacagtaaacacttgattggttacgttaaactcagtcaccatgatcattttgtgattatgtgctcacacagaatgtgattagatgaagataaaagatcaaattaagacctggaaaacccaactctccatatgggaaaaggcaagagcctaattttacatgtgatactttgggggaaaaaaagaaaggcctcagctttgcttccgtttcagcacataaaagttagctgtaacaatttgcaataatatgagataaatagctaacctaaccgctgaaagcattttccgaagtaatcactatcaattataaacatttagcaagagtgaccacctttagtcaatatacacaccaggactccagctatacataactacttactgcaaaattgcaggaccagataccatccaacaacaattaacacttttggcagatatggttaaaattgttacaatgaagtaaagacaatgataaaaatgacatagcattatgacaaaactgaatcaggaaaatttcaatgctaattgtttttctttctttttttttctgcagggtgaattaaatctgggcaggtcatcattataatttattcaattgcaagggtggggaaggataaaaggccacgacaaggtgctagatatgagaaattcaccatccactaaaattttgcaaaacaaaggcagagactttaaaaaacactttttcaaacaaagttaggcgtagttggtaaagaaccactaatcctcaaatagctaaataaacatttggggaaaacaaaccaaaattctttctcggtcccaaaaacaaaaatttatgagtttcaaaacccaaacaaatcatcaccacgtggaatccaaacacgaaccgaaacaccacacagacaaacacaggtccccattttgtttccattggtcacaaaagcacgatatttattttttaattttttgaaaatataaaaataattcttgtgttactaccagaacagtccttgtttctccatctcacccaactacacccgacatttaattgcataaacacaaaactccggcgcacgttagcccatccccaacccaatatcaatatcaccttcaattctatctagtattgtaatagctattacaccattgtcatgcatgggaaaatctagtaaaagacaaaattctttgaccattcccagctggccatctgtgtctcatgcaccataaacggcaacaacatttacaagaccaattaaacttaaatgtatttgccatttactcctcaaatttcatcactattccttttttttactcttaaaatccaacaaattcattaactttccaaataaatttttaaaaaatcctgataagaataattgaatcaaatgatttgacttacctgaattcggacgtagttactgctccgggattgaccgaaggccatggagacggcctgatcaactaggtcagcggagccgtcgctagcaatacgggcagtgggacgtgcccaatccttggccttccactttttgacttgatcgttctcgaaactcacttccaagagctgacccgttccaatggaaaggaccaagaggtcctccaccccacgcacgaacggaaactcctgcttgttgtgcagcacgtgcgtgatggccgccgccgtcgggttgctcattgccaagccgccgtcaaccgccaaacaccttgtttggccgtccacggaacgcatttgaactgggtcgaaccgaccaggctcggcggaagtcgctcggcatacctcccagagctggaagtcgaagctgtcagtctccagcgcgtcagcgcgtgagaacagaaacggcgctgtacttgacaagtcgtagcaaggtatcaataccggcttcaacgtgtccttcagggttaggctctttcgacttttctcgacgaaaatatctttcatcgatttctctaacccggcggtagccgagcgagtcgaactgcaaccgccgcgtctgatcattcgacgcagaagttttccaccagtggcggagctcgacgaagaagaagaagtgtagaatctctttccctgttcggccaaaaacctccaagtatcatcggctttggatattgggcggctctggtcactcgtagcaaagagcatagccgtgaaaattcctccaacaccagcccccgctgccacgtcgaagtagtcagcgattctagcgtctggattccccgatttagccttgagcgcgtgctctaagtatgccaatgctttcccggacagaatccctctcatacctccgccatcgatgctgagtatgcagatttttcccctctggttcttgattgccgagacgccattatcagcgccaagactcgacacagcttcaagtttggggtcatcaatggcggtaactgcgggagcgatctgcttgggaacccatagcttctgatcatcgtaaccaaagagaaacttgctctccaaaatcgaaaagatctcgtagctaagcttatcagtatcaatactaggttcatgcatttctgatagattcgtagccatttccccccaaattcttccctataaattaacgggtttcaacaattttcacaaaccaatttttccgtccggacaaatggcttctaatcttcgagaaaaacaaatacacatgtaatcggaagttcaatcaagtagaagcagttaccttgtatttcacgcccctatttgtacccaaataaaaaaaaaaattacaaaatgaaaaacccaatgttcaaactttgaaaataaactcagataagataaggattgaattaaaaagctttgcagaatctccaatccaaaatttaatagcaatcattgctcaaggcctaaaactaaaggaagcaacaagagaaacgcctgataaaactctcacaatacaagtttttctcgtttccaaaaacccagttgagaaaagcaatcaaaagcccaatttgccaaatagtccctttgctgtatgctgttgctgttgctctggtttttaacagagtaaaaacccaccaaagaggaaaatgaaaaccttctcaagccaaggaagcggcgccaaaatcccaaaacaacaagccaaatgagtattaagaaagaaagaaagaaaaacaggacgaccaggcaaatatcacagaggtttcagagtatgtctgtcttatatatatagccttttcaactataaaacaccttaaaccgatttttttcactcattaattttttttaaaaaatacactaaatacatttagatgggttaaaaataaaacaagtgtattaccgaactttctcttataattttttagtcaaattttttttacagctattaaaatttcaaattatttacaatgtcaaaaatatttgaagttttttaacactcgtgacaaacttgattgaatatcaggaactatattttcagtagataaaatatttggaatttttcataa

SEQ ID NO: 317 - DNA, 1376 bp, Cannabis sativa
accttgcttaaacataaaattcaagcaagaagaggaagaccatggttacctttaattttctaagaaaataaacttcaaaatcctaacttaaatatcttgaattatgtctgaattctataaaaaagaactgggatttcttggtttagggtgaggctgaaagagagagaaagatatatgggtggagggtttgttttaaacttaatttgttttactccattttataaaattaaactatcagaaataaaaaggattctaggaattacactataatccattaaaattactttaagaaaaaattataatattgtccctttcttcttgcttaagtaatctaaatatttaaaggtaaaatggccaaaaattattccccctaattaagaaacccaatattttaaatgtcctataaaatcatgacccaataatttaagatgctaaaccaaatcttcatgacactaatggccaaatggtcaagttccactgttactgagcaccaatcataaaaagaataaaattcatatataacatgcatgacgcacttagaactcaataaaatttccataatttaaaaattacttcagtgatgcctatttttgataataggtattattttatactaatacacatataattatgaataataataataataattatcttcctaatagttttctaattatctactaattcacatatttaatcatgtagtcattacaatcattgactaaataaaatgtaaaattaaatatatatttatgattttttatcattttaaaactacataaagaaaggtcatctatataaaagaaaacccaatgaaaatcacgtatcagtatcttctttactttgtatgttttatttctatcttcctttcttttgtattttatttttactaattcttttttatttttatttttttgtgggttatgcgcttaatatctatgcactttttttatggctaactctgcatgtatagtggtgtaaatatgggtcgagttttttgacacgacatgaaactaacacgagcttaagaggcaccaacacgactaggcatggaaaaataggggtatgggaacaacatggcatgatgctactaattagcacaacaggacacaaaaaataagggcttaaacacgacacgacacgacaggacaagcccgaaaggcataagacataagcacgaataatttattgtgaaagtgtgacatggaaaaactatataattggtaatagtaatattaatagttctagtaaactttcaaataattttatgttaaaaattgtccaaaaattacataaaaataattgaatctacaaaaaagaaacacataatattaatatttatctcattaattgaaaaaaaaagtacgaaaaaagta

SEQ ID NO: 318 - DNA, 9100 bp, Cannabis sativa
ctgccgatgccgacggtcgggaaattgaaatttccgacaagtaggactttcttccttctttgtgtatttttaatttgtaaattgaatgaaaactatttgacttatatttttttaattttcttgaaattaatttttatttatttatttattttttttgagattaattttggatctgtcccatgtcatctcatgtggtttttacttcactttgatatgtcgtgtcgtttttaactgagcggtgttccattattttaaagctttatctactccacatgtcatgtcacgtgcttgtaaacgacatatcattttttaatagaataaataaaaatttatcaatcagccaaaaaaaaatatatatgaaatttatcctaaattattactatcattagttgatgctaacaactttttttttgtaaatgtaatactaatttactaatggctacatttgatccaatgcaggcctaagagctttggagagagatttccttttataatcactggctttttctttttcatgtggtaagaatctatcttctaatcactgatcattaaacttgtttggtttctgaattgtttctgatgacaagtgtgttgtcatttcaggtactttttaaatgtcatcttcaacatactgaacaagaaggtttacaattacttcccatatccatagtatgtcaactctcttatcttcatacataaacttgagtatatcacattagtattgacaactattaatggtttaatgccttgaaattttattagatataatcagttcattaatgtgctaattagttaggttgtcatttctgttaattagctagttattcccaaaaccacttctaacctttttcacaaatgtctatataaggcccttttctcttcttgtaagacagattgcaatttaataacttctcttatgatgttcccatttttgcagctttgtctcagtcatacatctcctagttggagtggtttattgtctcgtttcatggactgttggattacctaagcgtgcagtgagttttagtttatcagcatttgacatgttgtatttgcatcaaagagaaactatgctgtttgaccttgacttgttttgttttggtatgtgcagcctattaataaggaactgctgttagtattgacccctgtggcattctgtcacgcccttggacatgtcatgtccaatgtatcatttgcagccgtggccgtctctttcacgcacactattaaaggtacaacatttgatatttgtttgtgctcttatcctgtgatgcattaaacagcaggggctgcttgtcaagtgatttattttcacttctgtttgtactttgttttggggcttagatggtttgacattatctcttatgtttttcaacagcactggagccattctttaatgctgcagcatcacagtttatcctgggccaacaaattcccctgtcattatggctatcattggctcctgttgtaattggtaaccactatatgcctggatcatttgccaataaatatgactcttaatgaattctagataaaagctaatatctttcagtggctaatttataaccctgaagatttacatgttctgtttttttcatctactgacttgtaagtgtattttttgtgttaggtgtgtcaatggcatcgctgactgaactttcttttaactggactggtttcgtcagtgcaatgatttcaaacattgcattcacttacagaagtatctattcaaagaaagcaatggtaaaatctctatggaagtgggattcttctaatttatcatatatattgcttctcttatcacaggttgatgcttacttttatttacttgagatggtctatcttttaattttcttttccatttcttttcaacagacaggaatggacagtacaaatgtgtatgcttacatctccatcattgccctcttggtttgcattccaccagctctaatagtgagtctactttttctctcagttacatatacaggctaagtaaggtttgacattatctggtttggatgataatttggtgtttgattggattggattggatttcagattgagggacccaaactgttgcaacatggtttccaagatgctattgcccaagtggggctctacaaatttatctcagacttattcttgattggattgttctaccatctatacaatcaggtatatatgttaataataataatgaatttgttatttgacctcaaatcgttggatgctcagtgtttgctatgtggtgataaattgcagcttgctaccaacaccctggaacgagtggcaccattaacacacgcagttggaaatgtgctgaagcgagtgttcgtgattgggttctccattgtagtgttcggtaagcaagcaaacgctaatcattcattttcattgagttttattactcattttttcatgtgtctgactcttatattgatatacaacataacaatggcaggcaacaagatctccacacagacaggtattggtactgccatagcaattgctggtgtggctatgtattccttgataaaggcaaacattgaagaggagaaaagggtaagttaggtttatcaaagcttgtgctatttgaataagttatgctagtgttgtgtgtgaattgtgaatagtgatttcattttatggtgtcattttgttattttagaaggcagcggcagcttctgcagcagggggagcagcatcgtcttagtagacaacttttgtagatattgttgatgattgatgatgatgaagagcatgatgagaggagatggagaattatgcaaaccaaaccaaaccaccctaaccgggaaacattttcatattatatttcaattcaactgctttccaaggattataatatcattcctatgtagaaataaaagttcaagagtcggatactaaaatcatttccataaagtttattattgaaatgaatgacaattctttgtttttttcgcttttgttctttttaccgttagccgtcttaatactatctattccattcttatttcttgccaagttattccctattatgtgaaaacatgttctattaatttgcatgattttttttcctatttacttcgacaaccttgataaagatatctcattttattcgtttatttaaatcataattcattcttattagcatttaaaaatttcaattaaatagttgttcaaagaaaatttaattaataaaaaattggaaatatgtaatatgaaaaacgaatttccttaaaaaaaattattttattgtgattaaaatgttaaaaacaaattgattgaacagaatcaaaattaacattagagtacaatatgttaatctggattcctatccattatcagatagacaaaagtatactgttcagttacctaaaaaaaattaattttttcctacaatttattcgctcaatatataatactaaatgtggagaggaaaacaaaaataaggaacattatcagaaagaaaaagactgatgatcctagcattaatcctgccaagcctcaaaatttagtatactcaattaatttacaagcactgtcgaaaattatcgaacaaaacggtgtaggtctctttcttggggaaccgaatgagaagcgttcagattttccatatcattaaaaagccaacctacacagaaacacaggtagttgttcattacaaaaataagcttaaagacacaagcgttcaaaagaaggaaaataacaggactgcgaaaattaaacaactagaaagttctgtctttgattttagcatcttttaacgtgtgctgacagtttacctatgaagcaaacttgttgctgtagtcaagattaaacagcatgttccttcgattctcattacccagccgaatcttgaacgttgatgctagggaattcaaacggtcatcactttcatagtccatctctcgaatacatcgtctcctgacattcttcaatgtttctctggatggctcaaaaccagcgtttacctagcacaaaatatcacaccttttggattagcatcttcacagaaacagcaaataaaagaccataattgattgcgagttaccatgctatcaatcacagagagcgcggctttctgatctcggtttataagatgagcatcaacaagtatcatgtatgactttgcattcggcttagtgtccaaacttagcatgtgttcgaacacccttgaagcttcaaatgtctggcaccatcacataattaattagcaaacgtataaatctatgtcgtgcaaatgcatacaaattagggactcgaagaagtggattattccacatttaatcatccgttctaaagatgggcagcatctgctgagagatctttactttttccatcttcctccacacaatcaaccttaatatgattatgtgcagcagaacaagattacctcaagacatatggaaggcctatatgcatggtggagaacataacaaactaactaaccaaaagccacagtgggcttacaaagtgcaagtctctttgtgagagagtatggaagtgagaaagacaatgcagctaagacacccaccttcttgagcctcccaaatgcatacattagagcattgtaagaatgaacgttaggagccaacccaaaggaagaactaatggcctcaaaggtctggtatgcacgatcaaggtcccagatatttgcacaccctaatattacacagtttaaagcagcaactgacttgtagggagggtctgcacgactcaaattctccagttgaaaatacacctggaaaagaaattaacagttattataaaaaaaaaaataaaggtaagaaaatcttcaccttctatgccacaaaattcacgcatttattattttatattaaaaaaaaaaaaagcaaaagaactaccaacaattctatcattaggacatctaaataaataaataaaatcaatagtaatattatatgtgcttatcttcttgtatcagtaagttatgattatttatagttgcactccttacttgtttaaatgtctattaaggtttatatacaacagaggaagagttatcaataagtatatccttagggatttcaaaatcaatcaccacacgtgtgtatcttcttgtttcagtaaagttaacaagttacatgttaatatgcacaattaatagtattatcaaatatatccataaacaaaaatgaagggaaaagataaaggatatacacaagattgtagcgaattcaaactatcgtaattaatggatagaaagacatactgcatctaaagtctcaaaacctttcttggaacacgccacaaccaatggtgataaagaggtgaatggagaaaatagttcatcttctgctacattaggggaatgttcataagcggactcaaactcatttaaggtactaaaagctctccgtagctcccccaatgatgacaaggcatatatctttgcaaggtaagattcgggattaggaaccttcttttgacgcaatgagcgctttaggattgaccatgaagcatccaagagattagaattgttagttctaccagcagttcctagtgctgatacaagtaatccttcatccacagaaagagaaacagaaggccttgcttgttcacctctagcaatccacttggccagaaactccagggcatgataacctaacttgctattgtcctcttggaatgaatgatctgcaatcaagttgcacaacccccagggaggacaaagagctttgttttgttccattgactgataactccaataaaaaccaaattaaacaagtaaataactaaacattattctaaattttgcacctgtaactacaactccaaatgtagtagcaattacataccttgcacttctcaataaccgaaaccaaagcatccagcctgtgagttttgagacagagtcgaacaaaatctgtaaacacctgaactgacaatgtaacaccagatttcaatgccaagtctataaatttgatgccatcattaattctatttgtctgaaaaagcagggcgagaaccaaattatatgattcatcatcaggcagagattctttcccagtttgcagcatcctgcattttattgaaaggataagggtcagtgaaaatgagataagtcaatgtgttaacgaatatataacttttgtgaagtataagacaatcataagcattgtcttatttttcccattgaaagatttttgttaatgaaaagtacttttcaaagtattaacaaatcctagcttcttgcaaaaggacttttaaattaaaaagggactttttattttttatccaaacacacttatttttaattcttaaagctaaaaaagagcttatagaagctaagccaaacggggctataagtacatgtaccaaaatgctttactaagacaactaacataaacactgtcatggcaattagacacgatacaacctgcgtacttaaaaacacataaatctttgttttcattcaccaatacagcaatgcattctttttaaaagaaattcataaaaccataaaaattcctcaaaaacactaggaggattgattttaattgaacagtcactcatagttttcactataactgcaatttcaaaaaaaaaaaaaaaagacatttttttttagttttaacaaagagcctctacgactacgtaatgcaaactgaattgaaagatgggttaactcaaaattgtgacttctaattcttactaaaactttgtttttaagcacaccagctaccctatcaaatggcaactattttgttcagtatcatcaatttctttagattttttcttttgtttataaattaagaaacagacgtttcaagcattttggagtagaagaaggtcaatcataaaaataattcgtaatccaatgttaatgtttcagcacagacacatagttctatatactcgtataaattccaacaattcagcatagtacacaactatacaattatataaatacaaacatattaacccgcattttaaacatgaatatttatgtaacgaacaaacaaatgggagtagaaaaacaaccaaccgttcaagcaatttcatggcagcttcagtctctttggcctggtgcatgacttcaagtactagattaaaggacgctgtatttggcttgacatcgtaatcatccatttgggccactagatccagcaaatctcctgcagaagctccggtcatcaaattggccctcaggtaattgttgaagaggttcacgtcaggcttgttcggctttccgttcttatctagtgaccgaacccagtactcaaacaactgtttcatgtcggcccagttctgcgaagccatccaatcggcaaataaattcataaggctcgcactgtctagggactgcgacaaagcttggatttgaggagtcgacgaccgctgcaagaaattgagcggtagcaacgactgagccatggaagcatttgtgatcgggctcctccagttctcgtggtatagagggctaccggaggccgggttcgggggaagtggagttgccggatcgtgatttggctccgccagctggggctcctgactcaggaacccgaaggtggtgatggatttcaagttggagttttgactaaagttcttaattagggttcgggtccgactgaaaatagccatttgggacgccattgatggagaactcaagttaactggttagggtttttgatgaacgaagttcagttcagtgttatcgatggttcaagaattacatggtaaattcaggcgtatattctgtgtccgattggcaggcccagatgttaatggactggactagacataagcctcaaattggagtaattaaccatttacactaatctgggctgggctgggcttttctggaagatgttcgcaaggtatgttatgtagaaataacacaaattatggtaaaaattgaaggatttctgggggtttttacaaaaatgttagattttggtgaaaagtttacaattttactgccagaaattacatttatactgccctcccttttcttttttcttttatactgtaaacactaaaaaaaatgaggcctccatcttccatacccactgacagaaccaccacagcaataccagaacagtcgaaaagaactattaattctggcaagatgaagcaaaaatattaaaaccattaatattggggttgtcatggtttttctaatgttgttttaaggttgttccactgttgtttcgtatgtttaaaaaatattgatttcaaattacacaggttaaatcaaccactgaatatttgtttgagataaccataatgaaagaatcatggacactaatagtcttacctcccattaaaagtgtgaaatctagaagaccaaaaaaaaaagattgaagttggctaggaaaagaaacaacataacaaatgcagcaaaatagggggaactggggtacaacaagagaacatacaggaaaatgcatcaaaaataaaaagaagctgaacaactaaaaataacagtagaacaacggaggaaaaattgaacatatattgaagcataggatactgaagaaaataatttacatgcaaatttcattaatttcctattaatattaaaaatagagcaatacaataatatttgaaaaattataataaatatatgaaagaaaataacattaaaacaacattaaataataataaaacaataacaaaatataaaaaatgataagttggagaaatagggtggatttggaagtgcggtagagatgaagttaatgctttaagactaaagacactgaataacataaacttagtgggagtttttgaaagatttctacaaaaatctcatcacatatcaagctctccatctctctctctcacacacaaccccacactcttaactttcccaaatcttcttcttgttcttgctccttcacatttttttagttatctactacaaattgagaaggttagctgttatttgagtaatgttgtagacttggaaaaaaaaaagaagaagatgaacaggagagatagaaagagctacaatacaataataaataaataatgtgagtattttgggatttgatcaagaggactatatattatataaacacatatatattctcttagaatgggatagcccacatttaaaaaaaaaaaaaaa

SEQ ID NO: 319 - DNA, 1785 bp, Cannabis sativa
gtgcactgagaaagaggtttaggaattgaaaatttggcatggagaaaagaagcattaatggctatggaggtttccttagaagattcattatggcacagagtttaacaaaagcaagcatggagcggtggtatcactatcaattctcaattgggattctggaaaaagaccagtccccttgccttaatcccctagaaccaagcacataagaataatttgccatctataatagaagtctttgctagtaaagaatctacaaatgcatctcacatacgacatgacatgtctatgagagtgtatactaagacgtgcaagaagttctaaatggccaagaattgtcctctatggtcacacttaccaattaacattcccagcagaaaaaggtttattgaggcatgtccaacaaactatacatgttgtgtttactatgtacattaaggatttttgagcatcatgttgattatggatcatattctaaacttcaaatcttctcgacaataatttgcatcccaacaatatgacacaagcgaagctccaagttgttcataaagagttgtgtattttccagcttttagctttatgaatgtcataattctaatacctattttgctagttcagataatattactgaaattaatatggtcaatatatgaaatagagagaattggatttaacagcggaccggaaacaggaaagattttctacaaacacaaatatactagatgaagactgaagagaacgcatacttcggcaatcttctcgttcaaatcatcattaactgcgcattctggatttaaattctcctctttcagtgccaacatagttaactccttcagtgatgctggattacttagctctatagcattgaaatgggcaaaacgacgcaacacttgctgatacattagctctttgctaaagacattagagagaagttaaacaaattaaaagccaagaacaaagaagtgaagaacatgagaatcgtgtttagaatctacttttatgtatcgattttgaaaaagaaaagacagcatagcacatggaggtcccaagctgcatgtgccatttagaaactcacatatctacacatgcataaataataatgttaaataataataataaacatcccacaaatatgccaacacaaatacattatattttgggaactcgcacttatgctcgtgcaatacaaacatacacgcatacataagctgatgtaaaaaggaaggtttattttcagttgtggtctatattctttactacttatttcacttcaagtcctaaaaacttattttaatgttagtaatcaacctaataaaatttggaagtgccaaaaaaggagacaaaggttacatttccatgagtgacctcctcccaaatttattagggaccctcagttatggcgaaggaaaagaaaaactgaggtgacaatcagcaatttggaaatttcaacataaacaaaaaaagtacaaactatgacatgaagatgaaaccctctcaatacaagaaagttcccaaccctctactagggtcaagaaaagataagccctcaaaacctgtagcttgataaacactatttgctaaaaaaaaaaaaaaaacaagttgctacccaaaacataactttctcccaaagccctgttgctgcttcctcattatcttcaatgattccattatttatttccagtcacaacctaaagaacagcaaggatggcagattttgctgcttcctcattatctttcatatttttgaatggagtgtgatatatacagtgagcaatttaacccacaatt

SEQ ID NO: 320 - DNA, 2355 bp, Cannabis sativa
atacataattattacctaaattagtatctaactaatcacttttagtaactaattactttccttcccgcgcaaattagacttaactaaaaccccaatttctcttcttctggttttttcttagggtttctccaaacaacaacaatggtttcttcttcttcagagaagaaggtgattgagattgacgaagagctcgacgcagaccgaatctgctccaccgattacttcttcgatcgaattggagaacctgtcccactcaaacctcctcccttcaactacgatctcaaatcccttccttcacaacctctagctctctccgagttccacggcctcatcttcctcgctctctcttctggttcgtatctctatttatctctctctgctaaattcagtttcttttcttttgcttatcgttcaattttgctcttttttagggttttgcgttgccaggactaaggatgttatagctctctcacttgaaattaaggaaaagggaacttcttcttcttcttgttctatacaacagtccagccttgtggatgttgctattggagaagttcgtattttggcgctttctcatgatcagtccactcttgcagctactgttggagctgacattcatttcttctccgttgatttgcttatttcagataaggttggaaagatcaaatattgaagcttttatagatactgtgtatgacttttggttcttctgttgctttaattttttgttttggcagctatcaaaaccagatttttctagctcggtggatgagtcaagctatgtcaaagattttcggtggagaaagaaatctgagaatacttatctttctctttcaaatactggaagtctctatcgaggaactcttgatggtcccattaaacatgtcatggaggatgttgatgctggtaccttttgttttcttcttgtttcttacttatataattatcagtttttttataacataaaatagcaacttcattgtaatttagcattttgaatacaaaagggcttgaaaatcagcccggacattatgctcatgaatgctcaatgctataaccaaagaaataccgagaatgtctagctaataatgagctacttggtttgctgatcctactataaaacgtaaagtaacatgatgaagagaagaaagcaaatgtttacaatcatagataatcaacccaaagacagaaacagaagacatgtgttgagtattatggaaagcttcagtctccacttccttccaactctttcttttgacccaattaagtacctctttttattcccatagcctccacaacctcagctgcatatagacctccgttataagaagctttaatttctaacagcttgcctgaggagtttctaaccacaatcccaaagccatatgagttttctcttgcaaataaggcggcatcaacattgatcttgatattattagtacccgattttgtccattgctcagatttattatcatcaagctaatttctttttgttcggaaactcatgtttgggacaaaattctcagtgggtatatctagcagacaaaattctcagtgggcatcatgtctagcagacaaaattagttgctttcctgactggaagttttaattaacattttgaaaaaattgttgtaatatttgtttacaccttgttccttacaaaggttttctaatgctagttatgatatttgttgtttcttacttataaagagacttggtaggtagcttatgtagttatcaagctaatttctttttgttatgacactcatatttgggtaaagattctcaatgggcatcatatctagcagacaaaattagttgcttttctgtcggaagtttaatttacatttcgaaaaaattgttgtaatatttgtttactccttgttccattcagaggttttctaatgctagttctaatgtttgtttgctgtatagttgagtggaatgcgaaaggaaattatattgccttggcgaggaaggatatgcttatcatcttgtcatctaagtttaaggaaaaatcacacatggtacttccattcaagtcttggattggtgactctgatgaggattgcaatgtgaaaggtgcaacatatttattatttctttgtatctaactttcatgtgtgatataactgatgtgcattcaaatttgatttcctttattactgattgtgccttaatttctcccttttttcaatcagtcacttgacacaactactgttttggtatattttatatggctcctcaacagttaagttagtattctcattataagtataaacactaagatagaccactgtcttgaaagaattctgtataatgatctgtattgatacgaaaggtaaaagttacaaa

SEQ ID NO: 321 - DNA, 7044 bp, Cannabis sativa
cggctttcgcgctagggcgctcattcgcaaggaagatctccactcatttcattttaataaaataatatataataaatatattttttataatttttatcacctaatttattatatttcatcatttttttaatttttttttttagaaaaagacatttactaatttaattttaaaatttaaagtcattttagacctttacattttgataaaacacataacacaaaattattgtcgtttggatttaataaacgacactgggccattgtgatgatacgattcatttccagcccaataagtggcccactgagccctctgaagaagccctaaaccataaacattcacgcttctttgtttccttaaaccctaaaaccctttctttctaattttctaaaaccttcattctgttctttccgacttgggaaaaattaacatacaaccacagaaatggctgcttttacttcccttattcgcaaatcagcgtcttccttggctccattagcttttcgggctgtccggactcagaggaattaccagtctttggttgtggttgccataaaccatactcatttttctcaaaatcactctcacgcccctctggttccagcctttcactactccaccgagtcaaagaaacccagctcagacgagtcgcttctccgagtaatcgagtcagaaatccattgcgccacagaaactgacgatcaggaccgggtgagactttacattaatctattgcattgatgggttgtttggttttgattaaaatgcattttttggggcaagaaatgtgaggttagctttttttgagtctcagatataatttcagttcattacaagtatatctcattcttgggtcagctaaccaaacttttgaagtaggggaaattattcctttgccttttgtgctaacaagctcagaaatatggttacttattttgtaggttgaagaggttccaaatggtttcccttttgaaattcaagataatcctggactacaaaccataaccctaaagagaaaatatcaaggagaagatattcaagttgaagttcatatgcctgatctagtcactggtggacaaaatgacgatggtgatgatggagacgatgatgaaaaatctattcaatctagcattccactagttgtaaatgtctccaagaagagtggacctgcattagagttcagttgcactgcctaccctgatgaaattgcaattgaaagcttgactgtgaaacatccagaaaactctggtgatgaaattgcctatgaagggcctgacttccagtaagtctgtgtagagaatgtttgaatgtttagcatcactagctgttaattttcaatacaatacaattttgttttctaattgatttgaatctcttgtgtgtccagtgatttggatgagaatctgcagaagtcattccacaagtacttggagattagaggaatcaagcccagcacaacaaacttcttgcatgagtacatgatcaacaaagacagtagagaatatttgttgtggttggagaaacttaagaaattcgtccaagcataaaagaatgcatacttgatttatgttggaggagatggccatatagttgtttgttaatgacagaaataacaccctgtatcatgtatggaacaatatatttgctctttcaatgataggatacaacaaatagatttttggtagaaatgtagacgtactttctctttcaattgacaaacctttgatttgagttttttttttttttttttatcattatataaatcgagaattgtgttcttattttccatagacgaagtgggggtggtctgtgtatagtttcatttcatcgatattttatgagtttatacaattttatacctttagcttaaagtttatgttaaataaatatatatgaccatatatgctttaaaaattcacaatatcgggagttttcaaatatatatttaaaatataaatttacttctaacttattgaaaaataatctacgtttcttcaaaaatgtactctgaagaaaagtagattttttttttcttccaaaattagatttttgattgattacaaccaataaaatgccatttagttcagtatatggtcaaacaaccttttcggagtgaggatgttggtagttccttcccccaccatgctgtgtgttccaatgaatgagactctacttactttatttgtggatgcttgtgtgaatgcagtgtttggttctgttgtgttaaaaatattgaatatgcagtagaagaatgtcacgatgatgaaatcagggatttggtacagctgtatattccttgattttattccttttgtatcccacaatttgtgtataaatagccaagcattaattgtaaattgtaaccgtttgagcagtcaataatatcaataacatagtctaaattttctcctcaatactctccttttttatcttggtatcagagccgattctttactatccatggccagccctgacgattcctcatcaaccatcggtggtgctcaagacgtccctgctcaaaccaccgctgaaactcacgctccggttcaagcagctcctgcaactgctccagtctcaatctttcagaaccttgctcctctcaccttgaagctcgacagaggcaactactctttctggaagtctcaagtccttcccgctcttcgtgctcatgatctcgaagggtttattctcggcacaagagtttgtccccctcagttcgttgacaacaccatcggaggacctgtccctggagaaccacgacaactcaatgttgggtatgctttatggagaagaacaaatcaggccattatgagttggatactcaactcaatctcagagactatgtttggccatatagtcaggtgtaccacctcctttgaagtctggcatactcttgagtgtctgtttaccactcagtcaaaggctcgcaccctccaaatccggtttcaacttcaatcccttaaaaagggaaatttatctattcatgattatatgctaaaaatgactactctggctgaaaatctctctgctacaggtcaactaatttcagatgaagaactgatactctacatcctaggaggcctaggacatgactatgaccctgtggtcataactctaacctctcgatctgaccctataacacttcaagagagtccagtttctcttgcaaagccaagaaatgtgattagagcaaatgaatgcccctatcgcaggtgaaactctcactcccagtgccaactttgcagctcactttcgtggtcgtggtggaccttctaatggcagtcaaaaccgtggttacccttctcgtggtcgtggtcgaggtcgaggaggcagaggaaatcgtccagtttgccaactctgcaaccgtgtgggtcatgtggtaggaaagtgctatcatcggtttgacataaactttcaagccacaactcctaatgcaaaccagaacaaccaaagcaatcttacaaaccaacaacaatctggacaaggtcaacaggcctttctctcttcctctgctgaagccaaccaagacaactcctggtacatagacagtggggccacaaaccatatcacctcttatgctcacaatctgcagaacaaatctgagcacaaaggtagtactcaactcttgattggtaatggtcaacctcttcctataattgagattggaaataatattctacatgctcacaaaaactctgtttctatgcttttgaaaaatattttatgtgtccctcaaatgactaaaaatcttatttccatatctcagctaactcatgataaccctgtgtatgttgagttttattctgattgtttcattgtcaaggaactggctacgaagaaggaggtagctcggggaatgcttagcaatggtttatatcagcttcatagtcctacatcatgtttcggatccaatccttcaagtcgctccaatacttatgtttctgtttctcctaattccaagaagagttttatctcagagtctagtcctgttttagagtcaagttgtaagagtctttttaaatcaaaagagcatgaaaaatttgttcaatctttgtttgttcaaaaacagtaacagtggtgatatcaacatttggcacatgagacttggacatccaagtttaaatgtaatgaaagtcatgttaagcaatgaaaaagtttgttttcagtctcagcctaaattctgtgatgcatgccatataggcaaatcaaaacacaagcactactcttcatctaccaaaacagccacaaaacctcttgaaattattcactcagatgtttggggcccttcaccaatattgtctaaagatggatatagatactatgtccatttcatagatgagtttagcaactttacatggatttatccattaaaattaaaatcagatgttaaagaaacattcattgtctttcaaaagtttgatgaaagaaaatttgagtgcaaaatcaaagtgctacactcagattggggaggcgaatatagaagccttgcccattttctagcctctctaggaatccactttaggcatccatgcccacacacacatcctcaaaatggaaaatccgaaagaaaacaccgccacatagtagaaatgggtctcacattgctcactcaagcctccattcctctccactattgatgggaagccttcagcacattaacctttcttataaaccatctttcaactccaacattaaatcaaaaatcacccactgaagtgctttttaaagtcaaaccaaatatgcattttctcaaagttttcggttgtgccgcttttcctcatcttcgtgactacaatcaacataaattagatttttgatcaacaaagtgtgttttccttgggtatagtcccaatcacaaaggctataaatgccttcatccttcaggtagagtatatattgtccaaagtgtaactttcaacgaatctgattttccctttgcttcaggctttagtgtgtctcattttaaaagttctgatattaacacatgtcttagtcaagttcaatatagtcaatggttgccttttttatctaaccttgaacaggaacaggaacatgatgaaggacataatgatgctgaaatggaccattgctcaacaacacctactctacatccttttacaccagtttctaaggctgcctccagcaataatcaaagtaagactccttacacttcaaactcttactccacaatcccaattgacacaaatttgcccatctccattcctaattcatctccaatacagcccaacacctcaaccgaaacccattgtccaaataagtcctctcatcccatgatcacaagatccaaggccggcatttttaaaccaaaaatcctcttagcctctacttctcatttatccactgccgattgccttccagaatcccttgaacaagccttaaattctccaaaatggaacaatgccatgaaggaagagtactatgcccttaagaaaaatggaacttggataattgttccaaggttacctcatatgcatgttgttgaaaacaaatgggtgtatcgagttaaatataatttagacaacagtgtaagccgatacaaggctcgacttgtcgcaaaggggtttcaacaacaacccggtatagacttttttgaaactttcagtcccgttgtgaaaccatctacaatccgagtcattctctccattgctgtaacttttgattgggacattcaataaattgatatcaacaacgcctttctcaacggcactctccaagaagaagtttacatggaacagcctgctggttttattgatcctcagtttcccaatggtgtctgcaagcttcaaaaggctctctatggcttgaaacaagccccccgtgcatggttcgacaaactcaaaagttcacttctaggccttggtttcaaaaactcagtggcagatacatcattattcttttacaaccaatgtgatgctctcttatttgtattagtttatgtcgacgatattcttctcactggaaataatgcctctcaagtcactgctattatctctaaacttcaaggtctgtttgctctcaagtctctcggatcagtcacatactttcttggttttgaaaagtagggggcctcatggtctgcacttatctcaaaacaaatatactactgatctgttaagaaaaactaacatgcttcaagccaaatcatgtcctactccaatgaatcaaagcaacaagtcaagcttacaagatagtgctccttttgagcatcacacactctatcgcagcgtcataggcgatctgcaatatctcactcttagtaggcctgacattgcttattccgtgaacaaactaagccaatttcttcaagcaccaactcagaaccattggagtgcttgcaagaaaatccttcggtatttggttggatcaattggagaaggaattctatacacttgggtagcaaatctgaccattgaaggattttgtgactccgattgggcaagttccttggatgatcgaaaatctacaacgagttactgtatttatttcggcaataatctggtaagttggagctctcgaaagcaaaagtcagtagctcgttcaagtactgaggcggaatatagagccttggctcaagcttgtacagaagttgtgtggctgcaatccctcttcactgaaatcggtattaaacacaaagggcctgcaataatctggtgtgacaactcaggggcgagacagttaacatccaatccggtcttccattctagaaccaagcacatcgaaattgatgtgcactttatcagagagaaggtgttaagcaaagaagttgaagtcaggtacatacccacacaagaacaagttgctgatttgctcacaaaatcactaagtatagctcagttccaaaacgagcttgctgttacacatactccacagcacaacttgagggggcgtgttgaaaatattgaatatgcagcagaagaatgtcacgatgatgaggaccaccaattgtattgacacgttgcaaatgattggctgcagtacaagtttgttataccttttcctaaaaatcagggatttggtacagctgt

SEQ ID NO: 322 - DNA, 7891 bp, Cannabis sativa
tgtatttattgctattgaatccttatcacccttttgcactaatgtcctctagtatcaatatttcaagcattcaaagttcataaattgtatttgttatctaaaaggaaaaatgctatttgaagtacaaacaatccatggcaatggcaatcatgattttgtgtcaatcacttataaatttattgaatttaatcaaaacaattgggataaacaagcttacaagggaatgaagaaactatcaattattaagttactcgaaataactcgaacttcgacgacatgtctgattatttgaactattcttatattgaaaaaaaattgagaagcctcttaaataatctctcatcactcaatatataaaaagttactagtgtaggaggctcatcgaatcaactcgaattcgatctatgtatagccaagtcgtcgggtgcctactcttgattcctaggcactggaaaagcaatcacatctcgaatactggctgcgtttgttagaatcatgactagcctgtcgattccaagtccctgaaacacgaattcttaccattagcgacggatgcatgaaacagttgtcgggtatagaatgtatacgacacatgatgttttcaaccgggaatctgcttgagtaacctcgagaatttgagctaggaagaatcgaacttggaatcgtgctttaaccacatatcccaagttctaaaccttcaccctttactactaggccaaccattcggttatgtgttgtgtactagacaatgtctatagataaacttagcataatttcaaagtcgaaagaagatagataaaaggatgacagtacagtaccattcctgaagctggaggcattccatattccaaagctgttaagaaatcatcatcgagtgttacttcatatgactcatcatcatcctcgttttcctttttcttctcttcggtgctattatcagcttttgaaatagcttctgctctcttctcgttgtgttgccttacttgctcttccaaccgtcctcgctgcaagaatgaaaggaaatcaaaatcaaaatcatctccctagttggaaccaacatatgacattttgctagaatcgatgattacctgatcaacaggatctgttaattccgagaaagcattggccagctcacgaccacatatgaaaagctcaaatctttcagtcaacccgccatgcctaatatgaaataacatagaataagtcgaaaattaaagctttcatgagaaaaaatacagcaataaagaacatgagaatgtcattaccttcggtgtcgttttgctagaggggatatctcaaccggatagtctaacacaaatgtaggttgaatgagctttgattcaacaactatctcgaaaacctaaatagtagtgaatacaaattgcttagaacaaaaataacgagacttcagagtagtggaaactcaagagttcttgattgtaaatgcagattaacctcattaagaacatggccaaccgaagggcatgcttcgatggaggacttctccttgttaccaagattcttaagagtcccgagagtaacttctttagcagcatcaaggtcgctgctcaattcatggaaatcgattccagtggcttctttaacaaggttgtgcatggtttccctcctccaaggtcgttcgagacatatctcctctccctgcatatagatatgttattaaacagaaagaatctccgaagtagtaaacctttagaccgcataattacctggtaatcaactgtaagcttcccttgaactgcaagtgcacatcgagtaacaatttcctcggccatgttgatcatactttcatagtctgaatatgcttcgtacatctaagatcaaactaaaagcaattcagatcagagctttgtaaacatcatttagcatatcaaataaacgaaaaaaaaaaaattaagaacgagtttacctcaatggtggtaaattctggattatgacgatttgaaattccttcatttctaaatattcgaccaatctcgtaaactctttcaaaccctccaacctgtcatcgacaaagatttacgagaaaattatgacaccagattacggttaaagggtattatgcatattagtatggtttaaatcctcaccagcatcctcttcaagtggagctctgttgctatcctcaaataaaggtctcttcctagcgaattatggtacgtaacaaatggtctcgcttctgctccaccagctgctccctagttgatcaagtcaattaaaaaccaaccttcatgtcgaaacaatactcatatgtatgtaaagtaaagcaccaaaaaacataaaaaaatattccttgaaatgaattcaatacaatttaataaaataggaaccgaagaaattcccggctggtattttcactgttcaacccaatcatctatacaataaacttgaaattatcttttttaaatattcaggaattagatacaacagtaatcctacataagaactcaacaacaatagaaatgctaaatcttgatataaatgaccataaaatgtttggacggtagacaaacctgtagaactggagtttcaacttcaagaaatccgaaagattccactgtcttgcgtaactctgatacaatctaatccaccaaagaggaaaaaacacacttataagttccccaagtagagaaaaagggaaaatatttctgcagaaaagacatgtagttgaaataactaaaatatttttaatacttctcagccttacttaccttcgctctcttccgaaatacatcggctacttcaggattggaaatcatatcaatataccttcaatagaaaaagcaaagtgcagttaagtatgtagaaaaaatggatcccttcataccatcaccatgcactataaaacatgttattttccctaagagacgctctcactcaatctcaaaccgtaaaaaaggaacagaaaattcacctttgccggtaacgcttatcaacatgagttagaccatgatatttgtcaggtaaggggagcaaagattttgtaagaattgaaaaggagttcacatagacagacagctcccctagaaaaacaaacaaaaaaaaagtatggttagtttcaaactcgatggcattggtttgtctagacttcttccaaatccaatactaataagctaggattgaatttagcctcaacaattgaaatctaattgcaatcagattcatgtataaaagattaaatttttaataagttacctttctcggttcgcttaattgagccacttgcaccaagtatgtcaccaatatcaacaagattcttaagctggtcaaattgatcacttaaaaacctccccttttcacaataaagctgtgttcaaacattcactaacttgagtgagaagatttttcattaccaaatgtgagaaaagatttaaagttacaaactttggaaaactcaaacccctaaaaatataccaatgacagaaaacttagttgaggatacctgaattgtcccagaatcatctcgtagagtgagaaacgcaagctttccaaatgctcggcgagccacaattcttcctgctatcgatacattgtctttctcactattcatttcttcaccattttctaaatttttataagtctcttgcaactgattagcagagtgagtcctgtcccacttataagcatatggttccaaccctttgcttctcaattcttctatctacacaaaacacatacatacattcactcaaacacctatatttatggaaaattggccaaactaactatatgaaaataattcaatgtggttattaatatatggtacaaaacgaccatgatcgcacagtgtaaagttattttgctaataaaaaaatttataatgattatttttaaaaagacattctttatttactaagcagtgttgtgaaagaaacatgaaatttgccaaactaacaacacaacaacataattaccacaatgaatttacacaacaagaaatataaaatttgcaaaataaaaacaaatttacacaaccataatgatccatttatggtcacaaagtgtaatttttgagatagttttgtaaaaatagattttatgtaaatttttattagcaaaataaacatgtaattgatcgcacaagcaaccataggttaatttgtgcgaccataaaacaaccataaatttagactctgcgaacattatgttcgcatagagtacggttattttgtaaatttactatttcaaattgttagtttggcaaattactctaattttcggtcctttatgcaatcaaaatgtggttattttgctaataaatttttttaatagtttatatttttacaaaacacaaaaaatcaaacacagcatcatcagcaatcaaaactattctctcacacacatttcatcaaacagtttgcgtgcattataaattacctcaaaaacaattacataaactcatcatccaattaccataaaaagacctcaatcaaaaccaatgaatgatataaagaacataccttttgtaatctaatggcccgaactgactcgggacttgaagtagtagtagtattggcagaagagcggcgattacgggagttggggttagtagtggcggcgggggcagaggaagaagaacaagagcgaatgaggaatggggaagaagaaaaggaagaggaggaagagcgtggtgctctgaaggaagatgatgaggtggtgttgaagagttgcttcaatggacgccattggaggctcaagctccaagctttgacggcttccattgtttctctttctctgagagcaaagccacaatgaaaatagatgataacacaccaaatagcacgtgatagattcatggattgcacgtgcctctatcttatgttactcattttttttttctttttaaaaaagaaaatttcattaactataagagttttttttttttttggaaaggaaaggtttattagtatttttgttttttaaattttgacatgtattaaattatattttttaatttttttaattgtaaaaaattttcgtgaactattaagattattaaatttaaggatttttgtctaatttcattcaaatgtactaatttaacgattgtttatgtactaaatcatgctcccaagactttgaaatctattaaattatgtctctgaaatttttatctatgttagactttccttactaaaattggacaaaagtttttaaatcaaacaatttcaatttcaagaaaaaattttaacgaccttaaaaatttaaagagtatgattttgtacatgttaaagtttgggaggcaaaaatcttaattagccgaaagtaaatatagaacttttattaatttgccatatcagtcaaaagataagagtgtaactcaacagaaacatctcccatgttgaacactcgatattgaaaagaacaagatgttctagtaagaccatgaacaactatattagtagatcatttaataaaatataagaaaatattgtgattaagtagatcttttattattaacttagacggctaccaactctaactctactttcattaagtacaagagtttatttaattaagggtaactagaatttttacctctcgaactttgacatataccaaatcatgtcacttgaaatttttttggtcgttataaattctcctaaattattgaaattgttaaatttaagaatttttgtccaattttagtaaaaaaagtttaacacgagtcaaaattcatggaacatgccaaagtttgatagacatgatttgatacatatcaaaatttaatggatataatttagtatatattaaagttttaaaaacatagatgcacaaaataaaaataaaaatcagaaaataaattttaagtgttaaaagtatatcttaaaacataattatgaaaaaatgaaagatcctaaaactatcaaaactcggatcaaaagttgtgttaaaactatcttcacatcctttttcattacctaaaatttctaacacaaacaaatattaaaaaacaacataattgaaaaatctaaaatcacatcaagaacatgaacaaataaatcaaaaacaaaagaaattgaaagaacaatccataatttgatctcatgtagtatgtacaacatgtatattaaaacaagacattgtagtgagcctaactttcacaatgtacttctcttgttaaactttaatcaatctcagcccatttcctaaaggccaaaacataccgaagccggtttctttgagcatccgttctagcttccgacgacttcaagttcttgtaaagattcttatgaagcttcaagaactcgatcttatacatcgccttgtctgtaaacatattatgtttcctcatataatcaatgatctccattactctttcaaagtaaccacctttaaggaagttaattagcaagtactcatacaaatccctgctaatcgaaagatttccaaactccatactcctcttcatgtcaccccacaagattgtaatatcccggtacatttccatagaagaatatccacacacaagattagcaaaagtttcctccgtcggttgaatgttcatctcttgtattcttctgtatgttctcatagcatcttcaatcattttcgccttgcaaaagtagtagattgaagaattcaactcgaaaaccattgaaggaattcgcttctcattctcgtctttcacttcttgaatcaaagaatgatataaatctgttttaccaatcgagtttgatgatgcattttctaacatgttcgatagactctcggtcacaaccatcttatcagataaagacatcggcgtaccagtagctattctcatttgtttaagcaaagcctttgcttctcgtagcatttttcggttaaagtaagctgtcaagagtgagatataagtactaacacctatggcggcattagagctttccatgtcatccaaaatgtcatgagccaactctagccagcctaaacgaatacaagcattaatcacattagaacacaaatcagagcttctcaaagaacaatgttccttctgaatttcgagtaagagtttcgacagctcactaaccctcccagctgttttgaattctttgatgagtttcgaaagagccctgttactaaaaacaagtttgcccttattcctaaaaagaataagctcttgtctactctccattttcaggacagtatccttttgcagcaactcgggttgtatctgcatcttcaacccatcttttagattgtgagatccaattgggacaagaaaaatcttttctaagatcttgtctctttgaataggaacacactccttgtacctgcaaatatgtcccaaaagctcagctacagcatcgatatcgttgaatttgaaatgcaagctcaacaaactatcatagtattgtcgataatggcaaacgaacttagacaaaactcgatcaacatggactttgtatttctttagctcatccctttgtccattcatttcatgaatttgggcaataatgctgatggaatgagcatcagcaataactcctgtttgagccatcaattccataatttgttgtcctttaaaagccattttaaacctcacacatgcatcaagcaccagattaaatatcatcgtatcgggttttataagttctgcatgtttgcccttgttagcacgtaacttgacaaattctccacataattgagccaagaaattggaagcaagatgtgtaccgatttctgtcttcaccaaatgcagaaaaaccaaccacaaaatattcatggaaggtaacatgtctttctctaacatcaatctaagaatcactgtggcaggattaggcaactgagaccgagctaaggagagcgagagttttgtcaagacatcgccttttagcagacccgacttctctttcgataataacaagactaaactacatgcttttctcagcca

SEQ ID NO: 323 - DNA, 4051 bp, Cannabis sativa
ataagatgaaaattgtaacttgtctatgatccatccttttatatttttttgggtagaaaaatccatccttttatatactaatctatctatatatatatctatatacataaatatatatatttatatattatatattaatataaaatagttagctgtttaagttggttgtttttcagatttagagtaatgacaatgaaaccatcaagtaacatatggattcgacgccaagaatgcccatgtgaagattggaagtgttgcattaagtttgaaggagatgatcaagccttattaagctctcaccatgtgaagactgagatgattacatcgtcttcgcctgtagaagctgtctttactccttatgtaggtcaaatttttagaagtgacgatgatgcattcgaatactacagcaattttgcccgcaaaaatgggttctcaataagaaaagcacgctcaacagaaagtcaaaacttggggatctatagaagagattttgtttgttatcgatcaggatttaatcagccgcggaaaaaggctaatgtggaacatccaagggagcgtaagtcagtaaggtgtgggtgtgatgcgaagctgtatttgacaaaggaaattgttgatggtgttacacagtggtatgtttcacaatttagtaatgttcataatcatgaattattggaagatgatcaagttcgcctacttcctgcgtatcggaaaatacacgaggctgaccaagaacgcattctcttactttcaaaagctggttttcctgtgaacaggatagtaaaggtgttggagttagaaaagggtgttcaacctggacagttgcctttcattgagaaagatgttaggaattttgttaggacttgtaagaaggcagttcaggaaagtgatgcattgctaaccgagaaaagagagaatgatatgttggaacttgttgaggcctgcaaggctatgtcagtaagggatggagattttatctatgagtataccactgatgaacatgggagagttgaaaatattgcgtggtcatgtggaaagtctgttcgttcatttacagtgttcggtgatgtaatttatcttgacaccagttatcgttcacttactcatggattgcttcttgggttgtggtttggtattgataatcatggcaaagcaattgtgttagggtgtgttttgctacaggatgaaagttctcattcactatcttgggctttacaggtttgtggatgcaaatctttgtgatcaatttgcatcaatcttcatgttaagtttatgatttttcttcttttgaacagagttttgttcaatttatgagaggaagacatccacagactattctaaccgatattgattcagggctcagagatgctgtggcaagggagttaccgaataccaagcatgttatttgcatatggcatgtactgtcaagaatatccagttggctgtctttgcctcttggatcacaatatgctgaatttaagtctgattttgatatgttgtgtcatcttgagaatatagaagagtttgaacatcaatggaatctcttgattgctcggtatgggcttgctttagataagcatatagcattactttattcatatcgagcatcctggtcattttcctacattagaagttacttcctggcttgtatgatgacaacagaattttcacaatgtttagagtcatgcataaaaagaattttgagtgtacagacatgtcttcaagtattctttgagcaggtattcaaatgtcaccattttcatgtcctatgcttatttaattagtgaatgattgtgttccattcttaattattgtaggttagtattgtcgcagagtctgcgaatcaactcagagatcgcatgcaatatgtgcataccaagacttgcatgccaattgaagaacatgcccgaagtattctaacgccttttgcatttcaccttttgcaacatgagattgcatcgtccatgcaatatgccaccacagaaatgacaaatggatcttatattgtgaggcattacaagaaaatggatggagagtgccttgttatttggaatcctgaaaatgtacaaattcattgttcctgcaaagaatttgaacattctgggatattatgcaggcactctcttcgagtgcttacagtgaagaacttctttcaactccctgataaatatattatgcttcgttggcgtatagagagttccttgaattttatgaatgatcacaactttccaagcactagtgatgattgtgcccaagcctttcactcgctaactgcaactatattgacagagtcattggctgccaaggagcgatttgattatgttcatagagagcttagagtacttcttgagcatgttcaaaatatgccaatggctgatgaatattcttcacatatgacagctaacaacgtcagtgaatcttaattttttctttaatagcagatggtgaacgaaataaatgcttccatggaattgtgttccttcaaagattaagggttcctaacggtcgaagtgatggagtggaggcaccaagcaaaaagtggttttttttttactaaaatcatttttctcggaatcaaaattcttgcaaacaagatctccaggtaaattcaatttctgatcaaagctggaatgccatttttagattcttgtaggttcaggtctcattttcattctttatcgacattgatatttaactgaatgtttataaaggggagtaggaaatgatctttgacagcataaattttgaaaatcttttttcttttttggttgataaatctccttaaaatgctcactgggttccttactttgacatggttattaattatactgacgattgatgaaatgaagtatcaggactagaatttgaagaacaaccttgttttttttttttttttttttcattgaataagttaatctatatttagattaatgtaaacactgtaagacctgttttatacatatcatgtgtttgcttggtcatattttcattttctttttatgtccttagttttttgtttcccaaactacatttgttcactcactttataaatagaggaagtaggaacaattaatgtaaatgtcaattgaagaaaaaaaaaaagaaaagaaaaagaaagaagaagatatatgtgaatgtgatgtgttactatattaacaaattataatgaaatgtcaactttgaagttgttaaaacaagacaattttagggtgtggttaataagaaagatttgattaacaaaagttaactgttgagcactatgcaagtttctgattttactagtgagcattttttttttttgaaattttacaaaaaatactgaattttgagtaaaaatttacaattttactgttatacggaatttttacaaaaatattattttttttataaaacagccataaaataacaaaatagaataattaatataagaacaactaaaaaataattgtagaacaacggtataaatttaatacaatacacagtatttttttaaaaaaattcgtcttgaagttaaatattttaatttgtggtataattttttttttctcgataatggggttgaatttttttataaatgaaaaacaaaataaggataaagattatcgagatttacattagtaacccaatattaaattattaaaaacactgtaacaaacttcaattggcggtgggcacactagtgacttcaaacatgctcttttgtttctcccacaaaatgttgtatcgtgaaagacaaagtcatttcaagttgtccctcctattcacatgcatggtctctctctcgactcacctcacgtgccaatacctctcccttcgatattctttttcaaaaaaagaaaaaagttttaactttattatttattatacaaattactatttttttaaaaagctttaaataaccactaggtttaatatatttgaattaaataccaagatctcaaaatacatccgagattctagcatagtaaagaagttaaaggttctgattaattttgtcttacacatcataatatttagtttggtacatttttaggtactattgtattacattaca

SEQ ID NO: 324 - DNA, 2726 bp, Cannabis sativa
  modified_base (426)..(430): a, c, t, g, unknown or other
atgtcaacctaattgcattttggcttctaaaacattacattagtctttttcactattgagtaaccacacactatcttaatttatcacaaatattcaatatatcatgactaaaactaattaatcatataaaatagaaatttagatcaaaatttcttctgttgtgatatttatagcacttaaagcatgtttgtttgatccaatcttatatacacgcacttaaagtggtgtttagttggaggtagtgaaatggaatggaatagaaaggaaacaattttcattttatttttttgtttagttgcattttaaagtattagaatagcattctaataaaatgttctttccaccattttggtggaatgactattccattttaaaaataaatgaaagactattctaatgtaacaagagaaaaaatttaatgatttnnnnntcaatttttttatgtattttaaattttattccattcctattttcattgctattcctattcctattcctacattttcattccttccaaccaaaccccacctaatagttgtcataaatataagttgtgtttggtaatatttttctaattaattttttgttttaaattagaaaaataaaaatattttctaaaattattttcatttttcattttttttaattaagaatcaaaattttaaaaaaaaatactttcaaaatttttttagacagtttactttttttttaaaacaatattttggacaccgaccttaatttagaccttggaactcagacttggacccagacctaggacccgaaccccaaacccagatcatgacccaaacctcagactcgaacttgaatgtcggtctaggacgtagacctcgacccgaaccccagacccggaccacgacctagacctcggacccgaactcgaacattggcctacgacctagacccggacccaaatcccaaccaggccccggaccttgaactggaccctaaccctaaattcggaccccgacccccggacacaaacacggaccccagctctggaccccgacctttagacacggacacggaccccaacctcggacctggaccaagaccccgacccccaaacacggacgcagaccccgaatctagatctggacccaaaccccgacccccactcagacccaacccaagactcgaaccccagacttggaacccagcccacactcggaccccgaaccccagacttggaccccagcctcggtaccgaacctggacccatacccaaaccccagaccatgactcggcccgtacccaaaccccaaacaaggactcagacccggaccccggccaaccctagactcgagttaaataaaatcaacaaataaaaaatgaaaataaaatttacagaatatatttttattttttatttttaaaattgaaaaacaaatgtagttctaaaacacatttttatttttcaaaaataaaaaatttattatttttacaattaaatttaaaaaaaaaaaacaaaaacaaaaatattatcaaaagcaaccataatttattagttagtcgaattacacattttctcacaaagataaagtttgcaatttcaaatctctctcctagtgtgtaataaaaagctaatagcgcaccaaaacaataatagtgagtatttttgtcaccaaaatttagattgaagtggtacaaatattaccacataattttaatgaaactaatcatatgttatcgatcgaaaaagaaggaaaagaaaaaggcatacgttatcaaattgaagacatatgtggcgtattatattacctcatctttctgttctcttcgtctttattatgtccacaagtgatacccaaggagaaaagcaagggaaaactaacaaatgtttaaaattttaacatagaaaataaagtcatgttgttttttgttttaatgttttgagtagatagaagaggaaatctagtgttgtgtacggccaaaaatggcaacaatactactactagtcccttctcccatttcctcagcttcatcttcatcttcatgtttattggataagggtcatcagctgagcctgaggcacctccacctcagtcgccactcttctttttcttcttcttctttacccatttctaaacccctttcttcttcttttcaaattagagctctcaagcagaaaacagacgaagaagtttctgctgaggaaattactaaaaagttgggccttgaagctggtctatggaaggtaactaatgtttcctgtggattatgtttgctttactctttcaaatttcaaattcaattggtatatgggttttaattctttagctgaaatatctactaaatacttacttataacctaatttatgtccatctttaccttttgcagaagttctattagcttcttctttaatatatctttttccactctttatcttagttaattttaattatacataaaacccaatttgccgattatttatatacagatattcagctcaaaagatgaagaagacacagaaggtggggagaaaaagaaatcaaaaggagaacaagccaaagagttgcttacaaaatatggaggagcttatttagccacctccattacactttctctcatttctttttcactatgttatgttctaattaatgctggtgttgatgtccaggctttgctgctaaaggtacactcattccaataccaaacaaagccttattatcatcaatatcaatgccatgtttgcttagttctagat

SEQ ID NO: 325 - DNA, 4508 bp, Cannabis sativa
cttgtgaacccttttatatataaatgttgtttaaacatgtcaacccattaatatattaatgacatgtttaacacatgacaaattaacacatttatgacttgttaaagtattaaaataactttaaatatctcgttaaccagacagtttcatattggtcatgtcaacctaaacacgatcccgtttattaaacggattagacaagttaactcaaatacaacccgaacctatttaaagcaacattaacctgctaactttcgtgcgatcaacactgcacaaagctctctctagcaccaaagtcgatccttgaagaagatgaacactcctctctctcatctatccttctagttaggactgcttcaatcaatcatatagctacagtgttctatctcaccacacccttgttcctccataaataaacaatgtcctagtcaatccatcaccacatgctaattactcaagttattgttagcaatacggagcatgtgatgaatcttctcctatgacacgtatccttcatttgtgttagatattcaagaaaatctttccagagggagcacacattccgatcaagaaccaggtcatctcgtagagatgcaaaaccatcatctaaccaaaaaaaatacaatagtcccattccttcctcaataggagcttggaacttatttctctaagtccctccactacatggtgcacagattcagtcacaaaacatgaatgttgaacctgtacgcaaaccacctttccgtggttacaataattctcaaaatacgatagaatacgagcatgattcattcggctgcagctgcaagtgactctatcgttctgtctcccacatcagtcatgttgaaatgaggcttacaagggaacacaaaaatagtagactcgccacttgatggctgaaatgcagatgaatatcttgttgaagttattgtaaatctaggcaactgttgcatgccagaggcaagtggtacaagcttgtaaccaacaatttgctcagactttggaagaacatagatggcatcattgtgtgacccggacaaaacaaaactttgtgcatcagccaatgacaacttgagttcttgaagcaactgtgtttggttcctcactttaatatagtatgtaaagggatctcccagaacagcataaggaggacattctaaactcacaaccaaaggtgacaactcgagaatcacatcaggaagtctttgatcagtcaaaaccaaagatgctgctgagccaggctggtctccaatcccagcatatcttctccatttgatacgtacacttcctaacatgagttttgagacattcatctttggcttgacactaaaaaccttcttaaactcttctcccggtacaagaggctcagggtccgagtgatcactactgttttgcacagaacataactttccaatgtcatcatctgattcaactgaaatggatatcaactgcaatggtacatcagagcaatttttagcactaacaacaagtatacttgtttcactcagaggtagtgttaccagctgatcagaatcaggaactggcttgatttttgagggtaacaatgggtcattcctgaatggcagcataaattgatggtttattaagatggctgtctttccttcaatctgtaagctcttgtggatgttaactatatgggcagttgaatcattgccatcgggggaataacctagtgatgcatatagcataactggtttcggcctgtgccacttaatttccaatttgcaagaccacgagtctccagaatttagaaatggaacagacaccaaaccaaatgattcttgaattttcttgatattatcagcacccagattagattcatcctccccttctggtccagatatgccaagaagttgaacatgatgactatccagagtgataggttcagtttccctcggactgaacaaaccaccacccctaacatctaccagattgatctttaattcaccagaatgaacagcatgtcccttagcggccacggtaacaggtatcacaaagctctctccaacaaatgcagggccagaagcatctatgtttagattaacttgtgggtctggttcctcaacctgggtcgctttctgtccagtaaatgccagagcacgatccttggttggataagcctccacacggtcttcaaacttccaaagaggcaaatcacccattgaagcgggactctcagctctgcaacagattgtgaagtggggacccattttcgcaataacagatatgcattcaagctttccactttgatctggaatcagtcaacaagctcactttattattaagaaatgagaacatggagatgtcacaaataagtaaagggaaaatgagagcagaaacaagaaaatagctaaaggtaaagtgaccaaatctcgaaataagaattgaaccccttgtaatgtaaattactagcattaataaaataactaaatccttgatatcaacctaatccaaatgctggaacaattcgtccgatgttgacacaatcacaaggaaaacaaactcagtagcatttcaaaggtccaactttttaccctcgaatgtcattttagtcgaaaggcttaatatagcagtttctatatataaaaaaaatccatatttgaccataccgtttcacgtaagttgagtttttttatacactactcttactaatttagttttttcaacctactggttgaggttaaaaaccattgaagagagttagtatgccctttgaccatattctagcaaacactaagcacctttgaggaatcacttgcacacattagttaatccaaactgcaattaataatataatcttatgtggaagggcaggtgtacaaaactttgaagagcaaatatatgtttattcttgtctatgtgaaggaagatgagatcatagttgatttaccagatttgatgtcatatgttaggcgcagccacctgttttgagaaagtgacagagaaggggcagcctctactcgttgactctgttgatcatcatttgctgaatctaacagagttcgttgagaattcacaacaaaattgcaagcagactgattgaactggacttctaactgatcaacttcaacagtaagaggtagttgtgatagaagtgacaatgtaatcaaagtggaagaaccaggcttaactatgtgttcatgaaaaacaactgaagcaagaagaaccactctgagggggctgacaagatcaatctcaagatgaagttgattaactccagttactctgagatcagcatcgctttcgagtgaagtcaaactcaactctccactaataagctcaaacacttccttgtgtattaattccttttgttcaatactagcagacccagctggattacattcttttctggaatactggacaccaccagtatcagatgatacagggagggcagccatttcaagagagtactctataaaatccttaagctgaccttgtttcctagagcattctcgcaaataacccaatacttcccacagcaaggagacccatccttcttgtctgtatagatttgcaataccatcaaaaagttgttttgcactgctgaaatcccccacaacatagtattctgaagccatctggaatccacaaagagcagccattctctggactttaaaattactaaatgattcatatgattttttaagcagagcaataatttcaatggaatcttgaaacctttttccttcagaaatggcatagtgaatatattcatcatcagtgaggctgaaagtgaagaaaataatttcaagcctttaatagaaaacctaagccaaatcaaagacaatttttaaggaaaaatatgtacatcaataaaacttgacttacggttgcattagaaatgcatttccttgctcaattaatcgagcaaattgacccacaaatagtgaaggtaccacagagtcagtgctattatcactatcattgaaagtttctgacaatgagacggcactttccaaatatgatcttttctccttcaagtacttagcagccaactgtttcaggtaaatgttttcattcagctcagcgatatgcatcaataacaaaaacaagtagctgattttctaattattatagttgcatactaactttacagcaactggataagataactaaccaagttcaattctaggagccatctagtaaaatagaaaatgaagactacaattaataatgggaggacaagtgcataggtgagcaagtcccataaaaaattgataaaaataactaaccaatggtcaaattgcttggagaacaaaaaaatataaaacataaccaaacatatgttatagaaatatatatttatacatagtatattatcggtatctttgtggatttttagttctacagattttcatgttttttctacctctactctactcaaagattggaatcggtggttgtaatttaagatgatcccttatcattttctgtaattcaccttactctttaataataatattgttcatatttttttaaaaaataaa

SEQ ID NO: 326 - DNA, 2297 bp, Cannabis sativa
tttttgttttccatgcatgccaagttataatcttttttggttttttgtgtttataggggtgattctcaacttgggtcgtttctgtttttttattttattatatattatatatgtttgctttcttgtgttttattttattattattattatgtgaatgctgagattgaaaagaaaagaaaaggcctttgtataaagttgaagagtcaagtgctcatgaagtttatattttgtagttttttttttcttgtctttttggctctagaactttttctttcaaatgggatacttgaaaaaggttcaaaatctggtgattatgaactgatttttcttctctgaaaaaattacaaaatttgggaccaataattaggccataacacacttcttcaaaggaatttgtccgatgattgagttacattttagccaaggatatattgaccaagtcaaaagagaatgcccttatagaagaagttgctatcaaaatatttgcaactcaataataataattcaaattacggaaaagtacatattcatttcattgaacaagtttttttctttcttatagtatcaaatatgcccacttaaatgtcattttcaaatagcaccattacactatttagagttatctaatctaatagggcatttttatctatctttctttctttctttcttgatagttattttctactttcctttgataattgtggaataatgttagctttatatgcttctgatataagctgtctcaatcttgattcgtttttagatgtgtgagatgaaaaatcctttatggaagaagagaagaagaatttttatttttttttatttttttatttttattgttatagtgcttttcaattccaaatgtttgttcaaactaagctgtttctatatattgaaccaaaaccaaaattgcatgagttccccttctttacttgaaccattgattttttactaaaacatgtcctaacatgtcacatgggacacaaaatcacatttttctatttttgaacacaaaaataccaaattaatctcatatcagaacatggaagattggttaatgaaaaacagaccaataacttggtaaacaacagaatgtcatgatgttttttttttctttcatgagagataataagtagaaaaagagttgttctagattggattttggggaccctttttcctcctccttccatagtaagaaatatgaagaattattatacttctcatttgcttaaagcaaaggtcagagtatatataaattgatgataataaagactttttaaatatgagttataatattgttgtgttgattgtgttgttgttgtttttgcaggatgatatttctagccaaataagtgctcagatttttgagttttgtgatcatgaactgttccctgagacacttcagaattctgatgaagttacttcttgctcaaattgttgctatgaagtgaactcatcttatgcactgcctcaagatattgaaaaattcagtgcctatgctgctgaaaacaatggcattagcacaaccgaggctggctcaatcccaacagctacaagcaccaacaccaacaccaacaccaacaacaacactaacaatagtaacaacatctcaatcatatttgattcacaagaagaaatggacaatgacatatcagcttcaattgacttctctccatccccttcattttctgtccctccttcattaatgcttggaacacaacaagaccaattcgatttctcttccctacagcagcctgcacagatgtcattaacagattctgttgttgttgatggtttttcggtacaacagtaccctggtggtgactctgttggtcctcttatgtcggcggcttctttgccatctgttttcgaagatgattgtttgtcttcggtgccttcttatgtccctctcaacccttcttctccttcttgctctttccttggccccagcataggatcatacatgactgcagggtccataaatgctgctgctttgtctgttgacacttctgggatttttaacactagtattctcatggcttctgagttgcaacaacaagaattggattatcaaggagacacttctggactttattgtactgatactatgcaaagggttttcaatactggtgaacttcaggtacccacttgctcaaatctatcaaaattagaaatttgtgtgtgttctgtcccacatcgctcgtatctaagtgatttgtggggtttatattacacttatcagctatcaaattttaactcgaaaaagaaatttgtgtgtattttgttccatatcataa

SEQ ID NO: 327 - DNA, 4320 bp, Cannabis sativa
ttaacagaagccattagagaaagaaaaacgctctagataccacgtaaagtatgagaaatcaaaaaactgattgaatgaatttcttttattgaattgactgaagagtttagcttatatacaagaaaaggaaagtaaacagaggtaaatgatcattacaagagaaataacagaatcatcatactaactgtatttacaagaaaagccagcaaagctaactaactaatacaactatccttaacaactattacatgatttcaagatttgaaagaagaaaaaagacaaatgttatattttaattcaaattcaatttcattctttcattataattgtagatagaattctgatattgtgtgacataaaattaattgaaactttggacgaatcactataatttgaaaacgagatcaactcattgatgcaggaggtgcaactcattgaaaaactaatacatgaaatatttgtcaaaagaaaaaacccttctaataaaataagattaatatatacttacaacaaatgctattacagattacgaatcaagagatgaaatctgaagtctccgatcgattcctatttatgaaatctcacacaattgtagacaacactacttgcgtatggaattaacttaattctcactgtttcacttctgagtcctatgtaaacaaaagaactaattatacatactcgtgtatgttttgaatgcacaaaggctttcaaagttcaaaatctaacataacatccctttggtcgttggattggatcatcagtctgagcgtaactggagttctacttccccacattcgacatttctcaatcgtagaatcatactctgcacaagtttgccacctgaccagacaatggagctctcttcagtaagacaattttgcttggttggttgtactttggcaactgtgattccatctgggacaccctgcaactgcatcttcaaggctttaaggaaaggaccaacgtcgatatctacttcccccatcttgtcatcgaaactgaacgtatctttgtcatacacacactgcatccatatatcaaacaaattctccacattagtaacaattaacataacttcatatatcactcatgtattgtatggtgatgatcttgtagacaaaatccagttgtagattgtagtggcagcagacaagattcagtatataaaagagaaaaacttacaaggttgatgggaacatgtggatcggaagcagagatattgaaacactcattccactcaggattcacattcccctttattactcgagtttttagcttctgaaacacatgaaacaaatgggtattcttttttgttagataataaataaataaagtcaaagcacaattagaggcctcacaattctctgtttttcaatcaaacagttgaaaaacaaaaagtaccaatacttctccaaacacccagaaacaaaaacaggtgaaaagttggattacaaattacaaaacaacaaaagagacgaaacaaacctgcttgcccaacttgagaacaacataagggtcgctggtgacgatatctctaacagcgaggttgactcctctttggatatgaaccttaaaaaaacccattacttctcctttgaacaaaaaaacaaagagttgatgatgtttgggaacaaactcacaaaattcaaggatattcccctttatcttctgaaggcggaagaagaaagagaaatttcttgtggttagttgtattaatattattattaaatatgtatgaaaaggtaggataggtacatttattttatgttgaaatttgagccttagagatgaaggaagaaaggtgaggagtgtggaacaacgcgtagtcgaatattggtgtcgttttgcttgttctttgaagaaaacgacatgtgaagtcggcgtacgtgttcaagttcaagggacgtgtattgtaagaggcacacctagttttgggttattagcttagagagttagagacgaaacatacaacaacgcttataggtttgacatggtctttggacttttctacaatagtggcgttgaaactgccctaccataactatatgagtgccgttttgttatcctcatttcattaatgcttggatggtcctcatttcattgttaatgccacgaagtatatttattattgtaaactaaatacctgattacaaaatttgaaaactgaaaaaaaataaatattaataaagtattaaaaattaaaaatatatatcattcattacaaaagaaatttgccgtcttggcctaactaccatactattacaattcattcttaacctcagacaaacggcagctagtttagctttgattgatataattaccagacaaagacatccatccatgggaagatactgacgaataaattatgcggagaatatattattcaatggaataataaacaaaatattatatctacgttgaaggaattgagaaaaagatgaatagatgttattacaactgaaagtaatatatttgtaaattaatataacaataaagagatgaaaagtcattctaacacttttgtcaaaatttattttcaccctattctttaagatctaagggaactttcaaatggaaataattttgtagaataatcaagtcttttctgttatatattgaagatatgtctctctagattaaaaaaaagaagtgtgaaacaaatgatcattagataagccacctatatctaaagtgttttggtattaccttttgaaattcacacctcataactgttacgggtcttaatttagtgtaaatggaactaaagagaaggatttagaactaaccacgccactgaaaccaacaagaagatctctagaagcttcaaaacgtttgttgaaaaataatgtaggagatatggcgcctcacacagggcatcaggtgcttctttctgtagtgttttttcatcattgcggttttccaaaacttcccatatcattttcataattattttaactaattagtattaaaaaacataacagctatgatatggaggttacaaacggtaaccaataatttcacagaatacgttgcaaatttagacaaaaaaaacatttattttgttatatttttatatgtattctaaattatattattaatagattatataacatattatgtgcatacatcatactaacaaggccgcatagaattattccatagaaccttatgaagttaaaacatctacccattgcaattgaagctcaatttcgccacactccacatttctcagtctgagaacaatatcttgaacaactttgccattggagatataaattgggctctcttcagcaaggcagttttttctgttgggctggacttttgagattatggttctatttggaaggcccgttaggcccatcttcacgacattgaaatatgggcctatctcaaactctgcatcacccattttgtcatcaaagctgaaggtgtccctgtcatacacaaactgatcaaattgatcacattcacaggtaagaaatgagcaacgtcagttagtatcattaacattcacatcgaattcaatcatgaaaaggagattttgacttatgattattaccagcttgactggagtatttggatctgaaaccgatagagttagaatctcattccattctggatttacattctttttcaccacacgggtcttcaccttctgcaagagacaaattaatttgaagaaaaaattagcacataaaacacattagaaaagaaaataaggcaaaatcaaaatcaaaatttcagtccaatcaaaacacacatatcgaaattctaaagttaaaaacaataaaatgccagaccagaatcataataaaatgaggatgaaattaagaaaaaattaaacaatttacatgcttccccagcttgaaaataacataggggtcactgcttcgggagtctctgatggcaaggttcactcccctctggacgtgaatcttaagcagacccaaacagttgtccattaaaacgaaccagaatgaaaggtcgaaacaaataaaaaatgatgggttggggagagagttgtttgtaatagtaattttggtgtaaatcgtagagtctgatggttgcgtagctggatgttcactccgtccgtccgtagtttctagagacgcaaaaaggaagagtagtttacttactaataatttttgttttatggtgtacgtctcgtctcttcttatatacttttatgtttgaatgaatgcaatgaaatcacggatttgcagtcaaggtaataataactggccctatattttttagctacccaggaagtgcctgtagtcagtgggtgtcacactcacataaatgataattaagtta

SEQ ID NO: 328 - DNA, 743 bp, Cannabis sativa
tctcattcaaacttgccacctccgccgcatcattcaaaatactaagagacacagaaataacatcctctttcaatttctcccaaaatcgttgataaaacaatgcaggcagcccatctatacccggcgctttagatggagccatttccttcaccgcagaaaccacttcctcagccgtaaatggcaccaataattcatcattcataggttctgtaactcgcctaggaatagcttcaagcacttcctcaatcacatcctgttgaacgtcagaggcggcgaacaaagatgaaaaatattcacatacaataccttctaaagccccttgtccctccctccaaatccccgtccgatcaaacaaaccagctagttcatttttcttctttctccccgaagctttacgatgaaaatacttcgtattttgatccccacacttcaaccaaagagcccgactccgttgacgccaatacacctcatccttctccaacaacacatttagcctcctctcttgcttctttatttcaagccatatattcggctgctggaccttagacaattcactcaaaaccttttttgccttactcatttcctcattcaactccttcttctttttaaagttccattgcttcaacttaaccccacacttagccgacttcctcttaaatccactagccgaacccaaaacaccctccccttcccaaacactatcaacaatagctttgcactcatcctcctcacaccaagcttcc

SEQ ID NO: 329 - DNA, 5321 bp, Cannabis sativa
agatagaataataccttgtttactttgagtggcttcaactcccaagaaatacttgagcacccccaaattcttcgtgtgaaattaggtatgaaggaatgatttagggaatgagatgcctctagtatcatctctagtaattacaatatcatccacatacacgaccaataaaataatgccgacagttgatcttttatagaacacaaaataattagacttacttttcctttgggaggatcattagtcaagtgatatctttgtcaatactcctaagattaagtcaaattgttttactccatttcaaataattcaaaccaatcaatttatggtctgtgattttaaacatcacgggaatcacatcagaaacaattattgattttgggtctgattttgtctctgccataatctcgaaagcaaaaacaattgaaagagtataggaagaaagcaaacaacaaaggaagaatatccaaatacgaagtagtcaaaagtatcaaaccacaaaatgagaaccaccgaagacagatgcaaggaggatagagatgggtcgaaaaaggagcagaagtgaatcggagccggattcactgtcccacgcgccgacacgtggaaaagatctttgcaggcagtggcggtgcgtgagcctcacgcgcagcgattctggtggttggactttggggtttcgactaccggcgactgggcaatcctcccgtgtgggcggtgagaattgaaacacactccaaatagggtttccgataagaaaccctatattttttaatttattttttttaacagcctaaatttcgaaccctaatctaaggttgctctaatacaatatagaaaatggtgaatcatttgtgtatattatggttttcagatgaaagtcatgcaccttaaccacacacttcctaaattctaacatagtatactttcctgatgtgtacacccacaaaactttccgatggccttgtgggattctttcaaatatcacgcttgagatggaaccccatgcacaagtttagtatcttgtatttttgataatgctcatttggtatcttgaaattgtacatattttataccccaaagtcaagtttgattttattgatcatatttgattcacctgagatttttcacttacaagaacatttaaaggatattcttgactctattaaaacaaaaacaaaattgctcacatatgtttccttgttacattgaactgaattctgtagtcgtaaccttgtgttgtatccatcgataaatccagacaatataatgatgataataaaattttaattctattttgtcagtttcttgtcataaagtttttcttaggtatatagaaatgaccaaaacttcaaagactttttgcctagcttaataaaatgcttaaccaaagtggccttactattttgaaactaagtattgaaaagttggcaaccatattctatttattattctccttcattgaatctcactgtgtcacttagatgaacacattagctctcgcggtacttcgaaagacaaaccagcaatagtattgatgactaagcattggatttttattttatttttgtcaggactaaagtatagaaattgatcttctattacctttttttccaaaaccattttcagggtgtgtgtttgtcatgttttctacatcggccaaagaattactaatgcttatgtgtcttaattccatcattctttcggtttaatggtcaagcataaaagatgtgagaacagtttcattttgaccttccacttatgttgtagtaattattgttcttcaacaggcaactgatgtactatttgacagtttgtcttgggggaaagatagtccctattttaatttctgatgttttacaaattaggaaccagcgtttgaagaattgattttgctttatactgacgaagtagataaagggggtacaaaaaacaaagcagacattccatcattgcaattaaagatatacgaaagaattcccattccagatttatcagtaagtgcatgtgacgtatcacgttttatgtctcgtactttctcacatttcttggactcaattcagtaactaacattccagtgttccccatgaatttttctactttgtaggttgtctttcctcacaaaaagctatctttccgcattatagacacggtatgaaaattgtttatttttagaatttttaagttgcttgattgtggaccaaacaactaaaataccaactcctaattctaatttagttctctgataagtgagtcatctttcttgcatctctgaattgtctgctatatggatctggatgagattcaaagaacaatgattcatattccagtcatgtaacttgttacaattgatctcatattgttactagttagctgaagagaataacagagaaaacatagattttgtaacagattaacagcacgtttaagtggaaaaagaagtcaatttgtgtttgtgttgaccaattccatactacaaagtttgaaagattaagttaccatccttgaacaagaacatgtctaattataatgctttttaccttcaattagttctttgctagactgaatattttaaaatgagatagggtagtgaactttttttttgttgttgttgttcttactaagataaggtataatgtatgtattttctttgtccaaaaaatgtgcaagagaaatgaatatataaaaaaaattccaaaaggacagtgtaccatattttggatctatggtcccagctttgatcattctttcatgtatcagattactgattagaaggatgagatattatatattgaataagtaaaaaatttagccttatgacaacattttctcatctcataggtacgtttggatgttgcaacaatattggggctttcagcatacttcattaactacaagttcgagaatgtcttattatccccgtatgtatcacttttctcaaaactattgtagaacatattgtagttgtaattgtttgaggttatattttattaaaggagcgtgaatagtagggtgacacatcattctttaagatagtgataggcctgtgaactgggtcttgtactaaattttacttgtcatttaatcatggccactcattttgtaatgatggattgttcaagtgggttttttatgtgagatagattagatgtaatgtaactaccagtagccaccgtacatgtattatatccaatatttatgttaaccagggtttggcttgatgtaatgccaaggaaatagagttgttttagctgcatactgaagtcctgatattaacattagaatccttttgcagtctctctctctctcttgtgtgtgtgtatatatatatgtagatttatataaatatatatatatatatattatattttcgtttctgttaaagcatctgttaattcaaaggccaaccctgttagtcttaatagtgtcttctgcttttgagtagcatctttcttcgagaagttgcagtaatattctgtttggttttttcttttcatgttttctgttagatcagcaatattacttgatgtggttgctatcactgcactgataatatctgtgtctcgagtggtacttggatacaaacagacttgggataggtatcaagtaagtctttatgtcccatttcagagctgagtatgatttttcttgcagaatactttttaatattttttttccttgtcatttttatatataattgatgttttatagcaatcttctactacagctattggtcaacaggacactgtatgaaaagaccttagccagtggctttggctcagttcattttctcctggacgcctctgaacaacagcaagtaatgaactcctatacaacttctcatttacttttttttcctttccatcttcttaggtggtattcttagcatgacacaaatttaaaaaggaaaaattgggagatagaagaattgacctatctaaaatttctctcttcaaggtacaaatatgatgtttggctagacattttgtaatagccagtacagtattttctaccatgaagctttgtaactctgacatctgacctttcattaagggaaaggttttgagtctgaacccaaattatgtagaaaaggggagaattgtgttcttgctattagcttattattttaatcaacaaaattctacctttactagacaaaaagtcattccccagaactgtatagaagcttctttgcataactttgagtattagtgttgaacttttaactagaccttgctgtatgtggtcccacttggccatatgaaacattccttctccctaaatctggaacgtttatatatttatttaaccctgtcaaaaattgaatatgtgggtgataccaccatctaacagcctaaggcccaagtagtagacttcactcctatccatttaagaaacttgattttacttaggacctaacccaataacatgtacaggaatcacctagttaatactgatagaattatgtcttatcgatagtgattgaattatggaaaaattcttaagcttgaggaaaagaccaaactagattggatttgtttatgcaggagaaagagtatttgtttatgtagtgaactggctctgatgttttcttctacaaaattaataagacgaatatatgattgcatttggaagagatatattaaactaataactaacacttatattatgcttcattggttattttgccaatgacttttcttttacttggacccatgcagtacaaggaagctattttggcctatgcaatcatgcttaaaatgggggacaaggtttgctcacatcctcctaattttattcatacgcacgcttttgattttatgtaaccatcgatttctaccaggggcttcaagcttaaaatttgttcctttttgcacatctgatagactgatatacaattaaatctttagtgtgcattcatctcatgacatttcagccaagtgtgttatttataaataatgaactttgttatgaccgcagatgatctgccgccgcagtgttggggacaaatgcgagcaattcatgtacgccatgtttaaagtaaaggtaatagaatgattactgattagtgtgactgtattgtgtgatcagtgttggctatatgcagctactgattgattagtcatcttgatgtgtgtttggtatgcaggttgagatgccagttgataaagcaattagtaccttgttgaggcttggcttagcaacagaatcttctatagatggaagaattatactgcaggctgtgccttgttccaaggcgtacgaagcccttaaaatgcgttggaatagcttgctcagttagaagagaacgtatccatgcgtatgta

SEQ ID NO: 330 - DNA, 5461 bp, Cannabis sativa
gaagataaaacaatctcaactactagccagaataaaaacttcaaaagatagcacaacccagttggacccaataataattctatattttcttttattcaaattccatccatctagaggatccaaaaatccacaatgaacaatacaagatgatcagaattttcattattgaaattccttaagcataaatacaaaggcattcttagaacaattgcactaagcaaaattttttaatcatattctcagatgaactcagtgtaaaaataaattgaattagaataacaaatgggaacaatatcatgccatcacctttctgtcaagttatacagttgtctgcatatcacaactgagatgtgttcttctaatagatagcaataagagcttatgagttagagacagcatcagatgaactttccacaccctgtttactattgctgttattaacgttgatcaaacggttgttgggctcaaacccgtaaacatgccccattttcgctcgtttcgtctccaagtactttttgttctcttttgtaatcagacttaacaatgggactcttcccacaacagccaagccataacctttaagcccgatgtacttcgcggggttgtttgtcatgagtttcatcgttcgaacacccagatctcttaatatctgcattattcaaagaaaaaagttagttaattttatgaacttgtcagagtttcaatgttgtgacttgagacaacataataaaggcgagcttggagaaccggtgaagtaacatttcacagcaacagcagaattagtgttacctgtgcaccaatgccatattcacgtgagtcgaccggcaaacctagctcttcattggcttccactgtatcacgccctttgtcttgaaggttataagcattcagtttgtgacccaatccaatgcctcttccttcatgtccacggaggtacactaagacgcctctcccggcagcctcaatttgttgcattgcaagtgctagctggttcccacagtcacatctggctgatccgaatatatctcccgttagacattctgagtgaactcttactagaacatcttgtccatccccaatgtcgccctgtttgtaaagtaagattagtttatacacgaacattttctggtaaggcttctattttcaattcaaacaattaaaggaagagtaatcaaattttgaacaagtgaattgtcatcctaagcaaacattttggctgaggatcagaacagacattaagcagtcttggagatgttaatggaaaatatcagctcgagttattagcctcaaatggatttctattttgtgagtctgggataaaacaaatatttctcaccttaaccattgcaatatgttcaatcccatctaggatagatttataacagtaagatgtgaaaggtccccacattgtaggtatcggtgctgctgcagaacgcacgattaatttatccctcttccttctatatctgtcaaaattgaaccaaattattagaacaaatctagacgattaacaactgaacaagagaaaacctccagaactagtattttagataggaattgttttcttaatatcattttccacatcagtgtaacatatgtatgacataacaaggactgcacgataatatcaagagcattgtgagagcagtttgttatttgcatgcatgtcttctaaagaactaccacttgtttcctcaccagtgtaatgttttttcattccctggtttattttaatataactttaaagagtttttaataacatgaaagtatattttatacccttaaaaaatattgtcgagtaaaagaaacaaaatgtcaatatctttaatgtttcattagattttaagaaaggaaataaagtccactaacatgaatactagtttaagtcacttaaagtgaaaccaacaaatttcttccaaatccccaccaaagtactcctaaagctgtttcaaatttagcagaatgcagcatataaaatacgattttgttaacttagtaaaagctttcatataaactcactcctgcaaaattatctgttaggcatgaaattcgcttaatctactctaggaggaagaaagctacaaagcagaagcttagctgagtaacttttactaagtgttattcagtttagcttctgctatctttaggcttaattaaatgtattgctgatgtgaatgtccaagttagcttattataatggactgttttaactgttagttaggcctaagtctctccttgataccctataaatagatgttagcccctcatttagaggcatctgattatttttgtgtaaaacagagtgaaaggtcagtgggagatttccaagttctcgaattcttggaactgtaatttctgttcttataccaataaagattcaagcaagtttttctacaaaccttgtttgtatcacaatcagctgagagaaaacaggctattaatttaaatgcttgtgagtattaagaatttagcacaagtccgtaaaaactaacagactactacatgaactctaaagaaatatgaaagatgatagagaagaaaaaaagaaaaataaatagtttctttatgttattctaatgtttatgccattcaatgatcttaaaatattgtagttagcaatcacttagctctaaaagcattagaggttgttggttcatttatgtataataaatacaaaatccaggtaaaaaaaaaacaatgaagaattacgcttgaccaagtgaggtaatagctttaccttattaaatcagcaatagatacaattttcaagttctcccttgctgcaaattcgcgaagctttggtaatctagccatggaaccatcatcatccacaacctcacaaagaactgcagcaggattgaaaccagctagtactgcaagatcaacagaagcttctgtatgtccagcccgtttaagaacaccaccttcccggtatttcagtgggaaaatatggcctggtcgattgaagtcatcaggtttagaatccccggaagcaagagccaatactgttgttgccctatcacgagctgacactcccgtgcttgtaccatgttttgcatcctatgaaagagcaaaaacaagtcattcatacaaaaaagaaacacgagaaagagtggcaatgaaaaacatcgaaagatattggatatgaaatattgaaagtgaaaatctagtatgttaatacgactaaaaattcgcatctcaaactaccccgtagaagaaaagcttattagaaaaatgagaagatttttcattgtctcaaaatttaaatttcagatatgaatacataccacagtaacagtgaatgcagtacaaagtttctcatcattctccttttggtgtaccatcaaaggaatttgcaacctctcaagatcttctcctttcatgctcacgcaaactatgccagttccatactttacaatgaaagccatagcctctggcgtagccaattcggcagccataatgagatctccttcattttctctgtcctcatcatccacaaccactacaatctgtagctccatatttaaattagcaatgtataagtgaaaataattggtgaaacagaagttactgcaatacgagaatctttaacagtaaaaagcacaaaccaatgctcacctttccttgacgaatgtcttcaatggcctctggaattgaagcaaaaccttctgttggccgatcaagatcaaattcatcattgtcgtcagaaaaaccgctacttgttggagcagtatctgctgaaagtgctccaaatgaaactgcatcaggctgcatctcaatcccaacagtatgatcactaagaagagtactatcttccagtatattatttccatttgtataagccaaaaggtcaccctctccagataccaatgcagctctagtcatcccgggacttttattactaaatgaaactttaccacccagccggaccatggataaattggaggtatgaccatttgcaaagtaaacattttgagcgtgcaatccactaaaccatttgaagtttttgcttgctctacaaatgatagaaagcatgtaacataaggtaagatacacattttttataaaaggattactcaaacaggaaaagaactatcacaaatgttacagtttaaacataaaattactaatgcaaccaatagtttatcaattacaagaaaatatgtgaaagcagagccaagcagtgagcactgctgttcttttgccctttgctaaagaaagagaaagaacttatggggaaaatcccataaatagccaaaagtttcactccaccccacaaaaaaaaaactaatttctaaacattactgtttacggctgatagtaacaataacatttgtctacccaaacatgtagaaatcggacagacatgccaatacaatgtccatgtggtaatgcctagaggaagttagatttatgtctattgcacagtaattgtgaccaatgacaaagacaaaaagataaaattcagggtaaaccagatcccaacataggcatatatcatcccaaaactgaatcttcattgctcaaatttataaggaagaatgaaagagaggtctatttgttcatgctctcaataatatgctatcaaaagcaaaagaatgtcagctttatggtgtcctatgtttttgtttctattctaatttctacttcatagttcatacttcctccaaattgaaacaaacttcagttaagtaatatgctagtttatattttctcttttcaacaattttctccaaaaccataatctcataataaccattgtcatggaactcagacctgctttgctgaataaacaagttggatctgatactctgaacaatttaagaaaattcaccaaaaaattaatgataataaaacaaacataaaaaacatataagccatgaaaaactccaaaatcaaaaactttgatgatcaaactctgttaaaacaataaacttcaaagactccaaaaacagattacagcgaagaaatcccaattgaaatgaaaaacccagatggggtttaacgtaaaaaaaaacatataagccatgaaaaactccataatcaagggattaaaggataaaaaagcttactggggtcgcgagagagtagttgtagaaggggatgaaatattgattgaagaagccatttttgtttgaatagaaatctctggaagaagtcaaacaccggtgagagaggagtgattgatatctgtgagatattatctcaattattaccaatatttggttctctttaaattaatatatataatatgatatgaatgaatgaagaagaaggttcagggtagaaatgaatgaaataatagattatgtttatgaagcaacggcgaatttcgcgttatggtgaagaatttattgtcacatgtaggtgatgttgtggtgtcccccaccacttatagaactccaaggtcggttttaggtggaaaagtgggtaaaagaatatacttttggattgagtttcc

SEQ ID NO: 331 - DNA, 1148 bp, Cannabis sativa
gaatctatccaatcttaaagaaatggcttctaaagcatcccctgtcttcgaactccctcaaggtatagaagatgcggttgggctgagttccttacggttcagggctacgattgatctaaaccagcctatcttttctgggttcttcctcagacggcaaaaacttaaagacctctggatccagtatcggtatgagaaactccccaagatatgctttaagtgcgggcttcttacacacgatcaaaactcttgttttaaggcccctacgatggttaaggacgttgaaggtaattactaccccatgtttggagcttggctcaaaagcgatgcccaagaaaagtcgactttcactactccgttggccaaatggttccaggactgggttcttcaaaagcaattgggtcgtgatccagtccttaggaaccaaatgaaaatccacaaagccatccaacatggtgactcagctgaaattagagaaagtcggcttcaacttccggcgaaaaggagaatcgtggaagactctgagctcccggccaaggaatccaccacccagaaggttattatccaattacccctggttaatcttccgggtattggagaaattgctccatttggaggtaataccaaaaaagctattctgccagagagaaaggtacctgatacactcacaacctcatcagtcacgcctgccaacgatggctccatgaacaccaagcaagatgccgttttaggggaggacaaaaacaactctatggaaagccaccaaacctctaactcaaaagagcaaagtgttcctctgaactctgagaatgagagacaggcgacaaaaactatatgtactcccttcaagaatccgaagctcaaaaaggccaatgtagacttcggcccctcttacaaagattctccacttggtacccaggcccgttgggttgcctctccctctaaaaaaatatgggcccaacccaaaggaagggaactactcatgggctctccaactatagacaaatatcatagggaacctaccctattcaacccaattctagaaattgaagattttagagtttatgaacactcctctagcccacgaaagaggaaagcgtctgatggcatactgtttcatcccctccctaactcagtcgaaaccaacttca

SEQ ID NO: 332 - DNA, 2942 bp, Cannabis sativa
ctggtaaaataaattctaacaacaattaactatggaaattacaaaagtattagtgacttaatgaatatgtgcattagtataaagataagtcatattgtcagaaacattcattagtaataaaatttctcaattatagagattttattaaattttaagtgtgtcatatatgatttatatgaattttaatatttttatgttttatgcccaataacagtggaattcgatgttttgaccaatagtgtcactttgatacggtttagtatcttagaattattgggggcaagatttatggatagttaaaatatcatggttatatagggtatttggctatgaccattttacctctagttctaaaaatttcttagtaggaaagtaagggaatttttgtaaaatacaatttaagtttaagctagttatcctttattggatgagtgagtgaattaatggttttaattcagaatgtttattagaaaatcttagaacaatcaagattaatcaaataaactctctctgcacaccaaggaacctaaccaagtgtttagactaaatttcatattttgcaacatgattttcaattataattgaggtggaatttgtaggtaatccaaggtaaatcttagaactctctattttatagttttgaagtaagaagcttgatttttatatgtgattttggaatttcaattattagtgagtttgggtaagctagaactattttgttacttgatttgtgaatgttttggctagttttgaggttttgtagcaactatggctattggaaccaagttttgagttttgaaaactcaaagcttgatctccaatggtagttttcatttcagcggatgtttggtactgctataagttaaactaagtttattatgcttgtattaagtattttggaaagttttatttgatttagggtagaattgaagaagaaaaatagagttttggttatcctgctacgaaacggaccaccatttctgtcccaaggaacggtgaaccgttaggggattggcttacctagttgagattttttgggtaccttgatttttgtgttttctcgatatttagggtagtgccacactgattattgatagggaaatttttagtttcaagttcaagtccctaaaaatgatttagagagtcacttaccaatgttacgtgattgtgacttaggacttcagattttcgagcagtattttccactcaggttaaaaattagatttcaggatctcgcgttttatattcagtttacatttataatgtttatttatgaaaatatttgtttcttataaagttttaattaatcacaattttatattaaacactttgattaacaaaggttagcacaataagtaagaaaacacagtagtgagtctaaactagtagggtgttacaatttcgatccctaattgtttcataataagactttagtaagacaactattgggcaacgaataaacaatgtaatggctactgtgtatgaaccatgtgtttggatattgttatgaaaaaatttaaccaactattgttggactaatgaacaaagacttgtaatttgaggttattttgtgtagaaacaactgtaagaacactataaatcaacgtcaactcaaccaattctaaaatatgaacaaacttatcatattagacttgtttttatgagagttgtgtattggattgtctatatgaaatgcctgcaaataatactaaaaataatataatctgatcaatgtataagtattggcacatcaattatctgagcgtcaataaaactattgggcaactataatgcaaccgaattgcaacaaaaatatcaaaattgcatggccagatctatgtcgcgagatgaatgcaaatttattttaatgtaacaattgtattgaataattccaagattgaaattctaaaaaacattaatgcaacaattagaatataacgattatagtggtacatattttctggatgatacctaatttagattggttagaaaattcgagatatgtttcttataggtctacatctttagaatctgttaattgaattcacgataattagttttttgaaatttgaattatttttcagggttgagtttatgtttcaaactcgtatttctgcagaatttttcatcaatcgctaatggctaatttttagtttaatattttcttattatcatgtcgatttttcaagattaattgtgattctccgttgctgatattgtttcatcattgttgaactctatccatcgtggatttccttcgtttctctagtatgactacaattgtagaggaaaatgtattttttgttatttttttttttttgggttatataaatgtttaatagattggctcgatattttattgtaatacttttgccttattggattataacagaaaaaacccttaataaattacatcattatttaattagtttgatttttttttttcattaaaacattacaagtaaatattagtttttataatattaaactgaatgcttaacacgttaagggtgtgtttagaagtaattacactatatttgaaaatataaggtttatttaaatatgagaaattaattatatataaattcctaatgtcttatttggcaaaataactcataattgtagaggaaaataatatttttactacttaatatttaaaatcaaaagtttttagtaattatattgtgtaaaggtacgagaattagagtgtataattatatagtaagacaaacacacaaaattgtataattacctttgactacacccaattttaattttctcttgactttccaaatgcctctactaacattttttttttttcagtttaattactcaactcttaatttctaaaatattgtataaaatatttgtaaaaataaaacactataatctttttctcaattgacacccacccaagaaattaggaatgtcagtcgggccgg

SEQ ID NO: 333 - DNA, 1785 bp, Cannabis sativa
cctaaatctattacaacttccattcagttaattggtatctaattggaataactaaaatgggagtcaagtacagacaacaacaagggaagagctatagaatgctaaaatgatgctggggacagggacagtaaaaaatctacaactgcatacatatttataatgggaggaaactgtgtaagctagaaggtgcaactgaagccagccacaactaaatctgaatacattgctacaactgaagccataaaggaaagcatatgggtaaaaggggtcttagaggaactaattaaacttttagacagtatacctgtgatatactctgatagctagagctatgtgcacttatgtaaaactctgttttatgacatacattgaaatgaagaatcactttatcagcaacaaagtgacacaaggacacatcaacaaagacaaaatacctacaaaagaaaatcttgcagatatgggaactaaagtgatcaccctatctaagtttaaacattgtttaaacctaataaggttggatcaaggataagtgatcttagaattatagagcaaagaccctcagattggactttactacttagatatcagcttagtgaaagtttaagtggaaattttttgataaacctccacttaaattggtatcctttaattaaatctgtacaaggaaattacaagacaaaattatagtggccttaagccttattacaagtatgaattcctaatagaaattagttagaatggattgtgacaaatttctattatatatacctgccttcagcctcttctagcagattgatttagaagattttccaagattgagaggaaagaaagacaaagagagaggcatacatgcacaaaaagagagattgagttagtaaataaagagagaataaaaatatcaaaacttgtaataaaattgagactaccagttaaaatgcatacctgtaacttagaatctccatcttgtaactttgatatgttgattactagtggaatcgagctaccaatctaaggagcagctcaactgggacgtaacccacattttgggtgaacctctggaaaaaattctctggtgttttcttacctttctcttacttttttatgttggagaccaaatcaatctagatctggttgtgtgcatgtgcgtgaaattgaattgtgtttcagcagagattagggctaaaccaaaagattagtaatgatcgagaatgttttttgatttggaaaggaaaatttgattttttttttatgtttatatttggttaaattttttttttaaacaaataataactaatatttgtaggatatgataatttttatgatatttgtaaaatactcccatttacatcatcttatttacaccaccggaccacccatcgggtcactcattggaccatccatcggaccatccatcaggccacccatcggaccaccatcggaccagatatgctaccaattttttttttttttttatgtttttgtacatacaaaagtagcatcaggtgactatcggatcaccatcggaccctatttttttttttactaaaaaaagtatgggaaatttgagaggggtatttttgaattttagataaagtggttatatatttttaatggtgatatgtattagtttagaaataaaatattaagtatatgtaagtatagaaaatcaaaattttctttcggaatttgttttaggcttgtttaaactcagtaacttgtaaaagggaataaaaggtcagtcttgaccttgcttaaaattgataagtgtttgttaattagtgtagg

SEQ ID NO: 334 - DNA, 2893 bp, Cannabis sativa
ctgatatttgaacaatgagaagatataacaattatttataataaatagtaattaattttgtaagtttaattgggatcactttgatttataaagtgccacgagtgtgtaagtaaatataattacttagtttacttattagggcatttaattattggagtttacaaagctttgcctaatgttctaaaatttgaaatctgccatattttattattcatcgagcatttgttattagctactaatagtgttattgacaaagattaaagtaatttttttttaaaaaagaactaaatttattacacaaaaacaatgatcaataaatccaaataataattatttttttctttataataataattaattcttagaagggcataaactttttttatgtaaatagaagataataagtatcaattatgcctctttcttttatttatatttccaaacaatgtagcaatttttgtatatttattttgtatttaatacattttttttttaaaaaaaaaaagacaagaaaaacagaaagatttagtatttgttacactaaagtatttattgatgaattgatttcacaaaagtgactaaattcttttccgatgagccaccttctctcatagcttctttagttaaattttgccattttttaacattttttacaatttctgtcctgttttcattttcgctcattactaactccaaacatctcttgatctcttcacttttaactattccatcttcatcgggctttactctaacacctattttccacatttcttctatcaacttagcattcgtctgttgatccgtccattgtggaaatgccaccactggaacccctgaaactatactttctaacgtcgagttccaaccacaatgagtcacaaaacaccctaacgactcatttctcaagacttccatttgagaacaccatggtactatcattccaagtttctccaactcttctttgtaactcaactcgttttttatattatcttcatgaactccttctttgcttgatgaatttttctccttgatgacccacaagaatggatgcccaaattccaatagccctttagctatttcatccatttgttgctttttcaaaatcaaaatactcccaaatgacacataaacaactgtctttttaggcttggtgttcaaccactcaatgtagtttcgaaatgaaaaggatgtcttagatgtaatcagtggcccaattccaatcaaattaaatttgtttatagctcttaatgcatctggctccaattcatcgaatgtattcactaatattattttcgtgttgttactttccttttcaaaatctttgtacatttcatgtaacattgtaagaatataagaataattagaatcaaccatgagtgaaggaagatccgtaaggttcatggttaatggaatccccggaaatgataatgaaaatgaatgatttttagtattggcacatatgatttctttgtgtccatgaaagtaataatagtaaacatcaaacaccgtcgcgggttgcatccaaaacatcgatgctggaacattatgagtcgcagcaacatcagcagcccaagtgagaagaatagaatagactaaacaagtgtacggacgcccttctttaaaccctaattcaaggatatctcccactgcctgccaaccgcgacgtttgaattctacaaagtgatcatggaagccctttccatcagtgactccttcgtcatacccatcaaaaaatggggaaaaggacaagagattgtttgaagtagtggcgacagtgtgtgtagtcataataagacgatgcgcgttgacactggtgacaaaggttacttgtgcattggcgacacgaatgagttgattagcaaggtttaaacatgggttgatggtgccttgtagtgggaatgcgagaataaggaaacgaggttgcaccatgacaacaaattattgtggttgtatacaaattgtgtctacaattatatttcaaccgatacaaattgtttttgtgtcactttaaaattgaaacaaaaacttctttttatagtagtgatagtagtcggtattggtgatgactttattaataataattgtggcaaaatgaggtgattagtgtgaagcgattaatgcgaaacaagaaatgtatatgtgttagtctaatgttaggtgagtaggcatagttagatgattattgatattatataagtgaagaaaaaacatgatacacgttgttattgtgtttttgataaattttaatcacacacctaacatttattcacctctaccaaaatgttatcatgggcttgaacacatagttttttttttttaataaatcatgcaattttattaatactaatcacctaaaataatagtctgcaaatcaatcgggacatctctcccattggaaacatgaccaagtttaaaattagaaatacgagtcaactaatcggccgtatgattcccgtatcgtttgacaaaataaactaaaataaaatcagatgaaaaaaattgtaatatcagtgctaaccttaagaacacatacatttaattttctccaccatttagaagacacaagagtagaaacaattggagcaagttcattcaatcccttcactgggcactcaatacgtaactccatcactaacaacttttagctgcagagaacttgtaattaccaaccactaacagtgatttgatagcgagccatcgaagaacaacgaatacgactaacaaaacaaaataaaataaaattatgttgtatagacaagactattcacaataacataaacaaaagatactcaaaaacatatcacaaaaataaaattaatcgcagtacaaaaacctaaggggttaccagacctaaacctaagaaaagtctattggcctaaccgaagaaaaaaga

SEQ ID NO: 335 - DNA, 2091 bp, Cannabis sativa
acaccaagaattcgagctgtcccgaaatcactcacatgaaccacccaattctcatccaagagaatgttagaaggtttcaaatcacaatgcacaatgggaaaatcatgacaagaatgtaagtattccaatgcattagcaattgaagtgaaaacattcactctttctaataatgtccatcttgattgatcatcaactctattgctatgaataatcctatccaagtcaccattttccatgtattccaaaactaaggcctttaatctttcactctcccaagcatagccaagtatcttcaccaaattcctatgccttagttggattaaagtcttcatttctctatagaaccatttatctgattctatagaaaattgcttcaaattcaatctctttatagctgcaactttttgatcttccatttgacccttatagacaatgctcaaattggttgaacctatcacattgtcttcactaaagaaatttgtagcaacttctatatcatttcgattgtacctcttaaggggcaacactaatgtgtcatcttcatttggatcttcaacctttgtggccttatgcatctttgtatgtctaacaaggaatagagcaactaagactagaattagaagtagagaaaccgagccaagtgcagcgagaatcgccatagttttctttgaaaaccgacgtgaaactttcatgctgcactctttcaaaactttagctccacaaagatttgaattcccttccaaacttgatgcagttaagctcttgaaaattcctgtttcggggacatgtcctgtgagttggttgtgagacaggtttaagtgtttcaaggaggaaaatttggtgaaacttgaagggatgtttccattgaattgattttgagaaaggtcaagagatttgaggtgttttaaggttgccaaatttgaaggtagttcaccatctaaccgattactcgaaaggttcaagttggttagtgtgtctaacttagcaaaagcttcccctggaattggacctgtgagattgtttcttgacatgtcaagtgagaatagattcttacatcctttgatggatttaggaatgaccccaaaaagtttgttgtttgaaatgtcaatttcttgcaccatttccatcatgccaatctcttgtggaacacttccttggaagtgattgaatgaaagatttagatacacttgcattcctttaagatttgtgattagagaactcgggattgaccccgaaaaattgttatgggacaaatccaaaaccgataacctaccattacttcccaagcttcttggtattgttccattaagcatgttttcatgcaggtacagtcctgtaagccactcgagtctcgagatggcttctgggatctgtcctgtaaatttgttgcgctgcaaagcgagcaatgtaagctgtttcagctcagagaattgctcgggtatgactccttctaaagcattgtcgcgtagagagaggccttggagttgagtgagcttgaaaagctcttgtggaatctgtcccgaaaatctgttatcagcaagtgtcatggtgaaaagtttggtcaagttaccaatctgtggtgggatttttccagtgaaggaattggaagaaacatacaagagttgaagattgaagagttttccaacatctggttttaatgatccactaaaattgttacttgacaaagataacttgacaagatttgagcaagaaaagaagtcatttgggatttcaccaaccattttgttattttccaaaatgaaagctgagagatttttcaactgtcctaaaccttgtggaatttcaccactcaaactattgtttgctaaatctatggaaacaagttgagtacaattagctatactagatggaattggaccctcaagaaaattgacaggcaagctcaagttctttagattctgcaacaatcctaaactcaatggaatcttcccactaaggaaattgtttcccatactcaagtaagttagatttttcaactttgttaatgaacttggtatttcaccactaaacttgttgtgttgtagtgtcaatacttgtaaagatctaagttgttctaactcaaatggaata

SEQ ID NO: 336 - DNA, 4657 bp, Cannabis sativa
ttttaacaaaaaaaagagaagggattatcttcctctcttctctaatttatttgtttgctaattattgtagatgcatgtcactttcaagatgatgaacctataatttctgcaaggaaattaatacttttattaattttgtggcacttcaggtgctgcaagtgcaaagttagttgctcagaaaacaaagggaatgccggtgatctccatttctcttacaaaactatcaggccctgctgctagtgctgctattgcaaatctggctcttcatctcttcagagcattcaaaagcacccgtgagttatttgtcgaaggtaagaatatcatgtcactactcatgttggatggtctgtgtcaatgtgctacagttaaccattattctttttttcatatgtcagagcaaaatcgttctttactgttgacaaaagagatatctgctgagagggtatgcttcctgctattcacatattatatatagttaatctatgctgttttgacagaattttgatctgaagaactctgaaatattattgaacttagagaaaaagtgatgctgtggattggataagtgagagcaatgtgcatgccaaatccatggcatcaaagtagaaaaccccaatatggatgaacactctcaactttactactcattaatcaatagtgtcctctttacatctaatcaggcataaatgtagcatttaccaaaattacaaaaataacccaaataataaaataccaaaataacataatatgacattctaattcattatctcctctcctacatcattcacccactccatgaaagaactcgagctcaagttcattttctgagaatggtagactccaactgaaaagtccctttgaagctcataccaaagcaatccaacaaaatgataagaaatttgaccatccatctaactttgttgttggttttccctttgagtataaaattctttaaagacaaatttaacatcaaacaattgttgctttacatccctacattctatttgaaggctgtcttttttcgtcaataaaacttgaattaccaacatttatttgaaataaaagattaattaaatgcggaagccacaagttggtaatgcaaagatatatttgtagttacaaataaagtgtgcaactccagaattatcaaactagcaagaaaaacaagtgatagctgtaaataaaatgacacgggattttatccgtggtttcaatatcttttacaatggggtcacacttagagataagatccattagttaaatatcacaagtacaaggttttttacataaaacaaaaattttgactctaatatttttgtcacaaacttcatgtactagcgctttgctaaatgaatctttactgaaacatcaagatttgaattcccttcaaaagcttgatgagtgcttgcatcctcttgatgcaagcttctcccaaaggctctctatcacactcctcccttagtaacatgtttagattataaacaaggaaaatcgatctacaaaagaatagtagaattgactctcctttacttacaaaaacaactcttctaagtatatgaaatcacaaagatggcagaggtaccctagagttgaatccttggtttgtttttattctctttttcaaagggaaatttgactttctttgctttaaatggaaccaaacaacaaaattaacttactattggaatccaatacaaaattatgctaatctttctcctctttctcaaaatacccctcttttttttttttttttttcaaattctcctaattttctcaatctcttttctctcggttctttctactcctctcatctccttctattccaaacccataccaaatcaccttagacggtactcgactttgaccaccacccactcttgtcaccattttatcatttttggatgcttggagggaagctttcatgggattgtgactttctctaacatttattcattggtgttggcttttacatgtttgatggagctttcgaataaatctgggcctttgttcgtttgttgtattgaattttttgcaaaacatttgatcttaatttttttttttgcattttttgcgctttctgctcgtaaagactcgataggttcaatggttactctatataagcatgttcttgtggttagagatgaatttgcaatataaacttgatagtacttgttttttttttaatagaaaaaatgaaaaaacaatagtactatcaagtgccatcgaacactatcgagtatatattgcaaattcaatggtattgttaagctatgttatttgattaaaacatcggttgtactggatagtactcaatggttctagagagttatggtttcaattgaaaataaacaaacaacataactagagttatagtcatgttattactcgatggtgttgttaagttatgttatttaagttaaagcatacagagagttaaagtttcgattgaagataaacaagcatcttaactactgagtattatcgagtacaacagatgctttagtcaaataacataatttaacaccatcgagtactattaataatggcaacaaaggggaaaacccccaaaataggagaacactctcaaccttactactcaataatcaataatgtcaacaaaggggaaaacccccaaagtgggagagcactctcacccttactactcaataatcaataatgtcctcgttacatctattcattaatggggaaccatgaggcaaattttatggctctagaagattcagataaggagatccactttcactgttcttgttcacattggaggctgatgtgttgatggttgataaagctttaagttcctttaaccttagaggttttaatggtgaggagagaaaagattcaagttagtcacttgcagttcactgatgatacaatgttctttgtcaatgatcaaagctcacttatagtattaatggatatagttaatgtattttctgctatttcagtgctaaaaattaatgtacccaaaagatagttgttgggactaggcatggtagaaaaggtagtgatagcgtgtgctgcctttattgggtgtggagtaggaagtttacttatgaagtatcttggtatgcttttaggccgatcccctagaaaagggggaattttaagaaccaattctagctatgtgtgcaaaatgtctcgacggttagaagagtgcatttttatcaagtggtgtggtagactaagactcatacaatctgtgttattgtcattaccaattaattatcttttagtgttcaaaaccccaaaggcagttaccaatcaattggaaaaagttaatgcgaaaccttttatgggaaggcgaagatctttcaagaggtgatcgtttggtagcatgggagatggtttgtaaacctatatttgaaggtggtttgggcattgggaggttaaatatgacaaacaaaggactgcttatgaaatggttgtggagatttttgcttgaaggaaattctttatggcacagagttattaaaattcattatggaaaagctgacaataagtgggattccaaaaaaggtgacaatttattatatatgaattcctgttgttggtagactttagggtagggaagggggatcgaatccaattttgggaagatgttcgatggggatgcgcctttgaaggaatcttttccgaacttagcagtaatatctcaagctcaaaatgtgtacattaaggatatgatggccagggagggcagggaatccagtctggtaacaagttggaatttcaaatttaggaggtgttcattggagggagagatgccaagtatgcttgcaatgtcacaaatgctggaatattttttgctgattgatgcggtgcaggatagcaaagtttggcgtctagagtctaatggtgtgtttttttgcgagtctgccttttcattcttatctcttatcatcatcagggtcgaggtgggttgggctaaggttttatggaagagttgtgctttgtccaaggtgaaaagtcttgtccatggtgaaagtcttcgggtggttaaaactgaacgtccacgacaaattgcagcagagaagacctttcccagtgttatccccatgctgctgtgtttgttgtaaagctagctgggagatcagcatcttatcatggagtgtaatttttgtcggtcattatgctccagacttgggatttgggattctttgggcattgcctcgttttggctcccaaatgatcgagagtaaggtataagggagcaggtacatgacaactctatggaaggcatcagtgctagccattatgtgggcagtttggggtgagagaaatgcaagaattttttaggtaaagagtcttctgcagagattgtgtgggagaaaattaaattctgggcagcctcatggatttttaagtcagtattttgagaatctttccttcttagatctttgtagagagtggggaaacctactgcattagagctatgccatcatttcaatttacgcttaaatggtttcaattgtaacttaggacttatgctcctggttttataaagaaactttaagtcttgtaacatggttttcctcagccttatatgagggccctatcaacaaatgaggacggtggtcagccaagacatttgacctctatccctttttcaaaaaaaaaaaaaaaaaaaaaaaaaaaa

SEQ ID NO: 337 - DNA, 4156 bp, Cannabis sativa
acttgcttgtacttgtttcactatgaagtcattcaagggtaatttgtattaatcttataattttagtagcttgttatgtaaaatgataccctaattgggattaataccagttagcttttgtgttgttttgaccagagcaatacattcactaatcactccgtacaggttgaactttaagtcacacacaacagaatacgaagacggaacttgaattgatttttacttaaaaaaggactagaacatgtaaaatgaataccatattttcttacatacataattttgagttacacaagctgggattcaatcccatgacctcacacacgcaccctccaataacctgatccgatactggtgaactctcttttatttttcttggttctctctcttttagaatacagttatacatgtgttctaacttttgaggttgttaaaaccctttttcgccctgggcaattagccctttcttttatgactttggtgttatgaaatatgaattgttataaaagtatttacatgtagatattgctgtatgatgtcaatcaaattactagccctcttgatacacttgactggtattgattgcgacttagctcttgtagcgttccattctccaaaagaaacacccgtttggccattaaaatcgtctccaatcgatgagcaatcaccaacacctggttgtgacagtacaaacatatatcagcaatcaagattattctttataactctttctttggtggggttaggttgtactagtaagtgagagctagatcgagatttcctcgtttacttaactgtatgattctccatcaaccgttccaatgcttgtctcactaataactcggacctgctatcaagagcagaagtagcttcatccaatatcagaactgaagatttttgatagagcgctctagcaatagctaatctgcatttggaagtagcatacaaagagatgttagtaaacgatttctgaatcactaatcatggccgattccctagcgattgtgctcaatgttagaaatcaaagagttcgagtttgacttcaacctttgcttctggcctccactcaaggttgagcctcttggtccaatgttggtttcataaccttttggaaggtttcgaataaattcatccgcatttgcaatttgtgctgcatcctttaccatttccatgtcaatctctttcatcaaatcccgatacccaatattttcagcaactgttcctgaaaatagggtctgacacatcaagagatttaaccattagaaattgccatatttggtgcatgggaacatgcaatattaaaccttttcacttattaactaacaaactcgaaagagaatatagatatttcaaaagtaagagttgggactagggaatcactcactatatcctgagaaaccaagccaacatgtctacgcaaactttccaaccgaatgttttggatattctggttatcaataagtacatgacctgttaaaaatgaacaataaataaataaacacctcaacatatgaaacaaggagcttcaatttctttcgaattctacttcacagtgaaatgtgataggtttgaagaatgttttgggatgtgaaaaagtttgaagaatgttggctgttgccctcacattgaaaggtcaagtattagcgagcctcaaggttcaagaaataaataaagaagaaagttatggctcaaaaagtagcagtatttctttccacatagctcaccagataaaggatcataaagtcgaatcagaagctttgcaagagtcgtctttcctcccccagagggcccaacaagagcaactgtttctccagccttgattttcagggacaatccgttcaagacaagaggcatattctctccatacttaaatgatatattacaaaagtgcacctctcccataacattgttcaaatcaactgcatcaggtttttcgactacctgtaatgagtaatcaaaaaagactaataagtgactgctcaaaatgtacaaaatttaccttctactaaaacaaaaataaaatataatttacctttggtttgaacctggtaaggtcaaacaaacgttcaatggccggttctccttgcttcaactcattgtatgcttttccaatgccctgcgtgattctttaattcagattgataacttaagacagctccttaattactggaccataataacaatacagtgtattagcaagatgacctagaaatgacccaaaatggagaggattaaagaaagagctcaataaactactactgtcagtaaggaatggagcagaacaacttaaacacacaaaataaatggtggccaaagagcacaagtccacaactacaaggcttgttaaggcctgaaaacacatgcctaacttcaacatgaaccaaaagaataaaaaacataaggatgtaatgaagtttccagcatgtaacattacctgaattggttcaatcaaaaaaatcaacgacgttacaaaagaaatcatgtcacgcccatcaaaagaacttcttgaaattgccaacgaacaggcacagaagaaaactaaggatccaaaatacataatctgtatgatatgaggaataagagccttcattttcttcttctttaaccgttcagataagtcagctttagcaagcctctgaaacctagcattctcacactgctctgcattacttgctttcacaaaaagaattgccggaagaatctacggaaagagtaatgctatagtttaatacatgcatcttgaaccagacacaaattaacactaccccaacagaaaggcagaagctttgacagttgggtctcaataaatgcaagtcaagattggcgatgattatcattaaaccaaaatagaaacctcatttagataagctgacaaagcggcaacggtaatatttgcgttcttagaaatcatacgaagtttctgaccaagataagcaacaacaaacaccatacaaggtatcacctaaaatttaagaaacataattaataaaacttcataaacacaaaacttgttgatttaaaagaaaaataatactgatacaaatacaatctactagctcttttcctcaccaatgctgatatagaagatagcaaggggcttatagccaacatttgagctaccattgctgatagttgtaaagtacttggtacaatagtctgtcctaaaatcaaacacaaaatcaagtataattcaatagataacaagaaaaataaactcacaaaccgaaaagggtaaccttcatttggcgccatttttatatatatcaaaactcacattgagaagagcatagacagtgtctgcaacatccgaggcctcagcagtaatcctataagcaatatccccggccaaacctccaccaccttcgaaaaaatccatgtccctctgcaaaatcttttggaaaacccgaacccggatttcacaggtggcactcaaggcagcgttccatagaaacgcttgctgcaagtaacaggccacgaaccgcgccaacacgaagagacccaacaacaccaaaccctctgagtctctcaatcgagtgaacccattcaagtttccgagagtagcagggagttgtcctacgcaaggaacgatcctggagagagagtatactgagacgagactgcagagccagccgaagagaatgggtctgaattggggaagaatgtaaggatggagggaattgagggagttgaaagtttgggagagggaatgaaagtggagggaattgaggggtttagggttttgggttgtggtttggttgggaaggagggagaggagtctggtgcagttacggagcttgggacaaggcgaaagcgaaagattgaaacttgatgaatgggttttggatttggatttggataacatgatcaggtaaaagggtttaggttttggattgaaagtgagagagggttgtggtggagaagttgaggaaggagagtagatcaacaaggacatgtttttttttctctttcttttttgtttgactggtaaagttagggactgtactgtactgtacggacttgagctgaccttgagggagctcagctgagtagtactgagtagctcgctgtgtttgggacttgttctgagctcagcaaccaatcattttcgtaaaaattatctttataaaaaaggtaaatgctgttataaatattaataatt

SEQ ID NO: 338 - DNA, 4744 bp, Cannabis sativa
ttctgggaattggatattcatctctccatgagtttgatggggtgtatactctcatataaaattgctgccccaagtactgccttgcccaattctccgacctaatgttccacattcctacattgtccaaagccatgtagattgccgtccaagccttgggataaacctacacatttaaaacatgaaaatatagtttcaaaagtaaagtacataatctaataaattgtattaagtttctacatactatggactatctaacattctctgaaaacggtggctattttggtttactaatcttaaatggctcaatcacagataactattttggctattctttgtgtactggttttgcttgctcatgattttgtttaaaatgtagaaatatggtgtaactaactataatcttataaatcttaataagtttcttggatgtggagataaccttctaacaaacactagtcctaaattcaaacaccaagacttgttatcttgtctatataatgatacctgaatagtgcaacgagccactccatctctcaaattgtagcgcaatctgctggctggagtccactgtccaccgtccattctgttcatgatcaaaataaatcccatagttaagaaaactaaaaaggaaacttactaatacaaagttttgcaagagaagcaattaagtaaactatatcttacttacccaacaacgaagaaggaatagccatcaatatgccaagactgaacttcgttttcccagttctggaaaacaatctccacgaattcatggaaattcgcactcaagaccgctgtctggaggtaggcaccaccaccagtggggctggtgggcatgcctccgaggttgaacactccaggaatcttaaagtaatcagccagtttcagcggcgtgtcgggtgcaacatacgacacgctgttcactgcgtacctttgtttcccattgatccaagcatttgagttcgcaagcatgatcgtacggcttggcttgatcataccgtagtggtacgaaccttgaggatttggtcttggcccactagccgttagattacgcctaacgaaacaaaaacaaaaagtttctgtctttagttattttctttgctataaaatactaacagagtcagagactatgaatatagtttggtttggtttagtttgagtacctaattgatcttgcctgattaacggaccaagcaatctgagtggtgggaccgccggggacagggccagaaactctctgaaaagagttgctgtagtgaagaacagcggtagtagtaagtaccttggtggtgaaacgagatgaaacgacgacgtagtagtcctttggaggctgattagcagtgaccaaaacagagtaggattgccccagatgaacatcaagtgaggcaaagctattctgaattgtatgagacccttctacctctacaagtttcagagaatgaccttgaattctgaagttaatggatgtagtaagccccacattcgatattctgaatctgtatgtctttcctgtaaatcaaaactatgttattaattcaaatgggagtcttgtattatctctctaggtgtttgacacttgtgatcgacacacacaacaataccttgatcaacggtgaatgtgtagccattccaacctcgaccgttgatgagaagtccatcaggggaaggaaggtttcgaccactctccaaaacttgtcttagtctctaaagaaaacaccaaacacgatcaaattattagaccaactaaaaagtgaccattttgatactaaaaaaaggttaagtaagaaatgttacatagtgatttgtcttgtaccaatccccagctaggactgtaaagtctccagcaggaggaggaaaagggacaggaatgcgaggacggctccatattcggatgccgccaaagcctccggcagccttgtggaacaagaatgaagggaaatagaagaagctaccaatttgatctttaacttgaagaacaaatgtgaagttcctcctcggcataataggacagtttgtgccatatacaccatcttgccatgagtttcttctgtgttgcaatccatccctgcagtccaaaatcaagacatgtacggtttgatcatcagatacaataacgacatgtcgttctaaactctgcttcttcagtaagtaggcttggcattaaattttttaacatttattaagttcttaaataatgtaattttgtagtaggattgcccattaaactagtttgactaatcttaaagaccccacacgtttacacccagctaagacttgaaatctcattgaataaagaaaatatagtagcacgagcttgcacatgagactgagagagatatcttgtgagaatctttatttataatttggcaggttttgtagaaaatgcatatttatgatgatgatgatcccactgaatgagtaactggtggatctagttgtgtgtgcctagtaaaatttaattcttccagctatttaatgttatatttattatgtggggatggagaggccgagatctagcatggggaaagtgacatttaccatatgcaaatcaattaaatgatatatcataatattattatagtaaattaaagtgtgtcgatgataatgaggcccaacacaatatttagttagaaaacataaacagaagtttaccaattaaaaatcattcgaaccaaaaagagttagcttctctaggggaaggtaccaccaattcgacaaaaattgcttaaaagaagaaagatgctgttcagtcccaatgcttttgcttaattttattagtgttaagtaaaaggaaagacacaaattaagaccacctcattttgctaaaaagaataaaataaatatgtataacactcaacaaaatgaccagagtaaccctgcatttaattaaattttcctattaattaaggagacattagtcatgagaaaatcattaagggaaaagggttaagttagttagtagttatatgcatattagtttaaaagccaaagatctattaaacgtggattgagtaaagtgcataagctttcttccttaactcaatattatacataagagtaaaagtatcacattttgtcccaaaaaatgattcgcattgtctactaggttagaaagaccacttttattttaccattttctaacccaatttttctcaacaagagaagaaaagattgaaaagattgagacacgaaaagaatggagaacattaccaggaaacaaggagtggttctctgagataattgtagacattgatgatcaagttgtcgtttgttacagcatcaatctgaggccctggaaattgaccatttatcaagatcccctgcacccaccacccacattgttattccatactttactgaacaagactgaaaagggatattttttttctcgcattcaaaccaggaaatgaagaaagagaaaagagtaaagttaaagccaaaaaaaaaaaaaaacccaaatacctcttgcttaacaccgaggggataaatgtcaccataagtgaatttccacgtgaagaatctataagggttttcaccattaacgccaaaaagttggacaagtaccaaaacaatgagaaaacaaagaaatttgcagtttttcattttcaacactactctctttactaccaatgacaaagttctcaactttttcctataatgtagtcaaacacaatgagagtagatctgagaaaagagagagactgatatatatatatatccagaaacagaacacccttatgattatagagaggaaaaacaagatgaggttctgagctctctctttctaaatctatctcctttactctaaccttagaatctcctttatttttttttcactacataatgtttattgttgtgtaatgctttttgtctgaatagaggtcagtttttgtatacaatacaaagcaagagagcaaagagaaaatggccttgtgagctgtcagtggactaggctgagaaaaactaaaatggccttgatggtaatttaggtggggtcaggaatctaggcattcctatttgctgttcttgattaaattaatgtattagttggaaaccaatgagggaaagaaataaaagccaaacgagtactcttaacaaaaactctctttgtcgtttggtaagataataaggttaccccattcacgtgtagtttaagtgcttgttatattgttattaatattgaccataatagtagtagtaatgagtagtgacaaacctccatgctgatgaacggtaatgactattatttttatttttgatgaagaagaaaacccatcattgattcatgattaacgctgtttatatgcataactacaggaacggtttttttttaaaaaaaaaacaaaacaaaaaaagccatgaatgcctgtgacattgtgagacattattattaaattcatagaaagggatcccatgaaaattggtcccatttctattttcttagtcacgacaagaaaccaaaccgtactcttaagctgtacgtgatacaagttgagaccacgattaagaactatgattagcattcattatcttaatttttataaatgtaccatcacatttaaattaaactgtttgatatttttattttggtgggaacgaagtaaacccatcaatcaatattggtaatttttagaagatccagacacaccacatttgcacatgtaacatcataattgataacttaataatcaatatatttatatatgcacttgcacatgcacctaatcaattttataatcatagg

SEQ ID NO: 339 - DNA, 1876 bp, Cannabis sativa
atatcattatttaaggttctggaatagctctggaagatgggcattggttagcttagtcctcttgctgatttcatgcttcttcttcttggtcttgttcttgggggtaacaccttggacctgtgcctgggccctcctctttgcagtgttggttgcaggcttcataccattcttctgcagatccttctcaatatcaagcatgtcgcgaggtaattcaattcctcgaaacagcagtttaaggtcatcgtctactttaatgggaaccctggggtcatttgggtacgcaatgtcctcctgagagtccaagtttgatagcagccagatctgaccagcagctttcagactctggaaaagaacagtttcttaatgttcattcctccaatgtaatgataaatctacttataatctggaagctattttcataatagagttgcttggaaaagtgaatttgtttttagtcattctgcacaataatctctttttgataattctttgcaaaataaactttgacacactcgacaataataattaagaccattttgcaaagtggctttaagaattgtctattccactaatcactcttccataacattaatataccaacacaaccactatcttggttcataaaccttatcatagaatgtatgctcatagtttggctaaaaaagagaaatattgcagtcttctctggtaaggtaaagccaaaaacatcatcaaagaaaatcggaatcattcaaatgagaaaaagaaagagaaaaaatgctaaaatcccatttacatttatcaaatgtccctttggtcactgaaactaatgcttctcattcaatccgatccaaacataaagccatgctggaagttcaggacaagaactttcaacaactacactatcccattaggatgactgaggctggtttctatcacaaatcatcacaaactctaacatgaattggttaatcatcaaaatcatcatacccgacaaagcaacataagaagaaaaagggaaagtttatatatgtgtgtgtattcacacaagttaaaaaaaaaaaaaaaagtttaaatgatcacacctaacagcaatcaattagctaagctcagtagggtattgttggtccaaatcctcatattctaaaaatcaacataaaatgaaagagcatttggttgacaaataaagaggtgggaatggaaggatttgtttacacattacaggtttctttaatatcacaccaatctttttattctctctctcttgaacaaatctttttatactctataaattttgtgacgagtcagatggagaaaaaatgcagtatgctcaatacatgatggccaatatttttacaacaaaagaaaagaatcattaacaaatcaaacaaacctgcaagtcctccatcacagttgggtatgaatccttcagatcaataacagcaatgccctctggaaatttccgtactaagtaaagaagctggcttttgtcttttaagtcatgcttagactatacatcaaagaaccaacacatgtcaaattattttcttgaaatgaatgaatgacgtattaattttattaaaatgcaaaataaaataactaactgacactcttctaaccttgtaacaaaagcgtcttccatcatggctcactttaagattcttcctcaagctgtcaaagacagttttatttgcattaatatccacatagcatgcttcatttatttgctctggtgttagggctagccttgtctgcaaacaaatataaccacagcaagtcattaactcatacttctagactagttctacctagatttttttaatccagtgataatttcaaaaattataatactaataagaagaggaaacccagtgataatttattaggaagctagaaa

SEQ ID NO: 340 - DNA, 2667 bp, Cannabis sativa
aaaatgaattaattaaactgagagaaacaagatataatatttacatgtacatgtttttgacagatcaattaattaaaagaacgcaagttgttaattaaatgagtaattagaagtgatttgatagatcaccttaatcaaaggaggtgatgaccacttgaaaacttagtacatggcttacatatataaactatacttaacctttattaagtattttgtttctagctacgtagccattattatatgctctcttattagccccaattattatttattactattattatttttgggtggattttttttgataacatttattgtgtagatttagtgttttactctaaaaattattttatatataattttttaattttttaattttttaactaaatttacagttgaattgcttcgataattgttatatagattattatatgaatttccataaaaaaaaaaaaaattattttgaagtgtaaaaataaaataaaaaaaaacacttatctcatatactattttttaattttttttttatgaatttactggattgcttcggtggtttctatataagttgttgtgtgaattttaaatgcaatttaagttgctccattagttgatatgtcgatttttatgtatattttcataaaaaaataaaaaaaaaaataactattttaaaatgtgaaaataaaaaaaactcttttaattatcaatttgtactggtctttttttttttttattattagaatggcgattttatgttggaacaaaaacatgttttagctcataaattagcaaaaaaataaaagcatcaggaccatatagagagtgtgtttgaaatttaggtagtttcgacagttgtatttcttattttgtaatcctttaaacatgttttatctaatgaagttgcagatcagtactcttccctttttcttaattttttttaagaaaatgaagaacatttattattggtaataggctaataaccttgaatgataagtacccaaaacccagaattattattttacagcctaaaaactctgtaattattttatagattatgatatataggataagttaatatattattttttatatcaaccaatcctatatcataaactaaaattttgtatgtatttatttattgcgaactacaaattatatgtacatattttgatgaagattctaacaatcattttgctttcaatattaatataattcatctatcaaataaataattcaccgactaacgtaatttttttatatatatatatataaatatatatataaaatgaatatattcatattttataacgcaaatgcttgtatttgtgcaagaacattatatttcaactaacgagaaaaacaaaaactgaatccgtcaaaccgattaatcaatatataattaaacattttgggtgacttttagtcttatgatggcttaattttgtagattctacatcaaaatgccattattgtttcgtaccaaccagcacactaactccaaattaattagagtaacaagccacaaaacacactctagttttacataagatgttggtttttaaaggctaaaaagtcctcctttgtctaatcaacacttgaaaatgttaaattaattatttatttattttacgtccacatggattcaatataaatatattaaattatatccttcttacctaaataaataataaattttatcttagacaaaatgaaaatatatatcttcttcaaaactacttatatttctttttagtcaaatttttctcttttttacaacaactcaaattttgcaatacacagtaaaaattacacattttcattaactaacacgtgtacaaaaaactatctttacatttatccctgcaatttaaatttaacttcccaaataaaataaaaacttttattgaaatcttattttgtgtatgtgaaaatgaggtgaggttttacataactcctgttaataaaatacaaaaaaatatgtatacttttgttgcacatatattggggtagtcccttttctttatcttggtcgatggtgaacattacccaaagttgaggaagaagatgaaaccaacgaactagcccaacactaatctgggttaaggtcaagccacaatttttccttcgtaaaaagtaaattaaaattgtttgaatcgtaaaattgtgtgaatcataaaattgttaagttttgaattttatagctgactaaattatttctctaaaaaaagtaaaggataacaataataaaaataaatagagtaagttaaatttctattgacctcacaataaattggcccattagctcagttggttagagcgtcgtgctaataacgcgaaggtcgcaggttcgaaacctgcatgggccaatcatattttgccttttcaaattatttatttccaaatttcaacataagggtattatggtaaaaactgaaaaatggaatacgaccgcactttttcagaactcgacttcacagaaactaaaaatatgtattaattgcaagaaatttttctctttaattggcagtcggtacaagaaattttaaggtatattctggaaagaaattctcgtactgggtaattatagttctaatgttgtagaaatattttcatggaaaattttatatatatagaaaatgttggattttgaatgatcttatcaatacaagc

SEQ ID NO: 341 - DNA, 2760 bp, Cannabis sativa
gtgagtttggtccgcaagcttctttaggaggaaacatcaaccaacaaatgacatgtgctccatatgaccctgaccatgaccatcaccttattagaagatgaactactacttgattgttttttatgagacaaaataattgttttatttaaaaaaaacttttatttgggcctcattaaaataggaggtctatgagtattgttgtaaagaagaacctcaaaacgcccaagaacactcctaaataggggtaaccacgcgtgtagcggtatgttatgggctaatagaatggcccagccggccaagcccaccagccgccccaatagtatcaatgaactgcgttgttgtcaaactatgtactaattttaagcacattatgtcaaacataacgtaactttccacgacaataatgtgtatattgattagtagcctataaaaagatggataaagagagcgttaatttgaagctctcaaataattataagataatattaatatgggtgaccaagagcagaagggaattgtgtgcgtaacaggaggaacgggatatattggctcatggctaataatgaggctacttcaacatggttacactgtaagaacaactattcgacctgatcatgacccaactgcatctggtacatatatgatatatttccaattatatagttttttcaatataattattaattaattaataatttatgtaagaattgaataatttgttggacttaagaggggataaaaaagaagagagacattagtttcttgacaaacctaccaagagcctcagagaagctggagatctaccatgcagatttgaaccaaccagaaagcttcagtgcagccattgaagggtgtagtggggtgttccatgtggctcatccagtcactatagtcgatgaagagtccgaggaagtactaaccaaaagatgcctcgacgcagccttaggcatactaaaagcatgcatagcttcaaaaactgtgaagagggttgtctacacctctagctcagctgctatttctgttttaaatgatgaaactggacaacaagtggcggatgagagttcatggagtgatgttgactggtataggtctcaaaaacgcatgggaatttcctatgtggctgcaaagaccaagacagaaaaggcaatgtttgaatttggggagaagtttggacttgatattatcaccttaaatccttctttggttttaggtccatttatttgtcccactctacctggatctgtggctatgggactcaccatgattttaggtacacctttttctttcagtgatatcatgcattaaataattaataatgtgttatattcttatcaattgttttgattatgcaggtgacacatataatatatataagtatcttttaagaacgaatatggtacatatagaagatgtggttagtgcacacatttttctttatgaaaatactagtgctaaagggaggtacatttgttcatcggatgaactttcactgattggaatgtctgaatttctttctgaaagatacccgaactttcaaattccaaaaaaagagtgagattcagcttctcatcattattatttgtagtattattttatagaataattcgtttgaagctgagggtgtatgttgattttgtgatacagatcacttgagggtattgaaggttacaaaataattgccctctcatctaagaagctattggattctggattcaagttcaagtttggccttgcccatatgttcgatggagcaattcaatcatgcaaagagaggaatattctttaatttgtctttggatgcataaatttagaccttttttctatgtaaggatttgtgtttcagtttttaaccaagaaaaataaaataaaaaatgaacacatatttgcggcctttaagtttacgtcacttccgatatcataaattacaaaaattgtctcaaggcacatgtcgctataaacgtatatctcaattccaacagcaaaaggccataccacaaactgattgattcttatgtcatactttgtttattaggcctaatcaattatatatatatatatgatgttatacatttatatataatacggtaattaaagggtccaaatcacaatttatatgtctatatatagcttattaattaattaagaaacaatcgcaagaaaatataaaataaaaaggtgatgcaagtccttaaagaaacccattttcctccatcagactaatatatatatatttaaaagataaaaagctttagaatccaagaaagagcatctgttctgtggtgtcaaccttcaatttcctcaaagagcatctgttgttgttatgaatgtgctgaatttgtcaaaagatttcataacaagccttttattagtagttttataaacaccataaaaaattgttgaaagctactataataaagacaagattcacctttcacatatacctcaaaacagaaactaaaggatattcttttctttgcagcatttaattgctccttcaaacatatcatgtacaccattcttgtaacagagcttctttgatgggagggattcaatattgaatcctctgatgctctccaaagatctgtctgacaagatttccaaaaaacaataatgttgtgagacttagctcattaaaccagctgccacatcagcacaactaccctaactgtcacactataaaggcacctcagttaaaaaactcaaggcatctctcagcacctagaagattctaactcccacagattcatctctccctagttc

SEQ ID NO: 342 - DNA, 1395 bp, Cannabis sativa
aatattctggccttgcctctggttatcatagaatgagtgggaacaatgggtgctgcaggaggttgtattacttcttcatgatcatcagctggcatgttctcgggtgtggaatcagtacctaaattttgattctcttcaaaagctgtttcaggttcaccagaggttagtgaagaaggtgagttaggtacctgattgttgttatgtgcagatgatgtttcttcagggtcagcagctggttgtgtggctgtttgagaattcgactgctcagagtgagtttgactcgatataaatggtatattcagcatagtagtccaggaaggaacagacacatgaactggttgttcattttgatgagtattgaggaatcctaacttgaaggggaattcatcttcattgaagatgacatttcttgaaatgtaaagtcttcctgtgctactaaggcacttataccctttatgcctatcactataaccaagattaacacacttggttgagtggtattggaatttgtgggattggtatggcctaagacatggataacaagagcagccaaaagtttttaagaatttgtaatctggtttcttgccaaagagagcctctaaaggtgatttgtctttaagcacgggagtaggtaacctattgatcaagtacactgcagtttggaaagcatcccaccaatatttttgaggaatgccggcctgagcaaggagagttagacccatttcaacaatgtgtctatgtttcctctccgctctcccattttgagcagaggtatgaggacatgattgttgaaaattaatgcctctttcagcaacatgattgctgaaagcttgatattcgccaccaccatcagatttaagagattttatttttctgtcaaggagattttcagcaagtgtttggaagtgagtgaaggcagagagagcatcagatttggcctttaaagggtaaatccatgtgtactcgctgtaatcgtcaatgaagtgtatgtagaatctaaaattagtgttggacatagctggggcagggccccaaatgtctgtgtgaaccaattcaagaggagacttagctttttcatggttagttttaaatggcagtaggtgagattttccaagttgacaggcttcacaaaaatgctcaagatcttttttaagacacttttcattaacttgagataacacagaatttagaacacgagtggacggatggcctaatctcctatgtcatttgtccttgattgaattaaaagacttttcagcaacatgctgagttacattggacttagacagactcgagacaccagtaaagggagtaaactgacagctaaatggactactacggctgaggttggatgttgtgtttggtgaactgaaatggtagagaccatctttaagc

SEQ ID NO: 343 - DNA, 4862 bp, Cannabis sativa
  modified_base (4393)..(4409): a, c, t, g, unknown or other
gagaaaaattgtttattgtgttatttgatatttgatagaagaagaaagaaaatcacaaaacttggagaaaattttcttctgttccctcccactgaaatgaagaaagatgtgagaagaaaatttgtattactctgaaaagaccaagtaattggctattatttatgttttcattatgttcttcactgttgatcaccaaaccccaccactttaaatatccatatatggttatgctgagaggagttcttatgtaaaagtagctgctgggaaaacttcaatttcatgctcctaacatgaaaaccttctcttgatgtgtcatttccaccacatttattttgtttgtttaaattaaaagaaaaataaaaataaaaaaaaacttgttcactctctctctctctttgtctttctctctcttttatcttttctttctttgtgatttgtatatggaatatctccaaaaccacaccaaaaagccccattcaaccaaaactaatttggactctcattgagaatgaggttgtgtggtgtgatgagttggagaaaactttggcaaaatctcatgacttgaatcctacattattagataatgcatcatcaccggatttccttctcttggtaactcgactaatattatcaagactagtgtgtgaagagttttttgcatatgacacaactgtggtcaattcatcacttttgtagctcaagcatgtagcagcatccaaaaccccaactgggctttgaggcactgatgataatgatgatgatgatggaactgaggctgagccacttactactccattagtggtgcatctactgatcagagacaagtctttgatcagttcaagacacttcaaaactctcccctgcaaaacatacaaaccacacacacaaacacaaaaaatgttattgatttcaaatcagtacatcatgtttttaagtgggccaacattttttttttttaccttttgtactagcgtgaaagaggagatggccctatctatgtccactgcttttacttctcctgaaactgaaattgccaccgctgcagcaatttcagaaggtttgaattccaagaagtcaattcctgcattgaattcccaccaagaactgcatcaaactccattaatcctaaagaggaacaagataaacacatacattcatagatggtcaagaaaatgacctctaattgtgcccaatatgagttgtgctgattggcatatggatgacattgatggatgctgatcatcactgatcttgctgagaaaatagtcaacgaatgagcaggaagtagaagtgtgcaatctccatttcagggtgctcaacactaaaagctccattctttgtatagttatagcttcaaacacaaacttgggatctccaacctgccaatgaagtgatcaataatacttccccacatatcagaatctaataacagattaggcaaaatcatattgccaattcaacagtctaaatcgaaatatgtaaagacttctatacctgcaaatccacagactgaggcactttagtctcatccatttttgctgccaatgacaaacaagctacagctaacaattgtacagtccacgctttacctctctaaatcaacaaatgcaagtagaataagaaacatcaatgagaaaagagaacaattaatatgtacaaatgtaatgacataaatgatgtaaattcaggttcatcttctcaacttacaggcaattcataatgtgaaaggaaccggtctaaatagttcatagctagacagatacacatgggtccaaaacagtaatgagcttgagcctgtccattgcaatattgaaaaatcagtcagtgacagaaaaggaaaaataaaatataatcaaatgaactacataactaggattcttcataacccaattaaactatgaacaaatgggaaaaactaaattaatctaccaataatttagtcattgcttagcaagaatttgcgatacaagaattccaatagacctaatacacacaaattgtgagaggagatgagttttgaagggaaaatagaggagtagtaactgagaaacatataaatcaagttggaaaagcccgaattgcatcatcataaatgcaacataattataaacagttatgagaagaaattaatccatagctaatgaataaagaagcaaaacataagaaacccattagagaaaatttaatcaaagcaaaccttccaaatccaatcaagagcttcccttctaacgctcaagttcaagtctccactgcgcagtctcttgaggtaatcagctcttggcaaatgctcactctcccttaaaaccattgcacggataatctcatcactctgtaatggaaaactcatcaaaggttcggatctatcaaggtcaaaacttggttcttgatcatggattcttttctttggttgttggggcatcaaaggagatgataccccaaactcatccgtggcattattacaaccaagatcatcatcaaagcaagtattggtattctcttcacagagaaggtttgagttaacacagtcaaacctatctgccattgaaggacctcaagaaagatagtctgtaaaacccagaaatatatcatcaaaatgaagccttttgtaatgggctatatcaaagaatcaagctttttccccataagcatcttccttttggaacaaaacccagaaagcgataacgatgagaagagaaataaaagagtggagtagagagagagagagtgagtgagagaggctttgaggaaaggttatggcaaagggagaagctttaagtagaaaaagaaatgagcatgtgtatttagggtaaaacaagagaaagaaagagagagccgtctctagctatggtggcttccgtagagaaatacagatccaaacattaaaaagaatatacagccagccaaacacaaacattaatccatttttgttttcttatttggaaataagaaagaaaaaaaacttcaccatggctattgggatatgtatctctgataaatactaaaaattcttttttttttttaataatggaattccttcatttaaagaatttttcctttttttttttaataataatagtggcattttagtcaaactattttttgattgattttttggctttaaacccatttggctagtgagtccctattcaattttttttattttttctttttgctagtgcttgctttaccccattggtcaatacaaaatttatttatttattttgtatatacataaaaaagaaatgacaatgtaatgagtccaagtattagtagtacatgatcttttaattttttgaggcgaaagttgtaaaagaaattataccatcattaaatccatattgtacataattccatataatatatcaataaatcaataatgatatatgctttttctttaatgaatgtctctactatataagatgagtggttgaaatgactaacatataaatgaaatttatatggggtgctactcttgctaaatgctaatggtaggctttgatcacctccaaccaacaagcactttacatttacataagtaaaaaagttgaggcctattgactaataagagtaacataaatgtttgcaggtaatatctattctcatcaaaaagaaaaaaaaaaaatacatctttgtatatgtataaaatctagtttgattcttattagattgaaagaaattgttgtgatttttgcatatgattagagattatataccaattatgatatgattttatgatataagggaaacaattaaatgcaaaaaaagaatttgagggtttttttttttcaatccatgagttttggttttcctttcctataaaaatgccattaacattaagcccttgtggtctttggacatttaattcaaaggaggccaagtggtcaaagtattgtattgatatacctactactcttgtttgtttgctactctctagtgcgtttagttctgtttggttacatcaacaacagagggcctgtttggattgaaattaaggagttgcaattatagtaataaaaataaataatacacgtacgtaccccgtatattactcccataaaaattattaaatgtggaaaatttagatagccatgaaaattcgttgtatttacataaattttgttttaagttgaaaaaaaaaataataataagaaaaaggcttggagatcaaatatagaactttaattaaacattagtggagtaaaaagtaaaaatatttcatgagattgcaaatagcttatatgagctggaacttctttagccacatatgagtaagattcatgaatctaaaaactaaatctattatttatttattttcctaaaatttatctaccttatttctacaatttcttacccttattgtcaactcaccaaaaaaaattattattattattannnnnnnnnnnnnnnnnattattattattattaatatttgtgtgaaggttgtattttttttcttttaaaatttttttagactaaaccttgtgaactttggatagtaaaaaagtatgcttgtcaaatatatttttgtgaaagataaaacaaataaaatttatattttattaaccataaccggaaaagataaataatgatattgtgttaagacatatttataataatgagaatataaaaaaatatatatcacggtataattaataaacttgagacacatattatagttaaaattatttatttagttcaatccaacctataacttattaactttgtccgtatttaaattagaaatatatttccttacaaaaaaaaaataaaaatatattttaattagaattttaaggatatatgattgtaaaatactgacatttaaaaaaaaaattagggctccaaattaaaactataataaa

SEQ ID NO: 344 - DNA, 1653 bp, Cannabis sativa
tagtcctcataccttcttaagagaatgtgcatttttaccaaggccatcctctcctgcatcaaaagcattttttctgtaatgtgggtcatttggatctccataaggcacaaccatttccacaaaactcaatctatgagctacaggccttctccctcgactaccatcgacataggccacagaatatatgattaaaccctccctgggtgtaaatccaatcctgaagttccactgccagtaacaaataaaataagattccaaatttaagcagataaagcaaaaattccaaaaaataaataaatatttaccttctgccattcaacaaagtacccattgacgcgaaagcttggaccttcaggctgaataatttgtaaaggcttcacatcacttcgatcaacaccacctcttgattcaccgggagtatagttcctcagaggatcagcaggaggtaagggaactagtttgcggtcttcaaactcaatcaccaccatgttttgcatgtcaacaactacatggattccctctacgggtcttgcataaccattttccattgggcagtcgctttcagttctacagaatatcagtggcttagcaagcctacgactaggagcgtcggcatcgctatgatagcccacacacctgagacatgtgacgaaaatagttagcatgccgatataatggaactagaaaccatagttagcatgctacctgagaaggtagcaacttaacttaccatgcatcaaccatcacgatatccatgtcttcaatacctctcttcttcatagcctctctaaaaggaggaaagtctttcacaacagcttcacattcagcatattccacagcatcctaaagttgagttggaaacataagatgaagaaaacaaaaacattaaactgtgcaactaaaaatcatttaaaacatgttctatcctgctatacaccagctatgaaataggaacatatataagccctttactctattcatgttttctattttgtaagtgaataaacctgctatacaaaacaaaagggaatgaaaagataattaccatgggaggctgcacatcgggaactacttgtgaggaaatcacttttcccctatggtgcccaccacgagtcgctgcgtgtacttctgagagctcgacaatccatgtgcttgtctcattcgacttcttgttgtaaacaacaagtctagctcgccttgcagggagcttactggggatcacaggtccaccttttgttcttggaagcaatgacggctggaaaggtgggaagaaatatgcatctgctaaagcaacgacatgtttatctggctcaagcagaacaacctcaacaaagcgcatactgtctctgagctgtaataaaaagagagtgaacatttatacacaaacatataacctaccaggaagaaaaatatatctaaaacataaattcttaagcgaacaaggcattgtgtaattcaacaaacctcaggggtagctcctgctgccctgactgtggcaactgccactgagatctcagctgcggaaagaggatccagaggatggctcgactgagctcttagcataattgggatccctgcaccaaccaattgtacagactaattcaatcaaattcggcatatgcattactattaaataaaagtaacaaaataact

SEQ ID NO: 345 - DNA, 1147 bp, Cannabis sativa
aaaaaaaaaaaaaaaaagcctgaagaaaaattaccgagagttctgtcgtccccctttcatgaaagtataaaggggtatttataggctaagatttggattcgcgcatacccgtgactcgttagggttactgtgcaaactaggccaactattagggtaaatacatgaaatacacaacaataatacccacggcaagatacaggcttgtggagtgaaagtgtctgtacagatggggcccgcgcattctggacaggcgtcacgcacgggcattacaacaatagacaaagatatcagacaaacactgttggacaaagatgatgtattccttttggtggtgtgcgcactaccatgtcctgacatataagacaagatttaatttcgtgggaccaagcgttagagggcagccacataaccttgaaaatggattccaaaagcgcctcttgggattcctctctgagtgcctcaatgttaacctagagggtttcgcctattctgcctttaggaaggcagggactcttctgaatttaagtaaatttggaggcaagacttctaggctttagatggactcgggcccatcttctatctagaccgggccttcttatgtggaagggctttgatccaagcgtcgatctcctgctctctcattctatggaagtcccattcctcatctatcaaaaaatactatttttacccccaaagatttcaacacttgagaatggtgaaagcttcactacaataaatgtcactattgtcgggacatttgaccaaatacttcagcaaaagtggtcggtaaaagtggcttaccctaggatgaaaaattttatccaacacttttgtcggtgcatatttgtactggcgaaactctgtcagaaaaaaaaaattagcttttaggggggaaattttactttagttggcacaaatatgcgccgacaaaaggtccaaaaaaatgagaaaattctcgtgttaaaatatggtaggtgggaatactttaccgacgtaaatgtgcgccagcaaaatattaccaaaacactgtgtttcaattagggtaatttttaaaccttttgtcggggcaatataagcttttgtcggcgcaacaaaatgcgctggtaaaagtctatatatataacatgggtgaagccccccccccccc

SEQ ID NO: 346 - DNA, 2224 bp, Cannabis sativa
gtgttttattttcattggttattagtttgcaattaggctgctgatgtggcaagttctatactctgtaaatagagcaagggaatttggcagagtccttctgttggatgagaatagagagtaatctcaagtaggagagatctagccctcttgaaaggttagaaataggagagaaatcctctcgaagagctattttgtgtaattctttggtgattaatgaaagattctggtggaatttcattacgattgttgtttgtgttgatagataatttcttctctaagattattctatcataagccaaagttacagcataccttcaactggagcattttcaggaattgcaggctgaatgccttcaattgccagccaatgagcattaaccgatacatcaagtggtggtttgggtaaaggtgcatcaactacctgcaggacttaggaagtatttatattgggtcttaacaatgaaagtaatgacaaatatataaatctattaggttcattaatgacttattacatctttaaactccacatccttgttatcaatgaagaataaatccttgtgtccagcagctctcttgaaccgcagatgatcgcccgaagcaaaaccgtatataggctaaggtagcaccacaaaagttaaaagatagccaaaaaactcaactttgaaagaaacacatcaacacaatatgaacaatacaaaaatattgaaggaatgctgtgcttttatacatacaaataagtctaacaagacaacttttatgaaaacacaagtagttgtacaaattcaccttccctcttcatgattattcgatcatattacaaaatacagaccctaatcctccacttacacttaacttcttaagaaatattttcttcaagaaaagaaaaggcagcataaattataagtttaaaataattcaaaaaaacataaaatgatacaatattctacaaggaaagcaagttaaggatgtttgggattgaatgggcacgacaagacatcaacatctggataacaatatggcttacctcaacatgtcttaacttcagtgcactatccacatcctcagtagtaagagtagtgcgtctagagtggcgcatgcatttaattgcctcctgaagattgaaagtttgaaacaatatggttgatatcttttggttgttttaaaaaacattctgcatagttttcatagtatagacaaatgaaacccacaactccggggaagtgacattagatgttcacctaaactattctaacacatacaataacagtatggtcaatctctaaacaagtaacaatattaaaattcagggatagttttgagtgttaaaaaacaaaacaacatcttatgtattcaaaacccttggacttcgatactgaactaaagctaaatcttgcataatggaatatggtacaactatgacctactataacaagattttagctttaattatgaaacagcattaaagaattcacactctcaactcaaattacatgggtctgtccaacttaaacttggcaagtaaactaaagctagctcttgtaattgtactatgtgacaactacatcacatacccttacaacaattacgaaaaatagaattaaatgtgattaaactcaagcatacctgcatgatctcacgaacccggtactcaacatcaggagccagagccagggccacatctggggacaaattggtaatgccaatgctttgagcaatgacctcaattgcttccttcggcacaacgctcatctttgtgtttggtttcaactttttggatccaaattctcaaaatttattccaaaaaaaaagtaccctaaaatttaaaaattcaaatttcacgttttctaacgatgatgtctttttttactacttatttcctcactttgacggaacactgctggctaggatgtcgttcctctcaccgtcaccgactccggagtaggtctatcatattattcgaaactctatgactaacgaagagagagagaaagaaaagcggtgactatttgtgatgggcctttcggcggtaagctgcggccgaaattcaaggtggcgcagagttaaatagagggtctcgaaagctgagcttgccggatttgggcggcgtcgtctcgtcggccggtggtgaggtatatgtatataagtagaatatgaatttggtaaacagactatgataggtgcagaagattagtgtaatgtgtttcccttatacataaataactaa

SEQ ID NO: 347 - DNA, 8505 bp, Cannabis sativa
aaaaacagaaacaaagaggaaagtagggcaccgtgtagccagtaatgatacatgttatgaaaatttgaatgtggtgaacaagaaatgtatataagcttatatggatcttttatataattctgttttaagcttcttttgatgacttaagaacttttttttccctcttctcccttcttcttatagctggagaagagagtattgtctgtatttgacattgataattttgcaaggcctgaatttaacgtttttctcttgtgattcagattcctcaaactggatgggataagttgtttatttcattcattcctgctgattctgcaaaggcaacagctaagacaaccaaagcaaatgtgaggagtggcacctgtaaatggggagacccaatctacgaaaccacaagacttctccatgatattaagacaaagcaatacgatgataagttctataaacttgtggtggcgatggtaggtactagtagttgtattattccctcagaattcttattttaaataatagtttctgcaatgcaacatagggtcctttctatgaatgctttaataaatatttttttttgttctagccattatctgttttaacttaacgaattttggtttggctttcagggttcatctcggtctagtgtccttggtgaggctaacatcaaccttgctgattacgctgatgcatcaaagccctcctctgttgcactgcctcttcagggatgcgattctggaaccattctacatgtgaggattgcctcttcagatgattttattatctttagaaatgctctttcatttcagggttttatattattttacatcactggatgtatttttttttctcatttggttgtaattaatcttgtatgcttcttgtctagtgattcaaattcccactaagtgtttttcttttttcattccttttcccgatgtcaggtcacggtacagctgttaacatctaaaacgggtttcaggtgctgtatttacatctagctagctttatttatgcttattgcttgatataatttcagtttgtgaatatatattttttttgtttttattaatatgtaaatataaccattttcagagagtttgagcttcaaagggagcttcgagaaaggggtctcccagatgaatctgttgccagaagattatcatctgttgatgatacaatgaatgatccaatggacaaggtttggtggcttttaaatttcttatattatgctgcttcaaattattttgattttcagtgattgagtattttattgttaaaatgtgagttttaatcttttgatcaaaagaacctgtataaatatttatctcaatgtccttttcttggccaatgttagcattatgtctgctcatattgctttcagtagaaaacatcttccagatgagactttatgtttcagcaagcccaagggatcaatgtttatacccatgaagtgtttccttgcctgacgggaataatggttattcccatgtagttgtttgttgcttggtcgaattactaagtccttccaaatacaaactgctaagaaacttaattcgaagattaattctgtctctaatttgtttcaagaaatagatgatcatatattattattagttgagtttaggtcatgaaaaatgctactcgtatctagaatagttaatgaggtagcacatagtctatagctaaatttgctttaactgctaccactagtactgtttggtggtcgcgttatcgtgattgtatccatcacctttttttggttgatgccagtacttaacaatatctctagctcccggccctcttgagtttcctgctcttaagtggtgttttcctaggctaattttgtcccccaaaaaatgctaattgtaaaaaaaagtaaatttctttaattatatagagttggtaatttttattcatcttctcaggctcttagggtatgtttgactgggaggaataaaagcacagaaatagttatggaatgaaataaaatctaaagtgcatatgatttttttttttaaaaaaatttctcatcttgcattggaatggtgtttctttctgtttgatagtagaatagtcattccactaaaatggtggaaaaatcattacattggaatggcattccaatattttcaaatacaattaaacaaaagaatggaatgaaaattgattcatttctattccattccattacctccaaccaaacgcaaccttagaaactgctatgtactatcctaaaacctcagcctttatcataattcaggatttgggattattattctgatttaaatgtaaagcattttctatgtgggataactgttaactgtgtaatgtgtttgcccttttaattattgacatcagtgtgtaaattctgaacactatttattgtctgtctacctggtgcgtcagctgttttatataagaagaccaaatatcatgcagtatcataaagctcttttgcgctcgaaatttattatgcaaatgtaaacgtctagtgttgtttagtcttgatatgtatttattgtcactgtaaacaggtcaattcaaaagttcgattcaaagaagaattgcctctccttgaagaagaggtgggcctcagtgaagagtatgcagactcagctgttggcttcgatggttcttcgagtacttcagagagtttatatgctgagaaacatgatacttccagcaccaatgaaattgacagccttaaatgtacaacccctggtggcgtagttgggccgagtcaaggtctacagccagaaaaaggagatccctctaatgttcggtttgcgcctcctggaagtaatgattgggctcatggctggggcgctgactattctgcagataatgacttggcaaatgcatatgaggagaatagtagacttcgaagaagcttggaaatagccgagtcatctattcttgagcttaagctggaggtgagttccttacaaagtcatgctgatgatataggcaccgaagcccaaaaattttctcagctgcttgctactgaaatggcttcaggagaacaattagcaaaagaaatttatgtactgagatcagagtgttcaaatttcaaggctgatcttgaacagttaaaaaattccaaattatacattccatttactgcaaaagaaactaaaaagacagaccgggatgcctcctttcaagagttgccactcaggtgggtcaaggggcttctggaactggaggataagataaaagaggttcgaagcaaggcatgttttggattccaagaaagggaagtggggtccttcagttcagatatagatgcattgctgggcgttgtggaggatcttaaacaaggtactagacagacaatttcaacgatgaacttggtgaatgtaaaggagatcagagaaatgaatttgcacaagggtcaacaactattaccaggaagcaggtttagtgctgagttttaccagccagaaggtctgtttcattgtgtggacatacctgccgtggtatctcaagaaactgattctgcagatgctcacagtgcaatcaagggaaaaatgtttgaacttatcaaagaattgggtgaatcgaaagctgaacgcgaaggccttgcaagaaaaatggatcaaatggagtgctactatgaagctcttgttcaggaacttgaggaaactcagagacagatgatgggtgagttgcagaatgtcagaaatgaccatacaacttgcctctacacgctttcagctacaaaagctgagatggaaagtatacagcaagacatggataagaaaataacaagatttactgaggagaagtgtgaattggagactctcaacaaagatctcgaaagaagggctgttactgcagaagcatcactgaagagggctcgcttgaattattctattgcagtaaaccagttacagaaggatcttgaattgctctctttccaggttctctccatgtatgaaactaatgataccctcattaagcaagcgttttcagattcttcaacaccaagcattattgagcacaaatcaagagagagtaaaaatttggactcaaaggaacttcaatcaacgaaactctctcagtccccgcgtcaatttgatgcggtgaagaaagatttagatggagacattatatcagacttgagaagatctcttcttttgcagaaggacctttaccggaaagttgaagaagaagttggcgaagctcatttggtgaatgcatacttggacattttctcaaagactctacaagaaactttacttgaggcaagtgctgattacagattgctcaaaatgaaatctgacaaacttacacagcagctggaggtttcaactgaatctaaggggatgctgaggcagaggcttcaaagtgtcatggatgaggttcaacatttgaatgaatacaagaataattgtgatgcaaaatgcaatgacatggctctgcagaaccaaattttagaaacaaattttcaaaaggttactgaagaaaatgtttttctttcccaaaagattactgaatgtgagagactgctaaaagatttggaaagttatgagaacaaattccaagcaagctctattgaaaagttagagttggagaatttgttgaaaaaggaagggctagaaaatgaaaatcttaaaaacaaaattctgtctttgcaagatgagttgaaagctgtgaagattgaattcgaagagctagcttctgcaaagctcggtgaagaaaactttcttctttctgcaaagatcaccgaatgtgaaacactgacgagtgatttggaaagttgcaagaaaaattttgaagcatcctctattgataagttagagttggaaaatttgttgaaaaaggaagtgctagagaatgaaaatcttagagatgaaatttcgtcgttgaaggaagagatgaaagctgtcagaactgaacttgataagctagcttcagcaaagatcggtgaagagaattttcttctttcggaaaagattgctgaatgtgaaacactgttgaaagatttgggaagttgtgagagcaaattccaagcttgctccatcaaaaaattagagttggaaaatttgttggaaaaggaagcactagaaaatgcaaatttacgacgtaaaatttcctctttgcaagacgaggttactgaattcgaagagctatcctttgcaaaggaggatttgcagagtactctagactttcttcatgataagctgcagaatctgctggcattctatgatgaaaagtttaatgggttgaacattttcagtgaatatgtgtgtgagggactagagcccaatgatttgaaaggtactgtgatgagattggaagagatacagcatattgccagaaagaagatattccagctgattgaagagaagcaagatttagcgcgtcagagagatgtggctcagatgtccttaaatgcagcagagtcagataatgtcgtaatgaaacgaaaatttgaagatgatgcacggagtgtaatgggaaaactggaggtgtctggtatcctcatgcataagcttcagtccgaagttgaggccattgctaacaaattgaagcttagctctgaagctgaagaaaattatgaacagtttcacagagaacttctgtctgcgtttgatgatttggaagctgagctgcagcatctgacttctaagaacaaagatcttgctcaagaaataatggcattacggagtgtaagtgaagaggtcggaaggtataaacaggaaatagcagcaatatcagaggaaaggaaagttcagatgatgatcttgaaggataagaatgaggaatctgcaaagctagaaatcgagcttaataatatgagatcaaatttgcaatcactccatgatgagttgcatgttgaaagaagcattagaagtaagttagaaagcagtgtaactgatcttacttctcaattgaatgaaaagcagcatgagttgctgacttttactcaacagaaggctgagttggttcacctgaaacagtctgtgaaagatttagaactagagaaggcaagtatctttcggactttgtcggattctgaacaaagtctaaaagcagctggtgaacacttttctgatatatctcgtttggaagcccaattttctgaaatgcatgagttatcattagcgacagatgtgagacttacttttacaaaagctcaatatgagttctgctttgaggagcttcaggacaagtatgttagtgtcgagagtatgcttaatcattgtctttctacccaggcacattacattgaggagaatgctaaattaatgacaagtcttgattcccttaggtctgagttggaggcttccactgctcaaaatagaatgcttcttgatacaaatagcagcttaagaattgcatttgatgaactcgagaaaagagctgaagatgcagaggataattcaagaaagaatgctgttgaagttgaaaggttgaagggtatgttggtgaaatctgatgaagagattgatgacctgatgctcgtcaaggaagaactagaagtcaaacttttggtcctcaaattgaaattggatgaacaacaacctcagatagccttgatggatgaatataagcatgaactggggatgctgcaaactaagtacaaccagattagccaaaaactctctgaacaggttttgaagactgaagagtttaagaatttgtcagttcatttgaaggagcttaaagacaaggctgaggcagagtgtcttcaggctcgtgaaaaaagagaaccagaaggaccaccacttgctgcgcaagagtccttgagaattgcattcatcaaagaacagtatgaaacgaagctgcaagaaatgaaacagcaactttcaatctccaaaaagcatagtgaagaaatgctgtggaaattacaagatgcaatcaatgatgtcgaaaatcggaagaagtctgaagcttctcacctaaaaagaaatgaagagctagggatgagaatcttggaattggagaccgatttgcattctgcactttctgaaaagcgtgaaataatgagggcatatgatctatcaaaggctgaaaaagaatgctcattaataagccttgaatgctgtaaggaagaaaaagaagagctcgaggccacattgcgcaaatgcagtgaagaaaaaactaagatttcattagagctcacctctatgaaggagtttcttcagagctcagcatcccaagtgaataatcagagaagagacaatgagggattatgcaaaccagattgtgtctctgatgagccagccactgcttgtcaagaagttggccaggcttttttcactcccattgatgaaggtgaccagtcaaaggaagccatcaatccgcaaaaaaatcaggtaactagcaacttttgtctgggttgtgcttgatttgttagtacattattaatttatgcatataggtactgttactagagttcaatttgcttcttttgcagctgagcatttatagctattttaattttgaaattgctcactgtaagaagaaacacttttttgttacttttaacatatcacaattctaaataacttaattcataaatcattcagcacttatctcaagtgttgtttggatgagtgtgtgagttgttgggggttcaagtttccaataatgtacaaaaaaattactatgatcattgagtaagtatcagggcttggtagcacattctgtcttccttgagttttcaaaagggggtacctgtaaatctcatttgaccctccaaatatgctaatttggttcgttatataattcaaatgatgttcatggaaatttgtttatcatgtgacatgctagtaagaactatgtaataccattgctttcatactatcatggtaatgttggtgtctaacaatctttgtacatcaggatgctcttacaactcggtcggcaggtcaagaggatacactacgaaaagacacagagcatttagctgttatgaatgaccatttcaagacccaaagtttaaagtctagcatggaacatttaaataaggaggtatttacaagagaaaagtgaaaatatgattttaaattttgctaggatatctggtatagctgcatgacggttaaggatacaatttttttgttcttttcattatgttctttgtcctaccccttgaaataattcacttagtatttaagaacataatttattttcatctttatacagttggaaaagatgaaacatgaaaatttgcttttgtcccaagatgatcatcaatttgatccaaattgttctggtttacaaagagagctgatgcagttacaaaaggtaaatcatatctatcccagttttatatttgaattttcaagtttcctcaaaactcactcttcattctgtttgttgcttaggtaaatgaagaactgggaaccaaatttcctttgtttaatgagttttcttacaatggcaatgcattggagagggtactggctttggaaattgagcttgcagagtccttgcaagcaaagaagtcacgagttcaatttcagaggtatgtcccgtctctctctctctctctct

SEQ ID NO: 348 - DNA, 6726 bp, Cannabis sativa
  modified_base (6511)..(6516): a, c, t, g, unknown or other
tttttttttttttgtgatatagtgaaatttgcatttagaaaaagaaaatagcacggtatgacgcaaattgtcgttgtaatgcatcctgcctggcaatgttgacaagtaggatattaatattggctttaataacggcgatgtaacttgataccaaccaaatcttgcatgaaagaaaaggtttatactaaatattgaagacgtaaaacagaatagtaaaaaaaaaatggatttcatttttgataaaaaagaaaaacattcgaaagaaattaggatgaacagtgaatagattgcaataaaaaaaaaagaaactttgttcccaattcaacatgcgtcaccttttgtctgttccctcccaggatgccagctcaagcttttgcttctgccagctcacgcaccacctgtgattcacttcttcccaccgccaccgcttttcccagccttgtaggcttcgcacgccttcactctcctatctctcgctaaggaaacattcagtgaggtttttctaattttatggtatttcctattgttatattaagaatattattatgaaccgtaattttagttaaaatcttttgctcatactatttcacactcacattggaagaaaacaagactttaatttccttctcgattttcagtgattgacacaacacgccatgtccacacgttcttcttcatccacatcttcttcgtcttcatgtggatcttcggccactaccattgcatggatcggttatggcatagccgccattacagctgcagcaattggagcccgcttctatctgggtcgagctactaagttccgaagccgggtcgttggcattattcccgctcgttttgcttcctcccgctttgagggcaagcctctcgttcagatcctcgggaagcccatgatccaggtacccattattattttttttctttctacgaattgaatttacgagtttgtgtgatttggttaagttattgcagtgttggtctcaaattttaaaggggcttctgtttagcttggcgtaaatagttaccgacaatgcacttttaatttgttagaattattgaagaaaaaactgttctttcttttgaaatttatcatctcacaaagttaattgtttgtgcttacaagtttatgtcagttacatatggatctaataggtagttttttttttggttaagatctcatattcagagcattgtcattttgttttagaaaagtttaattatttattgagttcatcttatgcagagaacttgggaaagggcaaagcttgcgggttcgttggatcatattggtatgttaattaacttcttttcatcttatattatgacattgtgaaaaagcgaagaaagactctcttaggcgatatttctgtctgaaattttagggtcaagttcaatgtgttttaagaattatttcgattcaagtctcagagttattaatgctttagccaacttgtgttagtcgctgagtaccctttcaagattgttttgatacgtactgtagtagaatcaaatctctctttgatttgttctgttattcaagatccattctttgtgtgctggtatcaatcttcgtttcttagagagcgaagtttcttagttgtactaaaatatcccccgcaggaatgaaggacaattgattatcaaagagaattttgtcttgtttgtgtcaaggtttttggcataattattcttaacctttcctttaatcaaccttactgtatctcattgctcaattatctgtctgtctcactcatctagtatcatgttcatctgaagatttgttttttttttctttccggtagttgtggccacagatgatgataagattgcagaatgctgccgagggtttggtgctgatgttgtaatgacttcagtgtcttgtcgaaatggttggtatcttaccatacttgaatgttgatttagatagttttggttagattttgttgacagggtatcgtttaaggtactgagcgttgcaatgaggcacttcagaagcttggtaagaagtatgacatagttgtcaacattcagggcgatgagcctcttcttgaacctgagatcatagatggaattgtaaaagctttgcaggtatgctatcctctttcttttgcagtcttccactttttattcttaatatgcagaggtatctcatttgtggacttctcatattgggttttcaagttttagtctatagggaggaaggcttaaaattggaatttttttgaacttaggtgaagcttgggttgtaatatatcctatagtttacaattgtccatcttttgttaaatctgcatgttcatactggaatttgttttgtctaccaggatgcacccgatgcagtatttagcactgcagttacatctttgaaatcagaagacgcatttgatcctaatagagtgaaatgtgtgatggataatcggggttatgctatctacttttcaagggggttgcttccatataacaagtgagaatatgctccccgtcggcttgttttatcttttataatagcatgtatgaaaaccaatccatgtttacaagtgtttatcataccttgattctgtccaaaattttcaacaggttagggaaagtcaatccacagtttccatattggcttcatctcggaattcaggtaccaaattcaatctttcctgtgttacgcagagtgggtacaatttactttgtatagatgttggttacccatattttttccggtgatgtgtttggcatgtctaccagagctacgattccaagtttctccagatatattctgagcttgaacccactcccttgcaactagaagaagatcttgagcagcttaaagtccttgaaaatggatacaagatgaaggtacaatgagatttttactaagttaatgtcccttgaaattttaaagactagagttttattcactttttttttggccttttcactggaggttgtggagaaaattggaaaaacattctgttgcaatctttatttacttggaccataataaattactggaatttcaaagtagcccttaatataacacttattagtgggatgcatggtgaaggtataatgagattttacaaagataaaagtattttgaaacttaagcctacagtttcttcgttcttttcttgttttcttcactgaaaattgtgaagaaacttggaaacatgctgctgagatctttgttttcttggaacatatcacattaatgagatttcaaaccttatttataatttccttttgctcattacactgttcaggtgattaaggttgaccatgaagctcatggtgttgacattccagaagatgttgagaagatagaatctctcatgcgtcagaataatttgtcttaagtttttttccccctcgttggaagtgaaattttgtcttagtttgtatactacatatcttccttttcttttgaaagggatatactacacatctataattatagaaaacacaatatcaaagtcgtctatgtaaacttattattgtctggttcacttggttaaggagagaataagagtgttaattgagtaaccccatctgatttatttatccttttccagttgtaactcattctatgtaagtccattttttattcattattattatgacagatattgacatcccatttttgaagcaatttccataatttgtgcagtaattgtatgtaatatgtactattcagattgtcaaacacgaggaaaataatgtattatttctttcctagtgttgaagtattttgacatgttaattgctacattctctaaaattgttagagcaattggccttttctaattttaaacatggactcttttgattcgggtaaactttagttgttgagcatatattgactttgtatattttttttaaatgatgtaaaaaaattactaataaattgacaaataaagaaagaaggcggtattagtccaagtccctcggggtagctcagttggtagagcggagttttttgagtttgtgagacaagtgccaaacgacaaagcaatagacttcataagtttaagatcacaagtcggttcgtttcttttccctaggttgataacatgacactattttttttaacttttaataaaaagtttacttcaaaattaggagaagaattctatctaggaaagtgaacatgccagacaaacttgttcctctgtctcctaacctaacccaaaaacagaaatccatgctctacttctactcatattctgatattgcgtgtctttatagaccaaattcatcacacactggctctgccactcacaccacactagtaaggaagtaacaactctttgacacaaaaaaggcacaaacgacacagattgtaacactgtaacaacaggtgtcgttttctgtaatggcgtactgaagttaacaaaaattaattacaatacaatacaagattaggatgagaaggaaaatcttaaatgaatccaaatcttgaaattaatttaattccgtagtagtagttgttgttgagcttccgtgaccaacttcacctctgtttggaaaagtagaaccgacagtgagtcaatggagaagtagacgaacccacctggcgagtgagtcacgaacgacccgaaactcgctccgaccacgcagtgccacgctggtccgtacgacaagtcaaactcctgtataaataaaacgacgaccaacaacaaccaccgttgcaatatcaataatcagaattcagaaacccaaacaaacattattggagcttagtgtacctttttgagagctctagcgaggagggtggggttgggcttcggacgagtttttgttgtcgtttttgtggaaacgacagagtcgaggagcgatctggtgcttctcaaggcgtgttcttgcatgtgggttggcatgtcggatgatctcaaccgtacgttgaagcttatggctacggcagccaacttcacatcttcatttgcggaccttaattttagcgaggcagctttgttttgaatttgcatggcttgctgcttctcttgtttcaattttccatccattaattgtatatatatatatatatatgagacctataaatatacaaaatggagtttgtgttgaaaagaaagaataaagttgtttcagaatgaaaggtgcacagaagcagagttggtgggactgggagagttggaagtttgactcgccttttctgaagaagaattttccgagtttttggggtccaccaggcaccacaaaacgcatttgatataacaagtaaatacatgcttcaatgcttcctaataataaatagatattatttttagatttatgttttataaaaattatagattttattttttatttttgctatttgataattcatataatttaaaaaatagtataaattaaaaatactatatatcatgaaattaacgaatggggcttttgattatattaaaataaaaaaatagatagacattgagctcaaaattattttgtagtactttaaaataataaaaaaaaaaatgctaaaagtatcaatttagatttagagtgtcatattataattattaaaataccaatgtaggtttattatttactaatggcttatttgatacgctgtataaggattgcattgtattaataataaataatattatgtatggataaatcaatgtattgtattaattattacgaccaaaaattttaatgcataacaaatagttcgtattagcttatattataatatttacaaaggattcgggtcaacaccaatctccaacccggacccaaacccaaacccgagacccgaacttggaccctggacccgagacccagactcgaaccccgaatcccgaacccgagatcaagacccggacacgaatctaggacagacttggactcgaaacccgaaactcggacgtagacccgggccccagaccgagacttggacccggacctaggagccggactcgggacccaggactcgcacctgggacccagacccgtagttggtgttgggatcaagtgtattgaaaatatttataaccttacacaatttattaatacaactcaataccaaacattatattatattaaataatattaatacaatacaatgtgtcataccaaacgagccctaaatatgatcagtagattataattcataaagcaaaataatcggtgtgagtgagtgactgtaatataaacttctttttataaatttaatcacactaaaataatacttattcaattatttaaagaaaaatttaatattcatacattaaaacgatcccattaatataaatagatacttaagttttataaatggataatattattttggaagttgtgttttgtaaaagttactaataggaccctctatattgttaaatgacaaaataaatcttgtattttctaaaattgtacaaataggatcttggattgattttttgtcaaaataaaactttataataatctgatctatagatattatgacaaaactgattacatttttcgtatctattcatgctggaaattatcttaaagttggttatannnnnnaataaaattgttaaaaattgagcttagggtcatatttataccattttggaaaatataggatctattttatcatttaacaaaacaaaggatccaattaataactttaataaaacacaagatccaaaatggtatttaccctttataaatcatacaaaatttacctttctaacaacaaacacatcatttaactctttctctctctctctctct

SEQ ID NO: 349 - DNA, 3037 bp, Cannabis sativa
ggatatgtaatgattgtctcgtaacatataattgccaaaaacattaaagaagctttttaataaatatccaagaaagaagcgcgaagacacattcaatgtgtctaaaagcatggaaaagtaaacaaaaattaggggaagaagaaggcagagactagagaaaaaatagaaagaaagctcaccttagcagttaatggagttttgcctaattctgaaaagaaggcatctttccttcgtttccttagctctggtaacatttagccaacaacaagaaagttcagaaagaagccatatctgatattttctaatagctatatatagtcactgagaacggtaaatatatttaatatgagctaaccaatagaaattaaacaaatgaggattgtccagtccaacaaataggataatgatgaacggcaataataaaagtacatgcacattcgttatggatgcagcaaacagaggattacacacaagcttccaagtaatagcttcaatgcacctattgaccgatttgaccatagattgtccaatgctagagctcacacataataaactttgacttgaaaattttggaatttggattactgtgtaggtaaagataccccagtttttatagtgcaaatcaaatttaaacagcaaacggaaagaagaaagtatatctactacagatgtggttgaagtagaattaatgtagaggtgtatgtgtgagtgtgtatatttataaataaacaaaaatgatactaacatagagagataagattggtccgtttccgtcataaaaggtaagtttgcatttacatatagcataaatgataaatcttgtacaaaaaaatttaaaatgtaaaaaagagaaagatagttcatgtcacaaaattgcaaagatgatacattaatatagccccctaattgtgtacaaatgggactacatccaaagcccttacatttattaatttatacttatatttttatatataatatgtacactactggggcaacaaaatccaaaccccaggtaattgaaatggtgaaatacaaggccacatacagttaagcatgtgctatcatacaattcagtgtcatagcgaaacttttcaagtatttagattcacaattatatatctaacatcatacctttagcatccttagacctcgaaggatccaatcctttttgagcatgttgagccttgttaacctgcagaagatttgaacaagaacaacacactttagtagaagataaattcataaacgtgactaaattaaaagcactccaaccatacaaattacaaaaccatccatgtataataataaaaggatcaaacttgactagagtatcatgaagcaacttacagcgttaaacaacttgaccactgaaacgccaccaatgcacaagtagtaactcagttagtaccagaaacaatgtaataagtctttagaaagagaacaaatatatatataaagattaaatatagtaagaagccactacctccttttgtagcaacaccaattaaaaacttttcatgtgcatccaaataatttgctggtattacatgtcccttttctcccatctattacattaaaatgctaataagattaaaacaaggaacagatacagatgtagtgtacacaaagatcatttgatttaccaagtgcttttccctcctgacgtccttcttcaccttcctctcagcgtcttcttcagccagtttttctgcaacaagcttcttctgagatgatagaaccggaccctgcaatgcacacccatcacatcaaatcgagtaattcccatgttttagaaaagaaagaaaacaaaaattacaaaatatagcttaccaaaccatcgtcttgaataaccctgttaataatactcttgaaagccattttaaacgctctacaaccctctgtaaacttggtgattccaggctgaataccaacagtttcttcctcgccgtcggataacccatcatcgaaatcttcacggcgctctttcagattcccatcttcatcttcttcatccttatcttcctcagatgaatgcccaccaccactcaactcctcgactttctgtaatttcctctcgttttcaacatcatcattttcttcttcctcatcttcttccccatccgaattgtaatccctagctcgcttacgaaacagcttcttcatcttgacatctatcttcttaggctttctcaagtctccgactcccccgggtaagcccctgttcggtctattcctacccttgaaacctttcttcttccctatattcctcctcatgggaccctttgccgaaggctccatcgcttggttctctccggcagccatggcagtggataaggtttatacgaaaaattagaaaggggaagaatattagggtttaagagaggtttagtatagttatgaggaagtgaacaattacaaccttattgtgaatgagtcactgttgttatatgtatgcttattattttcagccaatatatgaatcagagagagagagagagtgtggttgctgtggctgtggccgcggtgtggcggagagtgaaagggttgttgttgttgtggagaagaagagagtatgaatgagaggttttaccaccccattatgatgggctgcgccatgggcttttcaaaactgtaagtgttttttacaccaaaatttccgttttttttttcttgtttattatgggtcggaattttttaaaaaaaatattgtgtattttttatgttgtgaattgtgttaagtttttattgttgttcatggttggtttttttgttgttttatcattgtttttaattgttctgtgttgttattttacgataattttataaaaggacggtatttttataaaaaaaaattcgtgtggtagtaaaaaaatttactcaaaatctaatattttttataaaaacctcaaaaaaaaaaaaaatcatttcattattacccaaaagtaactaattttaacatttttacaatttctttttatatataaaaaaatatgaagtattgtttgtctgttattgttatttgtacagcattattttt

SEQ ID NO: 350 - DNA, 1548 bp, Cannabis sativa
aactcaaactcacaatgcaagcaaatatctccatttgtggacactctatgtggccgttacccgtctataaattttctcaaggttgataacttaacatgtacatttccattcaattttacatgcctttttcttatattaatttcgtgtttggttggttgatcaaaggttgacattgaagatagccctgcagtggcaaacatggagaatgtaaggattgtgccaaccttcaagatctacaaaaacggtaatagagtgaaagaaatcatatgcccaagtcgcgaaatgttggaacactcggtcaagcattatagcttttagagaaactcatgacaacaacactgtaactctatctgcttctgtgtcatattttcgagtcttcttcatgcttttctttttgtttggcccaaaccgaactcccccatctctgttcgagagcccttccagtctttaccctccttccttagggatgatcattcttacctgtgacataatcaagaccacataaataatctttattagcagccattggtagtggatcccagagagatattagtagcttagtttccttttccagttttttatttattcattcattcctcattgctctctggttccattttcttttcgtttgttctattccttttcggaacttgtatctcatattcatgtaggcctatcctagtggttgtgtatcccccaaaatgaaaaacagaaaaagggaaagagatagtaagtatgtatgtatgtatgtacaatttgattaaatttggctaatgagccaaaacatggggaagaagggaagaagagaggtttagagtaaaaatggctggttggtagaaatgatctgtacatgtatatatatgtgatatatacaagaagaagaagaagaagaagaagaagaaaaattggaagttataagggagattggatggttttggtgggtacttattgggttagtgaaagaaggattgaatatgttgttattattattgttgttttattttcctttaaaccatttatttttccatcaataaaaattcttctaattttctctgtttctttctccatgtatgcacttttgagtttcgagttgaggctagctcgagtttttatcgggtgagtatatatataaatatataataagtgaaatggtatggagtttcaatcttcaaattccatgtttgggaactactaggttctctcttgtgtgttcatgagtattttttttttgaaataatcaaattcattaattagtatttagagtacaataaagatttaagttcatcagaggcattatattgaaaaaatacttcgatcagaagagaatcgagagcttctagctaaataatgtgctgctcgatttggagattgttttaataggttttctttctcttgtgttttcaatgttcatgagtgtttgttcacttaggatacttagttgtgttttttgttttgtttcatttggtaaagtgaatggtatttaattttggtagttgagacaattcattataggcacctttcttatttatttatgttattttctctctt

SEQ ID NO: 351 - DNA, 3814 bp, Cannabis sativa
atatatatatatataatttcattactagtattaatattttatagattgttataagaaaaaattacggcataagtcctcaaaaatattaatttgatacaaatatattctcaacctcgaaaaattaaagtaatagtcccaaagctcactattttcataagttcattagtcttattttctaacagctctattactaattaaaaattccacgcgacgacaaattatttgtcaaaattatattttaatttaaaaattaaaaaaataaataaattattttaaaaaatattttttttttcttttttttctagtttctttcttctttttatataaagcatcaagtagatgaatctaagaatatatgtacaactttaagttgtagactaaactgtggaagagcacttgcggtcctaattaagtccatcagatatctccactatcaatactaatatttccgcagagtttagtaagattttagtgcgttttgcttctgatttgaacttggaggaatggattgggtgctttacttatgcccctcctcgaagggagcaaaggttggagttctgggaggagttgggtaatgtgatgaaagcatttagctgtccctggatggtgatgggtgatttaaatgcggttctgcaccaggaagagaaagtaggaggcagactggtaactcaggcagaggggcaagggctccgtaattttattttcaacacaggagctatcgatctcgaagggattggagcaatttttacttggacaaattgtcaaagttgggatagcttagtgcgtgaaaaatggatcgggctgtagtgtcctctaattggattacccaattcaagaaggcgagagttcaaaacctgtctattcggcattcggatcatgctgtgattttattggatactcatcttgatagagaagtggtcaggactcctttttggtatttggatgcttggagtagagacgaaggttgtagaagggtgatagaggagacttgggatgtggttattcggggttttcatagcttcatcctctgtaaaaagctcagactcacggcaaaagctctgagcaagtggaatgtgcaattgtttgggcactgtcaaactaagcttaaggcgctggagaagcttttgagtgatgttcaaagccgcctcccgagtaaggagaatgtggaattggaaggaacaatcatgctcgaaatagaagaagttgaaaagcggttggaatccatttggaagtagaaggcacgtgagaatttgttaaaagagggagatagaaactcaagatttttccatgcctccattgttgttcgaagaaaaagaaattttatatgggcggttaaagaagacaatgacagatgggtggaaggtcgtggcaacataagcgaattcttcaggaaccggttctctgaggtgtaccaatcgactaatcagaggtttgactctgagttggattccctgcttaatttatgcaaaactgatgaagagaatcggctgttggtggaacctccttccccggtggaaattaagaaatttgtttaggagttgcgtgctttaaaatccccgggtccggatggtttccctattaagttttttaaggactactgggatatagtggggaatcaagttatatactttgttcaggagttcttctcaagtggtaattttggcaaggaggttaaccgcacattcatagtcttgattcctaaaaagactcatgctagtcgctttgatgattttagaccgattagtctatgtaattccacctatgaaattattactaaaatccttcctaatcggttaagtgtggtgcttgataagattgtgtcctcgtttcaatcggcttttgttaagggaagatggatagccgacaattctataatcgctaatgaagtcttccatgatatgaataggaaggtggggaaaaaagcttttgcaagtataaagtgtgatatgtcaaaggcgtacgaccatatggaatggagtttcatcattaaagtccttaagggctttggctttaattttcatttttgcaaaatgataatgcatttcttgtcgtcggtccagtatcaagttttgctcaatgggggtctcactaaggcttttgctccgaagagggggctcagacagggggacccgttgtctccctatgtctttattcttggagaagaggttttgtctcgcttcttctctaaagctgaatctgaagggaacctgaggggatactcgttgaacagagaaggaatccctatctcacatctgatgtatgctgacgatctccttctctatcttgaggcagatagaggtaatgtagaagggatcctgaattttttagataaatattgcaagtggtctggtcagaagatgaatgtgtagaagtcaaaggtgttcttctctaaaaatggctagggagagcgtcgttaggagatacagagattgctgggccttaaggagatggggagagaagagaaattcttgggcaatctgctctttttcaaaggcaatcggagtagcgattttaactttattcttgatgagatttcggctagacttgaaggttggagggctcgacttttatctcaagccgcgagaggaacgctaatcaaaagtgttcttgcttctatctcgatttacagtatgtcggttttcattctcccgcgaagaattaccaaccaaattgatgcggctctgagatgattttggtggacatgtcagtgcaaggagggccattttctggctttgaaagcttgggattctttatgtaagcctaagcaatgcgggggtcttggcttcaggtgggccagagatgttaatttcagcttgattgccaagattggctggttgttggagaaggattctaaggctttcttgacacatgtactcggatcgaagtattgcaaattcaatagttttctctcttcgagccaccctaggaatgcctctgcggctgctagagggatttagtccacgtaggattttattcggcaaaattgcgtgtgggtggtgggccaagactcggatgtgaaaatctggttccataaatggtcgtgtggtaatcatcttgttgtttattcgggggcgataaaccccctggttggtagtagcatggggatccaggaattggtggatttggctgaggatggttggcatcaggggagggtggtttcgacttttactccggctatttcttctaacattcccaaggtgaaaagagagttgcttccggctaatgatacagcctattggaactcctctttgaatggcgaattctcttcgaaagctgcttattggtctctaaataaagagagatttgaggagaaggatgttttgagtataaaaatttggaagttaaaggcccaaaaatgccttaagttgttcttgtggaaactatgtcatgatgttcttccttttgggtccaaactacagaacatttttgggaatgctcctggtgtttgtatgctctgtgggcaagatgaaggggacaatgtgagtcattttgtctccctttgtcctgtcacaagattcctctggttttctacccgttggggtattcgatcggaggccttacagagttcgaatggccgtgaggtggtgaattggttgctatccccgcctttccacaatgctctggcgcagactgaggctcttgaatttactctttatggtgctatgttgtactacaaattgtggaatcaccgtaatgatatgtatcatcatggagttcctttggatttggataagttagctcgtcagattagggagttagcttcaaagagtattaaactggctgctagtgacgatttgcaagtgtgggggggggg

SEQ ID NO: 352 - DNA, 2252 bp, Cannabis sativa
ccaattttgtctgcttcagctggagaaacttcaatcaatgaatcttccaggattcaggatgaatctgctgctgaaattcagccagaaacttctgaaagttttctcagtactttgttgaataagatccaacaaggacttgaatctgaagcagtagacttgggggctttggcccagcgacttgtgaattcatctataaattggttaaagaaaaaatgtgaggcagaagccgcttctgaaggccaactacctgttatatcatctcaagataccactggtagttttcataatacagaactgctaaagcttttactaaaggaccccaaggacttgatctcaaagtgcagaagtaacgatcctcccattcagtcttctgaagcttcatcagaaaagataattagagagtatcctttttttttttctcttgttttgcatatatgctatggcttagttaactacattgtgtttttatatgtgatttaattgcatttatctctagctcattttactctacattttccttaacatgcactagatatgaattgcaaattttatttcgaatggaaatactacaatcagaagttcgagagagcatcggagagtctttgaaacagaaatttgtgaaacagatatgcttgcttctagataccattcagtgccatcttgagggaggtttctttggtgaatggagcctggatagttatgtgggaaggttcataaaagccaggtatcttatagaacaacaaagttttttttattcgttaatgagtgctttgttggtgagtcttttgtttgttgttttgaggcatgtattgtacattgcaatatgtctagcaatgaatcctattttcaaagttatagtatgaaagcaactaactagaaaaatgtaaggtgaagaaaagaaatttacattagacaaactgggttggttctttgctgtaacttttgcagaaaacatgaaactctatagcaaatttactttgctagtgctagtgatagactaatgttaaagtacccaaattttcaggtacagttccactcttgaagatgtagttcataagatctataaaaaaatggacttgttgctctttgctgatgaggatggacctccaaattgcctactcaatagcgaggatagcaatcaatcttggaaagaaaagccagataaagacgaagtgggagaaaatagtttatttagtgaaccactatcagcagaagatgagtcccatcagctgcttcagcatggtagaagaacacaaggagtggctcaggacctcgctcgcaggttaactgaagctcaagagaggagagaaagagctcggagattttcttcttttactagctggatgcctgatttacagagagtttgggctccaaagcagcctaaggcagtgatgccaaggtcagattcacttccaaagctgtcaaaaaggaagagacatgtagaggaagtcagtgacacagtatgcgaaactccaatggcagataagaaacgttcaaatttacggcgaaacagctttgattcacggtataacagcttctacaacgaggattaccatgataatgagttcagtagtcagccatgtgccagtgtttccaaggcattgtttcaagacgatctgtaaattggatccagccaaggaacatttctcagggagacacttggtttgaactagcaactacatgtaagaactaagaaccattagagctgtacattttctttaactcttagtctatactctataccatactgaatttttcttcatttggtgaagtgaataatgtttaacataaaataataaaaaccaaaactaatgaggtaatttattcacttatttatatgctatctctgaatttcttcttgatgggaagtattaattattcttttggaccatatcattatcatcataatttctgtaccccagttatatctgtctagactctaggcaataaaacaatgaaaaataagttaaatctccacactcattgcctttcttcaacatttgaacccctctgtacagtgcttgctctaataatcagttctcgtaatttcattagctaaatagctagaccaaaaaaagaagaaagaaaattgagaagaggataaggggttgaaatttctgaatgaagacaaagacaacaacacaaaattaaaagtggacccacaaattttttctaatttcatttgagcctaaaaactttagaaaacttatttaattaatctgtacttgcaacccaaaatcccaattcaaaga

SEQ ID NO: 353 - DNA, 11044 bp, Cannabis sativa
  modified_base (6313)..(6318): a, c, t, g, unknown or other
tttttttttttttttggataattggatttcttataaatcccatttttttctacagtaagttgcttcttttatttttaactcaagaaaatggaaaccatagaaaaggaacacaagtaattctatggttatcctttgacttacattgtatgagctaagattgttatgatatctggttaatataaaccaaattactgtctctttctctctcaagactcagttttcaaaactttttttaaattagagaggaattgcacaactgtagagaagacaagaaagaaactactgatatatttttgcatcgattttgttgagctgaaaataatttagatatttttatattatgaaagcaagagcacatttcatgccaaaattttcactccaattttcttgctacaacaataattcaagagctaaatttgttggttgtttgcttgcttgggagtaaggtacattgctaagacattatatggtgaagatgatgacgaggatgaaacacctcaaaacaacctcgttatagaggagccaaagttactagggctcaatccagcttcccaagaaaaagtagagtttttatctttgtatatcagctaatatgaagccttttgtttcaaattttgcatgattatgtcaatatattctgtgcatgagttgacattacacactttttctgcagattcttttgaagagcggtccttatggattttatgtacagcttggtgaggataggaagggcttcttgcctaaaagagcttccctttcccatgtatgtaaagcagaatacatattgaattgtttcttacctgaattcttatgtatttgatttgattttggccttgtttaattttttgtggggaaattaattccttctttcagataaaagacgttcaatctgttaagcttgaagatgccctcgagttgcttcgctatccagttacactggttagtttttctctcttaaactttgtcatgttttatgttctgtctcaatgcatctctaatttccttttcttgtaatctcctactagggtacccatccggccgatggacagccggtggtattaaaattggcaaagggcgggcctgttgtaaaatatagaagaagttttgttacagttcctaaggtatcttttcattcaccagtcttctcttgtattgtgttcttcctacattttttcagatttagaccaagttggatgtgttggtgacatgagataatcaaatgcagaatgtgaaaccaaatgaagtcgacctagagaaagcattaaagtatttaaatggtcccgatgtaagacaatctggtcgaccgaaggccaaatcgaaggctgatgcagccgttgaggcattgtagtcatccacgtgagttgcatagggaaggaagcgcaaacttttctgatacctgtgaccaactatcatcacaaactattcaggggtgggagtgagcttgcaatgcaacttttcttattggcagtgagttgactatgctatacaagagaactagatcactttatatgcttgagattctttttcacagctagaaggggtataggacaaaacaattcttttgtaacattatatgtttatttatttatatagatatcattttgtgtaggtgattttttgtttttttactatttaatgagccttttccgggtgatgtaaggctcagatgtgagatgatatcctcacaactttgagtcatttccggaagatgttaataaatatttacattagcaagttaaactgtgaacaagagtagtgtaactatatatctaatatttatactggtgtctgtatcgctgtgatactgtactttattattctatgaccacagatagtgaaattgcttgattctagttcatttccatattcaaaatgaaaattgttgcagccttcaaacagagctcagatttttatgttttctaatttaattttaaaaaaggccctgtaaatatacatacttggcagcacaaagaatattcggctgttaacttgtttatgattatgaacagaacaactctaggctatagtctatacctgaaatgacaccattcaggccaagctaattgaaaatctgtgcctaaaaagtacaaacttgtttagttagttccattccaggtccagcatctctggcagcatggtatggtgccttgctttgtttgtagcatagtttactttggtcaaaactcaaaaatggcggtgttatgtaatcggggatatgaccaaattaaatgttaaggaagggagggcacatattcacatgtgtccatgaccattgccatggaaatcttgtaagcatatcaacgtacaactataataatatgaactcaaatgtattaaactcacctatctaacaaaattaccctttcatcatatgttgttacaagcctttggtagttacatattttcggtttctttttcggctatgaaacaatactggatgatggtgttcttgagctagcaagtgagcttgtatatgaattactatcctgcattaaaaggcatataatattatcatgtaagtttgaaaaataataaattgcttggacagaaaatggttgtttgtgcaaaaaatggagatttagacatgctttgatttgaagaattatataatcatttcacattttggtcatggcttcaacctatcctggaaaactacaatgcaagtgctactctataaccacttaatttccatcactaaaactgtctgcaagtttcaagttactgactcaaaacattctgaactttcaaaatcttgtcttctagccaacatgtgtcaagatatgcttactgacaagtgtagttgaaagaaagtaagagccttttatgcttagaatttgggttattattcctagccccaagaagtaaattagaagttttttcttaagagtgactagtgttcctggtggttttatggtagctaatgataaggaaaaagagattgaaggagacaggctggttgtggtggtgatttataaacagagaagtaacaaaggttgagaacaatgttaataaaacttacaacagagacttggctgtagttaaatgggggactttcatcgccaggggacaatgtgagctgcatattttcttcagcaagtgctctcaatctgttgagttctgggaggataacgctgccaaggtcgggtctatcttttcgtcttagctctgcacacttgagagccagtttagcaaagctcaaagcttcgtcatagggccagtctagcacagctggatccaacatctcagcaaaagtccctttctctatagccctttccacatgatgagtcaatcccattgctgattttgctgttataagttgtaaaaacatgattcccaaggagtaaatatcagacttaacaccaagcattccagtttgctgatattctggatcaatatagcagaaagttcctgcagtggatgtcatgcggtattgggtgacatgatcagcaacagatgggggcactagcctggccagtccaacatcactaatcttactaacaaagtttctatcaagcaggatatttgctggtttaaggtcccggtgcacaagtggctctggctttgtttggtggagaaacaataagccagtcccaatttcagctgcaattctaaacctgagttgccaagaaagaggaggggtgtttcctcgacagaagagacggtcttccaaactcccattagccatgaactcataaaccaagcacccatattctggacaagctcctaaaaggagcaccatgttaggatgccttatgcagctcagaacttcaacctacatcatcatatttttctattactacttaagtagaagaagaagaagaagaagaaaaatgagattaatttgtatgcctagtcctacctcttgctgaaactgtgatcttccttgagctgcatctggacgaagaaccttaatagctgcaggtgtatggtcaagataacatttgtacacaggcccataacctccttctccaatcttgcgggacttatcgaaaaaccctgttgcagcctctatctcttcaattgagtaccttctgtaccttagatctgttcttgacagagcatccattgctttcctcctctcttctgattctttgattgctttcaattctgcattaactcttttttgtgcttcaaggtctgcaatcctcttagcagcttctgcagcctcaatggctgctttggacttagctctctccttttccactattgccactgcagcttcctcagcaaatcttgcctcttccaatctcctctcttcatcatttttccagcgttggagttctatggcctatatatacacatacatttatagaaatagattaaaaacacaatcctcatgatgaatcacgaatcatactggttagtgggtaccttctgtttagctgagagtgcttccttgcatgcagtactatacatttccattgtttgcttaagttcaagccttagcctcctcatttcagcctccacatcttcctgtgatttcgaaatttaacagacaaacaaaaaaacaaacaaacagagaagcaaagtaaagatgatattattattacttaccatagctggtgatgaagatgataataagtcagtactgtcttgtgaaaatgttgaagagaagtcagatggagatattgtatccaccgatcttcgtccattaggcaaagactcaaagctgtactggttaaagtcaatgtctgtaccatttgacatccgaggtgaggtctttgctgagtcaataatgttgtcatggaataaggacagaggttgttgtgattggtgttggtgttggtgttgttgttgtagtattatacggtcaagacttgatcttccagagcttggccttccagagctgacaaaagatatgtcaccactgtctgacatagtaggaagttctccatatgactttccatttggccctcttctgctagtaaatggtgacctgaagtattcaagttcatcataagatcttcttggtggtttttcaaaagcagaagcagctgatgggtgagatggggatagggataaggaaacttttgcattattattagctggttgtggttgtggctcatcatcagattgtttcattatttcagctcgtaaggcagagttggccggagctgggcgctgtgcagatctcattgactgaatctttccctttgatatcacatacacattgcaaaaatcaggtgccccttttcccacactaccaggaatatcactcatcttgaatctacatagtgaattgacactaatattgagtttgttcttataaattattattgaatttattaacccaatcaatcaaaattaatgctttccttacctaaggaagccggttttaacggaagcaccaagaaccaaattttcgattgcagcctgggaaacgtactcaatcaatgctttagctacatctacatcttctaacatgatgtctttgcattgtatctgtaatgtatatttatatataagaaaaaacaataataatctgatactataattaatttgatttgatttgattgtgacttacatctttacgggaacaaaaacaacgaaaagggaggagcaactccctggtctgggcatcaggttctttggaaagtgaactatcctctgccacctctgtatacaatataattagaaaggttaagaaaaacccattgagatgtattattatatatatataataagagtgaatgagtgacttacgtacttgtagaaaaagaagaattggagttttgtttgagcttgacatgaataagaacaacagtttggcctctttggagaatattgtcaatagcccatttaagggcattttggctgttcttgtctttgtctatggccactgccaccaatccattccctccttttctctctgaatggtgctttggaaaccacattattatttttatttcttattaattaagttgttgtttaatttctcaaacaacaacctaaacccaaaagacaagatcaaatcttctttttttctttttcttggagagagagagagagagaaagagaaagaaaatgaactatttttgtcttgtcttgttgtcttgtggctgttaataataataataagaaaaataaccagtatatgcatgcatgcatggctttgttttgttttgtcttgactatatataatccttgttttgagttttctgactatataaagaaagccatgtttgtggcataaataagcactagttttgactatatataatataaacctgttttgactattttataacctgtgtttccactaaatataacctccctggaatcggatctaatacatattttattattattattnnnnnnattattattattattatatatcatcactacgtatataccttgatcaattttagtgtagtttgccctttttctaaggcatgtttgaccactcttttatttatttatctttttattttaaacctgtgtcagctaattttactatataggttcttagaaatttatttttctaattcgggcacaataaaacaaaaacaacatatcatatatagtatctttctattataattaattatgagttatattttgtgacaaagttattgttgtcaaaatttttaaaggtatttctttctcatgctagtcacaattttaatacttgcagcttatggatttgctaacatcctcttaggctaaccgatgtgttctttttggtaagaagtaattcctcatcctatatgtaaactgtattttattgtatttcaataaaacatcatattcttgaaagaaaagaaaaatctatgtattatttatagatataataatgtattaagaggaggccggcgttgccttttgtgagggtaggagatggagcacaaccttgatggcaaagtttatttggactatttcgagcaaacaggataacctttgggttcggtgaataaatgctatttacttaaaaggaaatgacttttggcaagttgagtttaaacatgatgcgagctagtatttcaagaaattattacgactgagaaattctattgataggttacatgttgttattgctagtaagaatggtaagttcaaagccaatatgttttacatatctgttaatcctatgcaaaaagttgaatatgctaatcgaatctggcataaaatgagtatcttgaagcatagattcattggatggcaagcgatcaataatccgctcttgactagagaccacatcagtaggtttatgctgattcctgatgatctttgtccgatttgtgaaactgacaaagagtctcatggtcacatctttatggaatgcccgtttactttaaaggttgtgtcagaagttagcaattggttagggagattagattggccgaaaagcttcaaagattggtatgattgactttctaaacccatcaaaaacttacagagaaaattgctcaatgcagtttgctttattatccataatatttgagtgaataggaacaattatatttttgatcttagttgcaaaactatctctcgtattagtttggatattaagaatgctgtcaaatacacatgtttgagttgtataagtagtagcaagagcaagtttgatctccatttatgtaagattatagctagctggtagtgctgttggtcccggccagctttgcagctgttgtttgtattgtgtttcttcgttggtttctttgaataaagtcttttcttattaaaaaaaaaaatgtattaagaatgtaaattgagtcattgttgttgccttcacttacccttgaaggctcaagaaagtgatacggtgccttcacttgttgctggacagctgttagggctattagggctatgtgccgttggaattcgattgccattcaggctattggttgccattacagtcagtttttggtattagttgtgcaagaatgtaaactgttattgggaggtttaaaagaggtttctctcatttttattaaacgatatgcaaatatgaatatgttggctatttttctagtcaacattttttgtgctttcattgagagctttaactttcttacaaagatctcatctcttttcacctggtaatcacgatggtcttgacaaggaaaaatgtgtccactgaaacccagatccgagggctgtgaatctcaatgtctatgttccaccaactagtgacaattcggccaaccttgcccagccacctcgggcaaacctatctgcagggttccaacaggtaagcccagttaatgtcaggcaagacttgacaaatatcaggcaggtgccgatcaatgttggacaacttgcccaaagtaccacaggggttcctttaacaagggctacccccaggtatacgctggagaaactagatttggatttggccaacctagtgtcaacgaaccccatgttgacttgggggatgattatgagttggccagactaagagaggccgtagggcaagtctaggatcatacgaacatcctccatcatgaataagaggaaacatgcactgctgtgagcaatgctttagcctaacagagatgcaaattctaagaatggatggattggcagactacgatcctccaagcccatcaggcaaaattaaacggccccaatagggaggcaaatgacctgattaggaggtttaatgaaagagctgggtctagagtggaagaaccaccactcataagggaccccttttgggggaaaaggtccttatgtcacggaggaaactcaatgccttagggactatgggcgaacttcgcatccagtgagcccaactgtttcccaaataaggtcgcctccagatcgacccaatgatgaacgaatctcgccttaaaaggcatacagttgaactgaccagttctaagactttcttagagatgaaagaaagatggaagatgtcctacctaagtagggccaaagtaggtcctgtagtggagaatcttacccctacctcaatgaggatggttccattagccaccctcttgatgggcgcactaaccaactcataataacactaggcacaataacgatgttccttcccgatatgctcaaacgtagtctgacctggggcccaaggactctgtgtttgatagaatgggtgcccgagtgggagaagaccttcggaataacttaaaccgaagaagaaataatcaggatggacaaattccaccccaaaatgatccactaagggcacaagataagccaattcatgctgacccatatgatcaacctcctgtcaacccaagagaagagttggctggacaaaggacgactagagttgattctgtagtacaagcataattggatcaactcaagagccttgtacaaggactgtccgacccaaagctttctgacatgaaacttgactgggcttgaggattacctttctccgcatgcattaacgcgttgcccctaccaaccaagttcatgatgccaacctagaaaatgtacattggaaaagaagatcctttggcccatatcaaatactttgagattcaaatggatctggaaggggtgatagatgatgttcactgtagaatttttccagcaaccttgtttgacaccgcacaacagtattattttaaactgtccctagggagatttgattcctgggatgctttcaccaccgagtttatacacatttccatcctctagactgataccatctcaattggaggacctgattgaaataaaacaaaggtcggggaacttttgaaagactatatctaaaggttcatgatcgaagccacaaaagtcaaaggtttgatagaagaaggatggtatgcaaccattttaggaagaatcctacctctgagtgacctttgtagggacatcaaaaaaatatcaactaacagtatgagagagtttttagaccgaacggtttcataaaacttgaagaggttgtccgccaaatgcaaattggcgggcagaaaatagctacccccaacaatacacctgccatagttggggccaataatattgcccaaccccaaagtaacaacaataacagagggaaataaaacaacattggtttcgaccaaggaaatggtaagaaagggaaattcaataatccccctacacaacaacatcctcgggaaaaggatgagaagttcacatgcttcaccgtcctcacagacactcctaggacaatcctaatggccacccacgccaatgttccatacaagaagcccccttcaatgaagaaagacattagtaagaagcctcgattttacttgttacagtggtcgtgaccacaagccttctagtcgcgacgaattatgttgtcgcgatgaggcttctaagtggtcgtgactacgaattttacagaaagccttttattttcagccttgcaatggttgcgaccatggattagctagtcgcgaccaggagacccacgcagcctataaagacccacttcgggccaaaataattctaaacctaattttatcatcccatttgagttttcactttctctcaaccaaaaaacacccgatctctcctacaaatccctgatttcttcatatccatcacttctaatcacttataaacacattatccttcattaatctttctttttccccaaaaattaaaccctaaatcactcattctcacccaaatccaagaatttcactattcatcatcttcaaactcaaatttttaagatttttcaacaatggtggttcattgatagtgtcctcattagtaagtctcattctttatgattgttcaaatgaattagtgagttttccattattttgaaagcttttgaagattgtatctgggatttgtggattttcttgagaatttttgagttgtattggattattggtctcattgggtattagagctgtgatttttgtgaaattttgttgtaggggaagtgaagaaattaaggggatgtgttgtaaaaatttctcaagaaattttggtgagtgtaaaagttgatttttttttttgttgatcatgggcccaaagcgaacaagagtgaatgaggtaggtgcctcctcatcgaatcctccacgtattgccttaaggccttcatttgacaagactcggtttgtaagtgaagaagcccaag

SEQ ID NO: 354 - DNA, 1276 bp, Cannabis sativa
gagagagagagagagagagttgttataatatactcatttaatggttttgagtaaaatttaattcaccctcatttaatggttttgagtaaaatttaattcactatggtagatactagatattcaaatattttatcatttcaaaataaaaaataattaacgacagttaaattgtatgaagttaattattattaatttttaaacattcaagtttcaatccagaaattgtcagagctcaaacatgtaaatttaaaataaataaataaggcagaagcatgataaatttttgtataaaaaaaaaaagttaaatttgtgggctatatagatttgccgtgatccatataaataaatttggggaaaaaaaaaacatgatatatttaatttatttatttattaacctatcacgagtataactacaaataataatttctaaacaaaaaaaaaaaatcccctaataaatagtaacagttaaattattccataaaaaaagttacatttaaataaatattgactacaatctaattatctggtaataattgttatctttattatgatatatccttttttatctttttttccttcaaaaaatgaataaatatatccttttatattttcaaaaaatatatccttttagcaatcgctcacctcatgagtcatgtcaagactatgtaggtccgtcttctatatctacacccacaaattttaaggctctccatctctctctctattctccaaaccaagttctcaaaactgtgtcagattctacagtactaccaccataaactgccattagaaaaagcttttcactctgttttctccactttcatacataaaaacaactaaacaaagttgtcatattcttgattttaacgttcccatatatttataattcctctttaatttgtctccattgattcttagttttctgagtcgatgatgaatatggcttctgtgagtgtgaccaacccagttcagtccccgctccgtacgtctcgaatttcttcgctttacttgtcacccattaagatttcacctacctcagttgctctcaagtctcgatcagtgccctctagagcctcaaccagcgccggcttggctttttcgccgttgccggagaatgtcataactcgtaagaataagagtaccgtggatacttttcctcacaagctttttttggggttttctgctttggatcaacggctgagacggagaggttctgctgaactatctcttgtgacggccgcagctgccgatgccgacggtcggggaattgaaattt

SEQ ID NO: 355 - DNA, 2824 bp, Cannabis sativa
ggaaggagcaagtgatgataatgtcgacgagaagttactaatttacgatctcactttagcaagccttgcccgtaactcttccatttcttcttcatcatctacgccttcagcaatggcttctccctgtaaaagagaaggcaccaagaaaatttggtttagctcttgcttccaaagaaataatgtaaagaaggtttcgaagagttttacacacttgtttcgatgcactagctgtttgagcaggtaactgtatcctctctttcctgttagcttctggaagctgcgcagccgtctcaccagccaattcgctcaaaaccttatcaacctcttcctcagtttcctcttctatatcttctgaatctaatgctgtatcaagagcatcatttacaaattcttcaatcacccctgcctatggaaaacaataaaggtgttaatctaaaagattcaagaagataaaagccagatatcagataagaacccaatcagtaagaagctgatatgctgcaacagccaaacaggacctaagagaaacttaaaatgaaattgccaagagataatactaccaaccttggtcatttctttgctaaactcttgcattgtgacagccatctctggagctttcatcaggttattaacaagtttcatgacttcggagctcttagacagatgaccaacagtacgggcaatagctgtgatggcatagaaaaatattataagacttcaagcaaagttccagtctttgagcatacagtataaatacagtttcatttttacaagtaaaattcccatatacaaactaaataaccagttcaatatatgtatttttgttacgctttaatattagtataactgattagaattttagaggctgaattgtcaaattcttattggctttaggtgaggtatcctacagtccttaaggtgtcaaaacagctacgagagacttagtattaactataaatagagggctgataacgggggaatgattttgtaacaaagtgagtaagagattactcagggagataccaactatctcgaaagtttggaaatttgtaatttctttttgatatcaataaaatgctattgcctatgttctaattcttacaagaactgaactagaacattagtgtatcaaatggtatcagagcagactatgggaggacagaaaagaaaccaaagaaagcaggaaaaaccgaccaagaaaggtcgaaggatttgccgaaaaaatagaagactcttgatgccatgattggcacaatttaggatgaagtgagggaattctggtatgaagtgtgctggtttcggaaaaaattgatggcttacttggatatattcttgagaaacagggaaagagagtggatcagccaagaacaaagaacttagttaagaccaattttcgagtttctgagaaatcgggaataatggcaaacagtccaaaaactggaaattcatcagcttgtaacgatatggaagatgagtttaagaatgtgggaggtcgagtagcttacaatcttgttactcaaatctacaaatgttggctctcaaccgctgaatccaagcaagggaggtaaagtgactccaaatattcaaccgaaaattctggcgaagagcaacaacaacgtaaaggtacttcgacaatagtgactttggaggctctcgtttcttagagaagggaactaatcatgcgagagaccttgttcgcaagagcaaacagagggcctttgcaagaaaccaaagccaaactcttgcgcaacaatcgcaactcagagatgactatgagcaaccgcctgaagagaagaaggtgccatcggacgacgacgacgatccaccatggtcatttccttggctgttgatcacagtgagagagatgtcgcatgatgaaggtgatcgaacagaaggaaatcttctgggtattttgttttcaaaatcggtggactaagaaagaaggttagggcctgtggacttgagtttattggcatcaaagggatccaacaaagatataattatttgggtctaaagcacaatctaataaggttaattaagcacccgatccacttatggagacaacccattgagcaacaagtgccttttagtaaaaggtcacttgcaaatcacctccaaaaatctatacgcatttttataggaattcacgatttccacaacttgctctcaattaatcaatggcggatgtgattgacagtcttccaaacagtggtttgggtttcactctacatggcaacgatggttctactcagacaggtaatacaacgaaaaggagttattattgatagagggaaatgaaggatttccagtttactctcttgcaaggaaaacctagtatatacaaagtatttcaaatcaggccggaacaatattcaaattgatttttctctctatttcttcctcgtttgggcttattggagtaatagggttagaactcttgttgggatttgcattcattttttcctactgtgatggtgtcgtcaagctacccaaaaagatatgaacaaatgagttgacaaaggtagttaggcgattgatttagatgaaatatgctacactacttggttggtttttcgatagaggaagaccagttgaggatggtgaataaccagccacttcacgaggactgtccaagtatcaatttctacattgcactccgtaaatctagttgggtttttcagattagaagttggtttgggttgtactggcacacaatggctgctgtaaatggcagtgtggagcaggaaatggttattattatttttttattattcaaatggctttttgactgatgtagtactaccattgagccacatgagatttt

SEQ ID NO: 356 - DNA, 3084 bp, Cannabis sativa
aaaaaataaaataataatataaaaattgttggataatgtgataaacccaaattgtatccattcccatatttctgaactctttcttctaaaaccccttctgttaagttctgggtacactctctctcacccgcccaacaatggcttcaatctcatccatttcgtcaccaccgaatttcttccaccactccgtcaatattctcaaagcttcacccaaactctctctccaaattctcaagccaaccctaacatctcatcctcacatactcacttcctcttatctcattatagctccttctcctaggcactcccaaagactgttcgccgtcgcagaagcaacctccgttgatacatcttccgaggccgcccgaagactttacatcggcaacattcccaggaacctcaaggacgatgagctcactaaaattgttgaagaacatggtgctgtagagaaggtcgaggtacacttttttttttcctcctctaatgttgtttctaggaatgtaaaatagaattaattccttaatcaggagaattatttacaatgtaatgtttagttgaattgttgaagttcattgatgttggacgttagcaaaacttttctgaaatctatgctaattgcacttttttctttgttgttgtttctgggaatatgaaatagaattaattcgtgaattaggagaccaattacaatgtaatgcttagttgaattgtacaagttgattgatttggatgctagcaaaattttccaaatttctatgcttcaaacttcatttacttggtaacaataagagttgtctcttttcgatctcaaaagcatcatgaaattattggtaagcagagtagctttggaaattttagttgaggtctgaggatcgattctaggacctacccaacaattcagaagattttagtgaataaatacacttgtcttaattgttttagtgaaatttatgttcttctcttttgttcataggttatgtacgataagtattctggtaggagccggaggtttgcatttgcgacgatgaagacggttgaggatgcgaatgcagctgttgaaaaactgaatggaactgtaagtttaaatgaactaactcaaaagattccctaatgcagtttatttctttgttaattaatctgtagtgatttttgataacaggagattggtggacgggaaatcaaagtaaacataaccgagaaacctctgtcgaaagttgacatgtcacttctccaggctgaggattcccaattcgttgatagtcctcacaaggtttatgttggaaatatagcgaaagctgttactactgaaactcttaagaactttttctctgagaagttaactgttcttagtgcgaaggtttctcgggttccagggacctcaaagtccacaagattcgggtttgtaactttctcatcagaggaggatgtggaagctgctatctcttcatttaacaattctgtaagtttcagtgttctctgctatactgtgtattgaaatctttttgtgacgtgatagtatggatgttttaacagataaacaattacatggatataataggttttttttttaatggaaatggatataacaggttggcagtctcttggttgggcagacaagattgcattctttccatttctagtatttgtttgctcttaaaatggttctaataacttcatacagtactgtaaaacataataatacacatgcaggaaccttcactgtttttgaggttatagcctaaagtatatctaaaatgtaaaatttaagatgtgccaacccttaattttggtaaacaggattatgatgctgtcgatctagtttgtctattatcagcttcgtttgcttatgctgcttagtttttggaaggtacagaagtggttgcatgtgatgttttgaaaattttccaagataatatttccatcctatgacaggctatcactgtttatggattgatgttcctactgatagttcctgattcttatgagtatatatatcttccttttcgttcatagggtgatctgtgatactaaaattggaatgtcagctgttttttatagccaatagacagttttcttagtgatacagcagcttttgagcagttgatttgtcattgttatttaacttaatcgttgcttcatttagcttatttgtctaaggctcgtttgtttattattgcagttattggaaggtcagccaattcgtgtaaacaaggcatagtatgtagctagttggatgaatttttcagagttttacttgtactgattttatcagattaaaggagaggcctatttaaatcaaatgaaaatcattgctaatttgtgctccttttgttgatgattctaaggtttgtaattttcttaccctataaacctttgtttggtaagaagaatggaatgagttaaggatggattgtatatggcccatggaaacataggagggaatggattgggttggcaccttaaaattatttggtaagctggaagtaaggatataaattctaaaatataaaaataatcttttaaaatatttattaacatatttcctatattatccatgatacttatacttttatgttgggattatttttatttttaaactataaaatagtttttttattattattatttttacaaaattctatatagaaattaatcgcaactagcgttgcaacttaaaccgcaacaaaaaacagtataacaactcacatagaatctactttagaaatttaaatcgtaaatttgagaaaaaaatattaaaaaacaatatatggggtaatttctcttttatattttattttcaaggataaaaagaaaattgtagaaagattaggatcattattactcaatccttcatagtttggaaggattgttttttgggagatttttaattatatacataaatttctaaataatcacagaaataatgctaacctaaataatcccaaaaacacgtgtaccttatgcccaagcgcaagccatttgatttcaacttatttgattctctatttaaaaatattttaaatttaaaaaataaaaataattgtttcactctatttatatacgatgtttttttttttttttttt

SEQ ID NO: 357 - DNA, 1681 bp, Cannabis sativa
gagcatgcttcgttttaagtttgttttccaagtttcatttcaatatgaacaatagattttagaaaggaagtaaaacataattctgactgatagtggaagctcaatgaattgtaattttacagatttcacaacttttgtaaatttattttattgaattctagaagaaaaaaaaattcttttagactttcttcttggtccttttccttgtgcggcaaaacactagatcatagtgctagatagcttaagcatcttagcgttgtgcctgcattttgtatggaaacacttgatccagattgatctttctttcgatacagtaaggttaggttccaatattgacaaactttgtcacattattgtgcaccttcttgaagcaactcttattttcttatttagtgcttataatttgtgctctaatggttcagtatgtgatgattttgataaatggaggagtgcctattgcatttgctggcactgaagaaccagctgcttatggggaattgatctccattgggggccttggacctagtgtcaatggaaaattgagttcaactattgcagaaattcttcaaattaagctttccattgacagttctcgcttctatatcaaattttatgatgttcaggtatgtttatttgacttgtcctgttatggtcttttccttcaacaattttaccctttatacatatcattttgtcatttctttctggatcacggggacaattttccaatgatacaacttttgatgaagaaaaaagagaaaaccaagacaattttctcatttcaaatgtttgtaatctcttcataaacattggtctattggatttgtctgaacttttttacacattaacaatttcgcaatcaaagttaactaatataggagaagaatcagaaaatatatatatttctagaatggaagaaaaaataccaacaaaaatgcatgccccaacccaagcagaaaacaatgcaattacaatcaatattcattcgtatccacacagttgccatttttttttctattaaaaacatcatctttgtaaacttatacaggtatttatcccaaagacaaataagagagagaggtagggtattcatgaatttatcttatgaaaatacttgatttgaataacttaatttacaaactgataagctgataattgagagtggattgatacatcacaattgtcatttagtgcgactttgattaacttcttacagcaattcttctgtataattctgttttgtccagtaatctatccataactcattttttgttgcagcgaccattctttgggtttaatggctcaacattttgaaacacccttgtcttgcttgagtagcatttcattggaattcaaaagccttaaaccgtgtcgtgaagctggacggtggattgatcttccctttaaggttgtaattttcatttagacatatggaagccaatatcttacattgtaattgtcattgcatagctaattagcttttgtgaaatgataaatgtgaaaatttaatttttgatcaaagatatgagaaaaatcgactgatctagcagcatctttttcagagcgttgctaatgctattagatcaacacaatgcatgctgtaaattttgtgataaatttggcaaaggaaaaaaaatgatttagtgcactttgtacgtggttgtgctcatccaaaataagt

SEQ ID NO: 358 - DNA, 1860 bp, Cannabis sativa
tattgcaatagtacttaccgaccctaaaagggctaactaatctaaacacctttaataaagaggaaattataaattctatgaattttatactttttgtattaaaatatggcttttttttaaaaaaaatatatatattttatagaaaaaattgaaaaaaaaaaaagttgaaaattgtggctttaataaatgaagattacggttatgagctaataaaactaaactagtaaaaagagttcccaattctaatccccaacccctctaatgtcaaaataaacaaataaaagttggtttcaagtcttgctataacaacattaatctaaggtttttaatttcaatttttgagatccacatagctaagatactcggcacactgccatttcaaaaattacaacataatatgattctaagattgaacataatttaataatatctagtatgctacatatcaagatttaggagaaccaataattacacactaatgacagtgttataggtaccatatacagcaaaaagcaggccacatgacaagataaacaaatctaatgctttttgccataaattcagagaagaagccaataatttgagatgaaatatggctgggaaaacgaatgcaataagagcacatacagtacttccaactagtgatgtaaatacaccaaactctggcacataagaggctaacactgccaatccaatcaccaatatgccacggctactgtatattcccaacactcctattcttgttgttgaatgaccatgatcactgtcgttttccttattactattgtaacaccatttattcttcttcaaccttctctctatgatctcgttaaggggatgtactgtgattggaaatgtgaatataaggcccaagcacatcccaatctgtgtttgtttccattgaccatacaaacaatcaataagaagaaatgtattgtattaattaattaacatatatgtattggcaatgcactagggaaaatgataatggaaccctttaaggttaaggtgtcaaacatcacatgaggtcagatattattattcgtgcattttaatatcggattctattaatataatatattaaacaaggtgtcaaataacaatgcttcacactctatatgtcatgggttaaaattaagatattactttgcaccaataaaaaagattgatatgtcacttcctttaatcaatacggtgaagcatagctactcaaaaagtcaacttttcaagaataaagaactactttaaatgtatctaaagcttgctcaagttataactatataataattcttatgttgtatttgatcaagtaggcagtgatcataagaaattgagctcatgaatcaattaattgatcaccttaaacaaaatggtctttcaatgaccaagcttaaataaaatgagttaagaggggttagaaaagaagagaagagagtacctgaacggtgagtgcccaccaatttctaggaagattgagagtgattatgtcttttgtttgatcaccataagccatgtaaccaaagaatccaaacaaaacatacaaaagggctatcccaaaaaatgcttgagcaagcacttttgggaatgaccttttatccttcattgaagcctccaatgccaatgtcataccaaacccctcaaagcaaaacactgccatgccaacagcaaaagccaaacccccaaacttagatgttatggctgttctatcatcaaacaaaaattcactctttaaaacttgttgtatatcttccttaaccacaatccccatagccaaaacattacaaacattagcaaatatactgaaatgtgctaaagatgacaaactccttatccatgacaacccaatttctattgggacca

SEQ ID NO: 359 - DNA, 2174 bp, Cannabis sativa
taaaaaaaccatacttttacataaattttataaaaatccaaaaatgtgtaattttagaatccgataaaaaagtcatcaaatttgagaaaaatacttttttctttctcttttcaaaagatttccaaatagagaaaaatatcattttatatattattcctcttaaaactataaaattttgtattgggctttcaatttttggcgtgacataacttgtcatctcttgctaactaatttttcatgttaaagttataataatcaaaaggaataatatcacagggtagacatgaagctataataatgctcatattcatgttccaattatctttatctttcattattttatttttgatgattcaattaaatggagtttagttatgagtgtccataccatacatataaaagttttgtatggttaaattttctaactatcatattttatttgtatttaattttttaagctcaaattttaataataatattttaaattaaactgttaacatatttaaagtgttattgaatttttatcgttaagtgccaacataaactacttatgtacgatatatatttttgtacacgtgacatgtttttattagtacacttaatattattattttaaaaatataaaaagttatttcaaaatttatagtatttttttttaatttataattttatttaattttaaaatgaattttgaaatgataatatttaggtgtaccaatataaatgtaccacgtgtacaaaagtgtacacataagcagtctatggtgacaattaactgggtgacaccttaaatttgctaacaatttaatagtttagaaaattttatcgccaaaatttaaatttagaagattaaggacaaaataaaacgatactctatatataataatgagaatttaaatacattattaagagtagtatttaggtaagagtaaggaattaggtacctcaacaaacaaccctttgtcctttgtaatgggagaaagggcaaaatattcttaatttgaattaatttaattaattaaacacaaatgagacaaattaacatatcaccattactattaattaattactctctctctctctctctctaaatcaagatgtaggtccacctagtttatttcaatccacaagagtgagagatagagagatgaagaagattgatatatacacatatataaatgataattaaagtgaagttattaagtagtgttaactaaataagggtaattaagttgggagtttgaactaattataattagagagaaaaagagatttatattatgtatatatgtacataccctgaaacaaggcgaagattgttgtgataacgttgtctatggcgtcctgttcttgctaatacttccatggatgacattactatatagacatataattaacacaaaattatttacatataataagattgaaattatgaagagaaattaataacaattactaataatatccaaattaactaaacataaagaagaaagaaataatcaactctaattaagacaaaagtacaaagagatcacttacataacaacttagttaacaacgatctacttcatcaactgcatggttttagcctagctctctctctatactttgattaatatttatatatatatatatagttgaagagaagagaaaatagataataattaatattaatattaatgagatgtgtgtgtgtatatatataaagaaattaaaggttgttgacgcgtggggctgagactgatcaagtgggcacacactacacacaataataataaagctacatactaagaccaagtcaattggagcttctttgctctggttttggagctattgttttaatagagttaatttgcactttatcaaaaaagaaagaccaagtcaattgccatgacccctctctctctctatatatatgtaaagatttatatccacaattaatataatatattatgaactatttttttttttaaaaaaaattaattagtaatttacctcacttgcttaattagcttaatggtgtcacaacttaagcatttttttttgtgacaatgattatagtaaattacaataaacctcttgtaataagtgttcgagaaattctgaatgttgtaagtattttatttttgtttgggttatttgcagtaaaattccttaaagtagggatatttttg

SEQ ID NO: 360 - DNA, 853 bp, Cannabis sativa
aataataataataataaggtgggtgtttgggaagtttaagcaggaaagggcaggcaaaattggtggtgattggaaccctttttgtgtctcccactcaatttgtcttgttttcattcgaatcccatcccatgcgtagtttaaccttagccaatccaaatccaatgctgcttttaattttaaccatcaccaccctttttttcttggttaatgtcactttctttctttcatttgtgataataatttatttttataaaatcttatttttgttctttacaaaatggatgttaaaaagagaataaaacatgaagtattgcatataaaattacttattattatgtttggtaatgagggcatgtcagcaaaatcttataaagaataaatcagtggggtttatgctgacaaatctactaataataatattatgattaaacgtgttcaaaatctatatatttcattataattattaagttaccttttagtacaagtataattggtcaaatgattggttagaagttgaggattataaaaaccaaattttttgacctaaaacttcaactatagctaattaacaacataactcaatcaaaaacaacatttaaaaagtgcactaattaacaaagttggtttataaaaataagaatgtaattaaacaaaaacaaaagaaaaaaggtccaaacaaacaaagaaacaaaaacaaatggaatgtttccctctagtctctactctactctagtctagtaggaagaaactcaaacataataagctccttattatagggtgggctggggaaaaagcaaacatccctttcatttactttttggtgttacaaaggcagatcctaatggattctata

SEQ ID NO: 361 - DNA, 4270 bp, Cannabis sativa
tgctgctggaggtaatattggaccattgtgtttcagaggatcataaaaaaggttacagtgtacatgagaactcccttctgcagcacgcaaatcagccaaatatacccacaggcatccagaagcttcagcaatactgcattgttgcctctccttttcactaaattaacaaaatccgctagttttataagagccggggaaaggtaattaacaataaattagaaggacaaagtagtaatattttaggaacaaaacattagaatctaaaagtcataaattcttgagaagggttcattctcttgaagagcttacagcaattctccccatcttttgtctttgactcaaatgccaaagcattgcttgcaactctaaggatcatttttaaaatttaagcaccaaaaggactgttcgttgaaagggacttgttctgaaactttgtgttttatccttcaaagagttcattgcatgtaattttctacaagttctgcatcatgttctacattctttcagagttgtccagtcacaaactacagaccactacagtacaccagtcatttaaaatcatatctaatccctattgtgcaccaatgcccttgcacacttcaagtttctaaataggtatgtgtataagcacagaataatgtgataccccttgaacattacctcaatgaaacatcttaatgtccaaaagaacagtgataaataatattttgttaattgctgaaagactcgctatagtagctagcttgtttcttttactaagttatagattgcattatatcaagactaacaaatatcaagtaactgcatctcaggtatcaaaagggcttacctattacacaagaagtttccaaagcgacatgaaagcatactgtccaagagatccactaagaaagcctagtttacccaaaaaacaaaacaaagttaatattacactcagctgtttaattaaattgaagtgtatcacaatgagaaaaaatatacccaccgaggagaactcaaacgcaaaaggatacatccgcatcaactgtgaaacacaatcaatccactgtgacaaacaaaagaggttagatcaataacagatagtccaaggggaaacaaacttactcatatcacatacactcaatttctagaagaattctttatcacaacagcaagtctcatcacattaattaaccccagttggctcatgggattaaacactcttatctcaaatgattcaagcatccaaagtttccataacaattataatagaacaggaagaaacatgtctgatttcttgtactggtttggtgttgtcttgtttttttatttttttgaaaaagagacagaggccattttcttagactgtcttgttttttattagtgttaagaagtttaaattttggtggagtttgttttggtaaggattgttgttccttacaaacctctataggagtaatcttatttctaaactacaatgaatacgacatttttgtttcttaagaagaaataatagtaataaatgaattttgttttttttaaacagttataatgatgatgataaacgataataacattactcgtcctcatagaaagggaagaaaattaacatttacccatatagtgagagagtagtacatatatttggtttgcctaaaaacaatagtggacgcacctgcaaaaatataggggaatagttgtttgaattctgtgcatgagtagaactaggattttgggatgtatgcgatccagctgattgacgcatcggtgatgatggaaaagcactagcagaagactgcctagataattcataaggtatgttgccacccccagatactgttggcatgcacacgcgatctgaaaatggatgaccaaacgctagccaatctttttcaatgagtgcctagcaaaagcatatattgcaaaatttaggtaaaattgtaatgttctcttttttcttgaaatgcagcagcaaacaaataaaatttaaaacaaagaccaagatgatagtgtaattctgatacagacatcttcttatcaagtcttcaacatatcaatcaaatgtaatgaaacctttatagatacatcaatgtcatagaacttcaaaagcagtggcgaacacaatgagaaaattaagggggcaaaaagcaaccacaataaaaacatcacacaaaataatttttcaagtaattcttcattcaggagatttgtgcaagtgagttgcgataataaacgagctaatgttacatcataaaacttgaggtcaaagcagaacatactacaactgaattaatctattgttgctcagctaatacctgaaaccccgtgaatgtccgatagaatggatcaagcaacaaactggccagtgaaatcagctgagtggttctatcccagccatcactacaaaaatgtgtcatgtgaacctccatatggaataaagttataacaccaaagcagaacagtcaccattatgaatgaaatgacttcaaaaggacctcacctgcaatgaacaagcactgatgccgattctaaagcaacccgtgcagcaatccaagctgaaccagccaagatactttgtatatgtattaaccaaccactatcaccaagagttgaaactgaagcagacatactgctgagattacctccaccccaggtccatccaccatgtctctgttaatagatatagtacaaaatattcttacttctagcataagtttagtaagaaggcgtaaagaaagtttgcctattcataattgtttgaacccattcgcaacatatagtttcatttttaaatttaattttgaccaataggtttttactttggtgcttcaaaagctatatttgaacaaatgataccattgtatcatgatactagtctaccaaggcatttgtacatgaaaaaaaaaaggaataacacgatagaacaccacaacatagttaaaatacaagttatgagttctaagttcaaattttacaattgatcatacttttaatagtaaattgaatgtcacgataattgaaaaagtagtatattctatctcaaaactgaccaggaatgatgacattccatctgatgaagttgcaccatatgtatctaagtagtctctaagccgagcaaaactctctcgcattgcatgaatgttgtctatcccaaagaaaacaatctggtcaaatataacagaaaacaaacagaacattagcatgatgccaatattcatcactgaattaagcatcgataaaaatctcaaacctcagaatgaaaataatttgaagatgattccgatccacctcccattgcaccattagctaaagcattttttctaggtcttgcatcagctatatatagcttcctaagtgagatgacaaaacaattaattaacacagagaaaatgacttgctagctaaactaatactaccatatcaattcttgcctggacaatgaaaacagccaagacattcatgtcaaaacacataattaagaaaggatgatttcatgaaacattaagcaagaggaaaacaataaaaactgaaaacatgatcaactttatgctattacaactctttataacataagggcaagtactacaaaaatgagtaacaacctccactggagacatatctcctgttttttttttcttaacaaagattgttataggaggcagcatgtatggatgaattcaatgaacacagataatgtcttagttctatgagtcatgattcagagacatcatatctgtttcttgacatttcatctgtttgtcaagtcttgcgaatatgaaatcaaacaaataaaattcttatatagagaaacacatattatgagaatgccacaaagcagaatgtatcaccgaaaaaaaatggtaaaacaaaaatgaaaatgaaaagcaataaggggctgatttgtttttaatttgaaaacaatattttaaaatattagtctgaaaatttttagatttgaaaatgatgaattttcaaatatttgattggctagttatttctaaattgataaaacagcaaaattatggagacacaagaaaatattgttttcaatttatatagagtttcatctgttttataatttatttttttagtgttattttttatcagtcccaccatttcaagttttataattaataaaatcctatggagcctataaatttttcttataccttcacattctttcaaaataaatcaatcatacgaagagaacaaaaaagctagcaaatcatatgcttacctccgttttacccctgttccaccaagttgagtacaaagtgcagccacaagcttc

SEQ ID NO: 362 - DNA, 2668 bp, Cannabis sativa
ttattagtgttactctgaaaaagattacatcatactagtcacggcaaacaaaatgagagagagagatagcataacttataattattgaagaaaatttgttctcaagaacaaaactgctcgacctagcactgatacaaaacaaaattagtagctctaaaatactgtttggatgaatacaatctaaatttacatattatcaacaatggtaagaatacaagcccccctctgttttgtccttctgttcttcattttcctctaatatgatgatcacccaaaaaaatgtaacctctttttgtacagaaaccgagaacacatgccggtctggaaacattcatttcttactacccttccacttttttattggaaacacagttacttttttgccggagtggttatgtttggccttagcaggtcgtagtgctgaaataccgacttgctgtttcttttcattttccttgtcctctgtaaatggcttgacctcaaatgcacctcgagtgaagcctctagcaacctgtacgtttatagctgacaatcagtacaaggatagaacagaaagcattcaagcaatttgctatgatgatcatgtcaaatcacacaatttgttatgatggcataccttcaaaaggatccaaactttgagggaactactcaagtgcgcaagtcgtgtcctcctcccagaggtcaagtactcgcacatgtgttggtctacccgcaggatgaattttggccaggatttggggtttccggggtctgcttttttgttctttgttacctaatgaaattattagaagcttattacttacaggaaaacattcaaaatgggtatgtgcattgtatcatgtaactgaacaaacataatcacaagacagagccgtttgttattccttttagcatgttcctctgttgtgtcatctttaaacattatataacacaagaaaaatgttaaatgccgtgaatacttactaataaccgagaaatttcttgctcaattttcgagaatgaagtctccagagcttctactctcccagtaccgtgacaacaattgcacggttcactaatcataaatgtcacactaggtcgaacctgtccaaaacatgccatgaaatagaaaattattatagttaaactaatcaagcattatgctaaccagaagaatttcttgttgcctcagttgtggactatctgaaattgagttggtcccaaatagtttggatatggtacaattgaaggacaaggagaagtacaatttctttttctataatttaagttgcgctataactgaaatccaaggaactaaataaagcaaaaatgattttgaaaattgcatttcagaaccataccctctttcttgtaatttccattagtccgtgcttcgacaattctgagaccttaaccattgacctgtctctttcaacagctttcttaacctcttcatagaccagtcttttatttgctgagaagacgatagtaaagagagaagaagtaaatgaaaaacgatggtcgtatgaaaggaaaattgaatggataaagtcggttcagttgaaattgagtacaaaagcaactattagcagctgagcaaacatgcccctcatgcacaaaacagaaggataggagaaaacttacattcatctgtcatatcaataaaatctaccacaataatgccaccaatgtccctcagccgtaactctcttgcaatctgaatcacaaaatcatttcctatcaattttttatttttatttttatttttttgaatacaaacaataatgaaccctttggatttttttattcccttttaaaaatccacataccaaagagaagggaagacatgaggtaacaaaaaagaaaccaccaaatgcatatgcatgtaaagtagcaaaaagagttcagaataggccaaacttgtttagcagctgcaaggttgacatcaagaatagctttttcctgtgaatttccatgaccaagcatcacatgaccaccattcacatcgatagagactaatgcctcagtttgctcaattactaaagaacctccttcagaaagaagaaccctgcaatgtacaacaatagccgtaataaagcttctattccttaaatttccagtattgcagaaatagttccccttatttggaacaaaaacaaactaaattacaatctgagtgaatgtttattataatactgacttataacactgtcagccttaaaaagtgttatttccctttgctactccagaaaatatgacaacttttaaaataaagtccaactgtgtctgtttactgcccttgtgttttggttaaaagtcacttatatctgtttctacaaaccataaaataaaataaaatcgtataattcagtatatgggagcaagaacaaaattttctacatgctcaatgatcatttcacaaagaagaggtgacttggtataaacctcaaattaatcatggaacaatatttcaattaaaagcttcttctaatagtatagtaggacaaggcaagggacaaagagtatcataagaaagttgcagtggcctcaccttttactaagaatactattgatctcttcttcaatattgaattcatcaaaaagaggaattcctttcttgtgtaattcaactcgatcgcaaagatcgggggcaatttcctgaaggtaattacatacctgaaaaacagca

SEQ ID NO: 363 - DNA, 4479 bp, Cannabis sativa
aaaaaaaaaaaaaaaaaaaaaaacagttaaaagaaaaatctcaataatctgattcgaaaaatttgtgatttaaggcgaagaaaatctcttctgtttttcgcatttcaaatcaggtaatatatatataacttttccatttcttgaatttgtttttgttgtttatttagggtctgttgtttcgatttttcatagggatttgaattttttgatctatatatatatttaatctgtgagttgttgttgttttgtttggcatctgagaaaattttgttttgtggatatggatagaagtagattacataactgtttgggggaactgagttagataatgatcttgaattggttatggatgaggtttattttgaatctttttttgattgattttgtttttgtttttttgtgattttttttttagattttctttgttgtgaagaatatgagttctaatgttcgaagtgagcggagggataagcctaggtcaacagctcaggcttctgctaggcgagaatgggttcctagaggtgctcctatggtgactgtggtgagtcagtcttcttccaattcaacggagaatgttaatgattcaatccttagttcccatggtcggttcaaggcaaatagtagttctaatttgaactcgggagaaaatggaaatggtggtgttcctactcacggtggttcttcagcttcgcatggtcatagtcgatacagagggaataatagctcacattcgaactcagccgaaaatggaaatgacagtgtttcagcttcacatagtcatgggcgatacagagggtataatagctcacattcaaactcagctgaaagtggaaatgacagtgtttcagcttcgtatagtcataatcgatacagagggaataatagttcacattcgaactcgggagaacatggtcagggtgctgatccggggggccatagttatcagtacagggggaatgctaatttgcatttgaactcaacagaaaatggaaatggtggtgattcgagccatagctctgcagtgtcttatggtcagtacaaggggaatagtaatttccattcgaacccggctgccaatgggattggtgttgattctactaatagctttgcagcgtctcatggtcggtacaagggtaattatagttcgaagggtcaagtgagtcgaccagtcaatcataggagggagcagcaggaaagaggtagcgagtctaatgaattagagtcgagagaaaagagtacaggcaagaatggaaggttctcaaaggactcttctttaccacagcttgtgcaagagattcaagagaagcttatgaagggggcagttgaatgtatgatttgctatgacatggttagaagatctgcgcctgtttggtcttgtgggagctgttattcgatttttcatttgaattgtatcaagaaatgggcaagggcgcctacctctgttgatttatctgtggacaatcatggatttaattggcggtgtcctggatgtcagtctgtgcagctcacatcctcgaaagagattcgatatgtttgtttttgtggtaagaggacagacccaccttcagacttatatttgacaccccattcatgtggggaaccttgcgggaagccactcgagagagatgttggtcgtggaggaagtaaggaagatcattgccctcatgtttgtgtgttgcagtgccaccctggtccatgtcctccttgtaaagcatttgccccgcctcgtatatgctcgtgtggcaagaaaataattaccacaagatgctctgatcgcaagtccggtcttacttgtggtcagcgctgtgaaaagcttcttagttgtggtcgacacaggtgtgagcagatgtgtcatgtcggtccttgtgatcaatgtgaagtagaggttaatgctgcctgtttctgtaagaaaaaagtggaggctgttctttgtgcagacatgactgtgaagggagcggtgaaagcagaagatggagtcttttcgtgtaattctctttgcgaaaagaagctaaactgtggtaaccatttctgtggcgaaatttgtcatccaggcacttgtggagagtgtgagttattaccaagcaagaccaagacatgccattgtgggaaaacagttttgaaggaggaaagaaacagttgcttagacccgattccaacctgttcgaaaatatgccagaagctccttccatgtaagaagcattcctgtgaagaggtgtgccatgctggtgattgtccgccttgtttggttaaagtctcacaaaaatgccgttgcacatcaacttctcgaattgtggaatgttataaaacaacttcagacgaaaatttcagttgtgacagaacctgtgggcgtaaaaaaagctgtggaagacaccgttgcaatgagcgatgctgtcctctttctaattcgagcagcagtcacacaggagaatgggatccacacttttgttcaatgtcatgtggtaagaagctaagatgtggacaacatgcttgtgaatctctctgtcatagtggtcactgtcctccatgtctcgaaaccatatttaccgatttaatttgcgcttgtggaagaacttcaatacctcctccattaccttgcggaacacctcccccgtcttgtcaactcccatgttcagtacctcagccttgtggccattccgcttctcacagctgccacttcggagactgccctccttgctcggtgcctgtagcgaaggagtgtatcggtgggcatgtggttttgaggaacattccttgtggttcaaaggacattagatgtaacaagctctgtggtaagaccaggcaatgcggtatgcacgcctgcggaagaatctgtcacttacctccttgtgattctcagatggggtctgaaccgggtttaagatcttcttgtgggcaaacatgtggtgcgccgaggagagattgtagacatacatgtaccgcgccttgtcacccgtcctctctttgtcccgatacacgttgtgattttcccgtgacgattacttgcttatgtggccgtatatcagcaagtgttccttgtgatgccggcggtaacagtggtaattataacgccgatactgtttacgaagcttcggttatgcagaaattaccggctcaacttcaacctgtagaagctaccaatggtaacaagataccacttggacagaggaagcttatgtgtgatgatgaatgtgctaagttggagcgcaaacgggttcttgcagatgctttcgatatagcgtctcccaacttggatgcccttcatttcggcgagaattcctctgtttccgagttattgggagacctctataggcgagatcccaaatgggtgatttctgtagaggaaagatgcaaatatttagttcttggcaagaatagaggaagttcgagcggtcttaaggttcatgtgttctctccaatgctgaaggagaagagagacgctgttcgggtaatcgctgaaagatggaagcttgctgtaaacgcagccggttgggaaccgaaacgctttatcgtagttcatgtaacgcctaaatcgaaagttccacctcgtattctcggcgttaagggtaccacaaccgtcagtgcacctcaaccacctgcattcgatcccttagtagacatggatcccagacttgttgtttcgttccaagatttgcctagagatgctgatatcagtgcattggttttaagattcggcggagaatgtgagcttgtgtggttaaatgacaagaatgcattggctgttttccatgatcctgctcgtgcagcaactgctatgaggagattagatcacggatcggtatacaacggagccgttacgtttcacgcgacgacttcaggtgcttcttccggttcaaattcgggaacaaatgcttggggcggaggagcagggatggtgtcgaaaagtaatccatggaagagagcaattgttcaggaagatacatggggcggcgacgagtggtcaacgagtggctcggccgatgttcaaccgtctgcgtggaagaaagaaactccactcgcagcgtcgataaaccgatggagcgttctagatagtgaaaatgcaaccacttcatcgtcgtcattgttgtcgtcattatcgaaatcttttgccggaacaaaaaaagcgttagttggtggtttgcattcgagtttagaaaacgtgccaactccggcagcagcgccgcttgtcgggaacgttaccgaaaccgagacatcggaagtggctgaggattgggagaaggcttatgatagtagcatagaagaagaaaaatagagtggaaaaaagtttggtatgttttgaatttgaataatatttttgtttttgttgttttgatatgttttggccttttatttgtgccatatatttttacctaatattatattttttaaggttggttgattaatgttgtattaatattaaatattaatctgcctttcattttgcttttatggcaagttcttaattattactatttattttaa

SEQ ID NO: 364 - DNA, 1627 bp, Cannabis sativa
aaaaaaaattgaggttttgaatattgtttacttgttcggtttgagtctattgttaaatttaactcgcgatttcgaaaaaaagaaagaaaaaaagaaaaattctaaaataacttcagacgggcagaagtgtcgcctgagatgaagcgctacttcactgcacttatgttatttgttgaggaataacagaaatgaaaaagcgagacctgactacttttttagtcaaattttagcataaactcttacatttctcaattttgctcccaataaattgttaaaaaagctaatttattttagggttatttgtgttgaaactcctttatatttttgattttttacacttaaccctcttatctctttcttttttatagcaaaaccctttatgtttactattctttacaaatttgaggtgtcagctggatttcactgttaaataacaactgaattattactgtattgactataaaattttaattatacatatatacaggtgtacacagtggtcatctaattattatttaacggtaatatttaactgacacctcaaatttttttaaaaaaataaatttaaagacattttgtcataaaaataaaataaaaaaattaagtgtataaaaattaaaatataaaaaaatcatgtcatcaattactctttattttatcaatttgtgaaaagtttgtgttaatattgttaaaaaaagttagtataagaaggacaaaatagaatatgagaagtatagatagtagatactaataatgtctacattttgtgtatataactaaataaaacacatatttatattggtgtgaaattactaaccatcctacttggaaatccatgagtcttttagttgcagcaatgtcatcccttgtttctgagtaaggctcaaaatatttaccaacaagtgtaattccaatttctcctccttgtgttttctacaattcattattttttaccaaaaaaaaaaaagagttaaaattcatgaaaaaaaaaaaagatataacatacacactaattttttacatacatgtaaaaatgagtaaataatctaaaaatacttattttgttcaataaaagtattgtttgatttatcagatgatgactaataatgacactaaaatagtacaaaatatgattttattacgaaaaataaatttattcagagatttaagtgtaacatttaaaattatgaattttgacataaaaaagtaacttaatagtttaaatgcaacctttcaaactacttattgataagattttttagtaacatattatacgagaaagttcgagtctaacctggaactttcttcggtagagcttaacagcggttgcatgagcgagaagcatattgtgtgtgacaatgtatggttcggtggtagaattaccttcggtgcaaggacctgccaaaaatggaaatgaacatctgcctggtgctgccactcccaaatcatatcccatttgagcaactatcaatggctcattgattgttacccaattcttcactctatctccaaatcttgtgaaacaaagttcactataatctttgaaatcttttctgttaagattttaagaaaatttcagaatatgtaaataagtaaataaacatgagtattactatagttacatatt

SEQ ID NO: 365 - DNA, 6056 bp, Cannabis sativa
ggttgttctaccccggacgataatccatcccaaaaaaataggattaagtttttgtgtagccatggcggaaaaatcctacccaggccagccgatggccacctcaagtacgtaggtggagagacgcgagtcattgccgttccccaagatattacattctcaggtttttgcgccaaccctacctaatttaatgtttaattgttattttcatgctgcgattcagaatggaaatgaatatatatatgcgtgatgtttatgtttgtgtggattgattgtgtttgtaaattgcgttgttagaacttaattcgttaataacgatcatataggcacagagagaatgcctaaaacgtatgtatgtatgtatgtatgtatgtatgtaatgaaatatgaattttgaattggcacagaattagataaaaggctttcggacatgattgaaggggataacatgacaattaaataccaattggcctctgaggatcttgataccttggtctctgtaagaaatgatgatgatctaaagcatatgcttcatgaaatcgatcatcaggacaccgaaggttacccaaagctacgtactttcttgttcccttctaagccaatcattgttatagacaacaacccatctgctttaatggaaccccattcccttgagcagcgttatattgatgccgttaatggcgtggttcgtaccaccaggagacccaaatttgcttctagcattatacacacacccacctttaccatttcctctacttgttcttctccacattccaactctccagagcaccaaggtattgaatctgttgtgcctgttgtggcaggacctgaaatgcttttaaatggttatcagaggagtggtaatatgcatagagttcatagctctccaactctttatcgttcaaacagtcctcagcgaaacaataatgttcctcgtcctcaggcctatcactatggcccttcccaccaaaacttccatggttgccaatcctctaaattgctgggttgggatcttcaaaaagctgcagccactgagcggatggttccggctgtgtctatggcccgaggcgagttcagaagaggagtcttgggtcacggagtggatcatcagtaccactatgcaaataggcatcatagagggactggaggaggaggtgcatatgatgattttctatcttatggtaattgtcatgggattgatagagaagagagtcttcccaagagtcccagaaagaaattttgggactagagtcatgttgttagtatctacgtctgaaactgggatatctgtttttttgtacaaacgattcatttttctttgccacctttgttttgaagattgtaaggttatatttgggtgttaatattagtcttgttgttttgatatttgatactctctaggctgatgtgtaatattgaactgtattccataagacaaatgaatgctgcagtgagtgaagtacatcagaatttttggaaagtttgaagtacaaggttcctatatttatttttgtaatattggagctgtattctttgactttgattggtaaaatttaagattgaattgaattccataacagttaaatgtatttttaactaattttattaatattgtgtgatagtaattttaacattattataagttatgtagttaggtttggcttggtgatcatcccatatccatatgctggtcaagtcagttgtttattttctttcacttcagaccttttcaattttaattatgtggatcaagcatgagttttctgcaataattagcctagtgattcatgttgttgttcttgaaattattactatactcgggtgctcattgaggagacctcaaagaatcagtcaaaacagggttcggtgtagaatatgttcagaatgtttgttgactgatttaaagttttgcagtacttttatttaattgacaatggttcttgattgatttgtttgatgttggtcaatggtttttaacattttttaacagcattaaaacagtaccttgctgctgtgttgagctcatgaaatttgacatgggtggttcagcagcatttttaggtgtcagtgaaagctataaaccaaatcaaatcccagctgtgtcattctttgaagtatgaactatgatcaatgatgtgcctaactatcaactaaaacacaagatcttctaccttttgcattaagattctcaactcgatttttttttcttttgcatttagatcctcaactctgttttttgttttcgtttttgcatttaatttcttatcttctaaacattttgcagtcgttatatttagatttggtaactaatgtgtttatcttctctagagtagtgttagatgataacacaattgcaacttcttttttaaaaaaaattatgtattggcataaacatggtcattagtttacttcagtttggaatttgagttagaactctttattgtcttatcttgttactattgttcacatatctgtttctatagctatatagtttcagtttagattataagttggtaatatgttgctttttttctgttttgttaatgcctaatgcttttgattttttttttccatctgacccctgctgatgcagttagaactctattttcagtgtctcaaaaactagggatatacatgagcaatagaatccggtctttcagataaagatgtgaagagattgtgttctaagtatgcagagcttgagaaaagcatgggagaaactgaccgcgatggttcgatattttctttgcatctcattcagatccaccatctgatggggtttcctggcttgaatgtaatcattttgaagtgcaaaatggaaacgaagattctttcagaaaaattcttgaagtatctctgctatgccacagccaggttatataatttcatatacattattgctagtaaatactattaaatgtttctgatatatggattaagtttcagggtttgctgatacatggttcttctttcattgcacaatttttcttaatttggtcttagcaataacaattttccaaacaacacactctagtttgatgtgatgagccattattgaataaaagaaaactgagtacaagccaatggagtccatactaccccctgtgatgcagagaataacaattctcaatacactaacttccttgctcacctacatatactaacctcccctctcaagactaccctcatacaatgagtcatacaccttttttatttgctatactctggctcaccctattaatcatatggtctatcaatggatcaaaacatggatcttaatgaggcaaacggtccctgagaatgaaacggatggctctagctagagaggcagttagcttatgcagcaaaagctatactaacgccaaagatggcaatggtgaagtgggattcatcattcatgagagttggaatacaatcacacactgaggacggttgaaaactaacgcaagaaaattacttcaacaaagatagttgaaattaaggaatagatgtactagatgctgttttggagaactggcttataaaatggaagaaactgaagattagactcagaactttgatgatgaagcagtcctgttttgcccttgaaaaacttaaaagatctgattgtagtaaaattacggtatcaaattttgatgtgtaatgtgttataatttcaagtttatgctttgactgatcctttttgcaatatttgtggctaatcgtactctattcttactcttgaatttcatggagcattattactgaggtcgaaaataaaactctcatgaattttttaaagttgtcgtccaatctctatttagatattacatttcaaacataataggcagattggccaatttaaaggttagtgatttagtaaaaacaaaagtagtttttggaagagttttaggtggaaagttggtggtgaccgtgtaagtaaattagcatatacaaggtaggtcaccaactaagatctgaagtacataacagaacataattatatatgtaaaaaaaatgtatacataaaatttccaataattatctatagagcaagaaaaaaaattatacatataataataatgatttaagaatcattcattgacagatgaacaaaccaaccattaaaaaaatgaaagaccacttcagtattctactattatagacattttttccttttcacatataaaaaaccataccaaacctctaattatatgttgtatgacaaaaacaaaaccgtaaaccgtcatctcccattttttttcccactttatgatcataaagctaacttcatcaaattttgatggtataggacctattaacaagatttaaaaacccattaatcatatttgtatctttttttttttgagtaataatatgaagatataattaatggcttccacgattaatcatctccatatattgattcaacgactcttgcctttgcaacctcatttcctcgttaaacttctgtatgaacgcctcaactcgcttgttcaactcgtcttgacccaacgacggctccctcctaatcttgcttggcacaggtgatgacgtgtacgtttcttgctgaggtggcgctggttgattggttcggtccttgaaagtctctgacttcttgaataacggtagtgacgacggtaattctaactcacccacgtgacggccgtgattttcatgaaaggactcacacttcttcatgtgcctacttaacggcatcgaacgtccttccgttatcgccttccacgtattttccatagtttcgtgtcgtttgggcctcgacgtcactttcaacagcgactttccacctgtgaggagagttagttatttataaccaatgattatttaccagagagcaaactgttattattataattttactacttaggaaggattggacagttgacttttagaaatattttctactcagaatattcttttttactaaaataagaaaagggaaggaaaagatgtaattgagttgagcagcgtgaagcgaacgccatgcctgtttgaactctatttttgttggtttgaacaatacgctaataccctagattccagcctcggacatatcataaacattaaacggttccacgttgtattgtactgatcaatcaactcataataaatataaaaatataactacaataccttttttataagtgtaatctatatatatatttatgaaacaggtaaggtaagtcgtaagtgtaactatttcgtatgcaagagatagaatattagattagattggacttgatttaattatatcttatccatatatataaattgttttagaaagatataatgtttcgtggtaatatacgtagtttgaatctctccttttcccaatatataatgttttaatataacgctataatgttatcaattaaaaagttattttttttatttaaattaaaaagttattactttattatatattcgtacgtagttaaaaataaataatgtaataaacggttttttttacaagataatattattttttagggacaagatattaaagctatgttagataaataattagaaaaattaaattaaattaaatatttttcataatataatcgaagtaaataaattatatatatatatataaaaaaaactaaatagcaaagaaaaaaaaatagagaaaatgaaacaaaagaataaattgcaaaaaaaagttatatagctatagctttgtaatgtcttttttttattacaaacgaaataaataaagacgaaaaactaacatacgttataatcaattgatactgttgatccaataataatattgaaatttgaaagaaaagaggaataattaagaataagatagtatgtaccttcgggaatcggtttaaactgtttccgttgagcaaacctagtagaggcaagaggtttctccgctggcggtgaataaaatatctctggtgagttaattcttctcggaggcgaaggaggcggagacctcgagaaaaaagcttcgtgatcatgatcatgtgtttcgtatttatcaataactactgcctcatgatcactcttcataactggagctgattcttcttcttcttctttctctc

SEQ ID NO: 366 - DNA, 2010 bp, Cannabis sativa
ttattattattattaaatgggaggtgaaggtgaaggaggagatggggctttgttggtggagagcctgctgggttctgtcctcctcaccaagaaaaccccagtttctagcaggtgggtgttggtggagaagtgtagtgggaaagcaagtgtattggatatggacaagtttgccattatgcgccgagttcatatcaacgctagagaccttagaattctagatcctctcttatcatatccttctaccattctaggcagagacaaagtcattgtcctcaatttggaggtaataatataacacctcaattcaatttcattacttttcctttttaattaatttttttttattcttttacttccagcacatcaaagcaattatcacagcacacgaggtaattccctttctttcttgttttcttaaattgttataaaaatccaatctttacttacaatatacaaaattattgaggtggggttttcttaattagtgtttgttttctaattcaacacttgaatcttcttttgttgaagaacaagactaaaggatgatgatgcttttctatttctattattttgtttggtataggtgttgcttagagatccattggatgataatgtgatccctattgtagaggaacttcaaagaaggttacctttaacaacaagtgcaactcccaaagtccatggccaagaagaagaagaggaagaagagcaaccctcctctgcaacaacaacaggggtaagagatgaaaccgaaaccagtgaagaaaatggtatgcccaatccaatccaattcaaaacgaaacagcatttgaacattgaatcatttgaatgatggcatagcatagcattgttagattatgagtttgagatgaggtgttgtaatggcaatgcagaattcccatttgagttttgggcattagaagttgcacttgaaggtatttgtagctttcttgatgctcgtacaagagaattagaagcagaagcttatccagctttagacgagctcacctccaaggtaataaaataacataaacatatgtgatgtgactctataaattatagtaacttaatttagtatgtttgcagattagcagcagaaatttggatagagtgcgtagactaaaaagttcaatgacaagattaacaaatcgagtccaaaaggtatttattatctgaattgaatcataacatgagagtatgtgttatggtgtaatgaactgaattatttgcaggtaagggaggaactagaacaacttcttgatgatgatgatgatatggcagacctttacttatcaagaaagttgtttatgagtacaacaacaacaacatcatcttattgttcagcatcaccaggaagaagtggtcctctcaattggtctcctactactacaaatacaaatacaaatacaaataatacaataggctcaaagatatcatccagaacaagtactagtattcaacaggagaatgatgttgaagagcttgaaatgctgctagaggtaattaactaaatatataccaataccattaggattatcatataactcagatttgtcaatctcaataactttgttttgtatggactaatattatttcaggcatattttatgcaaattgatgggacactaaacaagttgacaacggtttgtatactgtaaagtatactcattaattgattaatttgatgaagtgaatgaaatgaatgtatataatgaaatatgattatgttaattacatacagctgcgtgaatacattgatgacactgaagattacataaatattcagcttgacaatcatagaaatcaactaattcagctggagctgttcctttgttctgggactgtttgtttgtctgtatattctttggtggctgccatttttggtatgaacatcccttatacttggaaacaaggtcatgcctatgtcttcaaatgggtaattattattattattaattgtgtaataatgtaaatgtaatcattcatttattaaataaataaattaataaa

SEQ ID NO: 367 - DNA, 4654 bp, Cannabis sativa
ccccccccccccacaaaacacctaaaagaaaaaagaaagaaagtagcaagccaaactatggccaaacaaaagtgagtattacaaccactaaactttagcagtacgcatagaacaaagacaatattattagagcatcttcaatagagtatcaaatgagttctgtaatgctacattctattattttcccaatttaggattacaactccttcatctaatagctagtactaataatataagtgtatttacactctttgctgtaatattattgcgtaaaattaatcttagtggcattatacaatgtcaacaaccagtaatatagcaacaaataccagatgtcatcagttgaaggactatttttatgcatctaatcgtcaaagtaaactctagcaacatgattaatgtgtagaaaaattaaataaaaatagatggttctctaaatataggtaatgaataactaattaaaaaaaaaattaggaacacactggaaaactaatagcacaatatttcagatatgagatattaagctacaacaattatccctctaatatacaaactctggtagtgatgccacatttttttattattattattgaagcttttacatataccttacattgtacaacctagaatttgatcctagaaatctccaaacacacacaccctcccatactcccctatggccacctgagctaacctcaagtgatgtagtaatgctagattgatgctgcaacaacagaatatttaataatcaaaataaatctttataggcttctatcgaagtcacttcaatcctttaattaaatcacacatgtctaatctattctaactttaagaacagaattttaagaatcaattctattacaatatggatggtaataatatatgtctatatcactacaataatgaaactaaaactttaaacatgggccactgaaattgtgtcaattaattccaatattttcagatttaaaaattaacccaattaattactaacagtgatcaattaaatttcaaagaaaaaccaagataaatatttgaatatataaaccttttatcgtattaatatcaatattaaagtcctacaataatgaaataatagtcttttctctctttggtagctctgatagggttttgctcgatcgttagtctatcaacagtggccatggtgggtcgaggccttctcactcttcgatatgtttgatatttcaattaagaattatacaaacgttttcttgtctttgacttttttattctatttttttttatttgagtcaatgaagaatttgatgaaaagttaactccacgccccctaaatattaaatgtctgagattaaatatttatttacactaataataattatatagggttatatagtttttacattattttgttgtattacttatacttgaaaaattatataatttttaacttacatctcgaagagagaaaaaataaaataaaatgtacatttataacttgcattaagaatgatacacatttttttcttctctttgtcctctttttctagtgataaagaatttaatgaaaagtcaactccccttgtaaaagaaaataataaaaaaaaagtagcaagccaaactatggatatacaaaagtgggtattacaactaccaaactttagcaatacgtatagcacaaagacaacattattaaagtattaaatgagtggtttaatgctacattttgatatttttctaatttaacattacaactccttcatctaatagctacaactattaatataagggaatctgcactctttgttgcaatattattgcataaaatgaatcttagtgcaagtgtacactatcaacaacaagtaatacagtagcaagtacaagatatcatcacaacaaggactatttttatgcctctaattatgaaaataaactcgagcaaaattattaaagtgtacaaaaattgaacaaaaatagatggtgatcaaatataggcaatgaataactaattaaaaccaaaaaaatactagaacaaactagaaaaacagtaacgggaagtttcagatatgagatatcaagctacaacaactatccttctaatatgtgaactatagtagtgatgctagcatttttaatttttttttattgaagcgtttatatataaattacattgcgcaatttgagattcgatcacaggaaccctcatacaaacaccctctcataccccctatggcaacttgagctagactcgaggggtgcagtgatgctagattgatgttgcagcaacaaaactatttaatagtcaagaattctaattgatttcataggcttccatcgaagtcacttcaatcatttaattatttgacatatgtttaatataatttaacttcaaggatacaattttaagaatcatttcgataggattatggatggtaataatataagtatttatcactacaataatgaaataaaaaattcaagcatatcccattgaaattgtgtgtcaattaatttcaactttttcagaatttaaaatcaaccaaattatctactaaaagcgatgaatcaaatttcaaagagtaaccaaaataaatatttgaataaataaaccttatattgcattaccatcaatattgaagtcccaagataataaaataacgaccttctctctcttcgaaagctctagtagggtttcgctcgatttttagtttgttaagttaggctatggcgggtcgaggccttctcactcttcaatagttctgataattcaattaagaattatacaaattttttcttgtatttgccttttttattttgatttatctttttgtttgagtgaatgaagaatttgatgaaaagtcaacgcctcgtctcctaaatatgaaatgtctcaaatttaatattcatttacacaaataataactgtataaggtggtatactttctaaattattttatagtattttttacatatgaaaaaattatataatttttaacttacgtctccaagaaagaaaaaataaaagaaaatgtacatttataacttgaattaagaattatacgagtttttttttcttgtcttaatctttatgttttttttttttgagtcgcggagaatttaatgaaaagtcaattcctgtacctactcctgcccaaagaataaaaaaaagggaaagtagcaagccaaattatggccaaacaaaagtgggtattacaaccaccaaattttagacgcatagaacaaagacaacattattagagcatctgtagtagatggtcaagtaagttatgtaatgctagattttgatatttttccattttagggttacaactccttgattcaatagctataagggttattgcaccttttgttgtaatattattgggtaaaattaatcttagtacaagtatacactatcaacaacaagtaatacaattgcaagtactggacgtcatctccagagggactatcgttatgcttctaatggaaaaataaactctaaaaagtgatttaagtgtataaaaattaaataaaaatagatgcactataaaaattaaataaaaatagatggtgatctaaagataggaaataaataactaattaaaaataaataaagtacaaagaatataattgaaaaatagtagcacaaagtttcatatatgagatattaagctataaaaattatccctctaatatgaagtgatgctagattttttttttattattgaagggtttatatatacattatattgtacaattggaaattcgatcctaacaacctccccatacacgtaccctcccatacctctttatggtaacttgagctagcctcaagtggtgtactaatactaaattgatattatagcaacaaaacattaaatagtcaagaattgtaataaatttaatagacttccaatgaagtcactccaatcctttaatgaaaccacatatatctaatataatttaactttaaggatataattttaagcatcaattctatagacatatggatgataataatatatgtctatatcactaaaataatgaaattaaaactttaagcatggaccactgaaattgtgtgtcaattaattctaatatttttcagaatttaaaatcaacccaattatttactaacagtgatcaataaaattttaaagaaaaaccaagataaattattgactatataaaccttatattgtagtactatcaataatgaagtctcaagataataaaatagcgactttatctctctttgatctgtaacaagattttgctcgatcttcagtctatcaactgtggccgtgatatctaggccttctcattctttgaaatgtctgatagatcaattaagaattatacaaagtttttcttgtctttgactttttcatattcttattttttttttttgtttgagtgaataaagaatttaatgaaagtcaactcatcgcccctagatattaaatgcatgaatattcatttacactaatagtaattatattggggttgtatagtttctaaattatattttgtagtatttcttatacataaaaaaaattatataatgtttaacttacgttttgagagaaaaaataaaatataatgtacatgtataacttgaattaagaattatatatcttttttcttattttgtccttgtttttttttttttttt

SEQ ID NO: 368 - DNA, 2862 bp, Cannabis sativa
cgtgctgatgagagtgagagtcgagattgcttttcctgaaaccagagataactctcacacgggccaaagaggggtgttctgaaacatgcagatcagatacaccagtaaccatccacaataaccctgtggcagagcaagttctcaagctagtaggaatgaatgtccctccgcaaattgaaaccacctgttcggatctcatcattaaaagaactactacatggtacatgtttttctcaaaccaagtaatgaaaaatgactttcaacatcaaaattagatatagaaatgaatttagggaatattcatccagaagattcatcttttacttatctttccaaatataattagtaacaggtgtcatgtcagatcctgattatttcttgcccttaccttggcatgagagagtgttctcgaagaaagatcacagtttaatattactatcccttgcaagctgcagtaaataaataaattattttctatcatacatggtattggtgaaccaacaggaagtttcactaagagaacagtatacagggagtactcaggaacttgcctttgaacggcaacagcaacaagtgagccatcgagactggtgcatagatctgtgacagcagagcaacactccgtttctccatcatttgactctaacagtcctgccttgagaaagatatgaaattaagtaaacatactataagctaaaattgaaaatggtgcagtcaagactcaaaattatgacaaaaatttcctaactctgattagcaggctggagcttaaaattggattagtataaacaatgacaggcgacagcctgaagataaaaaacaacaaaacaaaactaatacaaacttacaaaaagtactggcattctcttctctacataaagcagagaaaggtacattcttaaactcttcacatctaacagacaaatgtggccacctaatgcctagttttccccataatctgcatgatcttcatcccttcaaataattttgtatttctttccaaccaaatagctacaaccctagtcctccatagcacttttctgccactccatgacactaaaatccaatgagctaatgttctctttataattatttccagtgtaaaataaaataaaatattgtagattactgacatctgttcatccaggctgtgtgaagcactatctcttagaagaaaaataaatatttggctcctgcctaggagttagaaaatcatgtactgttggctttttaaatgctcagtaatgcagaaataaaaaaatgtacttaaatgctaaataaagaagccttgcaacacaactatttaagaaaacaacagagtggtcggtggggaaaataataccttttctccaatttcgcaagtattaagaagagatcctgaaggaatatcccacaagcgaacctggaaaataataataataataataattgtagacaacctttatgcttaaacccagcaactgaaagtacaaacaatttaaagggcataaattttatctgatagctcaccgttgaatcaccacttccagagacaagaaacccctgggggtactcctgagtgcaaacaaaggcaagacaagagacaaacctgcccgtaaacaccgagaggataaaagaaataatacacacatcaatttctagcagatattacttcacactgttttgagaagctaacacatcacatacaattaaactttaaatagagtagcaggcaagctgcaaaccatgacacaagtactcaagtctgccttctgcaagattgtatataaacacaagcacacaactatcgaaaaattagtaaataacatttgacgcactctgtatgaccaaggcaaaagctttgtatctcatgagctccatctaaaggcttcttgggaaatacagtcacctatttaaaaagctgtatgttaactagagaaaaatacgcatatatctggtttacaggacagaaataaggatcactgattacccgaatcttaaaatcgcggtcagcactaacaacatacttgccatctggtgaaaactcctgccaaaaacacataatttaatggaagtagttcagtgttccaacaaaatgaaccgaagagagataaagtaacattataatttatcttttataagacacattcacaagtaattcaatgccactcagtagctaacccagctacttgagctaccatgacatggctaattaacgttgatgtgaaaattcaaaagtgaaaaaatggtaaaagggaacacaaaaatcaaaattgcttttacaataacatcttgagaaacaaaatccaaaatggcctaaaggcttaacagagtctaaaatttatcacgacgatccatcatcaaacagaattaaaaaaaaatgcataaggaagggtaagttacaccagtgacatgaaataacttaccaggctggtgatgatactacaatagtgtgaaagcattggatctgccttcttaatgacaacattttctccatcaagcccatcaagtttcacaatccaaaccactccaaatttatcggcaaaacaaacatatagaccatcattacttattgcaacagcagtgactcttttctccgagcaccttttcaaaaatccagcagaatatactgtttagtgtctcaactcaaattatatgaaatcacattcttgtgaagtacttttgatatattttcatccacaaacaccaatgaatttaagtcattgtagcgagcaaatttcggtctgaagttaaacacatgagacaaaacaatactacacaaacaaaaacgtaaatttcagttccataagagactaaacaaaatctaaaagtgacaaaagttgatttcatattcgatggagcaaataaagtttagttacaaca

SEQ ID NO: 369 - DNA, 3504 bp, Cannabis sativa
tccaaacctgcaatcaattttgatagggcgtgtatatggtaaaaaaatacattcataatgttacatttcagtgtaatggctggttgaagtagcatcattagctaatgatttttgataggaaaactacctatgtgtatgaccatattttggaatctataacagatttttgacacaaaggaatagtctttgtactcgtaaagtccacatggaagtaaatcttttatacattcatatatgttttattttcaaaataattgttgatacatatacattaatcaaagaacaatatttgaaaaatgttgagtgtagtaattgcaatctcaactttcaattaggcatttttcttcaagtgtaatgagtagtcccagaggattctcctacttcaatttccttaggatgatcatgtggagatttaacttgtgatccttccattaccttttcagttttttggatttcttcgtctatatggatatcttcttcaatggttagtatcttcatttgttcaccatgtggaccaggtatgatagcttcttggactttcatgtgttcatcaaattttacaatctctgttttctcagccattcttttcttcttcttcttgatgaagcagcacagagcaactgagaggaaagcgaggaagaatagaccgccaagtgaaacaaagacaacaattataacagttgaatggtgtcctggtgctggtggcggaggtggaacaatgtgaggcggtggaggaggataaagaggacgaggtggtgggattgaaggacggggatgtggtgatggtggaggaagaggatgagggcggggtggtggtttaaccgatggtgatggtggtgtttttgggggacgaggtggtggtttaaccgatggtgatggtggtgtgattggtggacggggtggtggtttgactgatggtgatggaggtgtttttggaggacgaggtggtggtttggtcgatggtgatggtggtgtggttggtggacgaggtggtggtttgactgatggtgatggtggtgtgattggtggacgaggtggtggtttgactgatggtgatggtggtgtttttgggggacggggtggtggcttcacagttggtgacggtggtgtgattgggggacgaggttgtggtgtaatcggagttgggaatggtgaaggttgaggcttaacgggagcgtggggcggagcaacatttggagggaatggtaatggaggatagttggtgggtggtggaagaggaaaaacagggaacttgaggtcattgtcaccagaagaagccatattgatatgaacaaaagcttagagaagtttttgttgcaaagaaatgatgttatgggactcagttgtgtttattgatggaaattatagcaagtacttatacctatgtgcatgatagtgttgagtaaaaggggtttgatttgtgtacttctaagctttaatgacttgactctcatgccaaggctttgatagggttgtctttggttgcattgaaaaacacttcttcgaatgtttttgtttctattttattacttggtttttcttgtacaaaacatgggactcctattagtattgaccaaatatagtattcatcatgagtttttaacttttgaaagcaaacatttcatcatgtgtcatttgaggtgatcaaacaagatgcttattctctcttaatacatttttttttaataggaagtaaaatttgcaagttaacaaccttctaagcaaggtctctctttctctctctatctagagaaatactatggatttagtgttatatatatttggtattttaatataaaccaagaacatagcatcaaatacccaattttcaataatgtcttgtactattttttttttttgtaataccagtacaagttaattataacctaccattattcacatgtaataaagtaaataaatgaaattcttttctccctttttgttgagaacaaaacttattgttcatatcacaagcctgtataaatgaacaaaactgtgacctcagactcagtaacccaaaaactagtttgtaaggtacaaaagaattgctaaaaagaatgaccaaatcgaaaacaaaacttcctacaaaactgttccatacatgatacatctctgtgttcgttttccgcctaacagagaaatgtaaaataatttttataccttccgaaaacaaagggcaggtcagaatttgccggcatctctgagcttataaagagcttcaggacgtgtcgaaaggcaccgagaagcacaaagttgcaacttattccaccaggaaaagttttcataagtgagttttgttttcggttactaataacttgtaaaagaaccggtcttgataaataatttttttcttcaactgcaccaaccaaagataaacaatataaataaaatagcagaatttttaaaggtctggaaaggtcagcagaggatgttcgggaaagaatcaaattcttgacaactacctggatattcaaaactaaatactttgaggatttctcttttctagacttatgtaaggattggggtgtgttgttacaaatttgttttgattaattttatgtttacatgatctgtttaccatggtttttcctctaccataagtgaggatttcaatatatatcgggggaaggtcagtctaagataagtggtctctttctcttttaaaaaaaacaataaaaataaataaggagcataaattaacccttttttttttcggtatcataagacgggactggtttatatatcggatgatatatatagctgacagttagtattaaacaacagtaagaacttcctttattcctgtttttttcccctcttttctaagaaaacaaacatgaatataaaataatttagtccaatcctttactttgttattatattatatttatacttagaaaaataaactttagtttaaggaaatggacacagcaaatgtagcaaataagagtcatgcaagctaattctctgctaatagagaaggcaatctcatacatttgcctatgaatgaaacaaagtagcaaaccccattgaatatttgctaatcagttttagaccattcatttcaaagcaaggcataataatcatgtaaagcagcaaaacacagccgaaaagagatgagcgtaataaagtaagtgaacttacttgctatgccattcacctgacatgaagctcatcatcaagcaagtatgaaaggagaatttcattccatacatcaggtacaccaggtaggcaccagtggctacaatcaggaacagacgggttgtcactccactgaccaacatgtgcatcacttcgaaaagatgacattgaagtaacatgcaacacggttacaggaagtgtcatgttctttacaacgtcgaaaacagtgtcagagaatatactgtgttctctgccttcggtttcaaacacagggtgttgggtcacattgcaaactcttcgagtgaaattactagcacaaaacaatcatcatcgttagttaatagttacgcagatgctcattgc

SEQ ID NO: 370 - DNA, 1173 bp, Cannabis sativa
tatatattctcactttggaaatattgttggtatgttcaggccatccacgaattattcatagggatattaaaactgctaatattctcctcgattacaactttgaagccatggtattatatatttctttcattttcttttttcttaaaaggaaataaaattaaatattaaaaactcactttaattaatcttacaattgttaattttgtttttgtatggcaggtggctgattttgggttggctaagctttcttctgataactatactcatgtatctacaagagtaatgggcacattcgggtaattaattattaagtgatctttttatgtataactaattaataagtttgatttaattaatgtatgaaagtatgagatgatgatggtgatgatgcaggtacttggctccagaatatgcatcaagtgggaaattaacagataaatctgatgttttctcatatggggttatgctcttggagctcataacaggacatcgacctgtagatcctaacagtgcaatggatgatagcttggttgattgggtaatttcaactatacatgatcaaatcctcttaccatttaaaatatatataactatatagattaagggtacactccagaaaaatgagtataccaatgttgttattgtgttttcgatatctagttatatattaattacgattttttttatattataattattttagatatttttataaaatttcagaataatttataaaactcaaacactctatgatgacactagtgtatagaataataataataaaaagacataaaaacaataaattgtttgaattttatttttgacaaataaaattatgcacgaaaaagatgcatgccatcaatatactcattttgtttggggtgcaccatgaaatttctgtatacattatttacattattggtctctttgttataatagttgacacatgcatgaatttgtgattacacacaggctagaccacttatgcaagttgcccttgagactggtgtttatgacgagttagttgataaacgattggaagacaattacaacccacatgagatggcgcgcatggtcgcttctgccgccgcatgcatccgccattcggccagaaagcgccccaaaatgagtcaggtaccaacatgttcgataaaatgcctctagaaagaaagt

SEQ ID NO: 371 - DNA, 2055 bp, Cannabis sativa
taaaataatttccaacacagacatcttgcaccacaaatctaccatgttattgcctgtttgtacacccaacaccttaaagtgtttcttatcgaactccgttgttccacaaccacggccacacgtataccagatctggttcaatcacctgaaagagagattgtagtaagtgcaacatcttcaagcgactggaattgtgaatcttcatagtagtcgttatagagagagtgagtgtgtgagagataaagaaagcagagaaagagttgatataaataaaaaaagattatgatatatttaaatatgtaaacaagttattaataaaaaaatataattttaattatcaagtagatataaataaaaaatataatatatatagttattaataaattggaaaggacatagggagtcatgtggtcctaaattttttatataatatacttatattattttaataataataataataatatataaatgcaaaaatagagaaaattggagtgagttgggagttgtttgtaaccttaagaaatttaggcacgacctatattggtgccaaactttatagtgcctagaaaccgttattcttatagtgatctagatgggcattcttcacatccatctttcatagcctctaatctttactggctggaagttataacaaaacccgcactattgtaatcttactaacatggtaaatgtgtcatcacaatctagcccatacggttgagagaatcgtcgagctactaaacgagctttattctcttaattgaaccatcaagatgagtttttaccttgtagacccatttgaacgaaatgggtttcactttttttggctttagcaccagctcccaagtctgattcttttctagcgtgcatatctcttatttcatagcttttagctacatagagttttggtaagcctcttcatatgattttgactctttgaacttctcttctttggctgtagcagcattggcatatttgggattttactttcatgctcttgttgatctctaaagttcttgttgaccatcatttacattattttattctctctgatacacatcatttttccatggattctaaggtgcctcattctcggtgtttttctcatcatctatatcttaagttggaggtaactcaataatttcctcccccattgtcttctgtaattaatcattcatttatttagattctggtaatgcttgcttttttgatgaccaccattatgaagcctcatcaaagaacccattcattgatgtataacactttccaattataggttagcagcatctccacgctttttgttggttatcgtatcctacaaaaatacatcgtattcctattttatcaaattttctatgtaggtggcttggcacgaatatgaagcacacacaacaaaatactcaaaagtgacttctgcaggtttacaatgccatagtttctcaaagggtgaaaggaaccctaacttagcttagggaagtctatttatgacatgagctgttattttcattccttctacccaaaacctccccataacgttcgttgcatgtagcatacttcaacatgtctctgcaaggttctgattcttcctctcaattactccattttgttgttgcgtatttgcacatgtaaattgatggtgtatgtggcattgtcgaagatactaagaaaatctatgtaaggtatattcgccaccgtgtctgtttagaggcatcaaattttcctcctgacttctccttcaactatttcttcaaactctttttattttgaaaaagtttgatatttttcattcatatagaaaaaccatacactactagaaaattgggttttagtgacacacattgagtaactctaaaactatatagtgacacctcaacgcgtgtcactaatgagggtgactggaaagacaatttttagtgacacttcacacgtgtcactgaacccttttacatttattttttgcgcgtcactataggcgtatagagtcaagttttgtgagactgaaaagataacagccacacacataaagtctcactatatctttttttttttttt

SEQ ID NO: 372 - DNA, 2414 bp, Cannabis sativa
ttaaaattttgcaggatgacataaataactatattttacataatcatagaaaaaatttgactaaaatattatttctaatactatagaattttaagagttttgttgcaatttagtcgtgaaaataaacttttcggtcattatattttaagaaaaatctaactcatttatttaaaaacgatatcgtttcatgtgtaaattttcaagccaacactataaaaatggcagcccaatgcttcgaatgcgaaactgagaacaagtgtccgtacaaaaatgggagctttggctcatgtgagcaagaggctttcttggtctctcttcagtgattcaacctcaccttgtacaactctgaggaccgctcttacttctctgttttcttgttcttcgtatgctactgtgtcgcgctcatcatcggacccgttaccgtcaccaggccgtgacggttgcgccgccgccatcggtattttccagaggaccctgcttcaatctccctggttcgctattccaacccgtggagtgaaaactagcggatctagtgtgagtcatgggaaaaaattatgagttaattttgttttcttttgaattttcgcattgatttataaggtgatttttcgatatgcagttgagacctggaaatgtcattgaaaagaaaggtgtgtgtataattattagtctctttttgttttcctgatcaaatttgttattctatttaataacctttgttcttcttcttggaaatggtttatgatattctgcatcagaccgtatttatgaggtaattttgctggcttttttgaattcatttataccgtactcataaccataactcgtaatgttttaaaggaaattttggctttattcgtgttaggttgtgaaagtagaccattctcacgaaggaaggggaaaagctactataaaggtgtgtttttttgtcaaattatcatgttattgttattattaacatttcactcactgcattatagaagctaaattttgaagtttaacacttttactgttaaaagttttgggctttgtcaatctgtgattttggattggtgtgtgttatattgttgacaattgagaagagataaccatcactgggttgaattcctcatgcacttcctagtagtagttcaagaatcaagatggtaggttataactatatatgtgtgtgtgaataaggaagaaaacaatgatatgttttaaaagcatggggttgttcgtgagcttgtgaaataggaagcattacacctatatgcacataaaaaggctgtctttactctgtgatgaggttgaaatcagccataatgtttcattagaactttttttggtgtgtgtgagtaagaagtgaggaatgaaaaagaggaaaatcttggatgcaattaggggttaaaagtcaggatttaaatacttgattaatttgaattgtaaattcacataggaagtcttcgttccataatggtttatttacaatgtatggaaagtttgaggcagagactatgcttacgcacaaatgggcacagacgaatagagatttagtatgagacatattgtgaaaacagtaaaactggagaaaaaaaaattgtttgcttgacaaataaggttagagcctatggtatagaaatgcaaattacaaaactgtgacaaaacattttttagtagtgtagctgtgcaaaaccagatcttgctaatcagcttttgttaaaatacggatgcttttagattttgtttctgctgctagaagcttgcatcagtctgtgaggagagcatctgctgattgactatatgagtgggcttgttgacactgagtcaaaattttatccttagggtctttagtttcatatttatatcatgatttgtactagaacaatttgaatgagtttctttttggttttttcattgaacatgtattttttaatttatttagttaacatatgattaatttgttcatacatcatattcactgtaagatatcattgtcctgctggtatttctgcttattcttcattgcagtatgacatttttgtaactatattattctgttccctgaaacttgagctgctaattgtaggtggagcttcgtgatgttgatagtggaaacaaggtatcccaaagatttggcacagaagagacagttgaaagtatgattctatgctttgtaacatcctaaggttatttactgatttattatttgagaatggttgaagattagattgtacatttgtttcattttgttatcaaacataggtttattaaatagtccacacctgtttgagctacagtctttcatgatctgtggtggaatctaataggagttgattgctgcaggagtatttgttgaggccaaaccttacatttatatgtgtacggatcgtgatggcaaagtattattgatggagtgagttctatgttttgat

SEQ ID NO: 373 - DNA, 7246 bp, Cannabis sativa
acagatcgagcttccaaaaggtggccattgtgattccgagcaatgcaaccaaagccaaatttttgttgtgtttggaaaagagctccatcgacatttaccttaaccatatcaacacttggtttacgccataaattactaattgcagcttcacccgtggcatacaaagcagcaggggactgaaatttagcaactttccaattgttaaggacttgcttcgccgactgaactacttgtaaagcagagaaagggaatcttattagaactgagaaaataaaaattataaaaatgttttgcttggataatgtaattattatgattagaaaaaaagaaaaaaatagtgttggcagcgtttgtggaggttgcagggtgcgtgactccacgcgtacagcaacaacgcgtggtttttgtgttacctacttttgggtgattccttctattgtaataggcctgatgacgtgtcatcattattagcttccacgtggattgttgaaagagggagagagagaagtaacagtgacagacagacaggtacaatctcattaaaattgaggaaaaacattcaaaaaaaaaaattaataaataatgttatttaaaatttgaagagttgagaaattaagagaggccattttcctttgattaaattgaaattaataattagatttgaaagtctttgccattaaaattagagagaaagaaagaatggatgtggattatgacaccacattcccattcgcttaaaaagcgagctccaaaccctaacctctgaactttcttcttattcttctctcctgctatgtcagttagctacctacctatgtgatcttttactctctcgagctgtgattcgttgtttactctttgctttcggtggtaaagtttgagatcgacaacgaggaaagtttccgcgggatttctctttctcttagtaagttttgtgatatatttacatgtatatatgcgcatattggttcacatttgatcatttgtgtttctccgctgtcgttgttgtgattttctgtcgtttcattagtttaaacttcaattttttttctattagcaggtgaaggtcatcagtgataatagtggccgaaagaattttgatttttttttgacattctgatgtttcatttgcaataattgtatcaatctgcggtgaattttcatctaggcctccatttctgtactcaatttccgataccattcttccttccaatgttaatttcatatgttgctttaattgcctaagatttcgtctcaaaatttgacactcaattctaatctcaccggttccgattcgtgtttgaaacactgtagtagcaaaactggctctgtctaaatttcggttctgaaagagtgataattttcttttaaccttcaataatggccctacggtataggccggttttgatagaggaattgccatcacatttgattttggaaattttgatctgtgggaggctcagcgccgttgatcttgcatgcttagagttgacttctaggacctttggaggaagtcacggattgtaccctcataagtttcggtcattggtggattttgctgcatttcagctatgtatctccaattctacatattctcgtctgggactgaatcttcagagggaactctgcaatcgttgcagtgggaattggaaacgggttttaaggttcttgcaatctgtggagcaatcttctgacatagtggagacctcagcaggcaatgtactagttctttaaactttgcaattcctttccaatatagaaattatatgcgtattctggtgatggggtggcttatatgctgttttctttcttgagttccctatacgtattgactacattgccagcaaatgaactatatgtttctttctctttttcaaatatactctgtttttctagtttaacttagcagcgattcctacatgttattaagggtatataaggacttctgaaatcacgttcttctttatattttaatttcacaaaatgaatatcctactgctaattttattattctgtttgcgttgttttagattgtcataggcgatgttgcttaattgcttaattctgccagtaaattgcaataaaaagaaggctttgtagttgtaatgagggcatatgattaggtggattaaagtgatccattaatttttcttaagcagcccaaatccacattaattagaagtaatacattgaagatagtatttatgcaacttgtataatcagtaattcaatttagttggattttaaattaaattgttctgaatattcaggtgctataagttcttatttatgcttcttggccttcttaatcattatctttttgctgtttcatagatgctaagataataaggtgttattatttacaattgatatctattggcagatgcaaattaccactggaaagtatcacacattcctgatcagtaattcgtcagtgtactcatgtggttctggcttgtacggtcttcttggtcatggatccgaaactacgcagtgtgtaacatttacgcggattagctttccatctaaagcacacgtggtccaagtctcagcttcccataatcatgctgcttttgtcatgcaatctggagaggttagtctcagtaactggtcataccatttacttaactgctgtaactaagagcatctgatactgatagcacttttacaagcttagtgtgggaccataaagcggagcacttttacatatgttagttttcagggttacatgatatgcttgggaagcttcttgcagaaatgaatgcaaaaataacatgatcttgtgatgaaatctttaagttagaatcttttatgattaggagtgaaacaaaagcaatatggtttgggctatttaattatttataatctattgcttctcaaattattattatcattttatgatcagagctagctgtctagttgattcccggtttgatgtacaatgttgtatgatgaaattttaggttgcaactttgattttgtctgtcacatgtttacacttcgcaatcaagatagtgtccattggttgaagtttttagattttgtatcttctccatttcagtatcttttaaattcattataatgatgttgagatatccataatctagtgttgtttttaagtgatataggtgttcacatgtggggacaattcatcattttgctgtggacacaaagatacaaatcgccccatttataggcctaggcttgttgaagcattgaagggagttccttgcaaacaggtacactttcaaagttattttgtagatgaaattttgatttgaaatttgaaatataacagtgtttggctgaaaaaattaaatgattacctacaaattattgttgctactaatattaattggtatcgtttgctacacaacaattactgtaggaaaaaaaaataaagaaaaaaaacatttaccatagtttatcggtcgccaaatattctagtttcaaaaaataaaataaaaattaagtggttttgaagggccagtagtgtctcgtgtttccattattatcctaaaaacatggactcctgtattttaccacacttgctgtgaaaagcttttccttgagtccaaattatagtgagctctcccacccctccaaaatgttagttaagttgttttggatcatctttctggccagttatgctgtataatgtgcctgttgcacatcaaatgccaataaaaaaaccagtacttatgttagcattcaaaggttaaaagttaaaatttcgagctagttttaaagcaaatcaactaccttacatcataatttgttttctagagtacttgttgtgtttgcttcagaagttaaaactagtcttttatttgaggaaaaagaaggttaaagcttgtttcaggttgctgcaggtcttaattttacggtgttcctcacaaagcaaggtcatgtttattcatgtggaactaacacacatggccaacttggtcatggtgacacaatggatagaccgacacctaaactcattgaactgctcaaggaagttggctctgttgttcaaattgctgctggtctgagttatgtgttggctgtaatggatgatggaacagtctactccttcgggtcaggttcaaatttttgtcttggtcatggcgagcaacacgctgagttcttaccacgtataatccagagattcaggagaaatggcattcatgtggttcgagtgtcagctggtgatgaacatgcggtggcccttgattccagtggatacgtaagtctacatactcaaagataaactttctctgttgtaatatgtatcttaccgtgtccatatattcagaaaacttgaaccttcttaccattgcttggtgcaggtgtatacttggggaaaaggctactgtggtgcattgggccatggagatgagaatgacaagaccacgccacaactcttgaacatcgtcaaaagcaatgttgctgtgcaggtgtgcattgtgcttttatgcattcaatactgtgtttaattagactataaactattcctgttccacagcttgtagtcctctttgttcatcgtgttttgtataaatctaattgtttctgtactgtgtaggtctgtgcacgaaagaggaaaacctttgttctaatcgattctggctcggtttatggttttggttggatgagttttggtagtctcgggtttcctgacaggggagcatctgacaaagtcaccaggcctcaaattcttgactgtttaagagatcaccatgtttctcaaattagcacggggctataccacactgttgcagtcacaaaccgagggcgaatctttggattcggagacaacgaaagggcacagcttgggcatgacactttgagagggtgccttagacctacagaaatttttgtagaagaaatgactgatgggttggatcttataccagacactgacagtgcgtaacctccagatcttaccattgaatgtaggttagtgctaagtctacatgcccaaggtgaacataataagtttttatatcccaatgtaaacagaatatcctaaatttacgttattgttagagggtaaataactgttgttatttaagagttcatatgtaacttgtgatagttttaatttatccatattctgtaataatactgcagagattaaatgtattttattccacatatttaatgcttcctttcaaactcattttgttttattattctttatgtcttttttattagggagtaatgattcacacacatttaaattatacataataatttaagatggtaaagctactcagcagtttcttgtccttgcccagtaaattctttcggttcctcagcgttcaattgccaattctgctaatattttttttgtctttatgtaaattaaagaaagaaaccgaatgctcatttcgtttggatgtaactagttttgcatatacaacgacttcgcttagaaataagcatattctatagacaatttctcattcctaattgaacttgttcttttaatatagaaaaagattcgatttttatatatttattagttcattcattcaaggctggaaaaggaaagatggcttaaatgatcagagataaaaccttcatgataataatgactccttaattaactttgtttaatgaaaattgtccgtgctattcataatttatagtggcaaaggcaattatctttctttggaaaattttaccctatcatagtgccattcaatttaactgatgaggacaatttagcctccatgcctagaactgatggtttggcattgtcccttttaatctcacttctttcgtttagtataataaacttgctcttttgaagaaacttttaattgaaaaattaggatcacagaggatttcatttcatgctttaactatcatttcttatatttatactctgattttggataatgttttcttctactatgtcattataaagatataagatttcccaaattatgttcacggttttctattcagattacttaaggccaaagagaaagttggaaagctcttcttcaatcggaaatttagcctcatattttgtttttaatataataattagagttcccctctgaggaccacaaacaaataaactgaaaactctttcactatctttattgataccgctactattgtagatccttggatagaaacgtgatttcactttgatagagaaaggtatttttttttttttgtttaggcagaaattgttttttggatattgacacatccaaaactttcttctcttctcggccttaatttgacattttatggaaaataaagcacgtagtaacgctcgagtaacactaatttaacatttcataacttttttttgtcagataataaactgtaagatggtcgttatgatttgtttatattttaacgatggcagtgttgtaaataatcaacaatgaaagaagaaagagaaaaaaagaaaatcatggagaaatatgatctgagagtatgccttttagtctgcccattgtacgtattaggaaacctagttctgttgataaaatcattgaaaataagaaacaactaaaatgtaaaatccctttcaaaatagaaaaactaaaataaataaaagcttataaatttagtcttgtatatttatttatattagagtattatatggttgtatagtatagatattgaaatgcatacacgtatacgagtgaatgtcctagaagttagtgtcgttcgagctgtcaactagaaaaattggacagcatacttcaattaaactcaaaaccagtgataccataattcgtgggcctcagttcaaagtttctctctttctttatttatttatttttcttctcgtatttacttattcagaagcaaagaaaatctttttctcattctcatcatggctatataaattaacttctacaatttaataaaccaaaaaaacgagaaggaaaaaagatatttttcttttaatatcaaaagaaatattggaaccaatgaaatcgtaactcctgacgttagctcagttctttattttttgttttcttttctcctgtaattaattaattcttctacttttttatttggaaaaaaaaaacagagaggagagaattggaaatctgcctgtgccaaattctacttgaaaaaaataaataaaaaataaaagaaaaaaagataaggacaccttgtgagagacaatatttatacgaggaatttatgatataaattaacttccaattttaaataaataatttaaatattattatcacaaaaattaatttaagtatttatt

SEQ ID NO: 374 - DNA, 709 bp, Cannabis sativa
gcacagggaggctccacgttgggagctacttcgtgcatagggaggctccccagcctgcacacctgtagccccccgactcccacgtacctagtctcctcatggaaatggaagtaaggtgaagacattaaggctagagctatttaagcccagagtcgtaggcaagatagtgacgacacaataagtattggagtagaagaaaaagttcatttcatccgaggtacaagtaaaagaggaagttttggtataatttaggatgtctgtgacatcatgttacctaaaatactaggttatctagtgtgaaagcgacttgacatcctcatgcttagggatctgatgaggttataaacgatgaagagcttactataaataaagccttgaagctcattgtaaaggggactctctgggagaaaaaatattaatgaaatagtagtttttctaaatagtgaagagagtaatatttactttgagtattcttctattaagtcgtgaaacatcatcttgagttcttgttattttgttggtgaattcttactgtcaataatttggcactttctataggaagcaacatgcaaaagcaacgtggtttctttacctaaaattgttgagaagatgccgagacattcttatcgtagccaagaggtggaggtgcaacttgatggccattaactgatcgcctcaaggcctaacttgccaacacctatcattgggg

SEQ ID NO: 375 - DNA, 2500 bp, Cannabis sativa
tacttttttcttcttcttttttactattcttattattacaactactaccatggtcaaagtcaacattaggactctccaaagctctcttctcttgctccaactcagtactcttattaaaaaaaaatccttaaaaaaatagtaaaaccaaaaattaaggttaaataatatataaagattttttgttttttctttctctgtctaaaaaaattgtcaaaattatagtaaaaaaagtcttgtattatatacgtttattcttcttattcttctctctctcaaaaaaaaaaaaagttcatttgttattcttataaatatcaaacaaaactctcacatttcaaaaatttaggaaaaaaaaaaaaacaccaattttactaacataacaattttttactaacataacaatttttttttttaacaatttttttttttattattattattattattattatgggttgtgtttgtatgaagctaaagaagtttagatataatgaccctaaagttcttgcttctcatacttattctaagccatttagatatgaagaagaaaatcatgaagttcttgcttctcaaacttattgtaagattttattttcattaattttcttttaatttttcttgggttaattagtacttttttttttttttttgcagttactataaatgaagttgaatttgtacatgagcttttcaagaaattaagtagttctataattgatgatggtttaataaacaaagtaagttttagtaaaatttacatcaaaattaaataaataaatatatatatatataatgtattaatttattcactaaatttatttgagtttttctttaggaagaatttcaacttggtttatttgggaatagcaaaaaacaaagtctttttacagacagagtgagtagtagttactagttaccatttatgcttaatctaatctcttcaaaagcttagcatacatattacttatttgttcttgctcatatcttaacagatatttcaaatgtttgataccaaacaagatggggtaatagattttggtgaattcgttcgatttctaagtatcttccatccaaaaacacctcaagctgaaaaagtttcatgtatgtaatttttttttccagtaaattagttacttgaattacaaaacatgtaaccattaaccgaataagtctttgtgttaaatttttggtaataggtgcttttcaacaatatgatttatggaatactggcttcattgaacatgaagaggtaagtaaaaaattgcccttttaaagactttaaatctaaatgattttaactctttttttttaaaaaaaaaatgatgaaaaaggttaaggagatgatcatggcacttctaaaagaatcagatttgattctccctgatgagataattgaatcaattgtcaaaaaggtgagaactttagtcaccaacaagaattttcaattgatcttaatcatgttattatgtagttaatttgttcatcactaatcttttttggttttgtaattttgtatagacttttgaagaagctgattttaaaagagatgggaaaattgacatggaagaatggaaggaattagtggctaaaaatccatccttattgaaaaacatgacaattccatatttgaagtaataacatcttcatattattattatgcaaagtgtaaatttctttggctagaattgttcttctctttactaatgagattttgtattcatttgttattgtagggacattacaactatgttcccaagttttgtgctaaaaccagatatagaagacaacaacaataacttctgaaatttcgaagttatttcgaagactagattagaatttcgaagcttcttatcgagctcttcaatggcgtatctcgtgataaagttaaacttcattaaatttgtcaaactaaccatttcaaatattaaaatttgtaaaataacctcatttaattactctatgaccatgatgatcacataatgtaaatctatggttgtttaaatatttttgtaaaattattttactaataaaaaatttcataaaggttatttttacaaaacactcgaggattacagcctattggtagcaccaaagaagaagcaaattcctaaaaattccaacacatgaaaattgttgcaataagagcaatttatcatagtggaattgttctcctcaccttgagttgttgcctaacaatagaagctaagaacttgttggaaagtccatgattcatagatggtttgaacatttagacacattaggaagatagtaatgtatgtaataattgataccaattgagatgtaaatgatggaaatttctcatatgtatctgtatttatgtaaaggaaaatcctttgaccttgttcaacatcacaaaagtaggctacactgaatttttatacaacatggttttacattctaagattccttgtgaatataatttggaaaagaaagctcggtaaaaactgaaaaaccaatgcaatgattttagcagccacttgga

SEQ ID NO: 376 - DNA, 3667 bp, Cannabis sativa
ctaaccttagcagttgagcattgaaaaatttctaattacttaaaaaatatgaataattataaattccacttaaaccgtagtttcgaaccaaaccaaaccgttcttaatggtttggtttgaaaaatttatttgtctaatttctaatatttaaaaaactgttatactagtttggttcaaaaaaatataaaaatctagatcaaatcattttgtaaatacccttaaaaaaaatatagtcatcagttatatgatctcacggtggtactattagcaattttattatcatttactgtgataatcattagagaaatactaagccgaaatccgtggtgtgtagttatttattacaataattatttttaataacaattttttagttacagtatatttttttttgtgattaaatatgacttttaataaaaaaaaattatttataattaaaatattgtatttaaataaatttgatacaaatcattatggggtctaatcgcaacacgcgccacactagcaatgctctaatcattattatatcatgttaaaaaacgacaaataaagaactaatacgactcgactaatttagtttatatgatgagaattgctttaagaatactactccactaaattggtggtgtggtgtgttcttctttatcaccaaatgtattaacaaccacaatattgatcatcgatcccttcaacgactctcctaagtctctaatctcttgacttttttctgctatatataccgcttcccattccaagtaattctcacactttcaaacacacacacacacacacatatataaatatcaacttaataaaaagaaagaaaagataaaaccatggcaaccctagcttattcactactagtttttgctcttctcacactttcaatctcatctgccgtgaattcactgagcttgaattactacgacgacacgtgtccacatgtagagtatgtggttgccaacgctgtaaagaaagccatgtcaaacgacaaaacagttccggctgctctgctccgcatgcactttcacgactgcttcatcagagtacgtaaattttgcctttttgtcgttttattgtgtaatttcttttattattaattatgaaattaaattatatataatttttggttttatattattaggggtgtgatgcgtcagtgttgctagattcaacgaaaaaacacaaagcagagaaagatgggcctcctaacatttcattgcatgcgttttatgtcattgacaatgctaagaaagctgttgaagctatgtgtcctggtgtcgtttcttgtgctgatatattatctcttgctgctcgtgatgccgttgctctggtacttacctttaattttaacacacacatatatatataaattacatatatggaacaactacttttgaattgtacatgatagaaacagaattgctatcaggactgtataattaaagtattgctaagctcaaaataaaatatgttcgaggcattaatcttgagagagcttcaattaatctaccaaaaaaaaaaaaaagcttacatatggacacgtgtcattaattataattaaaattttaatttacacctcattggattcttcacatcttgtctagaaaattattttgtaaaatatacaaaaaagaaaaaataatttaaataccgagtaacacagtacgtattgtactttatatattcttttaacttttaagagagctactattttctaccccttgaaaacacttttcgaaaactttaatcgttattttcaccaattactcataaattaattgacgagtaattagtaaaaaaatggcctcctagagacaggtgagtaagttcttagatagaatgtttattaaacaagagattgaattgtgtggaaatgttaataatttaatatattagaatgtttatttttgttgttattgttttgttagtttaccattattaataaggtttttggtgtggtgttttcgttagtctgggggtcctacttggaaggtaccaaaaggcagaaaagatgggagaatatcaaaggcaagtgagaccagacaattaccagctcccaccttcaatatctctcaactccaacaaaactttgctcaacgaggcctttcccttaaagatttagttgctctctcaggtatgaatatatacacatatatagagctttttatacatatataataatctattacgtacgtagcattatgatcatataattattataggagggcacacactaggattcgcccactgctcatcgttccagaacagactccacaaattcaatgccagcgtggacgttgaccccacacttcagtcgtcgtttggggcgagcctgagaaatatttgtccagctcacaacaaagtgaagaatgcggggaccaccttggattccacgtcgacaatattcgacaatgcctactacaaactacttctgcaaggcaagagtattttctcttcagaccaatctctactcaccaccccaccaactaaggccttagtctccaaattcgctgcttctaaacaagacttcgataaagccttcgttgagtcgatgatcaagatgagtagcatccatggtagtggccaagaaattaggctcaactgcaaggtcgttaattaattaattaattagttttttttctttcaatatattattataaatttctccatcaatcgatcgtttaataattgaagaagaggagtgataagatgaaccaaaccaattaagatgcatgtaatgattagtaagtttgagttttttgtttgtttgtgtgggattatatattgtaattattattgttgtatcactttgctttagtttgttaccgttataattaaagtgaacgtacggtaacaaattaaaatcaaagttttgggaatccagtttggtgtactacgtgtaagtgtagctcaattttttcaattaattataactttgattggggttattccagtttgatcataaaatttctagtactttttctttgttctatggatctcgatcgatatatatatttatttatggggactattagaataggtattgggtaaaatacctatcaatagaaataataatttataatatttgatttaatctaatggttcaaattaactcttgaaaactacactataattaatatatttatttttttataattaatcttgtatagatttaggtaacaaaactccaaatctaactctaaaccataatttttttttactttttattttatatctactaaaaattttattttaattatatatattttttaattttaaatttacataaaaatatagttttattaaatttattttaaaacaataatcatacttatagaaaattataacatgttcaacttataataatcaatataaacattgtagttgatataagagaattttaccacttacactatgattatattgttgattgtattgattattttaagattaaataacttgaatattttgtactcttttagctataattattgttgagtagaaaataaaattaatatataaatttaaaattaaaaaataattaattaaaattataaaaagttataaggtaaataagtaaaaaaaattataggtttggagtattgttagttggatccaaatataacatattagtttaatatgatttgtcataataataataata

SEQ ID NO: 377 - DNA, 2474 bp, Cannabis sativa
tttggggaatatttaggtttttggggcttggtctgatgtagacctggtgcaggccttatataggcctgatgtatttttatagttagaaaataaaagttgaagacgatagcccgatgtaagcccgatggtggacttgatgggcccaatagtgtgcccaagctttatgcttttttttcgtaaaacccgattgaaccgatgtatggtctaatatcttgagttgacacgtccaatcaggccttgcatcgaattatcgagcccagcatcgggcctacttcgagctattgtcttcaacttttatccctttccaacaacaaaaaatacatcagacttgcatcgaaccaggccacaaactcatattttctccaaatacatatccgaccattctaactctaaatctaatccaaactcaaaattcacagagctttaaacctaaatctaaataaatatatcaataattttatatattttaacccttaatcatgcaaataaaattaataagtacctttgacgagattgctgatagaacctacccacacaccaagcactatgtcgtttacaccattggagctgagatgaagcaagttcgaaggagcccagcccagatctgactgatcacgacccagatcactcatcctagattcgtttgacccctgtccaaatccgagccctgcccaaatccgaccgacctctagtgcaaataatttagtgaagaagaagaagattgggaagttacctaaaggaaataatttaggggagagatttttaaaaatatattaataattttaattatttcagttattttttaatttttggattttattttgatttaattattttaataatatttaaatatgtataattatatagatcaatatgaacgcgatacctgtatatttgtttacgtgtgagataattcatgctggcacataaccactgttgtagacgacaccatgaattttccaacattagtagaggttggcaggttttcttaccaaaatttaaaattagaaggttaattacaagtgaattgagaattcagagagtttagccgtaaattactctaaaagaattgaagagaaattttagacttcatttaaatagcgtgtagaaataagtatatattaaatagtgtacaaataatttataaaactctgtgattcattaatttgtactaattaatatgaaaaaaatatgactaaacatatgcttaagttagacaatgaattatactgatttgaagagttcccaacaccgatgaagtattcaaggaaatatcttaatgtgattcagatcacaaattccaaaaataaaaaaccctccaaaatcctttccctttctttgtatatattatggtcgtctaaaaaaatttgtacgagttcatttatttttgatcgcttaatacaagttatgtcattataatgaagcacactaaaatgtgtatacttgtagaagtgtacaggaaagcccgtgaataattaagttgctagcttatgatcatgcatgttattagtatttatacatgaatgcatttagtccaaaattttaaacacatatatattatagttaatataaactagctagggtaggtaattagtataataatggagatataatagaagaccatgctattgtgaagttgtgatcacgttcacacaagtgatcaagagcatctaattaaaaccaagtatttaaaatatgtaactgtcctaatatatatatatgtacatacatgatcaacataccgattagcccaaaattaatggtacaaaacgaagagctcgtcctcatcatctacaataaaagattcggataaagataataataacaaccaagttttgaaatacatgcgtacataatatataaaaataatgttctctaaaagttgcatgcataatattaatttcaaacctaacaaaagcaatttaaacttgctttttcgttcaactacatctggaaaaatctagcacattcacgagttcatcaatccaagcttccattgataagtgacctctaaactttcaagctccacaaataaaacactcaactactcaacagtactactaacagattagatcatatagagtagagccacactataaatacacatacatatacgtaattattttccactataccattgatcatatattcacatgactctataaccaaacactgttcaccattgatcataatatactattatttccttcactacttctttctcttgctactatggcacctcacggagaatcaataatcccaagccctaacacacctcctactccaactactttctcaacccggattacagccgggaacttctccaagccgccaaggcttccatctgagagtctgcaccgaacggtgtcagacatctcgtttgagcttagcaaagctcaagaggcagcagcaatggactttgatgatctaccgccgatatcggaggtagaggatgccaagtgcgagtgttgtgg

SEQ ID NO: 378 - DNA, 561 bp, Cannabis sativa
atattttattgccaatttgtagcatgaagtatgcgttttttattttttattttatcttttcgaaaggatgcctttataaattcacatataggtaaaagtaatgaaagtttatataggaggagaaattaaaaaacaaaaacacaacaaagttaatctccatcatcaaccaaaccccaataattaatgccaagctcgagaggtgttggttgtccatttctctttttgtcattatttgattgctctttttggtggattgattgcccatgtggggctgtggtgatagcccttaagcaagagtaatgtctcaatacaatcaaattaccaactcccactatgtttaacctttttgacaaaaataaaccctttattaaacttcggtcatgtcacatccattaaattacataaatattactaatctttttcattcgattgacaaatgtactctaaagtcacattgtttgaaagaagcaatatttgtatataggattccctaacttatatttatatatatgtataggaattttgttaccattcttgccttcaaagaatctctgacttttt

SEQ ID NO: 379 - DNA, 1440 bp, Cannabis sativa
aagaccatcgagcaggacaccaatgccctgcaaaagatacatattacggaaataaatgaaacgactgctaaactcttcaaattatgagaaaaataagactaaaggattgagatgagacttgtcgtgttaaaaacaaagaaatatgcatatattttggttttgctagaataaaccactagtgttgtgatagctcacctgccagccaataccccgactcaaaacataagctggaggaggagttgcaatggccagcctagatgctgccttgtatgcacccgttgactgaagcatgaaaaagatggtgatataaaaaactgatacttttaagttttaaccaaaacgtattgcacctaagaaaccagtcacatgcatacctcaaccatggaaacaagaactgctgacatcattgcaaatgaatgacctgctgaaaatgtaggagggccccactgcagaggatatgggaacttaaacctggaatagcatataacattgtaggcttttagagccaggtaaagcatagaatagaacattgacataagtttatgtatccttgaaattaccatggggcggtagatatgagatttgccctgtcagttctacagctgacttgagttctattggactttcctctgtaggccccactagcagtcaatataagggcatagatccagacaattgtaatacagatcaataccggaaatcgttcgaaaactgggacatctctaaatggtctcacatgctttaaatactgcattttaattagcacattcacattggtctgagatgaaaatcatttagacaatagaaggtaattacaagacaaatcacttacttgtgataatccaatgaccaacagcagcataggaagtccaatttccacacagtttcctaactgaaacaagagagattgacacttttacaatcatagaaattggttttacaaaaatgggcaaatatagttgtgttatcaattttaagtattgtgttggatcctttaggcaaacattgcgctaatgaagaaccaagggaacatagctacagtttcattgtattaatttactttatatttctagtcagaagctaaggatatgaatcttaaatttcaaacagtgttacaaagctaaattaacagtcaacttgtaagaatgatggccttcaaaatatgatgtctcggacttagtagaataacaagggagctgacatatattgttccttgaaaaacaaagaatgcttacagcaggaaatccacgttgaaacaatcccaaaccgaccaatccaactacaggtgccataccaagaggactgaaaaatctgaaaaaataaaacaaataggaagtaggaagtactccacagtgaattattaaattactaactggtagtttatgattagaagctgtttctggattgatgcataccgtgaaaagaggccccaaacttgac

SEQ ID NO: 380 - DNA, 2293 bp, Cannabis sativa
gaagtgttaccgcattgatacagcaaatccaattgctattaagactaacttgtttctatccccgtagaatttcagcaaaacctaccacatatcttccttgcttgcattttatgctattactgcttcagtctatttactgttgtatttttcagtttataagtatgtatccttgtaaagatgtactgtacaatatctaaccagaaacgtgtcagtagtataacatgcttttacttggcccgtaatatattaatttttccttgttaaattccttctatattaatttgtacatcaatcagcttgttagagataaaaaatgctcagggactatcagatgtcttgacagaaatgttaggtgcattggatccaaagaatcctgaggtaatatattctatattcattctgaactttagatgacttgtcggaattgggaaagaccttataatacgaggattttgtgtgctctctttttgttttcgtttatggttttcttctcttttttttttgctggactttttgtatgtggtttctgaagttatcttataatgagatttctgtttgagcctattacaacatgctatatactgttatcctagttccctttgaaagaatatatacttttgagttttgataacaccttttgttggaagaaagttgctaacttactacatcagtttgtttggaagtgaagcataatgtttgttcttttagtagccattaaaaaaaaaagagaatattgtttcttccatagttttagtcccctctgctgaattatccatgcacaatattccaatcttcttatgttgctgtcatccttccatatatgtcacttcagtttttatggttgtttcttgatatttcggcagggtttgaaggatgaagtgattgttgaccttgttgatcagtgtcgctcttatcaaaaacgtgttatgcttcttgtgaataatacaacgtaagagattgattatctttagtttccgcttatattttttgatgatgctggtaggctgatagtcattgacttttgctttccttcagagatgaagaacttttgtgtcaaggattggcactgaatgatagtttgcaacgtgtacttcgccgccacgatgacattgtgaaaggaacccctaatacaggcacgaaagagacaccatcttcagctgtgccacttgtgaatgtcagccatgaggatgatgaatctgaagatgagtttgcacaactagctcacaggtaactatttgagcatgctttttccatatggacaatctaatcttactgatttttaattagttcactttaccccatatgtgtgtgtgtgtgtgtgagtgggtggtttctgtttattgatttaggataaaagtttgagattattttgattggtatgattttaatgtaattgcattttcagatcatcaagagatagctcgaagattgaacctgtgcgggtgagcccattccttcctcctccaccatcttcaaaaaggccagtacctacggatgctagctttattgactatctgagtggtgatgcttacaagtctcgaggattcgatgaatcatcagaacagccatcctttgtggctccagcccattcaaacacaagttctgctccttcattgagtccaacattatcgtcctctcccaaatcctcaagtttcataaaccctactgcatcactttcattcaatagtaatccagtttacgatgagtcggcacccctaagcaaatctgaagatcagctgcctccggccccttgggaagcacagtctcctgtttctctcccaccccctccttcgaggtacaatcaaaggcagcaatttttcgaccaacatattccaagtggtactgctcattcaagcagtggatccagctcttcgtcttatgacaatttagtgggacagactcagaatttgtctattaactcttctactccaccaaaacaggtaaaaccagaagatgcactatttaaagatcttgttgactttgcgaaagccaagtcatcttcctcttccgcttctaaacccaacaggtcattttgagttgccaaagatatttggattctcaaggtgttgtagcttgtgaacacccggctctgagttttgcattaaatatgacagtaacttgtgttaaataatttgttggtaggaaacttttggattttggttggtgcatactatttgctggtatatttggagatgacatgcttatttgcacataatttgaatatattgatgttctttattggatttgctttaaattctctgtttattgggtggagggttggataaaatgatgt

SEQ ID NO: 381 - DNA, 3272 bp, Cannabis sativa
gctgaaagggatcatttcttttcatccactctcaaacgcaggggagatggcatcactccaagtttgttgactaggaactgaaatcttgagtgtgtcagccctttagttaaacagtcggctatttgatcatgagaggagatatatcgcacttcaagttgtttgttttgaatcttgtctctgatgaaatgcacatcaacttcgatatgttttgttcgggcatgaaaaacaggattggatgcaagtgcacttgcaccaagattatcgcaccaagtcactgtcgtacgaataggaaagtcgaattcttttagaagagattctatccacgagatttcagcagcaacatgagcgagggctcgatattcggattcggtgcttgatcttgataccactgcctgtttctttgaagaccaagacacaagtgtatttctgagatatacacagtaccctgctatagactttcggtcatccggacagcaagcccagtccgcgtctgaatatccagtgatgttcaatctctcatcatagctgatgtgcaagccttgatccatggtgccttttaggtatctcagtacacgtttggcacctttccagtgtgttgtggttggtgcctttaagaattggctgagcttgttaacggcgtatgatatatctggtctagtgtggcagagggactgtaatccaccaattatacttctatattcagtaggatttgcaagaagttctccatcatttatggacatgggtttccctgctgtgattggtgtgggacaaggtttgagatgctgaaactttgtcttccttaaaagctcttcaatgtactttgtttgtgtgagataaaggccggtgtcatcacgtgttacttctatgcccaaaaagtaatgcaagggaccaagatccttgagagaaaacttcaagttcagttcagctatgaagcttttcatcttggtattgtcatttcctgttacaataatatcatcgacgtatatcaacaccatcataatagtcttctctgtcttgtgaaagaaaagagaggtatcggcccttgaatttacaaatttccagcttaggagagtttcttttaacttatcaaaccatgcccttggggcttgttttagcccatagagtgatttgttcagcttgcacacaaagttctcttttcccttttctatgaatccctcgggttgtgtcatgaaaacatcttcttcaagtgttccattaagaaacgcattatttatgtccaattgtctgatatcccagccacgagaaactgctatggacaagataattctcactgttgatgcttttattaccgggctgaatgtctccttgaagtctaaacctggtctttgatgaaaaccctttgcaaccaagcgagctttgaatctttgatgagaaccatcagcatttaatttttcccgaaacacccacttgttgccaatcaagttttgatcctctgttggtggaacaagtacccaagttttattattctttaatgcaaccatttcagtatccatagcctttgaccaacctttatgagcaagagcttcagttacacagctgggttccttggttaattttgtccaatttgacgcaccaatgaacactcggggcttgaagataccggcttttccttgagtaatcatatgatgtgtggctgctggttggggttgagaagcttctgaagctgtatgaaccgatgagtcttgtacagcaggtgtgttgtagtcaagagcaattggactgagagaagaattggttgttcctctctcaacacctgaaaccgaaccatgagtgccaactgaacttactaaaggagaagttggaacagaatttacctctgaatttgtagtttggtgaagtgaaggtgatacttcaggtgcgcttaatggactaccagcagaaagtggagtttgagacaacctgttgtgaaaagattgaagaaaaggagcaggtagaacagaccatatagaactctgaacaatcacagattttcgggttgataattattcaaaaatccttgtttgaaaggaaactctaactcattaaaaatcacatttctagaaatgtaaattctacccgtgggactcaagcatttgtaacctttgtgtgagtcactatatccaagattgacacactttgttgaatgaaattggaatttatgagcttgatatggtctaagacatggaaagcatgctactccaaatgttttcaaaaaattataatcgggtattttggaaaataacacttcaaaaggagacttgttttgaagaattggagtaggcagcctattaattaaataaactgctgtttgaaaagcgtcccaccaatattttagtggcatgcttgcttgagctaagagtgtaagacccatttccactatgtgcctatgtttcctttcggctcttccattttgagttgaagtgtgaggacaagagtgttgaaactcaatgccattttcttgaacaatcacattgaggggctggtattcacctcctccatcagatctaatacacttgatttttctttcaaattgtgtttcagccaaagctttaaaatgaatgaaggtattacatgcttcagcctttgttcttagaggatatatccatgtaaaacgggttgagtcatcaacaaaatgaatataataactgtaattattgtttgaaagtatgggtgagggtccccataaatcagtgtgtatcaaatcaagaggtttttcagctttgtttttggaagatttgaaaggaagagagtgagatttgccatattgacatgcatcacaaaacttatgcatttcattctttgaagttttaacatgacagaaatttaaaacatgagctaagacttttgatgatggatggcctaacctcctatgccaaacatcaattgtggaatttaaaaacttatcagttttagactgattaacaacagctaaaccagaatacacagcagatttaacattcctagacttaggtgagtttggttgagaagctttgagctggtagagtccatcttcaagcatcccttgaagtagtaccttccttgttgccttgtccttcaccaaacaacaatcagagtgaaattctattagaacattattatcagatgtaagctttgaaacactcaataagtttttggtgatatttggtacaagaagcacttcatttaacagtaatgatttttcatcttttgtgtttaaaatacccttgccaatatgagagatagaaagtttgttaccatcaccgatagtgactctctccttaccaccatactct

SEQ ID NO: 382 - DNA, 10952 bp, Cannabis sativa
taaaaaagataattattcaattaataatatgaaaaactgataattaattataaagggctaaatcggtatatatagtgttgaacaacttaaatatcaaatagcaatcctatatggaaaatggtcagaggccacagtagtagctaagatcagatgaaggttttttaggaggctggtaatgataaaagtgaaggaattgagcaaggtcaaagggtttgaacaacaaaggatggtcttcatccacaagctcttctggggctttgactatgtaacctgcttttggcatcgaaaacaatgccaccgaatacctttcctcctttcctctcatcattactctatgatttggggcatgtactccaccattagcccaagcctgcatgcatatagaaactaattaatgatatcattaatatatcacttaattaattaattaattaattaattagtagtctactcacgtggagggattctccaatcataacgatgaaagagtctgaagaggagggtttgatggaaacccattcttcatttttagtttgaacctctaacccttcaatttggttctgatacaaaatggtaaccatgtttttatctttgtgggctttcaagcccagctgccgcttgctggtttcatcatgatcagctgggcctaatgggcccttatatttcatcaatcgaaggaggtagtacgttgagtccatgtgttcttccaagtatttatcaactcccaaactctctaaaatcatccttcttatcattccatccaactcagataattgttcagaataagaatgaatagtttcactgtacatattcaaattaattacatctacatataataagatttataataattattgtatgtaaaattaaaaatttaggtacgtaccaaaaagttgggtttccattattgggccacaaaagagtagtcaaagtttcaagttttgtaaggatattggcctcatcgaatcccatgctctcgtacaaaggcaaagcatgagattggccaatatagccatgaaacggcatctttgaaacgtttcgttgtttcgtttgtaaaggaagttggaaaagctcttctaatgcatcaaataagccctttcgaatgtgtattggaattttatcacactgtgcctcgaaacaaccgaattcttccagtgcttggcggacttgggtccttacggtgttccactcgggtgtacctggtttcagtacctctccaactgaaaaatcaataataggaagcctaaaagcggtttcgatcgccattaattaattatgtgtaaaaatatatatatgatttagtatttctttatatatatgtataataattgttttggtttatgattcttggtactttaattttaatttcaccttcactagacccgtatttataaacttataataataataatagagaaatgcatgcacgcctcgcttgcggtgattaacttattaatattaattatattattattattattaattattggatgttatcatgtgtgtccttttttttatttttcttttcagagtgatgtactgaattattcatattacatataaaatattacattatttgtactcgaagaagatatcaattttattttatatattatattgcctctcataaggtacgtatatatcgtaaattaatcatgcaatgtatgtataatatatatgatcatcttacctaccaaaaagaaaaatgtttgatccagaatatgatatttttctgagtatatcaattttcagcattaattattatatacgtacgtacaataaggtccttaagagcaaattatatatactaaacatgtatatttttatacaatatataataattaagaggatggaataatatatagtgtgaatatataatgtcatattacagtagccttgaaacaaaggacagaatgctacggtttcgcatgatatcatcactcgagagtacacatattgaatattcgtacatttgctgctgtttcagtgttattacagtagcaaaattgtaaatgctataagatatatgaatggatttataaaatgatcaatactcattcattttgacgcctaaatggcaattgaaattgatgacaaaattggcaattttgttcagagaatatatattggtttattatatatgcaagaaaatctagcttgctttcccaaaaataaaaaaataaaaaataaatactacattaataagagcaacatgctggtattgttattttcggtttttttttttttttaaaaaaaaaataagtgctttgaaaaatgagaacaaaaaacattatttatttattaatgatattggtcatcacttgaagaaaaaaaaaaaaacttttaaagttttcaaaacaaaatggtgtttggttaatattttctaaaaataatttttattttaatttttaaataaacaatatattttgaaacctctatatgaacaagacttgactcggaccaaactcaaattcggacccgagactcgaactcagatctcagacctcaacccgaactcggccccaaactcggacctgaaccttgatgagatagaaaataatatgacaaagaatattgagagataaagtatattgagaaaataatataacaaaatgatgagagaaaatataatgtgagaaaatgatgagagagaataatgagagagagtgattagagataaaataatgtgagaaaatgatgagagagaaattaatgagagaaaaaataatgcgagaaatcgatgagagaggaaaaaagaatgtgagaaaatgataaaatgatgtgagataaaatagaaacaaaattgacaaaaagtgaattgttttttttttaaaaaaaaattaataatttttgttgtcatgaaacactataaaaaaatagctaccttaatttagtgacaactttttaatttctcaaaacataattttttttttttgtgactaaatgtgaattttagtcataacaaaaagttattttgtgactgaaacataatatttagagagaaattgtcactaatttaatttgagtcacaataagtattgtaacttattataatacatttagtcataaaaaattgtgatttttgtgactaatatatttttagccacggacattttagtcataataacatagaattaatgatttataattagtcataactattttacttttagtcacaaattttgctgtgactaaaagtaagattttttgtagtaaaaattcttattttttgtaaatttgttttctaaaaaatgttttcaaaaaataaagtcatacactcttaattgttctcaaaaaaaataattttctatttttaaaagcaaaatacaatttttttagttgtgatgtgaaaacacacactaaatttttttgagaaaattgaaatagtttacgtacgtacaatgcagaaaataaatcttcaaaatatatagtttattattcaaaccagcattcatatatagttgtcacgtacacacatacagttacaaatgacatgcatgatggttaggcccatataaccaccactggattatttattatagagaacgtacattaatttaaacaaagtacataacaatattattatcacacacaataactaattaataaggggctcttaaacacatatatattaattaaagaccaaaaaagaatttaataggacatggagctttttgcagttcttggtcttcaaaataactctgtagaaaggtcatgtgatcaattggcttatactgtaaagggtacttgtcattatctaccatctcttcaggaacttcaataattccatctatgtatgtgaacagtgcaattacatatctatctttattcccttctttcataatcactcgatgttcactaggaagtatcctatcattactccatgcctgtacgtatatatatacaaacaattaatatattttagtaattatatatgaatatacatatatatatataagtaattataattaagtatatgtacccttaaaatgtcgcctgcgaagaccacaaaagaattaggagatggtttagcatcgagaagccagtgaccatccttgttggatttgatttgtaaaccttcaacttgatgctggtgcacaatatttatgaaggtcttgtccgtatggggttgtaaccccaaattggtttccttctcctttggagatctgtactttgataatttcaaacgatgaaatgttgacttcattacactctcgtgcaatctctctactccatagctctcgaacaacattcttgttaccgtttcaaacaattctgtcatcagcttcgagaacgaaacaacactttcactataataaataaaacaaccattaataatcatatatatatatatatagtaatagaccaaaaaaagatatacatatatggatttgttttgaactttattttcctacttaatacacaatatatagaactaaaacgaaaaattgttctttgaacataagtaacagtattttgcatgtttgcattttaaaaaaaaattaaaaaaaaaaatgttgagaacaacaaaaaattatttccctgattttttattactttttcttcaaattattgcttaaatcacattatttattatacctttttatttttcacataaaaaaaaaacaattctaaaaactatttttaagacatcaaccaaatatttaaatatataactaaaaaaaataactgttatacgatttaattactacaataaaattaatattatcatcacgtaaaacactataactaattatattaacttccacacagaacatacatgttatattaattataaattaataatatatatatatatatgttttgtgtaccgaaaagggtcatttccttgtggccacataatgttagtgaatttttcaactccttgaggggttgaggaatggtcaatccccaaagactcatagagagggttatgggaccagttggaaatatagggtacgctgagtctgtcactagttttcctcgaaagagtttcaactggaagtttgaacaaatccttagtcgcatcgaaaactgagttgtggacttgggcagcaactttgtcaaaaacaacttccaaacacccatgctcttcgaaacccaaccgaacttgtttacacgcccacttccatgaatctgttccttgctttagggtttccttgtcaaaaaatatcacagggatctctctctccataatcataaaatattaatttatatgtatatagagattgaaattatactataaattgcctttcataatattaacttatatatagtattgatcttgtttttggctcatcatcggaacatggtgggttatgttaggtcacatgtaccccactcaacttttcataattctttttcgtataattttttatatatatatatttatatttttattcctatataaatttgattatatatatttttttaattttgtcattatatataataattatacctttataaaatttatatttttcatttttatcatatattaatattttcatatatatctaaacatgtctctataaaatgtactttcctaataaaaataacatattcttttcctcatcatgatcatgatcgtgactcatatagggacaatatttcatgatgtggtttgagtagttacgtagtacaattattagtattaattaaatgaaaatatcaaactaatatagtcgtattattatttccatttcttaaattcaatttattgtatggtccatgcagttctcgtgctatattttttttaaaaacaaaagtatatattatttatagtacttgattgagaggttagaggtaagatgtcaatgcatatgcatatattgtatcttgattaaatataataaaagataattatatatatatatgtacgtaccatatatatcatgtgagtacaatcatagagcacaggaattataatttaagtcacacataataagtacatctagaacgtaaaacacataacacttcaccccaaattgtaaataaggaaatatatctagtggtcttacttggttacgtacgtacagtcaagttaaagacattaataattatatactatattaatttatacaatataattattattttttttgagaaaaaatatatctaactattaagatcatgttttaataatttgaaaggttttgtatatgtaaaataaccaggcacaaatacaaatacttattaatttaatcttttatatacatacacaacaaaaaaatttactcaagttaatggtgactaaaagtacaaaaataataactaattttaaattatcatttttatattgtgacgaaaaggtctttgattgaaggtattaattagtcacaaaaattataatttgttgtaactaaatataattttagtgataatatttgttgtgatttgtcgaccgatggtttcgtcaaccaataattaaaattgtataaagtatttaatggaagttaaaagagaagattttttatgtgtttaggacattaataaactttagtccacgagtcactgcatttatgagagtatttattacataactctttttttcaatccccatttctctttattataggctcataatggtggtaaaaaatcactatcgtgtttgtttacaccatacttgtcacaatttttaaaatttgattatttagggcataattgcctatttttattatggaatttgggttgtctatatgcatttggtgggatttgacttatcccttatttatgactttgacttatatatgtagtcattgattgatgtaagggatctcgtgaaatcagagaatatgatggacttaaactcgtaaacacgcttgtcatagtaaggcgtctgatgttcttcctcatgctgcattaaatgcacatatagtgtcttggtctttgagtgacatgtcacatttcattagtcctcacataccaccctttggatacacttcacttgcggaggagaaaagacgagagatgctcgcggtgtagctggaccctcttggaaatgactattctgtcattactctttttgaaaaataatagacttcgacagtggttaaggcaacgtatcctgtaatgtggatctcattgccacgtacctgacttcttcttaaactgtcacgtattttgggagaaattctaggcaatattgatccacaagtccttttttgcaattttgtaagatgagatttgcaatgtgcctcttagaatgttgttgtcatgttgtgcgtgatcatttttaaatgttgttcattaattaccatcgttttttataaaaacgattcgatttcttaatcgattctcataccattaattgcaagatgttaaaaggacactcgagtagcgtaatcgtcctttttatgcttatctatatgccagctacatccctaaccattagatcatgaggcttttataatctttgaagtaggatcgttagatgacgacgatccatgttgccttggctggtatataaaaactcatgatcattcttctttgagatttttactctcatatctctcagaatttttgtgccagtcaaaatttcaggcagctcaaactttcttttactctttctttgacgttgtcaagctcgattttacccggcattttgcaccagcaccagcaactgctcaactttctcctatttgtaagttactagcctaacaagcttctttttattttacttttgtaacttcatttgataataagcttgcacgaatgtgttgttgacactgtatttgtgattttaggtgactttcaccagctcgtctttaattttaatctttacacaagagattcttgtgttagggctaattaggattcaccttttttttcatcctctataccattactcttcatcatggtgcagattgcactcgatgcatagcatatgaattttttttgttttcgatatgcttgcatccagagggggtctcttctcggcggttaggggacccctattccgttttttatttagggtttgatgtggcggctaactgctggattaattcttgcctttttatataagtgacatttttagggatcttcataaacatggcttgcgcgcttttgacgaagagattttaaaacttcattcacaaactaggatgttgaacctcgaagctcctgcccaaacttcttcttaggccgtggtaccacggtaccttgtagtaccactaactatagtgatgcagggtccagtcctgatcctaaactatgttcatcaccgagctatcggtgaagttgaagagctgcactcgtccatgggttgcgtctactatttgggaaccattgtgaccgagaatggaatcatcaccagaaactagagggttttccaccgcgtggctcgagagatagagacccccaaccattacaacggatcagggtttgaggcatggagccaagcacaccttatgtatggcgtgatgctcctggaccaagattattttttaaatttttcagtttttgtaggacttgctccgtattaattgataccccaatgatcccatctattgttaggcttaattattttttatgctttaaggagttggcttactcccagccccgctaaaatcttattcttttatgaaaattttggtccccaagaatggagatagacagattaatggtttctactccctccatgatcatcctgccaacgagacaattgtcccgttcaaattttaaaagagcgtcaaggacttttttcgttgattcttcttctcctctgatttcaaagcctttgaacatcccaatcttttaaccaagtagacttagatccctccgctactttgatcagttccaatcaagcttttgccgagtcatgttgtcgcctttgtaactcttactagggaagagcctaacgtgggagacctggtcacaattgctaactatgggaggactgggctaattcaaggcgaccaattagttaagaatactaatatgtcaaaagtgacgtgtccaaatgctcaaaataaagaggctgagaggaagctccaggtggagtatattcaagaggcaaaaaccaagtaccaagcctaccaaaagaggaaggagtaggaggacctcttagcttgtgcccagagtatagcagacatgaagaagcagaagaaggtggacaagaagctggtggctctgagaccatcgtttcccttcccggtccctaagtctagtactcccagagctagtacctcgagtgcccgtaagttccctctatccttacactattttgtcaagaattatccctgttcccagccatttggctttgataggagattagttaaagtacagatgtatcactcccagtggggctatagggacaaagaaaggcgagagggtggctctcaaggacaaggtcttggcagagaaggccttgaggcagtgggactagcgagcgagggagaattcattgaagaaagttcaggaaaacctacaatctactcaggaggagaataaggaactttaggataaggtgaaaaaaacttgaggagcttcaccaagcggatatctagaaggttgtccgcatgtttgtggacctgaacaagcttaggaatttctaggagaaggccaaacaagaggccaccaaagctgccaagaaggctcttgcagcctcggtcacatgtgaccagtgtgtgaagtgttttgggcatggcgtcttcatatgtcggaggtccaacaaatttgagcccagactccatttcttacccgatcctcaagtcctcctaactcgtttctagatgaagaacaagaaactagacatcaagcttactgagtctttgggtcctcgccttcctcgcatagctgattaacttgccatttatctaaacatctttgataacttttttaaattttagtatgttggggagaattttttattagcttgtctctgaggctttcttgtttttttatatatatttttacatcaagggagtcaatttattagcttctctttaaggcactttttatatatatatatatatatatatataattatactcttttcttatatatgctctcttcttggtatttcttgacattctagcttttcagaacaatatatttcgagttatttatgcatgttttatgccctactactccccaagtgactaaatagtttaatatttttttgtcactttgcataaacttgaatagatagtacatacataataaagtatgacaccgagaaaagtattaagcactaataatgtcttcttataattctctttaccaaaatactataatccatttttgctaaagctgcagcatatatagaaatatgcttctgaggtgagtaaagttaaaataacggtatatgattttccaaagtaaaacaaaaaataaccctaacctccttttattattattagctcaatggtaattaataactaaagcaaatatttattatttggttttatcgatggtataattttctgttcctcgagattatttcatgataaaataatttaattaagttattaaaatacaaactaagatcaatgatcagctgattaaaaacccaaatttttttgtattaattaattaattggagacagctcgatcgatggtaatcaaaaactaatattatatttacatggagccttgcttattaattattttgctgtaataatattaattatatgcacagcttttttattagttcatatcggctcgtccagtttgtatcagtgagtctgtaattttatttttattatctctgtaatgaaagggactggtggagtgtaaccaatttaattaagaatgattccatatagtaccaatttaattataatataaaacttcaattataaaagagtagtgatgaaacaatatgtatataaaaagctaaagtcaacatcccatatacattactacaatttgggtgttcattaaagaatgaagtcaatttagtatgcaattaattaatataagagcatggataattatatatatatatatat

SEQ ID NO: 383 - DNA, 5154 bp, Cannabis sativa
acatatcaagtttaatagcacaaaaaccatcacccttatttttttcaaagtattagtggagtagagtcatacggatatttttacattttccttacttctttttttctacaccgaaaaatctaacttccaaatataatgtaaaattttcatttatttcaaaaaaaaaaaaaaaaaggaaaaataaagctgattcacctaattatgctaagatatatcatatatagctataagttagcattttatgattattccaaaaaaaaaaaaggtagcattttatgacactggcagaccagcttacatgtgcagcgtttaaaaaatcttaaccattgataaacaaaactgctagggctgcaaacttttattaagcttgcattgtttataataaataaagcaaaagaatgataattaaagttgtaattattaattaataaagaaaagaaaagaaaaagattaacgtaagcactcttcttattattttggatactgcagtttttttcgtacaaatgaataatatgatcaagtagtggaaagagtacgtgtggtgtggtataaaatacaaaacactatatatttctttcttagttagtttggattaatattaaatttaattttgtttcaacgaatgtctttaatcaatttgtatggtaattaattaaatttttcagggaaaccgacaaaacaaattatattctatatagctggcacatgccaaccttgtttggtctctataataatgaattaatttcataactaagccactctgcttaatttggcctttgaggtactatgggtttttatatttattgatatattttacaacatttttggtttattccaatgtagtgatctcgacagtttgccacgtctcagagagtcagaagcaaccttaagtttatatatatactttaattttgtcttttgaaaaaacatattgaacaagtttgttggggcaaattcttacacattgatccgaaatgttcatatattttttataagcttggtttaaataggataatgccagttaaaatatatatatgagtaattaatgataataataatatatagtattagtaacgtggttaagcaatgaaattaacataaagtaacatttcatgtgcctttaacttcggagtcctgaggtgaaataataatgttattatgaacaacacaaatctcaatatattggtctgtgtttatagaggatttggaggacaattcgtagcaacatgatctgccttcttttgtttttaagtcaatttctggtgacaacatttttcagtttcgatctacatattgtagttgtgtttgttttggttcatttttgttattatttgttatttatttttttaaataaaaatctatacttattatagtaattataacctcttattacaatctcttagtcaatttctatattcgaaatcacatgcaagaatttttttttttaattttatactcacatctctatacatttttgaatttttttgaatagtttacagtacttagaataaaatttttaaaatttcagtccaccacgtatgttcagaaaattttaaatttattttcagcaatgtaaattatttgaaattttttaaaaatttacaaaactaatgttataactataacgaacacaattataaaaaaaaataaaagaaaatatttcgataagtatttttgaacacaaaaattgacgaaaagattataataagaaattgataataaccttaacactcctttaattattgttatgtgttttcttaaattgtctgcggtcaccactattaactattaaaattggagccaaaggaagaaaaaaaataataataacgcaaaagggaggaatatggtcagtttggtcagattttttgtcccttaatttgtttggctgtattcaattacagaatttgaagaacatttgtgtgtggtttgtaatattccaagcttaaatattacggataaaagtactaaattgcctttatttatagaatataataatatctattcactaatcctttcaagttatatattttaattaaagaaaaaatagattattagtgccaacttttagtttttgtagatataatgaaaatattgcttaattggctgtcttaggctggcaaagaaaagagtacttaattataaatatcatgagaactctacatcaatttatttcaatcagaaatatgagtactacaatttaaaattttaaaatatatatattgggagagattcttatagggtattacttttgtcccttagtataatgatgctatatatatattagttgggatatgattttgttctgttattgtactttcacggattataattcgtgatgtacggcaaccgtcagataagggagttatttgatctgacggttgagattgatgtaggggtaattaggattaaaaaataaaaacgtactttgatactcatttaatgtaccctaaaacttatctaatgtaccacggaatacattctgtgaaagtacatcacgggacaaaatcatatatattagttatacctcaccaattttcaaatagtctagagtgtaaaaaaaaaagtaattgctcttaccatggctttgaacaacactgattatttagaggtttcctccataccaattgctctgcttatttgtaatgatcattaggtgtattagttctgttttatataaattaatgtttcttttctttttttaataaaaagtagtagttgcacgcatatcattattttttatacatgtaaaattataatgattattttgaactctgttttaacactactttatgttattcaaaatttttgaagaattggtgaagaaacaattgggttataattttccaaaatattgaacatagaaaagaattcatacaataattaaaaacaaaaatgatgtcctttattacatcaaaatttcccaattctacttatgagtcatgtcatgcatattttgttttgtttggtctagcaaaccttgctattagatatgggtccattggatgtttatcgataataatcaatataacgtaattttacagttaattcataactattataggatttatttattaaaatatattctggtgttaataaattttttatatttttttgtagggctggtatatatgaataatcttattataatttcttttgtttttggcgtgtattaagggataatcaaacagtagtagttgagtatcatattctacgtacttatttgacttccaaattaagtaggaaactgtgtgtgttaatggcattttcaattattttcactttccaaaatgtatttaattctttaagtatgaaaccttaatttatataatacatgagtgattaattaaagatagacttggcaagtgatgaatactcatctcctaaccagagacaagatatcttggtttcacattgttcttagctcgatcaattgtccggtgtgtgaagaggtggaggaatcccatgagtatctattttttagctgagtgttgtctcgaaaagtcctggacttgatttttgcttggatgggatacatgggatgggcgactacttatactggtatcattgtgtaattctaacatgtcatattaggattcatcggctcaatatcaccattttgacaacagtgatttacaatatatgactcaacagaaacataggtgtttttaatggttattctagatcagtttatggaatagtaaatgatgtaaagaatacaataaagtatagattgtaaattgtaaacaatatatccaaataggagagagattacttgttgagattacaaagtaggtagtagtgggtttggggttttcttgactgtcttgagccgtgcttttggggttgtttcgctgttttgagccgtgtgtggctttgcctttttgtttgtgtttgtaagtggatgtgttgattaatgaagtatttttttcttgataaaagaaaaagatagacttaagctataattcaattattaataagatgtgatattggcggctaagccacctgaatttacggtttgtaacacttaaccacaaaaaccgaatttttggtaattgtgcgacgtttgtgccataatttttttttttttttttttgaaaggagtttgtgccataatttagttgactatgatattgtaataatttacttaattgacaaaatatacgattaaaagacaatctttaagtatcattaaagtatgtgcaaaaatactagtgttgtaaaatttgtaaactaatcataaaaaaaatatactatgcagtaaactattaaattaaactctagtaaattaagtctacactattcctatgtttaaagttgagcatgttaccatctgtaacatgctcaagtgaacgatccaacatgtaatgcttcacgtattcaacaacatagattccataattatcactacaaattaaaaaaatataaaactaatagaaacaattgacttaagtaattcataagggactacaaaattaaataaatataaaatgagacatttacttttttttttcatctgtagtacaactttagaggtagctcttctataatgcattggtgggagttggctaagatcacctaaatcaaccggaagtacacaactatttaattgaaaataaccactagcacgtaataaggatgcaaatagctcggtccaaggcttcagatatgacttcttgttgttcttagtcgtgccatcgatatcatagtcatatacaacaatctcctagttctcaatgtctacctcaacagccatccaattatgcttagcaggagggttcaacataaagtaaatatattcttggttctcccaacatgacaagtgtctatgctccatccccaccacataatcaagaactgattgatcccatttgaatgtgctcctatcatcatcatgtaaatttcaatacatctgaaaaatctgtggagcagatgtgtccaggataacacatttgtgagtgtacacattagggaaaagctctgtcttcttctttacaagtgtatcatgtcatcaattaactgcattgcaaataaaaaaagttaaaaacatgtcacacaaacttcgcacaaatgtcatacaaaataaattatcagtagtaaatcacacaaaagtcgcaaaaacatcgcacataacttgcacaaagatcaaacaaatta

SEQ ID NO: 384 - DNA, 2240 bp, Cannabis sativa
tgtttttaaattctaaaataaaccatgacattattttctgtattcaatctcccaataaaaacatagtgttgatatttttttctttttttttttttcttttttttttttgaaaggaacaatagttgatatctttcattttcattagttacatgatgtaggtccactgagagatggatgcacatgattttgtccaactttattatctttcacttatgagtataatcaatagtgaaataaacgtatgctatcaaagcctatagaagagctacataaaggaccatgtagtatagtgctcctattttgaaaggtggtccatatatagatatacatgtatcaatgtatatccactaaaattttctaacctttaaaaatatatataaaaatattaataaaatgacgaagggaattaattctatttcatttggacaacaagtgttcctgccaaatgttatatctctaggtgttttatggcttctacaaacaggttctataacataacttttggtggaaaaggtgcaatgaacattaaaatttgaaaaccaaaacatagcataaacaaataatttaagggttttattgtatggtgaaatctattctcaccaaaaaagtcttattacttcattacctcatcatcacaatcaaaacgaaaattactagagtgcatgttggaaaactttaccctaaaaaacacaagtacaagttttatgatatgttttcctttttctcacttggggatgagatattctaaagaaatgaattgtgtttcattttgtgctcagtgatgtaaaaggtggggtaataaaggaggaggaccatcttatctcacaaggtctatggggaccaaactattcaatctatattccatgaatggccttgtaggcccttaaaggacttataattgtattcatgtccccaaaccacagagatcccctttgatctttttatttttattagtttgcctttgattgaaaactagtattttcaatcaatgaattatcctaaacaatgttaaaaaatataaataaagcatatacataaacacaaaaagcaccctttcaaaaaaaatataaatgaataaataagaacacaaaaaaacacagtttgtataaaactgatatatagtcaaacttgcacatttatatcactaaattatagacacatggtgtgataacaaccgacagacagcttattgaaagaaagaaaaaaaataagtcattcagccaaggaagtgagaaagaataatgtggttggctttacattatcaaatgggaacttcccatctctttctttcttgatttattggccttgttcatgaagacagaccaactcattcaaaatgattgagtttatcatattctagataagcaaaagcataccatttgaagacttgtttttcaaccaaaaggaattgatgcacctgatcaagcattcaatcagagattcagagggggtatatagaagataatagcatggttgaccctgtggaaaatgacaagattcaattttaagacattctacatgctttaaactgcaatttttaagtaaaatagaaacccattaaagataatgacacatgcaaatgtttatatatttaatcataaagtttgatgttagatttgaagataagttctcatgacactaacacacataaaagataaaaatatgattaacaaataacaaccacaaggataaacaaattttccctatttagttagtccatttcagcacaaacacttgtgcaaaatgccacatgagatagcatcaatccattaattaaatatcatagacagtgaaatggtgtgctcagatcatgtctaaaaaattggtagaaagagttgtaaagagttaagattgaaggcccacctccaattggatgaagcccatcaatagtacacaattatccaaaatgtggtcaccctgattgtgaaaaagctgacccacaatgaaagatacccttcaaattcaagaacaaaaaaaaaatgtaagtcacttagtggctcctgttctttcataggatattaattaaaaaaaccatgtgaaaattgacagcaaaaagatgacgttttaattcaacaatatcatagttcaaacttcaaactaatctggcttctgactaggccaactatataacatagccaatgatatttcttgtgatatcttaagagctgtgagcctgtgagcatgaaaatctagcaagaagagaaaggagttccaatcatggcttttttaagttcattaat

SEQ ID NO: 385 - DNA, 2645 bp, Cannabis sativa
ccaattagcctaaagagagatataactaaaattgcaatgatagggagagatttgctggctaaagaatataatttaaataaacacactttttgtcaaaacataaaagttcattttccttggtgccatgaacattagttctgtgttgtgaccgtcccaatttcggttccacgtaaatattatggatatacattattagcacaatacaatacaaacacactgagagaaaaaatatatatagattttataaaaaaaaaaattacagagaaattaccatcccaaagaagctccattgaagaagaattttccttcctagcttatccatcaatgctgttgcaatgactgatcctgaaaataagtagaaactaatttttaaaaagacggattaaaacaattcaacacatgtaaaccttatatcaagaagcaaattatacctgttaagttcacaatccctatgaagacgtttgcaaggcttgatgatactcccgccttcttaaaaacagccgaagagaaataaaacacagcatttataccagatagctgttgtaaagcaaatagggttgacccaataaaaacaactgcaaaaggaatgcgtgaataacaaagatttttggagaaggaacaaagaaaacagatgaatggaagaaagtgtagcattataggttttgaaaacaagaaataggacatattttttaaaataatagagatgaatggaagtatagtattataaatttcatagaaaaaaaaaactgtacatatattatcaatcatacatgacagtagcttatctacctctaaaatggggaccagatagcaattctgaaatcttaacagactctgcctcatctcccctgtccaacttggccaactctgtcattgctacatttacatgtgatgctccaaaaagcctctcaaattcaacttccgcttcagcagttcttccttgctgtcaaatgatagtgagaatgtcaacttattcaatagaaccagagccactagcataaacttcagattatgcaaaatacttttttttaaaatagtttcatgtgctttctttattatgggggcaaagtagataattaagacgccttcatgtatgtgatgtttaagaataggtaagaagctacgacaaactaaggaagatggtctcagtccaaagtaagcaaaatcccaggaatttatcattgttcaagagagaaatgaaatgaatacataaccaaatggaactaactctcttaatgaaaagataaacatcataaataaaatttgaagactgttatttttgccaatcagaccaacataaagctgtgatcttctctaccaaaaaatagggcatagatttactgaattagacaccacaggatgcaaagatgagtgcatgcataccttgtaaagccaagatggactctccgcacagaaaatcatggcaatagcaagtattattgctggaattgtagataaccaaaaacaaacgcgccacctgagaatagaaactataatgtaccttcaaacgattaaagataaaagctaaaacaagagacaggtcaatctggagttcattcttaccagccagcaacatctttgacagggattccaacaaaaagagcccccatgatcccaaggcatgtagcaatttggattaagcttccataagtgccccttacaaaagaaggtgaaacctgccaacaataaacagtaacaggaacctaagctgtgaatagagttatagcgataaaacaagagagtgaactacgggtaaaaattggatcatataaaactacatctttgagatagtgggaaaacacatgctagcatctacgagaaagatacaaaagtatttgtacctcagttacatagagagcagcaacaggaggtcccaaacccataccagccccaacaaataaccttcctaaaagcatgccggcaagggttttgcttgttgcgctgaaaatgtaggatttatcttcagaatggaagttttcaatggaggtgtatcaattataagaaagtgatgaaagagagtaatataattattgggaacaatgttcccatatttataataattttaaagtgaacttgtgtttacatatgaaaaggcaacaacgaatttaattgatgcaaacaccttaaaaaaccttaaaacttggcaaactaaaatttatgttgatcgtgtaaaaccagcttattaataatgattttttccctttttaaatgtaataggataatttcactgactgatcaatttgttcactacctagtgtgtcaaattttcagtcagtgaagcaggtgaaaagccaaaaactactgcatttctttccagcgaggaaaggagaaatgaagagatatcatagctagtataaagaatatacctgccacaaacttcatgagctggggtgatgacaaatgcacatacatatcctaaagaaatagtttcagaaaggtacatgaatagctcaaagccaatctcaaactcaaacctctatggtctttcaaagaatgtctttttttaagaaagaaacgattgtgatggcaattgctttatggaaaaattacatgattctcatcacctcatagcagcgcccataatcataggcagtgcacacagctgaaatgctctacgacgtccaagtccatcagcaatccaacca

SEQ ID NO: 386 - DNA, 1013 bp, Cannabis sativa
aatgcaatgcaatgaatcatacagaaaactcttttgtaacaatgctctgatcataaggtgaggtgaaggttgacatggtagcagcagctgagtccgaaaacatagttgaaccgtctagtttctctgaggtagagggtagattatacgatgacgacgttgtattatcactgtcactggagtggagcttggaagttttctgagggcctctcactttgaggtccatgaaatctgttatcaaaccaggctttgtgatcctactgtcataaacttctatctctccggtcagcatcttaaccacggttgacattgttggcctcagctttggtgcatcttgcgtacaaagaagacctattttaagaaatctacaagcctcctcggcatcaaaatccccgttcattgatgaatctaccagcccaatcaactctttgcgttcgtagaagtgccatgtctacaaaaataaataaataaacaaaagtgctctctgtcgataaagaatatttttttttgcaaatatttcattaaaataaataaaatcttctagctatacaagttttctaaacaggcacaattaagtctttcaataaaacaacgaagaatcccagatattacagaacatgagtgaggaagtatgcaacattataaatagttatccgagaaaatggttgttagagttcatatattgcttgtgatatgttgacagtaagagatggctacgaaaaacaaagtcacttttaaatgatacatattcctagagctaagcaaacccgagtttgaaatcaaagtgttcatcacaccttgaaatcttttggaatcaataaatttacaagtatctgcccgacaggtggctctaggaattaaatgtcagactgtggagccagccacaaatcgaaccacacagtccacagtctatgcttgagcgtcaacatcaccttaaagaacattacatggtcttctaataagtttcacagaaaattctgcttaaaaagaacttgtcgtttcaaaaccaacaacta

SEQ ID NO: 387 - DNA, 1574 bp, Cannabis sativa
ccccatacaataacatagttccgctgaggtgtgacatctatcatgttgatttcttttggacgggcaatgtttggctttcgagatactcaattggcataatgtttgtttttatacacgattttaaaaaaaatataaaaaaagaaattaaaattaacacaaaaataagtgaataacaaaatctttccccacccacttcgagtgttccataaattaatatacaacaatactaaaacaagggccaagctccattatgattcatcaaagtgcacaaatttattatccaactattacaatacaatttgccttcttgaaactttaaatggaaaatgtgtataataccatgaaaaagaagaagtgtacagacaaaaaaaaaaaagaaagagaaaagaataaagaatctaatatttaattgttttatatataaaaatgtaattgtcgaatattattaaaacaatatagaaaataatctaatggagcacattttctaattattatgtatttatctgttttatgaccattaaatctatcatttatagctacaaaaacattcctacctactaaatcaaagttttcacaattaaatgtattaaaatcaactaataaaaaaattaaattttgactaaccaaatcctaaaataaaaacaagtaacattttttttttaaaaaaaagtaaatcatctttctgctatagtacgtactctcatcccatcaacctatcttgtgtcgttcactgcttttcgaacactagtgtgtactgtgtacctcaggcaaattcaaaacagagagtaagtgagagcgattcagaagattagagagaattaaaatagagacatgtaaaacgcaaagagactaatcatcaaatctgaaaagttaagagtatatttggtattgttttctgttttttgttttaaaaaattgtttttagaaatgggaacaaaaaataatttttgaagtttttaaaacacaagtcacatttggttagtatattttaaaaataatattgattaaaagtgaatttgtttttaaaacagaaaaaatattttgttgttttcaaaattcttgttttttgtaactttattttctgaaaactgttttcaaaacataagaccaaacaagctaaattatttttaaaaaataattttctgtttttaaaaataaaaataattttttagttaagatatcaaacatgcactaagatatcgagagaagtaccacattagataagggatataaagaagtactaacaggcaccaatggtgctagtagcaccatcacgaggccacattatatattaaggtgaaataatattaatattgttgtaattaagcatcacatatattttgatttagtaattactactaaccattttactaaacagcaatcttcacatgcacagcatggctcatcaatgagcctttttggtttgtagttagccaatgcccatgcataacaagaaggaaattaagaaagagagaaatgcctaacatgatagaaaagaggctgtcagagtagccaaggagactgcctgaacattcatcgatccaatcatcgccttccacgtgtgaaaagctatg

SEQ ID NO: 388 - DNA, 1480 bp, Cannabis sativa
acgctacttgtctaattctccatcgttacacaattttgatagcggcatatcataattaataattcacgcccagatagggaacgtacttaatcattatatatattccatccttttgcagttttgctaggtagctaaccttttcaataatgaacatctatagataaataatttgatctgctatatatatataaagttaatgacgcaatgaaagatatttcgattcatcatatatatctatcgctgacatattagctcgatctttcttctacgtacattacgtacatatataatcacgcttattatgttacatattattatataatatatgtatgatattatcaactagctagtctcatatatatatatatagttactctatggaaaatatctacactacacatatacatatacataatacatatattgtggttgtggtaaggacgaatgggcagtatatataacaatatggtgatggtgattgctgtggctgtgggaattatatagcactaacaagggctgtaaataagccactatagcgcaaactataaatataatatatataatctcttctacttcttccatttgtactcatataccttcccacgtgatccatgtcggaaaagaacacaccctccaaacgccaccgccaaaattttgaaataaaaccccccctatataataaccctacaaattagttactaaaaattttttataatttatttcgactttattgatattattattctatgtgcagttaatatacggtataaatataaatacgtatacatatatccaaaacattgttagaacgtagtctacagactcaagagttgcccataatttcatatatatgagcttaatccgacctgtctttttcattgaacaaattcaaagtataataaaaatccaataatattaatgttagtatttctttgttactattattctgttttattctaaacaaaacgatagattagccgaatggtagtactagtattacttattgggttacgaaattgtacaaaattctttcccttatacacataaaagcgtcaatatgttaggcttgtgagcccgataattactattattttcttgctggcttgctaagctataattatataattacaagagaaaaagaacaagtcaggctaccttttacaattttcattgtttatatattttggctgagcctaattcgatattagctagtattagtacgtacaagagctctgtgtattaatttccactgcactgatcccacgtgacaaaccatggatttcctcagggtcaggggggcctggggtccatggctttctttacatttcttcttatttgatcctgaatctctatattttttcaacctgtaattggtggaatatttgtgaaattaaggacagcgtgatctctttttgctacagtacttgtcaaaagtgatctctataaataatagtagtatttgcacttccttcttcaaaca

SEQ ID NO: 389 - DNA, 3684 bp, Cannabis sativa
ggatacaactcttcaataataatattttataaagtgtgaaatagttacatatcaacttttagatggaagaatatgatttgacaatagtaatagttcaaaagaactttaatataacataaaaaactcacaatcatataatagtaatagtttaggagataaaaattctatttattttacattatattgtttttaattatttttattatgatttactaatcaaccttaacatatcccactttagcttagttgattataatatccttaggtggctgcttttttacattatttttgatagtccattttgtatgacataaaagtgggaatactatatattctttaaacaacaaatatatgtaaaataataccaacttgtattacaatcattagtcataaatgagtacaacaaagtatgactattcaaacattaaaaaaagttgtaatggaaaatgtggtcttgggagatattcaaataaagagctaaggttttgaataatagttttgtggcatagatcatagatcatagaaatgatccaaaagattatcaactggaccaacatgagctactgaaatttgaacaaaaagaagccaagcatcgccattattgtacggcgtcctgcaatgagaaacagttttacgaaactcgaaccttaaattatgatgctatgaaatgttaaaaaatatcagtaaatgactgaatctgaaaagcttccaatcctgaccattctttattttatttatttaactttcgaaatagaataaaagatggaactttatctttaaaaaaacaaaaaatacctaggttcctagcttctctaaagcaacttccaacttggaaaatgatcttataattggcttgagaccaaagactcacaaaatccatgtatcttattgtttaaccaaatttgtgactagacatgatacaaggatatatagatgcaaaagggaagactaataatccataaaaattttgatctgtggtttatttaatgaatagagaaattaccctatcaagattagatggacaaatccatatttaattgcaccagctttgtaccaaagtggtaaattgagattcctctttcgagtctcgctacacgcagagcaactgcaacaatgtaagaagagcaagtaagagtacattagagagaatcaagaaaaaatattatcaaagaatgagttgattgtaacttcataaatgaagctaacatctgaaaatacatgaatatggccatgcctccaaatgtcatcaaatggggatttgctataacctgtggggcatgaggtgaatcagcatctgcctattttccgagcatggagcgattatccataatggaatgtccttgaggactatcttgtagcagtaacagctcttctccagttggatattgagactgagaattacccgtcttggtatcgtttgagaaagttgtattcttgtattacaatgaattgacctcaataacactaataccagaacaaccatcacctccagtttctctcatcatcttcctcaccttggctacttcatcccactttcctttagtagcataaagattcgacatcaaaacatagaatcccccactcgagttgtccaagagaaataacttcttagccaagtactccccgattttgagctcttgatgggtgcaacaagcattaagcaaagctccccacacagcaaaatcaggttttatcttcatgtctttgattagtatcaatgcctcgtcaagcaagcctgcgcgacctaacagacttaccgagcaagcatagtgctgcagccctggcattacattgaattcctttctcataatttcgaaatattttcttccttcatcaacaagacctccatgagtacaggcagctaaaacacccaaaaaggtgatgtgatctggctttagcccttgttcctgtaattcggagaagcaagaaagagctttatgttcaaaaccatataagctataacccgaaatcattgagttccatgtcaccaagcacggagctttgatgctcttaaacacattttcagcacgttctattcttccacacttggtgtacatgtcaataagagcagttccgacgaaagactcaacttctatgttgtttctcaagacatagttatgaagtctctccccgaattgcaagtgtccaagttgtccacacccagatagtaaagtagcaatagtgatggcgtctggaccgtgtccatgcatcttcatttgacagaaaacctcaaaagcatcagttgcctttccagactgaacacagccagaaatcaaagaattccaactaatcaatggcttttcatgcatatcaaaaaacaacgaaaaggcagcttcgatgtggtcaaactttgagtacatgcttatcaacccattcgcaacaagattatcgatactcaatccactcttgatcccataactgtggaaggcaagtccaattccgaagtgacaagggtcagtaaccccatggagaatgctaaccatagtaactgcatccggtttcatgtctaactgctgtatttgagcgaaacattccatcacagatgacatgttaccattctccgcgtggctagatagaattgcagttaagggaaccaagtttctctgaggtaatgacttgtaaagcacctctgctgatttcgaatcgccacgtcttgcatactcacaaacaagcgaagtatttacagaacatttgttgataagatcagttttaattacaaaacaatgtgtgaattctggattagcatttgctgataggagacacaccatggtaacctcatttgcttcgacatttccctccctcattcgtttgaagcaaagcattgcatcattaaagaaaccattttggccataggcaccaatcatggtattccaagaaaccacactcttttcaacaatctcctcaaacaagcattcagcagcttccaaatccgcacacctcgcatacatagaggtaagcgcgttcttcacctgagaacccgaatcgagtccagacttaatcccgaacccatgaatggttctcccctgaaatatcaactcatgtctagcacaagacggaaccaaactaaccaaagtcgtatgacaaggactaaatccctctctacacatctgaacaaagagatcaaacacatcgaaatgatacccatttcttgaaaatccacaaattaaagcattccaagagacaacatctctttgaggcatattatcaaacaccttctgtgcaaatgtcaaacaacccaatttcatataaaaatcaagaagagcagtactgaggtgcataaattgatcagcacctgatttgatcaagtgggtatgaatctgatttgcttcaaatgttggtttgaacccaaatgaagaagaacaagataaagcacaagccttgatgagcaaagcaaaagtgaaatcgttgggtttctcattgtaattcaacaattcacggaaagtaagtaatacccgtcttggatttttggtatcgaaacaaaatttgaagagagaatgaaaagaggaaagattggattttgtggagagaccaatggaagaagccaagttcatactctaaaatctcaaacttttgactcaacggctttggcgccaaagttcatagttcatataactataccaactaatttttttataatattaaaaaaaaaaagattttgtgtaaaaaggttttaagttattttta

SEQ ID NO: 390 - DNA, 3141 bp, Cannabis sativa
aaaaataagagcttgtaactacaatcaaaccatacaataatttgcagaaaacacacacccctcatcgatatttctcattttctttttaatattttgatagaaaattaaataaaattattactatattttaggaaatattcgttacaagattgaatcagagtgagatattatacatataactctaggctggctgctgtggtatatatatcttcctcggagaacgaggtggttcacgaaaacacgcagttactcttgggaggagaacaagactctgcagagcctgatatggactcctatggcgatgaacttgagtctcgtcctcccaaggtttatgatgaagatcatttaggtgtagaaattccagaaactgctcaccagattagcacaggttcattccattcatcccttttgtgtatattctttttgtatttcccaattcagtttctgtttttatggaaatgaacctttctcgataaggaattcttattgggttttattgttcttatgtaataatcaagatgacatttttattcaaaaaaaaaaaaagaaaaaaaaagtgctgctttgatatatgaatattgtaatgacatatattacaattgacatagacaaaattctgattaaatttaaatcttttcaaaattgaattatagattcatggtttcaagtgggtttcgtcctgacgactggtatcaatagcgcatatgttttgggatactccgggaccatcatggttcctctgggttggatatttggtgtagttggtcttatttttgccacagctatatcgttgtatgcaaactcccttattgccaagcttcacgaatttggagggaagaggcatattaggtacagagatctagcaggatttatatacggtatgctcaataaagtggataagaatttgtatagtacgttaccctttttgttgtattttatctcctttaatttgattttggccttttgcttttacaggtaaaaaagcttataacctcacatggggtttgcaatatatcaatctttttatgattaacactgggtacatcatcttagctggttcggccctaaaggtgaattcttgtttaacagcaaaaattttttaaagtctatagaaatgatacttcagcagtgttcttttttttttttcctttttttttaatattttttcttttcaatgataatctgttcacacagctgtttaaacaagaaaattgttgtggaatatgacaagtatgaattctgtgctgctattacaagcacataaagtttttgttctgaacatttttagtcccatgcgtttgttgtgtaggctgtatatgttcttttcagagatgatgggttaatgaaactaccatactgtattgctatagctgggtttgtatgtgcattgtttgcaataggtattccacacttgtcagctctgaggatttggttgggattttctacctttttcagcctggtatacatcattgcagcatttgcgctttctctccgagatggtaaacattctttgatcttatgtactagttatgaagttaaaattatggcttccatctgattggagatttgtgcttggtaattatttgtcaaggaagggattagcaataatactaatactagtataagcatattatatcagaatcactttgcttggaaagtgtttcacttatctcaaaatgaaattttggtattttaggcattaaagcaccggagagggattatagcatcccagggacaacaactagcaaaatatttacaacaataggagcagctgcaaatcttgtttttgcatttaatacaggaatgcttccagagatacaggtacgcttaaagacaggaaaaagaggctaactgtttttgttgctatcaatatcaatacaatcaaacttacttgttttcattatgtggttcttaacaggcaacagtgaggaagcctgttgtagggaacatgatgaaagctctatactttcagtttacagctggggttcttcccatgtatgctgttacttttattggctattgggcctatggatcttcaacctcgacttacttgcttaacagcgttaatggtcctgtttggattaaagcagcagccaacatttctgccttccttcaaacagtcattgccctacatgtaattctcttctctactaatattttcttaaaagtttcttctgttctaacattttcacttcggtttaattgtagatctttgctagtcctatgtatgagtatgttgataccaaatttggaatcaaaggaagtgcattagcaattaacaacttggcattcagaattgtggtaagaggtggttacctcaccattaacacattggttgctgctctgttacctttccttggagatttcatgagcctcacaggtgccatcagtacattccctcttacgttcatcctagcgaatcatatgtatttggttgcaaagaagaacaaattaacttctcttcaaaagttatggcattggatcaacgtttgtttctttggttttatgtctcttgctgctgctgtttcagccttaaggctcatagcagtagattcaaaaacttaccatgtctttgctgatatttgatcctttcttcttatttttttgggggatcaattactacagccatttagtatttaaaaactcaccatgtctttgctggtctctgatttcttttgatcaatttcaacagtgaaaaagtgtacaattttttttttttttttgtcttggcctatttgttaagcctatgtaatcaaatagctcttttggtgaaataaaatatatttattattctctgtcaaaatatatctagtgatagggagagctcaggtcaaatactttagttcacactccaaaagattagttaggcaatactttcgcactcaaaatattaaaaaggtgctatagtcaatctctacctaaaaagactttattcacaaataatctttaatttattaaaaaacattttaagccaatttattttctatatacatatagaaaaatatgagacgttaacatggcattttaaaatttttttaattagcattatttattttctccttaattttcttattttttttataatagtaaaaaaaaaactattattttctctaaaattatcttatttttttaaaaaaattt

SEQ ID NO: 391 - DNA, 5305 bp, Cannabis sativa
aaaaaaaaaaaaaacaacttaattttttttacaaaaatatagtcgtatgaaattttaaacgtttttacgattttttttttttgtactttatgttgtactcttgttattttgctgttgattttttgttacttgtatattattttttatgttattttcttattattttcatgtggtttttttgtatttttatagaatactgtaaaaatatatataaaaaaaaaaagtaaataccattttggaccttatattttgtaaaagttactaattggactctctctgttttgttaaatgacaaaatgaacgttgtattttctaaagtggtataaataggacctgaattgatttttttatcaaaataaaatttaattataatccgatctaaaagcggtatgacaaaactgtttacatattctgtatttgtttgtattaagaattgtcttcaagttggttatattaaaaaaaaaagtcaaaaattaagcttaggatcctatttttaccattttggaaaatactggtttcattttgtcatttaacaaaacacatggtctaatctgtaacttttgtaaaatatagggtccaaaatggtatttacccaaaaaaaaatacactttgaagagcataaatgtaaaaattttaccaaaaacaataatttatgtaattttttcttcttaatctcaaacgcttacatggggtccaaaagatgaaactaaataagacaacatacacacaaacacaatgatcaaaaactaaaatatgcaaaggatatttccaaagataccctagttgggaattttgagaacaccatcaatccttttattttgagattaagtactcttccctccttgatttcatatgggttaggagcttgttgcaatgaggaagggtgtccttaatgatgggaagttgcttgaaattttgaacccatgtatggagcctaggcagatttttggggtccaacaatttgagtcccacaagttgctccacacattcaaaccaatgagccaaccatccatttgctatgtccaccatgtttatagtctctcccccaaagaacttggtatttccaaggcttaattgctcttccaaagttttaagaacttccactacttcttttgctgcattttctccattttcttcaccgcgagtgcttgtgaagaatgaaccgaaagcgaggcgctgcgattgaactaatggtatcaaatgaaaaataaataataacaaaagaataatttttgtttttgatgatggtgaaatttggattgcaatcaagcttccaaaaacaaaagaataatttttctcttgctttttgttaaaattgtgcttgattcatcttcttagaaagtttaaagagtcaatatttttgttattttattaaaaagaaatttcaaatgaataacctaaattcggccatctgagcaagtactagctaggcctcgatgagcagaagggtgtcacggtcattgcaaaatctatagggtatgagcctaggcaacaaggcatttcgtcgatatagatcttagtggtagtagtaacaatttaaattagaactttgaagactgaagaaaagagaaattctatatgaacagagtgaaaatgaaatagtgtttgtgtgtgtttttaaaaaagaaaatagtgtgtagtttgatagagtgatttgagtttagttgaaaatataagatacataataaaggtataagttttatgaagtgctttgttataacttacccttttctttgtcaatggtaactaattttttttaatgattaatatgaacattaatattttcataaatatatttaaagcataaacaaagaaaaaaactaaccttatcatctataaattttacccaaaatctagccaaagctctttcgtaagggtctttaggcaagagaggcttttggggccaagtttcttcaatgtactcaagaatgacaagagactcagaaatgggtttgtcaccatgaacaagcacaggaactttcttgtgaattgggttgtattgaagaagcaattggctcttgtttggaatatcttcttctatgtattcatatttgactccctttagttttagtgcccaaatcactcttacactatatgggcttggccaaaatccaagcaacttcacttctttttcttcatttttttccattgagttttgaatcaccaaaattacttgcaaatacaaataaatatcaattagtgtagatgataactattgagttttctattcaatgatttttttgggctagttaatcaatggtctttttttaatgttaatcaatatttaattccaacaatagagcacaattttgtcttttttattttaacttcattcatcttaaagtctctttcttagaatattacaaatattcctttaaaaaatttggcagtattatttgcatcaaaatctgtattatttcattattccaagttatatgcattggatttaatgaaggttttgcccccacttatgtatatgtatgtttaacttatttgtgaacaaagtaccaaaatttttccttagcataaaaattaaagatgatccctaagttcaattcaagtactagttactgattcaaaaaaaaaaaaataattcaagtactagttacataaagtcttatatattaacaaattttggcctgtcaaatgtatttcattcatctctataattattgaatatttaacagttaaattgattaaacaattgttaattattataagccatctcaaatcaaagtacataaaataaaatatgcagtacaatgcatttagcattttataggaatattaaattaagtagctaggctaggaacctttccctcaaacccttaaaatagataaccatttgatcataatgaggaagagtttgattgatggaatgatgttgtttgaaattttgaatccatgagtgtaacttagggaatgtttgagcctcaagtagcctcaatccacacacttcttcaatcacttcaaaccaatgagttaaccatccaaagcaaatatctactattccaatctcttctccaaagaaatacttctcattattcatcattagagcctcatcttctatagttctcaacatctctaaacattccttcttccatttctcttgttcttcaccactagttgtgaacactttccaaatcaaagaaacctatgtaacaataataaggataggttaaacacaagaggagaaaatatatatgaatgaatgatattctcataaaaaattattaggaagacgaagatctaattccttgagtttagacaagctagacccaaacttatagggctcttgcccgaagaggactttgaatcacttattaattaggagaaactcgaaaaattatcttttggtcattttaagctaaaacttacgtctctaactaaatattaccttgtcatcagagaaagtgatccaaaatcgagctaaggctctttgataagggtccttgggaagcaaagggcgaatatgtggccatgtgtcatcgatgtattggatgatgatcatggactcacagatgggttttccaccatgaacaagcacaggtaccttcttgtgaattggattgtacttcaaaagcaactcactcttagtttgaaggtcttcttctatgtattggtaaggtatgccttttagttttagtgcccatatcaccctgcagctaaaggggctgtcccaatggccatgtagcttcacattttcatccatatctcaaaaacactccaatattgtgaaatgtgattgtatattataaatatttaatcagatagccttgcatcgattttggggttttgttaacaagttcaaagtttgaatctaagatttttataagcttaaaaatactatagcaagagaaacgaatccatatatgatatactaaattattattattgggtttgatgatggcagattcttaaaatacttcccatatatagtgttgactttgtttttgttttggatatgctcatttacacaacataatataataggtgtatatataaactataaataaatttgacaattatttatttggtaagtttttttttttttgtttcaggtgagtctcaatgtgtataagtgttagaatttggggataagatgaataaggttctatctcaaaattaattggcaatgagaggagtagcacattcctcttgtatattctggatcggttggatcggtatttggattatattctggatcggtatttggattttctgtggctcagatttttttttgttttgctctaataccatagaatttggggataagatgaatgaagttccatctcaaaactaattgacaataagaggagtaactcattcctcttatatattctattatttttccacacattagcaatgtgggactctctaacgtgcttaaaatttaagtttgtaaatggtatactcaatatttatttttagcggtataaatattttatgtttgtaaaaatataattttcatgaatacaaattctagatcattggatctagatagaaatatgtagtatcaactacttccaaatgtttttttaataaattcaaaacagagtatgtggtaacaaaattaaaggaattatagtttcataaacattatgctgctaaaaataaacattaaatttatgtcgcttacaaatttaaaactttaaatacttatgtaattatttatccttaatgtcaaatttatttgtaatttattattggttacttatatgttaaagtttcgtataaatatctcgatcttatcttacattattttaaattactcataaaataattgtctattatttatttattttgagtgtctattataatttataatatacgagtgtttaaaatacaactactactcaactactacaataatcaatgtaacttcattgctaaatgtatcctttgtttcagtagtataattgagcattgttattatatattagtggtgctcaacaccttttataaatgtcacatacgattgattagcgatattttctaaaaataattttttaaagttatataaatcttaatacttaattatactaatagcaatttgacactaaaaaaaatactagacactattaataccttttaacaattctctatataattagatataagtcataggtatctttagcctagcataagctagttgaatagttataagttttgttgatgtcttgatgggttgtattagtattgtgtcatagcttagatattataaacaaatatcaaactaaacttgacctactcacttatattggccggcttaaaagtgggggaaacgtggtagaggaggttagct

SEQ ID NO: 392 - DNA, 2683 bp, Cannabis sativa
cccactaattttagggctaaccttatgtgagtattcagccattgtttctctgagatttcaactacgatttgtggcctccgcctctctattttcaagttcaacttcaaccacgctggtattgtcctctgcttgattggtagacaggtaaccattacaaaaggaattattgtgctctgttcatttgagttgaaacgcttgaataattcacaataagataattacacactagttaccactgttcatcatattaatagacataattgttattaataagcttggtttgagactgagttaggattgcaccaaatatctaaattaattgtgtgtgaaacagaaactctctaatggcggatcgcagacctaaaccgactcagattcaagtgagctcgaaagcagatttaatccggttggagaagcaaagaaagaaggccaagtcaggaggtttcgagtcattgggtctgagtcctaatgtatttcgaggaatcaagcgcaagggctacattgttccaactcccattcagaggaaaactatgcctctcatcctcgctggaaacgacgttgtagccatggcccgtaccggttccggcaagacagccgcttttcttgttcccatgattgagcgattgaagcagcacgtgcctcagagtggcgttagagctctaatcctttctcctaccagggatttggcacttcaaacgcacaagttcactaaggagctcggccgctttacaggtatccttttacaaaattcttccgcatttggttatagaatgatttctttattttcattttacagaggttttacttttataaatttgtaatgcttaaattcgtcaaaggctgttgtaaatgattgaagttcatgacaacaattatggggagtaaagtattttaataattctgtatatcatttatatgattatttgtaaattagagtcgctgggtttttgagtcaaattaggaattggaaaatgataataaggtgatcctaaaccctaaaccctaaataattctatttgatatttatatgatggtttgtaaattagaatcagctgtttttttttttttgcttttgggtggattggtttaacttaagaagattggtttagacaagtgaactttgtctctttttccaaaagaaaaaaacttaagaagattggcttaaatttaatttttatttgttatttcagatcttcgtattagtttactagttggaggtgatagtatggaaagtcagtttgaagagttagcccaatctcctgatatcataattgcaactcctggtaggctaatgcaccatttgtctgaggtggatgacatgtcactgcgcactgtagaatatgttgttttcgatgaagctgattgtctatttggcatgggttttgctgagcagttgcataagattcttgcgcagttgagtgaaaatcgtcaaactttgcttttcagtgcaacattacctagtgcccttgctgagttcgcaaaggctggtttgcgagatcctctgcttgtgcggcttgatttggaaactaagattagccctgatttgaaacttgcatttttcaccttacgacatgaagaaaagaatgcagctttactttatttggtaagggaacaaatcggttctgatgagcagacattaatatttgtgtccacaaagcatcatgttgagttccttaatttgttgtttagggaagagggtattgagccttctgtatgttatggtgatatggaccaagatgctcgcaagattaatatatcaagatttagggcaaggaaaactatgtttctcattgtgactgatgttgcagccaggggcattgatattccgttgcttgataatgtcataaattgggacttccctccaaagcctaaaatttttgttcatcgtgtcggaagagctgccagggctggtcgaaagggtactgcattttcttttgttacaactgaggacatgccttatcttttggatcttcatctatttctctcgaaaccaatttggcctgcaccagctgaggaggaagttcttgatgataaagatggtatattgtccaaaattgatgatgccattgcaaatggagaaacagtctatggacgctttccccagacagtaattgatcttgtttcagatagacttagggaagtcattgattcctctggcgaattgagctctttgatgaaaacctgtgtaaatgcatttcgtttgtattcaaagacaaaaccatcacctgcaaaggaatccattagaagatcaaaagaattacctcctgaagggttgcatccaatgttcaaaaatgttcttggtgggggagagttaatggcactggcgttttctgagcgtttgaagacgtttaggttagttttccatgccttttcttttctttccaaggttatatatgcatggtttttaatctagctaatatttgctagaccgaagcagaccatacttgaagctgaaggggaagctgctaaatccaagcatttacaggtaacttctatacctctctgcatcgatcatttgtgttttcaaattttcctctttttctctttctctgaagtgactagcattctgattttaagagtctctctctggaacaatgttttcattcagtggggtaattatatatattcaatgctttttctggcttgtttgcagggttcttctagtcaatggactgatgtgatg

SEQ ID NO: 393 - DNA, 1160 bp, Cannabis sativa
ttttttttttttttaatatttaagcgtttatatatacactatattgtataatgcaagactcgatcctcactcactatacacaccctcgtaccctctatgatcacttgagttagcctcaattggtcccccactttatttttggtatattagattttagcaaaatcgtcactagctaatttttatttttagcaaattagttcctaaacttttagttattgaataatattaagttcttactattaaataatggtaattttattgactttttaattaatgttttgtgttaatttcaatattttatcttttatttattttaatttagtactttttttaaaaaaaaaaatgatttatatttttattttccaagaatttatttatatatataaacatttaatttcttttagccaaatatttaaagtatattatatatttccatccacaaacaaaaaaaaccaagcatatgtaaatgagttttagactcactttaaggtgttaatttaggttaagttttaggtatttaggtttatgttgtgtggatttatacttattttaatgtatcttcaggtttagatggattcagtatgacttggagtggaaacgatgtaaaaatatagaagatttgatcaaacatgcatgaagagaactgaaaaatattgcttctagaggagttgtgcgattgcataggtttttggcatggctgcaccactatatgctacaattgtgattttctaaaaaaatgaggaaacttcgaagtgtcatttctagaaagagtaatgtggctgcacaaatgatcttgaaaatcaatttgttgaaaaaaaatgggttgttttacctttttgctacgtaattagtgtgtaatgtgcctttttgcttccatataactcaaattttaggtatcatgcaatgtataaacttttaaagttagttagtttttgttttgctgattatctgatcatgtttagtaattaaaaggaagaaaaaagttgctcatgtaattcaagaaacttttgctacctttagcagctgctcgggcctccaaaccaattcgaataagtcacatatttactttggtggggttgatgaagcgattaaactggccatttgggatctgattccattaaagagagtcattttattcttaagtacctcagtgtgacaat

SEQ ID NO: 394 - DNA, 3980 bp, Cannabis sativa
agtacataatgggatgggaatgggatgcattttattttctataaaaaatattggataagatccattcccaataataatattcatatacatttacataccgggcacaaatcatgacttatttcatctaatgttttcttgggcttttgatgtataacctgaatatgaaaaagaaaaagaagaaaaaataaagttttagtgtacaacttattattgcactttttttttcatccaagtatataaatttcaagtgacgagggtatagatcaattattaccagaaacccaatggcttgtcttatatgcttgagctcatcccaggctgaacctgcatactgtttatatatatatatatatatgaatattaatgttatattgaaactgatagatatattcttcaattttaatgacagtaattaagttcaatattaagtacctcatcagttgccttgtaacaccagtgttctagttcagctaatccagctttaacatactcaccattactaaacgaacaacactctcgtcttagtagaaggctgcaaacacaaacacaattgaacaagtcaatatgtataaacaaatatatacttgttccgttcagtactgaattatatatttatatatataaatatatatacctgttgaatagttgaacgttgatgaaagaaaatatctgtgtaaacactttacggaccaagaatggaggcacctgttagaaaataaataataaataatgattaaacaaaaaagagaagattttggatacaaggactagaattttaaagagggtttttgctatactaacatgatttgctttcaaagtgtttaagaagtttccaagactaccaacaatcccttgccagtgagcaataagagctctctgggcttcagtgttggcaactgatcttgatgatccctttaccaagcttgctcttgatgttcttggtgccttaatcatatttaaagaataaatcatatttaagtttgaagaagatgactgaatattaagtactagataataataaggaagtttttaatgaaatatagtaacaaacctgtatgcataagccaagcagaggagatatttctttcttcaaattatctctaatcattccatatatcttttctacatatgcagtgagttgctgtttgaaaagcagagctgggtacttagcttcaacttgtctcaaactgtccactccaccattcataccaccattgatcaatgaaagattgactccttgtggggttccacggaaactctagagccacaccaccaaaaagtgttaataatgaatgtaatggtttttggggacaaaaaaacttgtgtttacctgtgtcattcttccgaagagagtggctgatgatgaacggcggcgttgaggagtcattccggcagccccacttgctttgagtgtcctctggagaagtaagaggagtgttgaggcattggatagccaataggccaaaacgtcattgttgtcttgagtctgaaaatcccagttgtaggattgaataagtaacttgagtgtgttagaaaagagtgaaagtcataaaagaacatgatgagtttgggagatttcggaacctcaatggcatggcctatagtttggatgatcctgtcaaagacacttgttctctcaacttcaaaagatctccactgcaaaaggcatttgtatattatacaagcagcaataggtctgtttgcagagaatccaaggtgctgtgcaatacatctaatgagaagctcttgattctcttgttgtttttcattaagtgatttctgaggcttgtcctctacttcagatgattccctatggttcagtgaagagctatgcaggtcctgagcaatgtcattaaccgaaaaaagtaaaacttaagaatgaaaatttggttcaatactattcaaaaatttcccttaaactattacatcaaatagcttagtttctttccttaccacagttggcttcacatccacaccaaaatgaccactttcaccacctctctgtcaattaacatataacagtaaaaattgtaagcttagctgcagtgttaatatagccaaatctaagatttgatgtctgtttgtgtaatacctgaagaattgatctagaacgcccggaaaggaacttatttggtgccattgacacagcttgttggcgtagaacttgattttctgattccaaattggtgagcttctcttcaagcctaatcaaggaagttttaagtatttcaatgaacatggataatacaaaagaaaactaggacaaaatagcagtaacatgctgtaattcaactaaatgttagagattatgttacctggtcaatgattcttgaagcagttgagtttttttctctgtatcttctagctttttacgtctttgttcattagattcttgagattcattgtactttctctcgaagtcttcagctttatccttctctgacttcaatgaatcctgaaaatgaaaccatgttccccatattaacaattaaaactgacattcttttagtgacattctcatcaagagaatatttgttataacatgtgactatcctttttgttaattgatataaagagctttacctttaagccatctacttctgcttttaaagaatcaatcttttcggtatcttcaacaagtacttgagtttcttgtatcacaggaggtgcttcttctatggccttctttgcagcttctcgttccttgacaagtaatgcatttgtttcatcaaccttgctctgcatttcttgtaaagagttctgcaactttgtaacctcctgggcttttgcttcttctaagtcagtctgcaagcattgtttcattccttttttatgagtatagtctaaaaaaaggttcacagattaggatttcttaggacttaacaatattcttctacaagccatgaacattacccttaaacgtttctccaattgtagacgccaagtaagttcctccacagttttttcaagcttatcctttgcttctttaagcgcacctgtttctctagcctcctgtagaaaattaaagagtgataaagaaagtaagaaagtgcttgaataaaaacatagcaacataatattcaattctattcatcaaattgctagtgtaaacaaacttagtttgtatagttcctttattataatcaccatagtgtatgctcactctcagtaaaaatctttatacatgagactaactgacttagtactgaccattttgagctttctaagttcccttcttgcaactcttcctctccatctgcattgtgttagaattgagctcttcttgagcttcttatagtatgcagcggatctgtgacagcgccaccgtgtctgcatacaccttaagtttagcttttgtgtcttgggatgacaatttagagtgaagatcctctgcattgctaaatattatggtgtattacctgaataagtatggctgctttggtttgcttcctgaatctaaattcttttcgagcagccattgctcttaaacctgtctgcaagacaagcactgagacatgaagcgacttgtatgatttcctagcatggtatctgcgtaagtttttctgaattttaacagcagctgcctccctcctcatgttctcgaaaatcttgcaagccagtcttcctacacaatacaccaaacaacatactcattgtatatcccagtcttgtccatgaatactgatatgtaatattgatatacttgtaaaatgtctaacctctccatattgattgcacaactatagtagcctttcgcaatgcaatgaactgctttcgagcctggtgcgtccttatgcgtctctgaatagtctttgctgcactactgagtacctctgctcttcttgcatccaattccgccatctgaccggcccttaagaatacctttgttttacctatctgcatgacaccatttcaaagctaagtaaaacatgagagtcaaatgtaaatagaaaaactactcttcatatacctgaaaccct

SEQ ID NO: 395 - DNA, 1165 bp, Cannabis sativa
aataatagtttctatcttactacaaaaacagaacttgtacgacttgggggcaagaaagattggagtgacatcactccctccattgggttgtattccattagaaaggaccttagctggaactcatgaaagtgggtgtgtgtctcagctgaacacagacgcccaaggatttaataagatgttgaacaatgctgctaccagtctcaaaaagaaatgccctgatcttagacttgttatctttgacatttacaagcctgtttatgatcttgttaattccccttctatgtatggtaataaattcataccctctcttttctttcttctttgtccccacactgcatacaattatgatttagtaatatagttaaatttaatgtatgttttgaatttcttgttataggctttgcagaagcaggaagaggctgctgtggaacagggactgtagaactaaccacagctttgtgcaattctcactcattaggaacatgttcaaatgctactcagtacgtatttttcgacagtgcccatacatctgaagctgccaacaaagttattgctgatgagatgataaaccaaggcctatccatcatctgatgaggatgtctaactcgttactactgaaatctatataaaagaagaactgatagtacctagccaactgtcttaataatactattatgttatgtgtgacagacgaatttattgagaagatctagtggttgaaagtatctatgtcctttaattttatttttattatgctatgatgaaactggtatgaatggttgcttattgcttgtgaatgggaaacgtgaatgagagcactttaagaaaaaaaatgttcaacagaaagaaagaagagatttattggcaatcaaacatgagatgttcaaagaactagttacaaaaacaaagaaatgttttaaaatcaatttcagaaaacatgagtacttaatattcctatacaatgagatgtaaaagatccatgaagattctatactatatgatccttaacgttcttgcatccatgtatgttcggctacctttcttatccccttgactcccatagctcagatgtcggtgagaacacaagactgctacaataaaaatggaatattgaatgtgagcaaacaatcaactcaatttgaacactaatgaaaaaaaaaaaaaa

SEQ ID NO: 396 - DNA, 1502 bp, Cannabis sativa
atattccctgtgtaagtctggagacataatttattgtattagacttattagatcaatgtcactaataagattctgaaaattccacacccaatccaagatacacccagcttccccccacccctatccccattaaaacatttgaacacttacgtatatctcgttgatatcatatcttgaccttaaattgtctaagactcctggttcatgcaaataagcgagttttgtcatatcatccactccacatggcggagcttctgcatctttaggataaacattggaagccttaacaacaacctgcaattttccaagaaaaagacaggaggtagtcaagaaattaacagaacacaataagatctcccatatttaaattctcttgccaataaaagtaataaaaatagtagtcagaattgttaaaggaccaatgttgccaaaaacaaaactacaccaacggccatatgaccaaaaagagtggctaattaagaagaacttagtgaaccagagatacataacatcaaaaaaatgcttaaaagtaaatcttaccgttttccctgatgtgcagaggactttaatattttcaccattgatctccaaaacttcaccatctagccaagctaaatcgggatcttctatccagactagagatccaaccacagggttgaaggcaccagcctaaaattacattgcaaatagttgaattcaccaaatagatttgtataattgtattacaaaatatatgcttgtgcaagataaatcttctaccagcatgtgccactaaatttcagtaacatactatgagaaaataaataaattaaaaaattacttaaaaaatgtaattaaaaagtaaacaaagtttacttccacattcaacgcaactggtaaaacaaatagaacattcagtccatgcaaacatgtaaagagtaaacaagaaagccaaagtcacagaacaatcaaagaaagcaacaaaaaaaaatcctggcagtacccaagaaaatgcattgcctgaagcctcaaagttgttatcgaaaatccttagtatagaaatgtaagcaagcaacagaaaagtaggacgccctaatacccaaaaaaagttacaaacccagtaaaagactttaagctatactggcaatgacataagttgtagaaaggggggaagtatgtgtacccgtagaatgtaccgtgtgttgtaaaatttcttgttcaacaagtgaggaaaaccagaaagagttaagaacaatacaaacttaattttctcatacaacaataaattcttaaaaaatggcccagaaaaaagaatgtagtattgtcttcaaaattattcaagtttcaggttttttatttaatcctgaattaaatttatgaaattcagtctctacttcaaattcacccatatatcaactatgctactgtacaatcaaatcactaagtctatccagtatgacaagcagaccgcatcaatattttacagttgtggtcactggtcacatcacattagtgacactaga

SEQ ID NO: 397 - DNA, 2503 bp, Cannabis sativa
ttataagtcacattggtaactcttatcttccctcatctcagtcctctatacgtttaaacaatattcttaaagttcctaaaattacaaaaaaacctcattagtgtttctcaattaactgctgacaatcatgtttttttagaatttcactcaaaatgttgttttgttaaggacaaaatcacagggagagtgctcctcaaggggaggattaagaatggcctctatttgctgtcacacagctcattcccatcaaaagtttagctccaatgtcaacttgtcaccaagcaatcaaagtctgagtctccttgttctgcttctcctgaaaccagtcaagaacctgtccttaattctactcaagaatctgtacctaagtctagttcatgttttgctacatgtaatacgagtactgttaatacagtgactcccccatgtactgattcttgcaataataaaaatgattttttgctaatactaataagtctttatcttatcttgcgcaaaaatctgatgtcaatttttggcattcgaaacttggtcatcccacactagagactcttgcaaaaatcatgtctgatttacatgttcctgtcaaccttaaacatttaaggttctgtgatgcttgtaaaaaaggcaaaagccatagacagcaccatcccttatccgagtctagagcctctcaaccattagagttggttcacacagatttgtggggaccatctcatgttgaatctaaagagggacatcgatactacattcactttatagatgatctcagccgttatacttggttctttccattatccacaaagtctcaagcctatagtacatttcttcaattcaaaacatttgtggaaaaacaatttgatctccctatcaaaactgtccaatcggactggggaggtgaatataggtccttagcatcctttcttatgcatcatggagtccatttccaacacccttgtcctcatgaccatgctcaaaatggaagagctgaacgaaagcatcgtcatattactgaaactggtcttacattacttgctcatgctggtttgtctctcccttattggtggttagcatttcagcatgctgtttatctaataaacagaatgcctactcgtgttcttggtgatatgtccccatatgaagccttatttcacaaagttcccgactataacatgctgaagccctttggttgcacctgtttcccgcatctacgaccttataacagcaataagttggccttacgatctgacaaatgcatgattgttggctactccatgaatcacaaaggctatatgtgtgaaaataaagatggcaaagtgtttatagcaagaaatgtagtttttaataaagaagaatttccagctctcacaacttgtgattccaacaaggtacattcttcttcacaacatgtttttccctctacttcatttcttacatctcctattataactaatcacactatgccctctcaatctgctgcaaatatgccatctcctgtcactacacctgctgctgctgctgtgagaaatgctgcaccagtcgttccctcagttgctgtaccaaatccatccgttaccagtgttgatgtccagcacataaatcctgaacctatagcagccatacctgatgttcactcccatgatactaatacctgtgccaacaatcccatacagcagccatccactacccctcacactacaaatttccataatatgcagacaaggtccaaattgggcatcctcaaaccaaaagcataccattccactctacatcctttacccgaatcaaccctaccaaaaattcccacaacagtcaaacaggctcttaacaaccccatatggctggcatctatgcaaaaagaggacactgcactaaaaaaaacaacacttggagacttgtcccttattcaccttacatgaatcttgtgggaaataagtgggtacatcgtatcaaactcaatgcggatggttcaattgataaattcaaatcaaggttagtggcaaagggatactctcaaactccaggcattgactacacagagacatttagcccggttgtcaagcccacaacagttcgaacattactcaccttggctgtctccaacaattgggacatcactcaactagatgtctccaatgctttcctaaatgggaccttacaagaatcagtctttatgactcagcctcctggatttgtggatccaaattttcctaatcatgtatgcaaattgcataaggcaatctactgtctcaaacaagcttcaagagcttggaacgaaaagctgaaatccactctctgcagcaatggttttacatgttccaggtctgataactccttctatttttttggtttgggtaacaataaaatactcctattagtatatgtcgatgacatcctaattacaggccccaacaagtctttgatctcacggctggttcaaaatctcaacaaagaatttgacatcaaagacttaggaccactacacttctttctcagggttgaa

SEQ ID NO: 398 - DNA, 1379 bp, Cannabis sativa
tttttttttttttttgctaaacctcaaactgcattaaacaaagaaagcgatgctcacaggagggagcatctccccaaaacattaaaaggaaaagataacattaaaaacactaggattaatatcccaaaagttcacaaaaccattacaatcattaagagtagcccacttggccaacgtgtgcgcccctgaattctcggaccgcgggatccaaaccagagaaactcccataccttcaatcgcacgaagcaacttggaaaacgaacaagcagtagaccagctaggaggccttttctctttagcagccaccgtaagcatctggcaatcggtgaagaaacagcccctgtccactcccagtaattgcagagcctcaaagcctttaataaccgcctgcagctcgcccgcaatcacagaatgggcctccaccttgcaagcaaagagagcctgcagttggttgaaagaatttttaatgataacaccaattgcagcaccccccgcgtggaaggcagcatccacccagacctggtacagtcccgaatgaatctctctcgtgaacccaacatcctgaccaggggtgttaggtggcttatgcttacagggcttaagagaaaacatagcaaactccctttccacctgcttgtgcataatttcgaaagggagcaccttcttagagtgaaaggcttcattcctgaaacgccataacgaatagcacagacacacggcgaagcagataaactcctccttctcagaattattgaaggaggctaagaatggcgcattgaaaatccattcaacaaggtctctcccgaagtagatgttgacagagtcaatccgcacattccacttagagataaaccaaagcctcttagccacttcgcactcccaaaagagatggctagtagtgttccccgaaggacaattacaaagggcacaagaatccggttcattgccaaagatagcgcccagacgggatccggttggtaaagcatcagcatacaatttccacacaaacaattgcagccggggatgcagggagccataccagattttcttaaagataccattaccagagcagagggaattagcattaagagcccagtaaacagactttaaagtaaagttacctctcggagttagagtccagacaagctcgtcttccaaaggaagatccagggggttgaatcttaccataaccgccgcaaccgaaggacgaaagatatcctccacacccctaatatcccaagccagagagtcagcctgaagtaaatcccccaacacgattcgaggctttactgtcggattaatatcccccgcgcagatcagaacatcatctcctattatccatcttccattccataaattgacatccgactccgaaccaa

SEQ ID NO: 399 - DNA, 10916 bp, Cannabis sativa
  modified_base (4682)..(4683): a, c, t, g, unknown or other
tcttagcctccctgggaagaagaccaaccttcagagcatgagtcaaaagtttagtgatatcaataaaaatacatacatggaaataacatcttgcatgatcgcaagtgggaatcaatctccaccacattgtcaatcaaactccccatctcacgaccgatttcatctgacaaacaacaaatagggaagtaatgaagttgaatccaaaaggaaatcaaatcaaaattcacctaatgataattgccattgccaatgcccgttgaatttgagagttttcacttcaaaaaggcccttaagtaatcacatatttggcgtctcaaaatctccatcatcattcccatcaaaatccatagctaattgcaatacaacaaaatcctcattatccatgataaccagaggaggaaacacaataaaaatttggaaacccacacccagaatatcagggagaaatgtcaactaaggagagagggtcgaaagctctttcatatattttctaaacacacgattagatataaactttattatgtttaaacacataatatcacaagtatattttcaaaaataataagaataaaaaatcagggtcatttcagaagcatcggtgaagaaaagtttattttctaaaatctaaatgagtggcgttaaaaagttcatttcagaagcattggtgaagaaaagtttattattattatgacttccaaagatgaaaacctataacatactaacattccatctccattaaactagagtgaagccaatggaaaaacgtaatgacattaagttggtgtaatgaaaaactcaagatttgtgtgtgaaatgtagtggcatatattctctctacggtcagaaaaaatattatattattattagtttgttcatcatgacaaaggtgttaatgttctcctttgttacaagggctttgcccagtcatggagcattctattcctgcaatttttgttcttccctcataattcttactccatcggaactcagttgcttcgtttattccatgactcttccaacttcaggttagagacgatgatgaatctcgataaacacatgcttgttcaagtaactttcagttatggagcttggcaaacaactgtttctgtaagcattgtcaacttgaattgatttcagagaacgcgccaggatgtaattttttggataaagcttctacagccgcttcaattcgagcttcatcctgcaatgattttttttgttttagtttttggttatatttttcagatgtgagtggaaataaagcagggattgtgaatgtaatgaaaacttgtaaattaaagcttagatgtttccttactctgcctctgatattgacaataagtggcccgtatctggtttggcgataacaaccttgacaagtacatggagaacatcccagttagagagagaatcaaaatacacattaaaaatccagacttttccatgggaacttactgatgtgaagatctggaaattcaaggcaaagttttgatagaggtttagcagttgccacctgcattttcatttattttcccaacaaaacacacaacaatcagaatattatgagattaagatataaataaaattgcttacatattattttacacaattttcctttttttttgttgggagggagaaacagctttgtattaattagtaaaatggcttgttacttacatcggaaagatcagttttcaacagcctcgaaacataaggttccatcaccgctaatatgtcactggatcttgtcagttcaatgagacagtcccactgtgtttccagctccataaaattcgttgcagtaaggactattatatttttgcacttgatctgcaataaacactcgttagacaacttctgatattttccattgaaccgattttatctgtgcaagaattaattgcaagattccaacagtaaatgatcaacatggttctaaagttcaatatatgatatatcataaaaatatacaaatagaatatttgagtttctaagttcataccaaagggacagccagtttttcgtgatgcaacaattcagtaattccttccggtaacagagccatctgataaggataaaaccaaaactgagaagagattcgcagcaggaaaaatgtatcatgtgcgtaaatatgaatgcaaaatcatagtcaaacaacaagatcgcatcaaaagcacaaggatacttctgttcgcgttatgggagcatcaatagcaaaaattttcaggatagcctaactagaaaagtatcaggataaatttcacagcatccgctttatttatgaaatgggcagacaatgaagactgggatgtcaaacgagtacggggcatattctttccaactaacataaatcactttattatcaaaagtcatttgaataaggcatattaattattacatgattaaaaaaattcactaaatatttgatgtacctcattccgatcactaggacaataatcacctatgacactccttagatattcttcaaattcttcatcaggtgcctgaattaagaaggatagaacaactatgaattagtacagcaaaaatgatatataatgctagaaattagagtgtaggtaacacaacaatgagcaccattcactagtaactgaagtctgttaatgaaactagattaattaatttttttttttgattaaagattaattaatttaatttatgtgagaatgtgccaacaagattccaaacaaggcaatagtgacaataatttgacaaacttgatgaaagaataatatgcgacattaacatagtgaaatgcagttaaagtaagttaacacaccaaacgaacaccaaaagcctttgcaacaccagccaaagttaaatcagaatgcagtgggcctatccctccataaatgaacacctataattgaaaattatatcatgtacagatcattattagattttcgatagacaaaattgtattcctttatacccttcttgaaaactacaagaagggcacgagaggaaattttttttatgaggatttaccaaatcattagttgagcttttccgttcaacttcctcagccacagaatctacctggtatgagaagtgagcattgagaagataattataatgcaatgttaaaataaaaattctagctccgtaggtcaactaatatcttcttttcttttcttttttttttcaattttttccctggcagttggaccggaatacctcctagtggccccaaagtttttgagtctgtgaggattcgaactttggaacaaatgcctaccaacactttcttaaactcatccatatcactagaccagcccttggggttgtagctcgactcatccatcatttactaaacaaaatatataaaggtaattacattgacaaatcagcaaaaaagaaaactcacatcattccgaacgaccacagtttgtgacattgaccaaccgattgaatggagctttttacacagcaaaggccccaactggtcctcaacaatgccaagcctgagctatggaacagatagatagaatattaaaaacttcaaacaactgaaagggcaatggcttaaaaatctatcactcaagttccaaaatccccacacacccccataccccacatcccatctccacctccctcttttttcaactgattagtttccttatcatgtcagtactattccttttctttgctcattaaatgtaaagtgaaaaaagctacaagataacatatctcagtgattttaaagttaaattactaatatgcaacttagagaatagagatctaatcaaaactaagatgtgatgcaaagacaaatcactgtatcaaattcattgacttttaaaagtaggaatatggaatgcaaacataagaaaggctgtgtagagacaagggacgcacaggatctcatcacccacagctatggctgaggccgtgagtaagctatttttatgcaaatccgcactgattagaccattgctaaaggaaggtgaatgcccagaacctgaagaaaatttgttcactctcccagctctctctaatcttccatcagaaagtaagtatgcgggtctaaatttttcttcactgctcaaggagttgctgacactcaatagtgcattaggaactgtgtcatgtatgctcccaattgaagtgtaactgtgaagatgaagacagacaaaattatctggctgaatatgattaagaaaatgggaaaaactccatgggataaggatgaaaacaattcactgagaaaaaatagagaaaaaaaaaagaaaagaataagctgtaactaggacagcaaatactaaagttcagtagagaaattacccttgatcataaagactgcagtattgaaccttgcatgccaaaagaaaggcccaaacatctctgccaaagaaccaaagcaagaaaatcttcaatttgctaagtctacaatcatcatagaaacattatagcacctttaacattcaaatgtagaattgttggcagtgagttcatggtcaatacagggtgacaggaagctgggaaagggggctgtgtggggttagtattcagggctcattaagctgtctctggagataaccagcagttaaagattatgaaattttaagcacccttctaagaaattccagcatcatttctcaggaaaacgatacttatataaagtaaacatgataagctttcattttcatgttttttttttnnttttttaaaaaaaaaagttattatataaatatatacatacacctatttgtggttctctgtcattacagcagctaaaactaattataaatagcccaaacaaaggaatgacacaaccaaccagctacaattgcatcacaacacaaaagacataaaagaaaataatagagcatcaagaccccctacgactacttcaatgcatgatctaaaacaatgtcaaatttggtaacgaacacaatatttgcaattgtgttccaatgcacaatagcattttaagatacaaattaatataaaaagaaaattatcattaattaaaatatttaaaaataactaatagcaatatggtaattaaaaagcagtgtatcttaattaaggaaactggtgctatttctaaatgaccgaaaaaccccttccaccattaaatagtttgtcgtcacacctaagccaacactcaatattccattattatgtaagctattatataaggatattagtaatgctcggacaaggagcaagtttttcattgtcagtaaggtttatcttgctccctgaacaagttatctgtaaggcattctgttctaatattcacatccatttcataaaaaaaagaacctacagaaagaagcagagagatcacgcacgaacctgtatgaccaatctaatataggattaactctcataaaaggaggccatcctactgaacttggggagaactgctcttggccaacctgcaagattaaagaaggccgttgggatacaactaacaatacagccgtaccaaactcttaacagaaacttaacagagcacagcaataataagtagcctatcagtaagataatgtttttatgaataataagataacacagttggctgtgatcatttattatagaattaataatgaaaataccgctgtaggatcaccaatcctgacaccaaggaaaatggctcgaattggattagcctttagtaatgcctccaaaccagatttgaaatcagtgcgaatgatatccatttgcaaaccatagctgcataaataaggagaagtcaaaacatttatcagctggtctaaagaagattttacaaacacattttggaaacaaaaataaattataacaaaaacaagggaagtatatcacactttgcagcagcatcataagtaaatgagttgatttcagggaatgcagatgagctttcaaaatatattgttcggatagggaaatcactaggacccccattggcacaattctgccctcctttgtgcaaaaagtagccagccctaagtaggtgcaggagaacctaccagttatgttaatggcatatcatcagtatcaatgaaataaaagtgccacacctaacaatgaatccacatgaagatttaccgttgaatcttttcctccattaaagctgaaagcaacttcttcgatcctgtataattaaaatactcaaaccatattagagctctataacaaggtataataattatagtactatgtaacgtcgtccataaattttcattgatcgtccctattactaccttccacaaccatcaactacccaatggagcatcaagtattgatgacactttacagaaacataattttgtatgaaattaaagaaaatgcccatgttcagagtgaataccgaatactcacatgaattttaagataaatgtggtcatttatatggactaattttataggttcactgaactccttatggggcgtttggtatgaggtttgacttgatgggaatgtaaaatttaaattaaatttgaatgacaagggatttgtgtttccaaataagtctcactttttaaattaaaatagtggtaatgttaatcctctcaaacgtgtttcatattccctccaagtctactccctccaactctactctctccaactcaaactcacataacaaacaccccattaggtggtgtttggttggaaggaatgaaaaacatagctagaataagaatggcattccaatattttaaaataagaccaaacaaaggaatataataaaagttgtttcctttccattccattccattttattccctccaaccaaacaccaccttaatgttttgaaaaacttggtaggttaaaagaatcaagcaaaaatatgaggtcatatttccaaatgcacaaaacagatatgtagttatgtattgaacatcactgaaaaatattctagactgagtgaccaaaattccagcaaaaccgagaaacaatgtgtaaaaaatcataacaacattacaacaatagacaagtatgaacaaggaatagaaaagcaattgtccactgacaaaacgcatcgagcaaacacctgaatatggacagtcaaaataacatttacacatgtgtgagtggagattccatcattttttttttctttctataaactaaaaataacaagtcgaggaaataacttacaccatgttattgctaagaaataaccaaatacttcaatataaatgatagttgtcgttcattagctaaacatgttgcataaattgacataacaaattgcatcaaccaacatgaaactgaaaattaggaaagaaaaaaacattgtcaaggaaaaaaaaatgttttgacaaattattagtcaaaggttttattgcatgagacctcaagaaataattccatcgctcatgtatgactaattcaattatagcctttcagcagcttaagcataaaacgagtttaagcatttttcttacaatatcaacaattcaatgattataattacatagatttcatgtccttttgtcattgccagggataggattaaggaaaaatcacaataaagctcaagtccaaaccccggatccataaaactcaatacccacttcttaacagagacagtaaacatcaaactaagaaaaccaaagaacaatggcaataaagaaagaaaaaaaacttacgagtagagagccagagctctctgaatcacatagatagctttgttgtactttgttttgagccatcgatcatcactttctctgattgctttatcaatctccatcaactctgacatgcaaattccaataaaaacaatcaaacagcagccaaaaaaagggcatcctcagatttaataaaccaatcaaatgggttctccaaaatcaaacaaatttatttcttttaactaaaaataagcaaatggggtcccaataaaatgaaggaattcaaaaaacacaggtgaactatgaactacaaatttatctctgaatagtcttaccagtgatttgaagtttggaagagaaaagatggtattgaaaaactgaaaatgtatgagatttttgtgaaatgattcttctatgaatcaaaaggaattgaaatatagatatgttagagtaatagaaaggtgtttcttagttgccacaggatgtttatctgagaggggaaaagattgtcttttttcccaaactttggtttctttaagcatataaaaaatctctcgagaagaaagccaagtcattgaaaccaaaattggaaaaataaaaaaacaacaaataattctattttgactttatatattttatttcaataatactaaataaaattcctcaaaaaacaaataaataatactaattaaaagttgtctttctttccttttttttttttttccttcaatttgtatgtaaaaagggaataatatttttttgtactatttttttctagaagagtgctaccgtcgacatcttgttacaaccttttagtcaacttctacgctcgaaaatacatataagaatatttttttttcacaggagtgttcgttatgcttacaacatcatccctgtaaatttttaaaaattttcgaataacttaccgtactggaaatacgtttgaagttttttgaacgcccatggtaaactaaaatatcaggaactctgttttcggtactgtaaattatttaaaaattttcaaaaatttacaaaaatgataatttctgacataaaaattaattaagaaattgtaataaaagattataattagcatttttcttttttgtatggaaaaaaaaacagcattttattgtaataaatttcaagctcagtcgaactttctatgagttttagtgtataaaattttaaatgaaatttgacagttggcccatctcatgcacatgatattgattatatcctcatttaattcatattaaaggtatataatatatgcaatgtacagttttctttttattttattaatttgtggatattttattttataatgatagaaacgcgtataaaactctttcatcttgttatcatttttatagttatataagagtagtgcttgtcacaatcccatatgattacttaattaattataataggttcagttgacacataattttacagtcttttacatcattttcacaccatcggattaaatgtaatcaaatggttataattaatcaatctgttcataataattttttttttgaaggaaactgttcataataattaaaatatactatgttcaataacaaagttaaattaaatctatatattgctgggtaattaaatctatatttataaacctcaagttgttttatccatgctagaagaaaaaattgaatacagcaagagaatgttaatttgaatcaataagtagaactttctgatatgttgaattcaatatgatggaaattcacttgaaagtttatcaaagaatgaaatttaagagctattgaaaagtctttattctgaagagacttaacaatacatatatgactgatcgtatgtagattcatatcataaaattatgagaaatttggtatgttttaattgctatatatttttatgtttaattctttttactaatttaatgtttttattaaatttagttgttaattgccaattaggtatgccactaggcactcatgtgtacacgagtcatatttttattagcttaaataattttattaatttaagtattataaaaaattattttaaaattaaaaataaataaaacaaatatttttttctcttttctttttagtcatcagaattttatttttaaataaaaaaattagaaaaaaaaataataaaagaaaccctaaggtgcgccagttttatttgtgaagaagaaagataggtcactgcaaatgtgcattgattaccaagagttaaacaagttgacaataaagaataaatatcttttgctaaggatatataatttgtttgatcagttgcacagaaagaccatcttctccaagattgatctttgatgtggttaccaccaattgaggattctaaaagaggatattcccaagactactttttgtactcgatatgggcactatgagtttctagtgatgtccttcgttatgactaatgcagtagtagtattcatggacttgatgaacctagtattcaaggactttcttgataactttgtgattatgtttattgatgatatcctggtttattctaagtcagaagaagcccttaaacaacacctacgcatggtattgcaacgtctgcaagagcacgagctctacgctaagtttaagaaatatgaattttggctatctcaagtaattttcttcggacatgtagtaagtaaggatggaatttaggtagatccaacaaagattgaagttatttgggatcgaccacgacctaaaatagaaactgaggtcaaaagttttttagggtggcttgtttctacaaaagatttgtagaaggttttgccacgatctctactcctttgactgagctaacccgaagaattgtaagtttatgtggactaaaaaatgtgaaagcaacctccagaagttaaaggagagattaattaccacacaaggactaagttcaccaagcagtgacgagaagtttgtgatatacttgatgcctcgaggtaaggatatggttgtgtgttaatgtagtcatgaaaggttattgcctatgcctctaggaaattgaaggaatatgaacaacactatcccactcatgatgtagaactgacagcagtaattttttccctaaaagtttagcgtcactatctatatggtgaaaagtgtgagatttacactgatcataagagtttgaaatacttcttcactcagaaggatctgaacataaggcgacaacgatggatagagttggtcaaggattatgactgtgaaatcctctaccatcccagtatggcaaatatggtggtagatgttcttattcaaaaaggcccagggcaagtttctgacttaaaataaatctctctgaagttag

SEQ ID NO: 400 - DNA, 2462 bp, Cannabis sativa
caaagacaaaaagaaataaaaataggagaattttcaattatatatgttatacataaaatattaacataaataattaacgctaatactctttttttataatctaaatttatataaaatttgatgttaccagttgtaaatgggggcattcgtgaatttaattaggtgatttaaaggtttttctcaactctttaaaacatctcaaacattcaaaaaaaacgaacacaatgagatgccgaaaaaatagtaattagttactagttactagaatcaagtcttcaataactgagttttcaatagcgctatcatacatttacctccaaacacaattagtaacttttgttactaatttaatcgtgataaagagatgagagttacataattatgtgatcatcaaattaaaagatttgtaactcttattttgtgatcattatctacacattttgtaacttcataataataataaaattaataatttatcacacttcattatttaataaaaattttatattatataaactaatataacaataaagaagtagatgtagaacttaaaaaatttaattgctacagcataataatatgattattttaattaaagggcaaaacaacatgttaagttttcattgaatttattgcttacatcaaaacaattgtgtttcctaatattttcattttaatacagaaaaattcatttatatatatggaattctacttattaatacaaaacaagaatttttattattattatgaataataaaataaacaaaagacttgaaagatgtggcaaaccatgagcctcctgtataagtatagtataaataacatacaaaacaaacaaacaatcaaataataatacattagatcgattgattttgattaaaacaaaattagaattcaattaatttaaaatgtaaagatattataagtttaatatattttgtaagcttaccaaaaatcaccccacttttcctgatcacgagctagttgatttgctatttaatatagtttgtaagagagattttcttttgcgacgttgctcgattctatattgtattcctcttgtatttttatatagccaataatcaaacttttcgctataaataactatgtatcccaaagatattccaattattagaccacatccatatcccaacatcacaattttccaatctaatattatgcgattggtatgctcctctccatgatcaccatctcgttgttgcaccctcgtgttgcatgatttagacaaaggaaacccacataattttaagtttccttcgtatgaatcattattgaatgtttcgaattggttcccaagaggtattggcccttctaatttgttatacgaaaggtctaagtatgaaagttgtgtcaaatcagtcatttcacttaaaatttttccacttaagtcattcgaagaaagatctaaccttttgagattacttaaatcaatcaatgacattggaatggacccctttaatttaatttgattaaagttgagccctttgagtgattttagctttccaattgactctggaatctctccttcgaaattgtttctagaaaaatcaattgttatgaaaatacttaagatcctttctagtacacgctcaaaacctttcattacaacaattacagaatcttggtaataactttctccaatgtgtgtcaagttacgaccgcttgaatatttgtccatcatagctttgaaactttcaaaagtctttgttggtaaaggaccactaaatttagtgccacagatatgatttgtaactttcaaaaacgagtttatgaatttgagtaaagcagagctttgagcagaattacacaaatgattagaaattatttgagaagtacacaaatgaaaatgtacaataagcaaaaggagaaaccaaaagtaactcatattttctttctttgttttggtgcttaaactagtttttttgatgtataatagtttggtgtaattaattgagtttatttatagtagtagctagttgttacatataggatacattaattaagcactaatctcccacttgattattataactttggttccataaaaataaataaataaaaataaaaagcaagactttgagtcaatgatagtattttggtaaatgtttgactcaatttaataaacaaactagtctcccactattattattattaaaagaatacacttcatttctaatataagtacactataacattcaaaatttatttatatattggaattaatataaggggaaaagtttcatatttttagatttttaaaattacataagaaaaacaatttaagataaggagtaactctttacaagtaaaataaaaatacaatttattttgtatcacgtatattaatacaaagataattttattcttttattattattaaagaaaacacacagagcttgaaagacatggctgatcatgagcctccttctccttgtaaaatc

SEQ ID NO: 401 - DNA, 4550 bp, Cannabis sativa
aaaatattatatataaataaacttttacgatttatcacctaccattcttgatggtggaggtttatcgccgatcagtaccatcctttcatcttcacattctttttcatcttatcctactatcttagaaaataaaataagcaaaaaaattcctaaatcgttacaccttgctccaatcatctcccttatctgttatgtcggtttttattttcggttgctatatctctgccgttaattagaagagagagagagagctaaagaataaaaaaacaaaaacaaaacaaagacatgtgatagaggctgggttggcttgggagagaacagaagaaaaaaaaaacaatagaaaaaaaaagttaattaattaattttaaaataatttatttatttttaattaagattatgatttagactaataaaatatcaataagtaatatttttgggaactatattagaacggttaaatttgtgagaatttttaaaattaagaacttatctacattaaagagaattttgtggagatatatacatcaatttaatattaacacatgataattttaaacaaatctattaaaataaagaccaacaaacttataaaaattttaaatttaaagactattatggttatttttcaaaattaaaaacttatatacgtcaaaataattttgttaagacttttgcccttgctaaaataagcttcctataagtttccaaataccaaaatttaacaatacaaaattgactttgcatatatatatatatgtcccacttgaactgagtgttcagtgttcacatggcttcgttttttattaaatatccagacaccgtacatgttcttctctttatatatgttaaaactaataactttatatatatataaaatattaaatatacggtgcgttctgtatattaatataatgttgcaattaacgtttttttttctgttgaagattacaagaaatattattaatttaaattaatatattttttaaataagtttaattaatattaatttgttctaatctaagctagaataatatttataattcataaaaagagtttttcattagcttatatttattatagttatccaacactaaagaaaacaaacaaaaacaatatactttctataaatatataccttttattttaaagctaacgaacagctatttaaagcttacccaattttgtcaaaaagaaaagcttaccaaacgaacgtgtatagttcgatagcaactcgtgctgaagcctcttcatagctcatataattgtgatgataagataagatattaacatcaaaaaagtccaagagaagatattacagctccaaattgagaacaaaaaccaaataccaccacaaaaacgtttagttgtcgtcttatgaatgaattattgtttatatcttatatggtgtgatactgtgatgtaacaatttggaccacttacaatctttataatgcaccacttctttccacttacattttaaaatatatgttacttttaataatagtgcttttctctgctaattcattatcacttcttatatatatatatgctatatatacgatattcaagaaaaaaaaatcactattagaaaaataaccaggttacaaaagtttatattgtatgtatatgcaattgatctagactaaattatcggcattttgcagctggctggatggcttagctcccaccactattttttcctttgcttcttttctaaactgtggtgaaacattctttgatgggtactactttctgtctctctagtgtgtcactgtccatcttagtcaccgttttttctctttcactacaaaagtgatcaccactactctctacttgatcaatcatatacacgattgatagaatcgatcgaatgaaattgagataataatattacaaaaaaataattaatgaaatgatatatctaatcttaataattaacatttaatcatatatgtactcaaaagttctctttgtgaaactcaaacttggtcgaggtcttgtgggagaagtcggaagccagttgtttgagttctttggtcagtgccggtgccccacagtaaaacacgcctgcatttacattaatatgaccattaattgctatgaaattaagataaaccttaagaacaaaaactataaacaaatatatttataattattaacggtactttctaaaggttagtttcttaccaactcgagaattagggtgttgaagagcaatcctcttgtacacttggcgccagtttggcttggcaaaatgcgatttgacacgagtgcctgagacaacatccacaccactcttggcatggtgaagagactgaagcatggcaatgagagctgatctcgcatctccttcttcgtatacactggtgcagtagttgtggagctcaatgaggcctctctcgtccatctcagccacctcattaagtatccctttgaaccactcgaacgatccctgttcccttgtcacccagtagtaataagctttctgggtcctgaacactgacgaagacgagggattattcgatctattctcctcggccttcatgttgtttatgatgtctttgacaatgctcaccatgggagtggctcctatcccaagtccaacaagcaataccacgtcgtatttcttgtagtcctgtgctggagctccgaatgcaccgtcgatcaaaatcttggggaagctcgggttattgtttcccccaacttgaatgtctgctctcaatagaccgctctttccacccgttggaggctgacaaatctgttaaaataacatcaaataatgatattaaaaatgatatacatgaatacgcatgatatgctttcagagattatatataggctaagttggctgacctctgaaaagacagttttgagttgccgagtccaatcgccgagtgttcgaatgtgaacgctcaagtagtcatctccaggcgctgatgtgatagaaaatgggtgcctgcatatacgcaaacatatattcatgatgaattagtctatccatattgaatcttatacaatgcaagaaaagggtaagttagattagtattttttaatgatgcataccattcgaagggggatacagcagcacagttaacaaacatgtactgaccactcttgtatttgaaaccctgtggctttgtcatgtgaattgccaacacatttccaggatatacagccactttcagaatcttaacagctttgatgcttgatctaagtgctctgatcaacctttcacaagcgtaaaggcacactggtactgccaaatacatccatgtctgccatatataatcaaacagttgtaattcattagaacattactcgttttatagaatcatcaatatatagctaaaattgaattaattagttacttaccgttttttgataccatgtctttgtgagatagagataaattccatggacaataaggagagtgtagacaatgacaaaaaggtgatgggagtaccaaaaggcattgaaaccagtcagtctctttaagaacttgggcaggttgagcttgttccgcctgaaccatggggtggccagagtgaaagcaatggccatcaacacaaccattataattccagtcacaccttcgactcctttaacaaaccaccaatagctttcaggctgttcttcaccaaagtaaggttctatgagctcgtacttgtcctctgaggcgtcgagaattcgaggaaagtcacatgtcaagtgagcccctgcatgaagccccacgccaacaacgattgccgcagcaatcaccttgtggaaattgagattgtcatcaaaaggaacaacgacacctaacttggtcttgttcctgagccaggtgatggtgtttcggcagacaggtagtaagatgagtgccatgttgaacttgagtgtctcggcgcctcctttagcaatgcaaacacaatatcccatgacttcgaaagcagcctcgttgttcttgtactgaataaacttataggtgaaaagacccgaaactattccaagccacaacatcataacccacaccctttgccaattgtccattaaggagtacctggtcctctcccaccaacgagtcaaggcattgctctcctgagtcggttttagtttctggctaagcatctggcttaaaatcctgctgtcggtcaccctgaccgattggtttggagcttgaagtaacaacatttccaaattatgaaccatgatgtaaccagcgttttcagggtctagttcttccatgatcattgctgcatactcttctgattgtttctgaatgttagatagtttgtttgccgaagcgctgagactgataatctgtaaacacaaaaaatcgaaacagagtaattaaattaatgtttacgagaccaggacatatgacattgataatgaccatgtataatagttaattagttaaaataaataaaataaatcattttacctctctgacttcttcctctgtgattcgcccatcagcatctctgtcaaccctgcataataattaataattttcagtataaattgtgcgcatttaatttattatgttatgatagcattaattgtgt

SEQ ID NO: 402 - DNA, 4866 bp, Cannabis sativa
  modified_base (4254)..(4263): a, c, t, g, unknown or other
gcaaattagtcagtaaacttgttacaatctgctctcgaatttcgtctagtagatactattgtggcacagaggtcatatttcatgtgctctgacccactctcactccccccatacaccctaaacgtcaatctaattaatcaaagcacaaaaaaatggagtaaagaatcatgactctttgataattttggactttaccgctcatcccagctaattctatgatataaatctccttgaaagtgcatcctagtgttaaagctatgcagaattttgtacagctcaaaacaatttctctttaattaaacatcaaataaagtgaaaccacggatttacgtgagatcacttcaaagctacagaaaagaaaaaatatacaaacaaataaaagaatttttataacccatagtgtcttcagaggtagttaagagtatacatctactttaacataaggtgtaatgtgtagtaagaatgtactaacactttttttttttctactagaataagaagccccaaccaggcaataaggaaaacaagtcgagataaaagaccaaagtcatttttctaattattcagatgcaaagacatcgatgaacctgggttatctcctccgaatattctttctttttcagcaatagtattctacattttgcttaccgactcgctgatcacggtgactaaagtggcagtatcttgaatatgtatcctatggctatcacttaggatgtaggtagatgtgtttattgttgctttgaagtttggaaaaggaatatagggtcaatggtagtaaaggtgtcctgttaatgattgatttcgaaaaaagcatatgataaagatggagcaaagaggatacaaagctaaaatggcaattgtgaatgacatggtgctaatccttggtaacatatttgatcaggatttaatggtaaactaaggggaaatttaaggtaatagatgaccctctatcacatttccttttttatctttgtggcaaacggattgggaagatttgtggataaagcaaagttgaaagttctctttcaaatgctagtgaatggtagggataaggtcgaacgttgaagtcttgcaactacagtttatagatggtatattgttctttgctgaagcaaaaattacaaactttcccaacttaattagattgtgggaaactttatgctcaatattgaaagtgatgactaatatggagaaaagtgtaaagagacatttctatagatttctccaaattgttgtgttttctgcaaaaccaaattggaggtctagcaatcaactattttgatattgttccttcacctgggatgccaatgcaaaattcgtacaacatataggagaggaatcggcatcaccagaacattgccaaattattgtacggcaagtggatgttatgggaaaaagaaaatcttaatctccttaattaataagagcggggcactatgcatcacatgagagctaaatgtgagaacagatgagatatgaaccaactcttacacagctccaaaatactaagaaatagcaagaaataaatattaggtaatagatgaaaattgagatgagttggtataccttgcagttccaggaagtaaaacatcaacttccatgtcacctatagagtatgcttttagtgtcttccctctgatgtgaggacctggtgcagtactaacagagctgggttcatgggttactaatcgtagcccattcggaggaatctggaactcaccttgtaaatgttcacctactactcaaatttgattaatcaagaaaaaaattagaatacagcaataatttcctgttcgtcaccaaacaaaacaatagttaaaatgttctatgttagacaacatgcactcatgctcctcaacattaaatcgtgtggctgactcccacgttatttgtgcaatcgaattccaaataactaatacctacacatgaactaccaaaaggtagcattacaggctttgaagtatgagttgacaataaggaagttaaacaaaggtgttagcttggtgtttcttagaagcaagaccagtaccttcatgtctggttctatgtagaccatacatcttggtttaacagtgccatgtattttacttgtaaaatatattttcttataaaaaaaatgccattcatttgagctatggtgaaacaaaaacgcttctacaccaaaatcaccaaattctttaacaattaaaagatataattaggaaagaaaattgtctgcattggagcctaccattatgggagggtaaattctcctgagtgtttgctggatcaggaggttgcaaggacttgaacctttcaggagctctaaaatgtaatcccaccagaaggctataatcaataatctgttgagattctaagaacttacagtccaataatatttgcctgcgaaaaaaattaaaggattctaccatgttagaatgtaaatcgacattatttacctaacagatgccattacaatgcacaaccaaatataatagttaattaatgaatcaaattttatattattttattaatttataagaaaaaaataattttattgtatattgtaaactcaaccataggagtccccagtttacattaatcacaccaaaacaatctcagccagaaataagagctaaaaactaagaaatgcggtaattcccagcaacaataatattacatcaactttttctatcaccaccactgcagttaacagaatattaaacagatgaattatacaggatttgcttagcaaaaaaaagtacaactaggttttttttgccgaatgtacaagtagtttgtccttgtccaacaaagaaaattggagattttgtttagtaggaaaaataaaataataaaccttatacacatataaacttctatagctaaatttatttggtcaaatttatggaaatcatgcatgttggtctagacacattaacatcagttcattttgtgtttcatgtcattaacttctattattctcaataattgtagaaaaacaattttttagcaatatttgaacttttagcatttaacaaaccgaaaatgggactataacagtggttacattggaaaaaaatcagtacttacttgaaaagggattctcgtaataatttgtccatatgaaactcatatgccagatctagatctttcaacgtggtattctggtcaactttatcttgatctgttgttctcccttgagttgaccccttcaaatcatagcgacgatgaatccgtaattcagtaaagaacatattccccatcaccacaaaacgtacctgaaaagaaactgattagcaaaggcaaaaatttccagataaatcaaatgttagatgcatgagcatctaaaaatgagctagatgtttgtgagaaagtaaagcagatcattggacagaaaccagtccataccttccttccagctcttagttttatccgatggagtccaaaaaattttgttatgagagtattttcatgctctcctacatgactatagtatttaggcaacattctgagcaacacctacagaaagatgaaattagaaggataaataataacagtaataaagacagttaattatatcattgttctgtagcttgttcaaatcagcaaggtaaataaacagctaagtttattttcaaatgaaaaataataattataaaaaataaccaatgaaaaaaaaaaaaaagaggacgtgggcaggaaaagaaaaggtttatgtctcatataacacagcaatattttatacacctaaccatgcacgtaaattgaatccagatgaagttaatatactttagtcctagcaatatgtaaagctgataagcctagtattaataataagaaattaagtacttattgacacaactcagtcaaatcacttattataggagaggtgagggctggcgaggtcatatacatgtaagggcaaccacacagtcaagtctgcaaggaaaaggttccaccacttttttttgcattacctctataacaaacaccccagttggtatgacgtatattgaccatcttatcaataaacaaaatgaaaatggaatgtttagccacatgagtaaaactttcatagtggatcctatatagggtgccaaagcattgttttaattccaataagtgaaaaataaaaggcaatcctacggaccaaatgcttagaaaatgacatacgattatgattttaatatggtttcaaattactacccactgccttgatcattcatagctttttttcatttcccaatatatatgagagagagagagagnnnnnnnnnnagagagagagagagagagaatgaccgctaaaaacagtaccaattagttagacccccaaggaaggtatgtctcaaactaatattgtccctggattgttttcaactctaaggttcagccaatatccagcttacttgtgaaagacaataaggtatttcaatatgaaacctcactttcacattactatcctatttttgtgggcttccataagtttgttatcatatgccaacattaaccctgagagagatacttgcaagctttcaaacaattgatatacagcagcaccttattcgtactcttagactcgaaaataaataaattgtcaaggttgacacagatagacaaataaaaccgattaaaagctaggaatacaaataattgactgtggaagtttgtgttcaaaccttaagttcagatttttttaatgtcttaatcacaaatctatcatcatgagatagaaagaagagactcccactttttccttgagaagagagctctcttaaaccatcatcaccgcaaatggacatcatgtaatctgccgcatccaacttgaacatctccctcaaattcctaaaataggctaacaaaattagaatgaatatacaa

SEQ ID NO: 403 - DNA, 4049 bp, Cannabis sativa
atcaccttattattggtgttcaataataatgctctatattaaactatatgcgacttcataattaattgtactaataataataatataatacgaagttgttaggtactttttgatatttatcttgttgctatggttatattttattatttagaattttatttaacaaaaataatgctccaatcactaatttttcattaaaataaaacgacacaattaaatccaagtaacttcaaatattggcagcttcttctttagttgacaagtgcctttagcttaatgaggattgggacatactcccaatctcatttatatatggacacatgattatgtacgtgtcactatgagtttaaggttacccaccagtacacactagcttgttggtctctattaattttgcgtgaattaagcaaaaatatatagaataaaaacaaaacaagaataatatgaccattttatcattaataaattcatgactgagaatagtttacaaaagttttcatatggaattatttaatttctccttttacttttcttccttttccatcttttccttttcttaattctcaattttattttatcaaaaattaaaaaaaaaaaaaaatcttttttatataaaaatatttgtatatatttatgtgcattttggggcatgaactactgcatgattgaaggataattttcccctctaaagctgatcaatgtgatccaaacatcattacctttgttgggtcttccatattttacgatgactaaagaataatactatacatgcactcattgcaatgtgggcaagtcacttaaactttcttttgactaaaaaataaataatctaaatcttctaatagttgctttatatgtcaaagatgaacggctattattgactcttaatacacattatattgtctatatttaagaaatggatgaaatgattttcaactttttttcatactagtatatataaagtaataattgtatcttttatatcatctctcaccaaaatttatgttcatacatttatatttttggtatggtccaactgacactttaaaatcttgcatgcaaatccttttgtaaccacacaaacacagtcatgacctacttgatatactaacacaaagcaaataatacacctttcattacttcttccacgagctccatatgccattgtcccttctaaattaccgtaatacccttccatacgtactctgttcactattctaaattgaccttaagtaactgagtttcattttcgtgaataaagacgccgacactaaatcgtaaaaattggggacattttgaaccatttcgctataaactcgagcataaacccttaaaaaaagcaatctcacttcccacttttaacactttcactctactatatcagttttttctttgtaatttattttccacgtggcaatcaaatctgccaacattaaaattgagtcaatacgtgtcacctttatatcaatggggaccccactttagataccgagcatcacgcctttatggcgcattatagcatatccggcgttccaaaaccgacgctctctctctctattttattacacacacggtctctcaccaacccaaactctcaaacccaacaagaaaaacaatagagaagcttacaaatcaccaatggccgccaatcgtcgcctttgttaggtaatcctatcgagtcgagacaataacaagtaccattggtccctactcaaatcccaactgtccctttccagtctccattccttataatggtctcccccgagttctcaccagctcactacgaaactcctccaatggcgaaacccagtcttcgtagcagggcctcactgtggatttcagacggtttgctctttctgggtggagttttcattgcccttttactcgtttggtctctcttctccattgcgagtcctaatcccaaccgcggcaccgattttcgacgccccatcgtcaaaaccagaggagatgaagaagcgctaaaatgcgccgggagtgtgcaaggagctaacatgcgcaaccaggactcggtggagagaactttctacgacgacccggagttgagttactcgattgagaagccggtcaagggttgggatgagaagcggcgcgagtggctggggacgcacccttcgttcgccggagcaggagatggagcagcgcgtgagcgcgtcctgatgctgacgggatcacagccgtccgcgtgtaagaatccaataggtgatcatttattgcttaggtttttcaagaacaaagttgactattgccgaattcacggctatgatatcttctacaacaatgctctgctccacccgaaaatgggctcttattgggccaagctccctgtggttcgagctgcgatgatggctcaccctgaggccgagtggatctggtgggtcgactcggacgcgttgttcactgacatggatttcaagctcccactggaacgttacaaggatcacaacctcatcgttcatggttgggcccatctgattcacgagactcacagttggacgggcctcaacgccggtgtattcttgatcaggaactgtcaatggtccatggacttcatcgatgtttgggccaagatgggcccacaaactcccgattacgaaaagtggggaggtattcttaggtcagcatttccggacaaggctttccctgagtcagacgatcagacgggtctggcttacttgatctacaaagagaaagagaaatgggcggacaggatttacttagagagcgagtactatttcgaagggtactgggaagagatagtaaagacatatgataacatcaccgtaaagtacacagagttggagaggacagacgtcagactgagaaggaggcatgctgaggtagttaacgagcaatacggtgcgtttagagaggagcatttgggtgaggtagggtacgggttaggcagctggagaagaccttttattactcattttactggctgtcaaccttgtagcggaaaccataatcaaatgtactctggccaatcatgttgggatggtatgcgaaaggctttgaattttgctgataatcaagtgcttcgcagctttggttacatgcaccctcacttacttgattcctctctttctgatgtgccctttgattatcctacttaatagatagtttatgtatcaaacaaaaatatagaacataattttagcctatgtatgattttgatattgaaattttgtaatttttttttttttaaggtagttgagattgagaatagtagaatatgtacattttggttgaccgtatgagtcgttacccttcctactcccctagtggggaaatggcatttccaatatatgcttttatcaaagtatgttggtacttcaaataaaataatgcatagtttaatgataatgtttttcactttttatttttttatttaaaaaaaaaaaaaaaaaaactcaaatatttgatggaagaatgatgtcctccatttataggttagtgtcacttgtgtaatgttgattgagtattttatgacacttgtttttgggcatatgagaaatgggatagaagagagtaagatactcctcatcaaaactaaattggttattttattatcttgtgccagagataatgagatcatagcgaaagaatcgagatgtatattatattatgtatagaaaaggaaaaaaaggaaagtttgaaatcatttccatgtatatggtggatatgtataagataatataatgcttttgatagatttgggtatcttggttttatttttaataagatgctgaaacatagcttttaagcattttaattattggtagagagaccactttatgtctggctctgcacactaataaattttgaaaacttagagtggtcaccactgtccactctcaggtgggacattacaatataatatttttaatagtaagcaattatgttgcaattggtcacaaatgtcatttaagtagaaaccgagatctatctacaggtaatataagatttaattttgtaattttcttacatggttgtttcatctccattcattttttagggttttatatata

SEQ ID NO: 404 - DNA, 1092 bp, Cannabis sativa
tactgtaaaagtaatctcttgtagtttgacagtaatatattaaaccatgaagatccaaactacaaaacaatcactagtagaggctgagcgtaaaaataaaatatataaagataatcctggcgcattaagaaaaatgtacaacaaaaaaagcaaataaaaatttcaaagaaatgcatataaagcctccaaacgaccatgtgccccccatatcaaccagatgctaacttagttgtagaccatgtacttaggtgtggcgctgaacttttgatatcccttaatgactttgttcacagcatcaaggaagtctttctctgttactgtcttccttcgtgctcgaatggcatacattccagcttccgtgcaaacactcctaatatcggctcctgtgaaagaaagactcaggtgtcaagacaagaaaaccgatgtttcaaaaccaaaatcatatcaaatctcaaatcagcactgacacccatgaccattagaatcagaataaccaacaaatagagaatgatagatggtctctctgtagaagaattggagaatatagaagcttcaaagcatcattcttaccagtagaatttgggcagagccgagccagaagttcaaatcggatatctctttcacagttcattgttcttgtatggattttgaatatttgtgttctgctctccagatcggggagaccaaactcaacttttctatccaatcgtccaggacgaagcaacgctggatctagtgtatcaggcctacacaagtaaccagtgagagttaactaaaagcagacaagcaacacatagagttacaaagcacgcaaagtgattctctaaatcccccatttcccataaaataaggataagatatgcaattcgtagcaaaaaaaaaaggttgagttatgcacctgtttgttgccataagaactttgatgtttccacgagcatcaaatccatcaagctgattcacaatctcaagcatagtacgttgaacctcattgtctccacccacaccatcatcaaaacgtgcacctccaatggcatcaacttcatcaaagaaaacaatgcatgccttctttgaacgtgccatctattgcaaaca

SEQ ID NO: 405 - DNA, 3224 bp, Cannabis sativa
caccttttattaattaacaagaaaacttttggtcaatgaaatccatgtcacaatacagtaacaactcaccacttcattagttattttgaacaaactcaacaaaaagccaaaaaaaattccttaatggttgatttaagtaaaacttttaattgtacaaataaaagagaggcatgcctacatggaggtatacagctatgtgcccaaaattagtagatccaaagatttatattttacaagttcatcaagctcaatacaaaagaagctgtgtcagggatctagagaactactatattaattttcattagttggggggaagcaaacacataattatcaaaacaatcagacttaaaatacacactaatgcaattattacaagcttagttggcataccatctaacagatactccggggctacataacccaatgtgcctgagagcttgatattattcttgttttgggtcccatcaactacagcaagaccaaaatcggataactgattccacaacaataagatagaaaatggaacagtataagaagagcatttataatgtttattgggaaagggtcacaatttataatagcaatatcttaaaacaatgtccaagattttaatgaagagaaagatagattagatattgaacaaattttatacaatttaaaattaccttggcattaaagttggcatctaaaagaatattagatgttttcagatctctatgaatcactgaagggtggcagtgttcatgcaaatattctaatcctctggtcaaaaattgcccaaaatgttaatagggttaaataaagagctactgtaaaaatgaaataaattaacagaagattctatggtgcacacccaattttcgggatgcactttctttgtttttcttgacatccaaagagtttttttattttgaatttctcaaaattttacatgatgtcttatataagtataatatacattatcatcaagaaaaattgagatatcaaaaacagaaaaaagtgcatcagtgcaaactaaaaataaaagaaaaaatgggaaaacaatctcataccttgctgtatcaagagcaatcttcatccgcatatgccatgttaatgcagaaccatgggagggtcctaccacatgatgaaatataattattaaatataagtatggactatgactatcatcaacaccagtcgaatttatagttaatcaaactatgaaaattaataataaaaaaataatgaatagatgccataccatgcaattgtgtctccagagatccattatccatcaattcataaacaataaaccttgaatcaccttgactacaacaacccaatagagaaataacattgggatgttgaattttactcaacaaatctacttcattctacaattttcaaaaatggaaaatccattaaaaaaaaaaacactataatataaatataacattaaaggaaaaagaaaaaaaaaaaagagtacctggaactctttctcggcatcgtgactttggcactctaatcttttaacggcaacaatcaagttatcatccatttgagctctgtaaacacgtccaaaaccacccacacccaagatattaccttctcgaaaattttcagtccccttttctattatcttatagtcaaccaatgaaacagatcccttctttccaacaaccatccttgaagtattgaattgagcaaagaaaggatttaatgaaaatcccttttcaccatcttcaaaccataatccaaacaaaacagaacccagaaaaaggataatctcagaaatcttaactagaagaataaactattcaaaaatcacaaatacccagaaaagcttgattcaaaatctgacaagtgtaaactgaggtacctgagcttcgcccagttcttctatgaggtttccgagagcacttgcagtgataaatccacaagcctaacaatgacaatatgattgcaccaagtgtagtacaagcaacaataagagcaattagaattttcctgtgagaatccatagtgttcctttgaccttcttctccaactccaactcctgcttaaaaaaaacaaagagtgtttattaatcatttacctcagtttttgaatctttaaataacttaacattttaagcaaaatgtgataatacccagaaagaagttcaaatctatactactaaatgagcctaaattctatgacccgtctaaagaaaaagctcaaagcatgaacccaaaagaacaagagcaacataaacagatagataggtatggtatggtaccagcaggagagtaggcaacagtaggagcagccattgtaggagaaagaggagaattaggtgagaaagctggagagggaacaagagggaccggtgtggcaccaacccaaaagggattagaataaacaagtaatagtagcacaagaagaaggagaagaagaagcttcatggtttttggcttttctctgttctctctttctttttttataaatttaatttcctttttttcttctttctctgttgttataaatcaaaataaataataagagaaaaacatgaagatagagaaatgtgcttttcgggtttttgaaaagcaacacacacacaaagacaaaagggaagagagaagaaagaagaaagagagagacttttcactgttcaaatcaaaatggcctcagaaagaaagaaagaaaatggtttggagttggttttggtgttggaccatctaaaagaaaatcagtctttttattattattattattattgttaataattttaattaattatttttctctgttttttagtttttgaaattctttctaataactttttaaaactaataaagaagaaaggggccaaaagtattttttatttttttgggttaatttatatatattttaagtgtgggagtggggacaagtgcacaacagtcacgtggccccgtgagcagttaggaaaattgaaattttaaatatataaaccttttaaaaaaaattattatataaataaaaatattaatacaccaaagaaagcctgccattttccacaacaatccccacacatagccagctctctctcttcctaatctttgaaaaaaaatatgaaaaagaaatgaaagtgaattaaaaaaaacactaataaatgagaaatatattattattttttaattttatatagggtgtttgaagtgtagatggtgtgatttttgattaatttttttaattgtactatacatacagtttgagta

SEQ ID NO: 406 - DNA, 4254 bp, Cannabis sativa
aatcactcatctttctcttttctctttccttagtttctctgggcaatggctactttacaatctcttgctttctcttctccactctctcactacattcatcatcttcaaccaccttcttattcaggtcagtcttttctcagtacattgtcttgtggtttttgctgatttcttttttagctcaatcatgattattttttcaaagtttaattctttttgtgcaaatatgagtataggagtcaaaagggtaacatgagtacttgtaatttggtttagattgtaaaaggtttaaactttaatgttttcttggttgtgggcaactgagaatgattgaatggtttctttttaagcaacttagaaattgaggatttctgggatttttgtgtatgttgatttctggttgttattgatgaaattagacatagaagaatggtgcaatattggcttatgttatgacaaatggattcatactcttgttgacttctattttattaaatgacaaatcaaacctatattcatcaagttgtttttagcacgaacaaatacaaaaaatgtaaccaacctgatcataacacctttattactaagttatgttttgacaaaaattgagctcagtctattattttaaaaaatacaggatccaacattgtataatccaagcctatgaaatcaaaactaatgtgatgcttttgctgttttaataggtaaagtatcatggtccatccaagcaagttcaaactccacattcaatggccaatctttgcaactaactcgcccccgatggactcggttaagacagaatgctcaagtgcctggttccatgataatgatggtaaagccaaccatccaattcatccaaggaactgatgaacagacaataccagatgtgaggctaacaaaatcaagagatggtactaatggtatggctatattcaagtttgatcagccttcggttttcgattcatctggtgaagttggtgacataactgggttttacatgattgatgaagaaggtgttcttcaatcagttgatgtaagtgctaaatttgtgaatggaaaacctgctggtattgaagctaagtacataatgaggactccaagagattgggataggttcatgagattcatggagagatattctaatgcaaatggcttacaattcattaaaaaataagatgttgtatatcctttttcattgtctttttacacttccataattgttcaacttacttttctttgtctgtttttgtcatcaagacaagtgaaactacttcactttcaatttgaaatcaaccaattttgttgttcttactcatatccatattctcattctttttatcactaatttcttttgttgtgtattccagttactgtagtggcatttcctatttctagtactttaagaaattataaaggcaaaagtgaagcaaggaaaatgtttataatgatttaatgaagaagacttgtactcatagctaatattcttaaaatcttgatggtaaattccatcctcaaatattgaagataacaaatcctccgagtcaacaaacaaatctcaggatttttctaaatcaataacagataaacattcactcattatggtcattttgtttcttccatgtcactgatatggggcttctaactctatgagcattattcacccatgtcaaatgcccttgtgcatagctcacactgtctttatcacctctctttcttgatatgaaccataccttatagttcaaaacctgatttttgtgtctaaatcttaacctcttaggcttgacaataactttaacaccctgtggtgcttctatttccagtgagtaaatggaattaggactccccacatttgttactctcctcttgatcatcttactcctcattccatgcttgaaaataaccgaaatggaagggtaattaaggctgaaacctttgttcatcatcagaatttgatgacagcttacattcttgtgagtaactgagaacacttctgatgttgtgtagccaagtgtgcaaagatgagtgacatactcatctggtttggtgtcataaaccaacccgggatcaagagcttttatcgggttaacatgtccagcgccaacagcaaaaactccagcaggtttgtcccaatccattattggttttcctgaatggtcagttacatcagcagttgtcataatcgcggatttaacagctgcagggctccattttgggtgagcagaacggataagagcagcaatgccacttacatgagggcaagccattgatgtcccagacatgacagtgaagttaactctcctggaatcttcagggaggccactggggcctaagttctgaggccaagcagcaatgatattgaccccgggtgctataacatctggtttgaggattgaagggttagaaaaactcggtcctctacccgaaaactgagctacaccaggtgcttctgatttgccaataatagttccaccaaacttgattcttcccattggtcttcttgttgagtttatgtaagttttcaagactattgattcatcaaaaccaactaaagttgcaggcaaaacatggacatcaaccgaatcttcttccaaattcagctcagtatttgtcaaaatcatagctaatccaccagcttccaacacagcttgacctttctctgatctcccattaactcctctatcacaaaccaccattttgccactcacttgagcctttggaagagaccctttaaggcaaaaccgactcccttgctcctcgttgacataaactatctctagctttttctgagagcccgaaattctgttccctggataaagagattctccatagagagtttggccatttcccatttgaactacagcagggaatttcctgtccattgtgcttgctccaatggtagcaacccaaggcgcttcattagctaccgagctctcaatagggccattgtttccagccgcgcacacaacagtgattccatgttccattgctcgaaaacttccaatggcaatgctatctgcgaaaaggggtatgggaaaaccgcctagagagagtgacagaacatcaactccatctgaaattgcagcatccatagcagcaaggatatcagagctgtaacaaccattgtaccaacaaactttataggctgcaacatgagaataaggagcaattcctcgcgccactccagctccattccctaacacattagccatagcaaccgaagctccaccagcagtggaagtagtgtggctgccatgtccatgtgagtctcttggcgaaacatactccataacactctctggtactgaggctgatgttgaacttgaagccactttatggcctcttatgaagaatctcgcgccaatgagcttcctattacaacttgaggtgttaaagttttcgccttgttgacacacccctttccatttttttggaacctgaggcataccatagtcattgaagctaggactctcaggccaaacaccagtgtcaagcacaccaattatggttccgattccaaaccttgctttgttataccaagcattttcttttattggacttaatcccaagaacttgtgagaataagtagtttgaagttgtagtctttggtcaggccttattgctaccacactaggcaacttttgcagcttttctagctcggattctgataaccgagcagcaaaaccttccaatgctgaattgtaagagtaaacaagacgcgaagaagggtgttgttcttgttcttcatcatcatcagaggaaatggattgttcaagaaatgaaatgtgccaattgagcttagtagtgaaaagagagcttgccatgccttgtgagtgaagctgaacaatgtatgtttggagagtagtagtgtttgctacctggtgagaaaccaaagaaaagaaaatgatggaaaataagaaatggggtttggatttcatggttggtgagttgagtttgagtttgagtttgatgaatcagcatggtttggtagaagaaatgttggggggtatttgaagaagaagaagagaattgaagagctgggaattttctgaactttgagtatgaaactcgtgaaatataagagctctaaatcacgaggatcctttgttgaaagagagagagaaagacaagagcttaaggtttgaggagctaaaaaagagagcttgttttattatgtttctaagttttgaacttcacgagatatcttggctaagtctttaacacacgaagaaattgatgaatgttctttgatgttgttgt

SEQ ID NO: 407 - DNA, 3240 bp, Cannabis sativa
aaagattgtaattcaaaaatctccaatgttatatgtatgtatatttttttaatgatgaagatcgaatatatttaagtgatctattattattattataataaaagtagaatcttgtagtgaatattattattgcttgccaacccaacataatgctctaaagcattaaaaaaaacagcataattttagggggagaaaaatacagtaagattcacgcaatgcaaattgcaaagatcataactctcaatcaagtttaggggtagtttggtaattttatctaagctagggtattttggtaattttgcatgtgaaacttaggtccatctattaagtttgaagtggaacctaatcccatctattattttgggtcccaaatgagaccgtctcttttggagagacacaacttggttaacaaaattaggaaaaaaatgtacccaaaaattataaagagccaaaagtggggagaaagtagtttggatgaaaatgactttggataaaatttaaggattgcttaaaaaaaatgtcccctttatgttaatttgcattattttatttctttttataattttttgaaaaatagaattgaaaaaaacaattagactacttttagaatttttacctttaaattatgatatatatatatattattgtctccttaaatttttcagtctgttacaaatagcttttgaactattaaattaatcattatgtcaagttttgtcacacgtggtaaacaaaatgataatatgattgcttggtcaattgtcgcatcaaagccacatgtataatttaacattaaaaaataaaaattatttttaaaaattattaaactaaacatcaattaatgattaaaaaaataggtaaaacaaaattaaaaaaatttatatttttcaaattacttacacatgcaacgttgatatggcaccgacgtggcaactaactaagcagtcatgtcattattttatttaccacgtgtgataaaatttgacagaaatatcaatttacaatattgtgaatagtttagtgaccatttttaacaggctaaaaaaactaaaatatttttttaaataacgaaataaatcgagaatgtaaataatatactatagaattacctaatagtactatttcactcacatataatagtctgttgagcaaaattaatattacagtgttatcgaaaacactcaataccataataataggacctatatattgtcatttttaactagctaacatcttgtaaaatttaactaacaacaataaatagctcttcaaaaagagttatccaatattttcatttaaataattttatatgttaagatataatttctaaggtacatgtaattaattttaatcaaaaaaatatatcttataattgcatactatattatataaaagtgtaaaatattttgtatttatttatgagtaaaatgtataaatatatcatcaatatattgcaaccgttaattggtagtttttgttagtttgaatctaggtttgattgacaaagaaaaaaagaacaaagaacaaaatgtcatttgtgatataattttatttttaattaattaattaataatgagtttggctaattccaaccaactacttgggctagctacctacctatatcaaatcaaataaaaataaataaatacaaaaataatgttttggacttttcttttcttttttcccaatttttattaaaaataaataaaataaaataaagtttttggactttttataccccactttattgtggtaggacttaagttaatgtatttggacccatcttaatcccaaccttttaggttagtttttaaactctttcacttgcataaaatcttcactttggattctagtctttattttgtttaataatatatttctttttctttttttttttgtttataattaattgaaagattgtttataattagtttaataataatttttaagctaattagattatggactaaatttctactactagtttattagaaagcttttctattctttctttttagaactaataaaaactgaaatttatcaaagcataaagacccaaaaatatttcaaaaatcaaaacaatgcccattgattttcttatagctaaatattttttttaagaaagaagattttaaatttccattaatattatcatattcaagttctttttttttttctttttacttacaaaaataccaaaagatcaatactttcaacagatgctttactctatatattactattaagcatcagtagtactcgatactttttataagtgatatcttacgattagttaatgatattttttaaaagttattttcttaaattatacgagactcatacttaattacatgaacaacaatatgacactgagaataatactaggcaccaataatactttttagcaattttttatattaatatatgataaatgctaattaagaccacaatagatgctattttcttaattactataatgcactaaatattatgatctattgatattttattaaattttacattttttttatctattatattaccattatttaaataataaaagaagaaaaaatatatatattttttttttgcatattgtcaataaaatattaaataactttcgatataatttttttttattttacatttttttgtattgaagcacaattataaataatgagttaaatataacataaacttatttttttgtgccaaatttagtataaatttaaaatcttccattgtatatcattatcaagatatgtgtattaaattccacatattttaacataataattattataaaaattatcaatcatttaaaaagaactactaatacttaataacaatactttatttgtatttatagtaataaatcatcaaaacaaattaagaaattttaaattaaaagaaaataatttatataaaataatcaatcaaatcttactagttataataatggagtacgtgaagattagatctaaaatataaaattacaaattaaattgctttgtcaagaaaaaaaaaagcatatttaattggtcgaacttgaacacccttatttgctcaatatatttaaacaatttttttttaatataatgttttattttatatggcctaaagttagagtcaattaaatatatataactttcaatttatattttataataataataataataaaaactaggaaagacgaccttaaaaatgggtctgtgttagagaggtggactcggccca

SEQ ID NO: 408 - DNA, 705 bp, Cannabis sativa
ttatataagagtagaaaagataggatttgtgagtctgagcattcaactcacgatagaatctgcttgctttaacgacaacaacagttatgagatttttcatgtcaacattttttgagcaccccggtctcaaatatagtcagcttaataaaaaccaatcccaattctcttaatgtttatctcatctcttgtttagctttgacaagtactgattcggcctataaccataacataaatggaagaaaaattcaataaccattcttcattatgcaaaatcataaattaagcttgcataaaataaattatgttacaaaaaaactttcatcctctcttcctctcagtatcgctataataatatgttcaaagaatgacatgtttttttttttttaaataaaggctaataaagtagaattttgccaacttttttccactattaatactcatctcagaacaataaagatgagagtagcattagaagatattattattggtgttacatggaaaaatttgccaaaaccatggtctacatgagatctgtggtaaagtgcaaatattgcaccagacaatagataccatctctaacttgaaaagacaaatgttcatactttgcaatgaaaaataacaaaccactattttcatagctggcacaaaatgaatatttagtcttacttcttttgacatagccaatgagtttcttccattcttcca

SEQ ID NO: 409 - DNA, 1845 bp, Cannabis sativa
tcgtgagcaataaaaactcgaagcaaacgtaattctattaccgtcgcgacataaggagtgaactattataaatctcgtgtctctctatttacttacttaacttgtatttcttctcaccaatctagccagcgaactattataaaaaatatattctttttgtattttgaaaaataaatcttttcttttgcccttaacttttaaaaactaatatatttgtaaataaatgtaaattttcagttaggccctggtagcccatgttgaactgaacgggcttctcagttataagacgagacctatggaaaagcccatgagaataagaacgaggaaagcgaacgaaacccctgtcgggttttgcagaatctggaaaaatggggatggagaactcagccgaggcagagcagactgccgtcgataccacctcgccggagaatattgaagccttgcttgaggtatctcgttctctgttatttaaactatttttttactataaatttattaaaccacatacaaactgagctacgctgtttatgttatctgcttttctactttgggcataaaaggctgctagatatggtgacattgatgatctcacaatcttagtctcaactggtatttctctcaatttgaaggacacattgggtcgaacaggttagatttttctttcatgtatttattaaaattatttacgatcatatttggatggaagaaatggtaaaaatatgttttagttttttttttcttaatcattttattggatgaattgatagaatcttttttctgtttttgtttttacacgaaatgggaattttgatttttattatatgtaatatgtatgtatctatttattttttcttcaataacaaaacattgtacatgtattaatgtttgagagtattgaaactagatgaaaacatccattaacttacttaaataagagatagattcttcccacctgtttacatagcatgcagagtcttagagaaatggcttggcttgaaatctgcatgggtgactctttgttttatcacaatgactattttcaggaaattgtgtttttgcaaatatgtaatctcttcaaagagtattttagcaaggaagaaagtatatgtatgttaacaagtgcataattgattcaaggtggttcactcatatagtcagacatgtggtttgcttccattaatgtccaagagactagagttctccaagatttagtgaacaattctcagctcatctcaaagccatcccaccctttacaaaagcttccctaaccaaactaccctaggaccattggcctcttacctctcttcgcataagtgaaacgtagcaaggacctaacaatcaacttctaattttctagaaatataatgcattccaaattatgggtttgaatttgcgagtgttattaacttcctatttactttgtcttgaaaaattggagtgtacactacttaaatgtagagatttgaactctggaaagtaaggggagctttcgggaggaagaataataacaatgtagaaagtggggtttttgctatagaatgttagttttgagtgatatgaaggttgaagcaaagcaggtgctaattagagtattggtggctatacagatattgaaccctaaggattttatagtatttttttttccttgctacttgatgattggtcagtattgttgttattcgatactaatagcttgtaatcttctagcttctattctctaaagtaggcttgttgaagaatttatactaattttatgtaatggctgaaacatcagtaggattaccatactgaaaccaatacaaggattctttttattttaatttgatagaattcatccaagaacct

SEQ ID NO: 410 - DNA, 846 bp, Cannabis sativa
atataatttagtgggaaatagaataacctccaaatatcttgaatataatcagtatccaacatgataatatctcaaaaagatgcttttgcatataaagaacctgaaaataccaggacggcagaggaagactacttctcatgcccatgtagctgaagacaggatatgagaaaatcataactggtaggttgacaccaaagtgatacagcaacaggcgagttatacatttctcctgagctgcagggctgttattttttgtctgtgtaaaatttagatgataaaagaagacaagtttatcattagactaaggaaatctaaataaataataacaataataaaaaaaaaaaaggtcaaaagaataacagttaagctgattaactaaaaaagctgacaagattttaataatgctgtcattttgggaggggatgattagtgtgtagcattatgataagaaaatatctgtatgaatgaagtaaggagctataatgaagttgctctgctatataaagatattgtgcaagcacatatgcacagagagttgcacaagaggtctcttttacatttcttccattcacagttgatttgggacgtgtcaaaacagcacaggtgctacttgaattttcaaaaaaaaaaaatattgctatctgcttcaaaggtaacatctaagtcaacagattaaacctgaatcttgtacttgctaagccatcctgctctctcaagatatataaagggaagcccagataagaagaaaacactctcatggagaaagaagcttccaagacatgccagttgaaaatcactgaaatttgtgataagatactgcaccacaaaaagatggacataaatttc

SEQ ID NO: 411 - DNA, 2489 bp, Cannabis sativa
tattaaagagtataaacattattataacttttattcgcttttcaatcctagacattcaaaactcaataaatttaactttttctaactaggataaaattaaagtttatatataggcaaataaaaatgagactcaaaacattatactatagaacagtagtgagaaaaatggatgaaagaagtaagaagtcagagaaaagaagtggggagcaagatagtgagcattcaacattaatatccttacctcaccaagctcgttgatagtttaggttataaaaagaaactaaagtacttgcacaaaataaattgatcacataatataggagaaataattccatgtagggctgtccaatttatatttgacttcagattgtctattgtctacaaggggtagcctgacaggtataaaatgtaatgttagcctactgtcgaatagaaaaatgttttaagaatatcaactgtacatttgttgtacagaaaaataaagttgactaattactagagataaagagactgctctggttatactcccgaaattgacatttacagtcgtagtgtcaactgatcagtccccagttgtaagaaaaggcataaatttattatcgtgatttttcgtttttctttattgaaagttagtcaggctcgacatcttttgttcataaacattgaaccagattgtgaacaattttaatggaaatattttcatgacaatagcttcacacagtccagcctaggtactctcagccactcagctccatttgcaacaattatatagcagtcaatctcaatgcatgttgcatattgatcatttcttgttaggaaggatttggaaaccttgaatctatcgttgcttctttgcccctattgcttataagggtcaattgttgttagttgtttttggatgtttgtacatggtcttctgtattcattcttgaaatattttgagacatcaattattctaatttttatggaatgttcttcaatttatttctgatgagggataaactatagttaagattaatgctataaggctcttggtgcccaaaaccacttgtgatctcatcttatatgtggttgaatttaaaacctcacttataatttaataagtggtattggacacactagaccacacttaaaatgtcacctcttttggtgtggacaccttaagataccatatgttaacactgtatttgagctataatggttaatgacatacacattttattaattgacctatttctgattattttctgtagaacaaattagaacctgatctggctaaaagggcagagcattacttttcggaaaatttgcgtgtcatcaaaggttcttttaatatgcaacaatagtaggatatgcatgagatgcacatcgtatgtgctgtgattgtttcaaacatttactttttgttatttttcaacttacagtttggtcaaaatcttgattgtttcaggacttgaagcctgggctactggtagtttagaagattttggaaaacttattacagcctctggcctaagctctattcagaactatgaatgtggtaaacttcttagatgttttttgtttttggtttgtgtaacctgatttctgtttccccaaacaaatctagtagatcataagatataagtactgctttaaatagcttggatattaatgttgttattctttaggctcggaaccccttatacagttatacaaaatcctagtaaacgcgcctggagtttttggagcacgatttagtggtgccggattcagagggtgctgtattgcactggtgaatgctgagcatgcagatgaagcagcatcatttgttaggagagagtatcaaaagatccagcctgaattggcaagccaatggaaacaagacaaagcagttttgatatgtgaagctggtgactctgctcgtgtaatatcatcttaatcgataattcactactcatattatcatgttttatcttatcaataccttgtaacaattttagtttccagaacatcatttattgatttatattttcttttatttcataagccgttcatagtacatctcaaagctcagaatgtacatgatgttatgagcaatgttgtgtgtgagcaactatgttttaagttggaatctcagaatatgttattgtgtaattagttagtaggtaacggccatttttgcacttgtacgttttgtttcatttcacttgataaataaagaaagtgtattaccacatgtttgcccaaaactcggcacttcaaatgaattacaatcttgccaccattgacctatgggtatgagggctttagggaatgtgggaaatgctgatgctgatgcggcaaagggttacttatggtaattttgttgcacctacaacagaaaatagattctaaattaaattgtattaaaagatgttagtatttttcgtagatactcaaaataccctcatttgattttctctctcactcaactctgattctctctttctttagaaggttgaatgacg

SEQ ID NO: 412 - DNA, 2418 bp, Cannabis sativa
gaaagtacgagataaacttgtgtagatgcaaatgcctttataagccattttacctgaaaatcaactttcacttctggtaattcttctccatggctatccccacccttttctgccacaacaagactcaattattactcatcgaagaaacataaaaggttaacagcctattggcttctcaaactatcctactgcatttaaagtacattattaacaaaacaaatagtcagcactcagtgcaactgtggataacttttagctgtgtagttgaaaatagctacaacaacattctcaacacacaagtgaatgaaattaatgaagaaaggtaatataccaacatgggaaccatctaacaatggattgctatcactagtcccactatcccttgcatgaaaatttgatgaagagcttaggttgtagccagattttgaaggggaaacctcgtgttgatttcctactggtgcagcagcaaccacctcttgatgtaagtctgcttcatcaatttgtggagtggcgggaaaataggcttctaaagtgtctttcgacaaaagaacattttcctcatgcacaaaacttgatgagcttttggctacatcggagtttgcatcagtaaacggcgaaacattactgaactccagaaggcaaacacaagatcattacatcatacatataatacatattatagtctgtaagggaaaacacaaaaactaaaaaacagaatatatatacacctccttcgatggcttagctgagcctccttttcctctaataaagcctgaagttctgacaacttaagattaagttgcttgatgtctttctttagacggttaacagtattcttctctgaactgattttcaataaggcagggatgcgtggcttagtcaaggaaacatttttcaaatctcatttagtactaaactgtcataaatgggaacaaatatttttgaatattgactattatcaatagtaaattataatataatgagtctagtagtaacttcaatgaaaacaatattagagcaaaaaatacatgtaccgtactcatttttaaaggttgatttccaccaagaaacatatcaaatgttcatctgactagaatagactatgttttcatgcgtcaaaaatttaattgtgtggtgaacagtgcttaaatcactaataatataaaacattttccttcgtaaggaaagttcctgcgaaaaacttttctgaaaggatatgagtaccattgaagatcacactaaagaagttcctcacagaaagatgcaaggcttcaaaccactctctagagaaataggtgcgaaactcaggatccaagcttggattctttatatatggaatagctgcatcacatttgaccaatcatataaatgaaacagagaataaaacattacaatgcatcataaaaaaaacaacaaagagacaaaaaaacccaccaaaccagggagtccaatcctgccccctttggagcaagtcatttccattcatgccataaaactccacaactttatccttccttcccgattgtacagcgtaaacaatgtaatagcgtaaaatagagacctccaacttactcagagtatcaatatacactctatcagtagatgaagagagacagttcttgaaaaaacttaacagaccaaccaatttctcggcttgaaaagtaggaacataaactgaaaatattaaatccagaatcctatccacttgaaaccctttaccgatatcagtcgatagttcagaatcataagcttgcaaagtgttggtaaatcctctaaaaactaggaactccctcacaagctcctcagcatacagcatattctccatcctcttttgctataccaatagcaaaagtaaaattcattatgttcattgcttgtaattttgacacaaacaaatattgcacaacacattgaaccctagtaaaattgtgacaaagtagaaaaaaactaaatttgttcacatacatcataattcaaatactgatggtggtctcgtaataaatgtacaataataactgaaattgtaaatgaaaatatgcaatgtgcaagtaaaaggaggagagaaaatgaataaaatataaccatttgaaaaggaaaggaaattcaagagacctaatctagggtttaatgaattcaaaatttcaacagacctttacaatatgctggtgtaaaagaaggaaagagaaagagagctgtacctttgggagctgcaaaagggttggtcgatctatggttgcagagacttcgaattgagcttttccagaaaccaaacatcaagcaacgaaactagtcccttaaccacggtacccgacccgaacaacgctgcgaaaataactcgggtctaagctaacccaaacccttttgataattacactacgtacttgaaatttccaacttttttacttttacattgtggag

SEQ ID NO: 413 - DNA, 1140 bp, Cannabis sativa
ataaatatatgtgacaaccaaaataattgtcacattcataaattatttccaattagcactaagttgaataattatttcttccaaaaaattaatttaatgtgtcatgctttcgatctaatttaatgaggcatatcatgtcatgtcgtgtctaatctcgtattgtttaagctagatcgtggttgggcctcttgggcttgtactagtagtttgtactgtgttgaaaggcttgaccagtatttacagcattaggtccattaatgtaccttgtcatgagtataggatatatgaggagatcatatccatgggtgtgattaggtctaaatatagttggtgaaggtgtgttgtctaaatcccataaaactaaaacttttttcgaagtactctaggtggtggtggcaaagttgatgaagggactgttgaatactactaaaaagaatgagtttaggcatcacttttaaatagacacttatatttttactatcggttctcaagaccaacgtatgtatcaccaacacaaaattagacataatttgtgtccgttcataacaatagcttcaaattattaccattggtttacaattgacgccaaaataaaatatttatttttttacttattattgtcggttttgtatcgacacatccaaaaaaaatactggagttatctccctagactaaccacttggattcaccaagagtttatctatcaaagaaaattttaagataaacatgtcatgagtcatactgaagcgctttgttgattctaggtcgtcatgacatctccttccacggtggtaacccgtgcatggctggtcctaaataaaaagagtcacgttgtcggatattttagctaaatgacatgacacgtaattaaagaattggtacgtcatcatgaagaaggattgtgaggtacaacctataagaagacgagaaccgaaattcgaaaaacccaaagttaagcacttgggtggcatatactagtgtatgccacccatgtaagaatctttaacaccttggcggtatacacatgcctcccaattggttttaaggatgcactttgtcaattccaaggcacctcttgcagatggtgatccaatatgccccgcgggaaggaataagtgaagtctggagtatcaaattatg

SEQ ID NO: 414 - DNA, 1475 bp, Cannabis sativa
tgtggtggcgggcgcccttgctatggcaggttacaaagtactagttcttgaacaaggaaattactacgccagaaaaaacctcacacttctcgaagggcccaccatggacaacatgtacttgtccaatggtttgatggccaccgacgacatgcaagttttgttgctggccggttctacagtgggaggcggctctactatcaattggtcagcctcaattcgcacccctgagcatgttatgaaggaatggtgtgaccggtgtgatctcgagctcttcggcagccaaatgtaccgagaagcgttggatgtggtgtgcgaaagaatggaagtacagtcagagtttacagaagaaggcttcaacaactcaattctaagaaaagggtgtcaacaactaggtcattccgtccataacatcccgcgaaatgcaccagccaatcattattgcggctggtgttgtttcggctgcaaagacgggaagaagaaaggaacgtccgagacatggttgaaggacctcgttgactctggtaacggagtcattctcccaagctgtgaggccgtaaaagtattgcaccatagaaagaaaggaagagcgcgaagtaccgcaaagggagtggccttccacttccaaaataaatcagggaagaaagaaatgtgcattgtagagtccaaggtgactgtggtggcatgcggggctcttaggactccaacacttttgaaaaaaagtggtgtaaagaatcccaatataggaaagtacttgcatcttcacccggttgtgatggcatggggccaattttcggatatggataagaaaagctacgaaggagggatcatgacgacaatgtcgagtttggaggataagtcaggatatggagttgttatacagacgccgtctcttcaccctgggatgttctcgattctgatgccatggatttcaggaaaagatatgaaagatcgaatgcaaatgttttctaaaacagctcatgtgtttgcgttagcaagggacaaaggttgtggaagagtgatgtctgaaagttctattgggtatgagttcgaacaggaagacgaggagaaacttcaaagaggagtggagaagattctaagaataatggcggctgcgggggccgagaagattggaacacacaatagagaagggaggagcattaatgtaagaacctcaagcaatgatgagttggagaggtttataaaagaggagagtaggaggccaatcaatgggctttcatctcccgtttgttcggctcatcaaatggggagttgtcgaatgggagtgagggcggagaagtcagtggtggatcagactggggagagctgggatgttgagggactgttcttggctgatacaagtgtgtttcccactgctcttggagttaatccaatggtcactgttcaggcacttgcttattgcacagcccaatcaattcttcaagttttaagaaggaagaaattaacctttaattaat

SEQ ID NO: 415 - DNA, 782 bp, Cannabis sativa
ggagagaatggccaaaaaaaaaaacttcatgaggaaaaaaggactcacaaactagaggcatattccaacctccaaaaggggaacaaaaactagccttaacattatcaatgccaagggtcaaagaggaaaaaaattaattttgaagctccttgttttgtaaaaaaattcaggtgaaagatttttttagatctagttacattcaaaatatttttattaaatttggttccgaaaaagtttagttttaaccttttgggtaaacatatattttttgttgaactatgagtcttgtagagttttgtcatctattttttttttaactaaaactcccttcaaatttttttgtgtgcccaaaatctcttcggcctaagataatcactgcaaaagcaaacatgtttgatttgttacatttcattaattttttatcaaataatttgttaataaagctacaattcactaataattatagtgtgaatgtctatttcactaactaaagttagttaaataataaccgtgagatctaagttatgttatcaatcaacgttttcatttcaaaaaaagaaaaactaaagttagttaaatcatatttatcgacacttaatatatacaaatattagttctaaaaataaatatacatattctaaaatttgtcatgtatttctcttaaactcttaaattacgctatattaataccatactaaatatcaatgttgcaataataattttttaaaaagtaaacaaaattcaacaaaaataatatatttgcaatgaattcaataattttg

SEQ ID NO: 416 - DNA, 6354 bp, Cannabis sativa
agtgtttagttctaaagacccaagaatatccacactttctaaattgtattggatcgtacaaattaaattagatcgaatattttgtgatgataatgcattgaaagagcatagaataagtccaaaattcagactttacattgtttttgaacaaagaaaagaacacaacccataaccaaagcaaacaaagaatcttaattacttctttttgtttttaaggttactataaacgcttacaactgttgttagtgttgtgttggtgagaggtagagggtgattccctcttttgtacaaaaaagttatcaacagttgcagttaaatcaaagtggtttgatcacaattacaattagactcagatcagccattgacaaggaccaaagcttatcatcaagctccttacttggactggtgtttgaaaggatccgtttctcctacttgacagtataagtataacctttatgcacagtatatttgaaaaggactggaaagacatcttcacacattggtagcaacgccgaccccttagccctaccatgcccaatgcaaaaccccaagattgagagctaacaaacttcattttgactgtgattcggcagcaacagaaaacttgctggaagtacggaaacgaaggccggttcctatgtgtcctgatgtaggacaaatccagcagaagatgtttggacctagtacctgaagagtactcaacgattaattcagctcatgaaactcagatcagaagctttatagaagggcatataagtttatgtaacacttgttttataaaattaagaatgactacaaattatacaaatgtaaatacacattaaataagttgggaccaaagttagcccctgcaaggtaacacaaacatttcactgcaaacgctaaaccccatcaatcgagttatgccattgtaggggaccaaagaaagtgtatccattacagtgaaaccaacaattataccctgcatatagctgtatgtatcggacttctggcgtccacagaataacacgtgggaactgtttaggtcccttgcacaattgtacaaggagactgaactctcaaattataataaaataaattcattcaattcaattcaactcagagtgaatctatttgtgatctgacagttcgttaacgtaaatggaaatcatatattcgtgtcatggaatgaacagaaaagcaaggcaaaatgagaaataccgttgttaaattttcaaatgcaccaacatcataaggatgtgaatagacattccctcctttctctgcaagccacattgctcttactccttcatgatactgtgaaatagtaaggggataaatgattttgtaattagtggatggatcgtataggtaatcaaagagatgtacaatgataacaaacttaattcctaatcacctcaattgtagttttgttttgcaaaactagatagatatgccaacctaagagaacactcagtgctacacttaagggaattagcattatcccagaaattacctggaaaagatagaaaggaaaaggatgagcaaacattgtaatatggtagattaaaacgtaacaaaacatatagcaagttgtcattacatatagtgttctaaaagaacttccacctccatcttcgtccttttgagaatcgtttgtcagactacctacaagcaaaatctaagaatatggaaagtaagatatactagacaattcaaaaacaaatatgtacatattgatagaaaataaatagacaataaaagagtcatgcaataagttttggaattcaaaactaagaagaattgaattagtatcatgtgcaatcaatcaacaaggagataagtacaatcattcaaataatcaaatgcaatttcacaaaaattgtgcagtaaaacactaacagccataagtgacacaagtcagaaattaaggcggcttttagtagcactgttgttttcaaatttttaaatcacaaaagtaaaagtagaattttttttttttaattttaaaaacaaaatacaaaagtgttttctgtaaatttcatttttatatttattttttgtttttatttgagggatatgaaactgaggcgagagaatgtgggtcggggtccgaggtccgtgatcgggtccaaggttggatgcaggtttcggggtctgaggtctaaggtcgagtccagggtcaggttcgggtctaggtcatgggtatgagatccgagttcaggtccacggtcggggtttgggtctggattcgaggtttgggtcattgtctgggtccagggtcaggtttgggattggggccagggttcgaggtccgggtccgaggtctggatcgagactaggccaggtctgggttcgggatcccaagttggggctaggggttggggtccaagactgaagttggggccgggatccaaaatattgataaaaaaatacaaatagactataattaagaaaaaaaaaaaactcttcaaaaaaactttcaaacaatgttttttttcaaaattttgattcacattttaaaaattaaaaagtagaaccagttatccagagcatgtttttttaaaatattttcactattctaattaaaaaagacaaaaaactgattgaaattatgcatcctaaataatttaaaatttcattgaaaatcaaataatcacaatgcattttgacaaaaattctgcagtaactcactagcaagccataggcaacggtagttagaaatagaagcaattcggccaccttatgtataaagattttataacgtaccagggagtatatgcaagcaattacagcatacacaacaaagacgaagaaggctttatagtttgcatggcctacacaattatttatccaaatgcaatgatgatccttgcaaagaagaagcaacactttcacacattaagaggtttttaaacaatatacatgtgcatatatttgtatagtgtaaaatatatatatgagagaaaccgagagattgtgcataccattcgtaaaacacatctttggcaaacacggcaatgatgcgcgcgaggtggtttatagtgacagcacttttggcaatacctcaagtcccctccctgcaaaaactttctaaaagtcacgataggacatgaaacgctaaaagttcctatcagcatggcccttttttatttactttcagaaacctttaccataattgacaggtcttaccaagctcaaattctaggtttattactccaaatacacagttttagggaaatgcaaatagaaaccacatttagacttgcaaacgatcaataggaaacaaattatcaaattgaacttaccagcagaaaatatattattaactaatctataaaagaatcataaaccacagaagacctaagaaagctagtctctcctcacatgagtcaaagccaatgaggttgacaggcatacaggaatcgaatataacagtaaattggacattatccaatccaatttccagataccaggaacaaaacaggaagtattaatctaagaatgtattttgttagcatcttatatgtagaattccctcttaattctcaactttaaatctagaattattgagaaaaggaaactagtgcttggctcatttttgttaacatttgaacaaggttagaaaatttgaatgtacctcaataatagaggtcaatatttataatgttattactataattcgcgacatttgacaagctagatatctacaagtcgtacgcagtagaattcattgtggccaattaattcatgctgatgcacaaaatcagggtaatgaggtcaatgatttgtagtgcaggaaataatcaagagagattatgaaagcctagtagtcctgccaaaacgtaaaatggttttcaaacttcatttaattccttgtgtttaactgaatatatcatctccttaacacttatgttagatcataattctagtgaatgtgatatggcctgaatgagtagacattccagttgcaagagcatttaattaaaatatccaagagagatccttttaaacataaaatgacagaacaacttcgtgacttaaagataaggttttaacaacataataagctgtgatttttaagatctatgttagggagaggattttaattcagacttctcaggaatcggaagccatggagatattaaataaccaattcatgtttctgtgaaactgaattaaaaattataccaattataaaaataactgaaaatgacaacaaacctattggaattatgctttaatcattaaataataagtatgacagatatgtatatggatacattgcaaccttgaaggtattccacaaatttaaaatgagacatccgcacaatcagctgtaccaactaactttatttaacttccaatctttgcttaatatctatcatcaatattaagctcatgggaatacagagttgtgcatgtgatttccctagtcaaaaaacaaaaacctacgaagaagacttttacagttcatgcatgcataattaatgccttataataaactttcattagcatttaactctacattaaactttgattggcatcaaagatatcaactttttaagatacccactcaattcatcattcttaacaaagccaatgcaacgtctgcaaacagcctatccaaacaaaatcccatgtagtacacagaattgtaccataccgaactgcgtcgaatgatgtctgataaggacacattacaacttgctaaaagacagtagtattcaactgggaatggtaaattgtgcagctatttgtgaatttctattttgacaaaatgttttgaaatcacttcataatgaaaaagaagtggagggactatttccaaccaacaagctaattgtctagccttctaaccaacaagctaattgtctagtcaatgtatacaaagtcaaaatatgaatcgctagaagacaacgcgaccgatattagcgaaacggaaaatataaaacttagaatacgttttgaaataacataacaagaagctaacctaataattaatttccacatcttatttctctctttttctctccacactcaaattttttccttataaacaatgtcccattaacaatgtgaaatgtggcattacagaacaaatgagttttatttatattttttttaaaaatcctttctttatttctttcaaatttattgttgcacaagcacgaccaacatctcatcattgctcgcgcaccttcacaagcactccttccttttcttcctattatacccaaatagatgtatcttagctatgactgcaagccctggttttaaatttctaggaaaaaaaaattaaaaattcaccaatacacctaaaagcttcttaagtttacccattcatggagggcctttgtatccgagttcctcagaaatattgtaaccatagttttcagtagatcatcacagaaaatacataaacaatcacacaaaccaacaaacaggagaagagagaatcgcaacaaaatcacgcataaaaagagaagaaaaaaaaatcacctttagaaaggaaccaaacaccccattagaaaaattcaatgaaaaaataaatagtttgatgtaccttgcgcttgatctcatgaacaaggttttctgaatcttcaacgtccggcatgaatgtggatggaacctgacccggatccgtgtagaggcatacagaatagttgaaaacgcacataattgcaacagccgtgaaaacaacggcgttcattatccctggagaagtgaagagaccaaaccattgctctatgaagaggaagagcgttgaaaagtaaatgaaagctataaccaaaacgacgacgctaacgggtacggaaaagcgtggggtcttcttcattgttgaggtttagagacctatggcatcggaggcaccggcgtttgaaacgacggcgtctcctccgagcttgaggacccaaacaaaaacgggcgacgagtctctcaaggttggtggcttggtggtggtgttatcaagctcctttctttgagtgaatcgagatgttgccaatgcttattattgttttttgtttttgcttaaatgggttttcttttctctttcttcacaaacacccttatttaaaaacaaaaaaaaatgattatttactttttatttattttttttatctttacagcattttttttttttgctgggtcactaatttttaagttgtacagatgttttgagcggataaatttgactttccatctaaatatatatttttaaaatatttaaattaaaatatcttttttttagtaattagaaaacaaatggctctttcggaatggtaatttaaattatccgcgacaaatattaataaaaatttaacagaagaataaataaaagttgttgatatatataataactaggtaatatag

SEQ ID NO: 417 - DNA, 7323 bp, Cannabis sativa
  modified_base (1246)..(1253): a, c, t, g, unknown or other
taggtctgggttcgggtccaggtcacgagtctcaggttttaggccggggtcttggtcctgggtcccggtcctagtcctggtccgggtttggatccgggtttgagttcgggtcctgggtcctgggtcccgcgtccgagttcgggttcgggtctgggatcggtgtccggaccatgtccgggtcccggtccaggtccgagtctgggtctcgggtccgggtctgggtctcaggtccagatcccgggtcctgggtcccgggtcccgagttagggtccgggtctgggtccaagtcccaagaaatccgagtcttgaattaagtttttttttttaaataaatttaaatcgggtcggattaaattcgatccagaaaaaaattaggcggggtggagcagatctgatccaagatccaataagtatttgaatgtttcagatcagaggtgatccatcggatcgaagttctaacccgctttaactaaatagatctttttgacatgcttaatttttaatttatgttatttatagaaaagtatgtatattatttaaatgataaaaaaataaataagttgatatttttgtggtatgatagacaaaatgaattttcaatgagatactttagtttagtgggagtggtgttacaccgcaaatgaaatattaatatcgtcgtaatatgaagtgtaagcatagatccaaagtctgttgttattattatttgaaatcgaaaatagctgttaaaataaactaaaagcctagcaacattttgggtccttttaattaaaaaaagttaaggcactttaaatattatatatatagattaaaaagttgttggtggacatattacaccaatagtttttgtattgtagtctctctcttccgacgccaaagacaaaaattctccagctcactgaacacgtgcgccactaatattaaattatttatattgtacacacttcatataggaaaatttttaatctttttttcctgcattaattaaaagaaaattatttagaattttcactaatgaattatgagttatattttattgtaccttttattagaatggagaatccattttacttttagtaaaagaaaataaacacttttataaagtaaattatattttaatgagagattataattaaatagaattatactgaaaaaatttaaaaaaaaaaccaaaaagtattaatgtaactacaatagttataaacaatatttaatattatattataatagaattatttttgagtannnnnnnnatttatacatgtattataatttagtataaaattattaattctacataaataaatttataaaatatatgtatattttttattaagatgtaattattcttatatagaggtatactttattagtacgagatttaaaaaatgcataactaattacaattcagaagttattcttatttataactggcccaaattatgaaattatgacttaattttttaattttttttttataacaaattagaggttatttcgaattgagtattcttaaatagaagttctactgtatatacacactcatcctttcaatctagttaagttagttgtaactaactaactaaccaaaattaacacattgtaattggctaactaaccaaactaataccaaaattggattttaatatgccccatcaagattatatttaaactaagaaaggaaaaagggtttgttaaaaggtcaaccaggttgagttgagcttggatgatacgtgaagaagcttgagttgtccatcttgaagtttctcccaaaaatgtgacaatccatctccatgtgcttcgttcgttcatgaaacacaaggttttcatatgtatgaatggttgcagtgttgtcactgtatagagtagtgggtagtccatgagaaatggggtagtccttcagtagggcaatgagtcaagtaacttcacaagtagtgttagccagagccctgtattctgcctctatcgaggatcgggacacattataggttgtttctttgatttccaagatataagaaagtctcctaggaagatgcagtagctcgtgactgatctacgaatgtccacacatgtacctcaatcagcatcggagaatactttgagtgagatgttgttatcagacaagctagaaggggcataggcaatgagttgtgatggtgtcttggagtagaaaaataagccttggcttggagtaactttaatgtattttagtactctatgagctgcaaggagatgaggctttcgagggacagtcatgaactgactgagtttattaacaacaaaggaaagatcaggcctagtatagtaaggtagattaattttcctatgatgcttctgtaagtggtaggatcagggaggatatcacatgaatacttgttgagtttgttgttaggctccattagtggaagtagatttagcaccccaagaatcttgtgtctgtcaatagtttcaaggcaaaaggtcattcagagactgaaatgccactggtagaccaagcaatttcaaggcgaagaaaaaatttaaggcggccaaggtcttttaattagagcatagaattgaggtgctatttaaagttgacaacaaatttataattgttagtggaaatgactatgccatcaacatagattaagacaacaagaaatacattgttctggtttttgatagacactgaattatcagaataagaccgtttgaaaccaaattacaaaagtgttgagttgagtttggtaaaccattgggaagaggcttgtttcaagtcatataagctttttttttttgagtttccaaacaacattatgggggataggcgcttgtgatttgtacccttgaggcagggtcatgtctacattttcatgcaaatccccatggagaaaagtattattgatatctatttggtgaagaggcgtttttaattatagctagggctaaaagtactttgagagtgttgatttagccactggagcaaaggtgtcaagaaaattaatagcttgttttttggaataccccttagttactaggcgtgctttaaagcgaacaattatgccatcagcaccatatttgtgtttataaacccatttattttctatggtgtgttggctaggggcagaagaacaacctcccacttgtgttgttgctccacggctgttagttcactgtccatggcattgagctattacttgtacttggaagctttcttatagctagttggttcgctgacattgtaagctccaagaatgacagcacaaaattggtcatataccctgccataagacaagaaagaatgaatagaatgagaaatggaacaagcataatctttaaggagggaaggtttgttgatgaccctgccagatttggagattttgaacaaaactagcaaagttggtgatgaggtctcaataggagtggcagaagtgggtatgtgatccacattagaggtagttgggattgcaggaataataattggatttggatttgcagaagtagtatcattagctgtgcgagtagtgccatctgaaggaaaagaagaaagggttgcatattgtgtcgaaagacctatttttggagcaaagactcaataaattgattagttataagtgaattttttttaatggaaagatattttcatgaaagaccacattttgggaatgaaaaattatgtttgttttaatatctaagagtgtataggccttcattccattataatagcctaggaaaatgcaaggtgaagcccaatgagagaacttgtgccttgatagtaataaggttgaggtataagctaggcaactaaatacccttaagtgtgcatagtttggtggtgttttttaagtagttcaaagggagttttgagctataatagtcgatatgggtagttgatgagatgaactgcaatatgtataatacaggtccagtatacaaggttaagatgagattgaaatagaaaggcccttgcaatatttagaatatgctgatattttctttcaactacaacattttgctcaggttaacctacacaataatagttaacttgaatgcctttggatgcacaaaagatagacatgcttagttcttttacataatcacattggatggccttaatggcagtatggtattgtgtggccacataagtgtgaaattaaggaatgatgtgagcaatattatatattttttaaaaataaatccaaacgtgtttagagtgatcattaacaattgttaagaagcattggtaaccctcaatgctcatactgtgaaaaggttctcaaatatcaaggtggattaaataaaaacaatgagcagacatactattggatgaggaaaactgcaaatatttttgttttaccaatgaacatagttgacaaaagtgagaatgagatttataactgaaaaaagaaatttctttattcattttttgtgtaatcttcttagtagggttccaagacgatcatgccaaagattattacaagaattatcatacaaaatagaaaagtagattgagtatgaggcagaaagtataggttatgaagccgtttaggaatcccaatcctggaaatctgattgtgtgcatggagaaaacaggcattgttagtaagcaaaggtgttagtaataatatgttcaactgaaatttaggaatgaatataacattctgaagagtgatgtgtggattaatttggacattctcagtgttagttacatgaatttaatctccatttggtaaggtaacattatgaatgaacggtttattagaaaaagattgaaaaaaattgattattgtagacatggtgtgtagcaccattgtccacaatccaagatggcgaatggatgttaccagagaggttggacaccaatagtctcatttcagattgtgttgattgtttgagaaacttactaagaatactgatcagttcttaaacttgatttgtagtcaaggatgagagaataggagttggagatgaagtggatgtagaactattgactgcgggtttgggtttggaggaatcttcagatttcttcttactgccatatccaaaggaaatccatggagaaaatagaataacctagttttttgcagttggaacaagtaggttgtggtttcttggcttttggagcatatggatgagaggtggaggttgcagcaatgacgagattgagtccaagacctcattgatgctcttcttgagcaatcatgaaaaagacattggaaagatgaggaatgggattattgagcaagatttgagctcaaacctggacatacgactcattgagtcccatctagaattggagaatctgatcgagattgtaacattcttgcattttcttcatagcaccatagatacaaccatagatgcaaggataaaaggattagaactcatgaagttcatcccaaatagctttgagatgagtgaagtatgaggtgacattggaatcgcctcgtttgagattggagagagagatttggagctcaaggatccttgtgccactatcttgattgaacttctcatgaagttcattccacatattaatagtcttatcttagaacataatacttttagcaatatcaggggaagcatattggagaatccaaacatgaccatgttgttacaagtattaagaactaagatttggatcagtaggaggaggtcgaggtaatgtactgttaatgaatcgtgtttttttctttgatgcaattgagatagatacagcacgcttcctagaaaggaagtttttcttgtcaatgagaggtgttggaatgatgagataagttagtttattgccattgttaagatgataggggctttcgtgatcgagaggttgagatccttcgattgaggcataatgaggttgattagcatcgaatttgaatccaggtcaatgcaaattctgagaaccaacaccatggccattattttcaatgacaaaagcttgcaaaggaggactactcgtttaagcaggatgttgcatgacatggccatgatgcattgccaagaatgttggtggagctgggggtaggttgttggctagagctatggatagatcaacagttggacaaggattttgtgaagaagaagaaccaaaagacaaagtgtgcgcatgaacagagattgagcgaaagatctattttacttctgatacgataattgaagaacgaatcgactctaattctgatgaattgtaataatgttatagagaaagagaaggaaatccatttatatacacactcatcctctcaaactagctaagttaggagtaattaactaactaaccaaaactaacaccttgtaactgactaactaaccaaactgacaccacaatttagttctaataccctttaaatttttaagtccactaaaaataattctcaaactattcacattgttgtaaattagtccttttgtgaatttttgtcacacatgaaaacacaatgatgacattgttgtttagactattgtcacgtcaacaccacatgtgtcattttaaataaaaaatatttgtttatttttttttagaaaaaaaaatcattaaacaaaaattaattaatgattaacaaaaaaaataagtaaaattaaggtggtattatggattttccaacacgcaagtatacatattatttacaagtaatagacttacaagagtgaggtcgatcccataagaattgtagttaattaccgaacaattaaatttctaattcatctatcattccaagagacttcttctagatgataaggttagacttcagggaatgcccttccaaaagacatcaaactttccataaccaaaataatttttagagatctttttatttagatgaactatatcatataaataaaaaaatattaagaagcatgattaagtattaagaaaaacctaaatgtaatttaatgtggtcttaaggtcctattcataatcttcaagcttggccctcctctttaattattttagaaacctaaattatgctcatcattatgaactccaatttacattttctaactttaaaaatttgaggataaattaatcacaactctcatgttactatccatcagatcatagaaaattaaaaatatatctttgttaaataattcccttgtaagctcagttgtcttcaaatagaaattacaactttgcatgtaggccaataccagtatagactcttaaactcaagaactcaactactttgagttacaacaaatactagaaaatagtttcaacgagaagaaggaaaaatacaaatcagcaatagaagacctaactactgtaactacatttccttcgtgagctattgctgtaggttgttgtagctattgttgtagctagagagagagagagagaga

SEQ ID NO: 418 - DNA, 860 bp, Cannabis sativa
tttccttgtttttctctatcgtgcgaggcttcatatttggtaattccgtagcttcagttcagctcttacatgagaacaatcacccacgaaatctttttagctataaacccaatctaaccccagattactacgtttttgtttttgtttctccttaaatttcttaaatttttcttttttgttggtttttgatgtaaataaaaggtccatttcttatgctattttctccactctgtcatgctgatttcaagattccataaaagggtatccaaattctcagcaatgatttcccaactcaatctcaatcatttacttcaattctctcctttcgtgtatgaaagagccactattacgcagaacccatcttttatttatctaaagttccaattcttttccagttctagaatatcttacaatggttcattcttcgaatctgcatattcttctggttcttctcccatggcgactattcgggtctcgaggattgtgaaaactgaagcccaggaagcattatttgattaccttcactttaccaggaacatgggcttcacggacgctgagcatatcagtaagaactccccaacattcgttcagagtttgctttccgaaatcgataccgacaaagatgttggccgatcgttaaccaggttttttcgttaccaccccattaatgagtttgaaccatttttagagagcttgggtctgtgcccatcagagctccgtttgcttcttccaaaacacctaatgtatttgagtgatgacccttctatgcttgagaactatcatgtcttatgcgactacggaattcccagaattaagattggaaacatgtataaaaaagcaaaagagatttttggatatga

SEQ ID NO: 419 - DNA, 2056 bp, Cannabis sativa
tccattggtgtaatgaatgagtaacaaggaaagttcttctttgccctcgtgttagaatggtaacactaacaataatgatttcacacacaatcatgcttaagggatgggacccttaagagttgacaatgtcaaatgtgtcccataagaaagaaaagaaaagaaaggtttccattaaattttgatccaatcaaaggcaaaagaatactaaggtcccctaattccaaccactagagagatgaagaaatgtgcattttatgacctcacatagggacatctttttaccttttttttttctttacacactatagaatcctatactaacaaacaagtaaataaatatagtcaataaagcaaaaaagtgatgtgtaaagaacgttccaaattgagtacacgagattgacagtaattaaacttgagtgcaagtgagaattctcaatttttgtatcaaactggtagagaacttctaatcaatgcggtaaacccgggaaaattaagaagattcagattatgcctttatgttaaagcaacttgtaagttacaataaggtaaaactgaaggagggcagaagatatagatgtctaaaattactttagagttgtaaaggttctctattaaagttggtcataacaagcttatgataaaacataacaaccaaacacgattatagtaacatttcacaacgttcaaaaagcctaccaccaccaccaccaccctatcccttgtagaagagttcacattttgagctgctatcactctgtcatcacaggcttgttctcgttggctttaaatctaggttccttgggcttatcttccattttcctgtaagggaaaagataaggaaacaagcaaaggtcaaaaacttctcacggaaccaatacaatgaattaaataccgaaatcatagcacagaaataagcacatgaaaacaacacaagacttaagttataaatataacaaagtgtaagagggggaaatttggtagtgtattagtgttattattactctaagatgattgtcaattcatgttgagcattatgtccgagttcggcaccaaagccagagtttagtcccactatttttcaatccatacctttcccatattgagcatcatgtgctagttgggcaccaaagcccaagtttagtcccacaatttttgaatcccatacccttcccatgttgagcattatgaccgacggcacctaagcccaagtttagtcccactatctttcaatccataaggaccatacctttcccatgttgagcatcatgtgcgagttgggcaccaaagcccaagtttagtccctctacctttaaatcccattacccttcctacattgagcatcatgtgcgagagttgggtaccaaagcccaagtttagacccactttcttacaatcccatattcccatacaagattagactgctttactaatgcattataagtaacaacgcacatcaagatatccttgactttaattaaagacatacaactctaggacaaacatactattctaatctacaaaataaattacaataaacttaaattttgtgttctcaatagaaattaatagcttaaaacaatcttcagttcccaagtgtgctaactaaataagcttgtgggtggaaaaggaaaaccaagtacatgacaaaacaagtcaatttaattatcacatgattgaaacggatattcaccactaataattcattgttagaaataatcttcatatcgccgactattctaactaagcttccaggtgcaaaagggggcttttatgatacacaagtaagattgtttgttacaataaagccatgtacaagaggttctgtttcatacacctcttcttcttacaaaaacaaatcaaaattaccacaaaacgacggaacaaaacaaattcctttaaatcacacatgcaacaaagaatgcactaatgaacatttgaacatactacacagaccaaacaaaaaactaccggaaactcaaacttattcaccatgtcaattttttgccatagtacaagtacccacaatcatttcaacagtaattaaaattgaatacca

SEQ ID NO: 420 - DNA, 2990 bp, Cannabis sativa
gcatcatttccttttttttttcttcctttcattgaaatcacaaataagcaaaggcaacattagcttctttttcaaaagcttaaacaatgttacaatatatgcaaactaactcatatccattttatacttgactttcacctttcaatcttttacaagaattttctggcaggcacttcgagattttcccgactctactccgtggtagccacaaacaccgtcaatcttcttcgtctcggttatccaacaaaactgttatgacatgagatggtaaatgaaacaatgaagaaatcttaagaatataacctcagccggctttagatgctcttactaccgggggaagaacaactgaatcaaggtttccgggataaggagtccacaagcctaacccccctcggctttcaaccaaattatccttgctcccactagcttgatcccaatctttacccttatttgaaatcttagcatttcctttaagctgatcccagtttgttacccactctatacgagaagaatgctctcgtatgtgtggatgcaacacgaacagagaattgtactcgcaattaggaaacataaagaactcgaacgaaccctttaatctgtagactacataaccgaaactcagttggtctcttggagtgaagaggtcaacctcgttgaaccacaaacaactaaacagattactcatagcggtatgttcccgtatgatgatggctccttcgggcacatctgcattttattcaagtttcagttaattcatgaaaaccaagtcagcaaattgtagaacaaaaatgatgtttcttcttaccactaactgttttcttttcgggactccaaggctccattccttcgtaacgataaattttcatgtggagatcaagaagaggccgagcatatcgtttccttcgcttgtttgcatcagcctcctcatagatactgtgatgatgcttgtgttgagcaatggcaaatgtattttttccacgccataagtatctgcagaacgaaactattgtaattacttcactcgtctcatacacaaaatccaatgagaaaacgaagagattgtcttttacgatacctctctagcattagcaatggatcaaccaatagctccattttaccatcaatccagatgctgtactgtgcttcggggaataatcggtgtgtaataatcttcggaaccttaccattccttcttggttcatcataaggtggatgttttagtaaaatgagacgccaaataccaacccattgccctccctttgcatcctccttaacggttacattttcctttatgaaatcaagagagatctcatcaacaaccataagaaaacagaagagctttttagaacgaggacttagatttgaaggctgatgtggaatatcgtatccatcgaagatgccagacgcaaccacaaatctgcatttcttgacataattcatatcttcagcagacatttcagccccaccacctttaataaatccacaatgaacctaaagaaaagcaaagaaaatataaatcaggtaaatcgaaatgcaatcacaagagcaaattacatcgatttcccataaactagaaatacaaagcttcaatctttgtttgacaatgctgcatttctcttcttctcataaagctaagataaccgaaacatgtcagtgtgcaaaaactttaccttcatggatgatcttagcttgaaactctcttctctttgagcccagctttcatgtcctccaaacagtggagtactctgagatccgttattcgaatgctcatcctttgtaatataagacaatttttttacaattttgtcaggagttcttccttctggaataactactttctcaggatcgctcagaaccggaattgaacaccctaaatgataaagcaccctaaattattaaacacagattcacaacagctatacataaattgagacataacaacaaaagattgcaaagttcttacggtgttgggattgtgactttggtacaagtcctatgttgctccacattgtgaaaaccttactctctttgttacacatacctgcaagtcaatgagacaaaacatatattgttcaaaaaaattgaatcttgaagaacatagaagctttttgatccactattgatccaattgagttcttgaaagaattagagaataggcattttgtagatatcaaagtaagaattacaattttccaaacttttcgagatagtttggtatctctctagagcaatgttgactctaaataagtcacacaaaattccataatcttgtcataagactccctcttagaatttataggctacactaacaaagattcctagctagccaaaccatagcaatctagtattagacacacttaaacaatcatctaagccatcaaggacttggcaactcatccactaaaaatgctaatcaattaaactaatgagactaatactaaggtgtaacacttttcacagtaattagcacagtaacctgagtgaaaataaatgcaggtaattgcagaatattcacaggaaaataagaataccgcgagtagctgataacttcgtattcgtttgcatctaatctataaatctagagaaattcatataccaaaccaaagtaagttcttggaattcaaaatatgtccatatcattagcttaatgttttaactgaaaagctgaatatgtagctagaaagaaatgtaatttaatcagttttttttttttgtttttctttttgatagattttaatcacacacgtagcatttgtccaattaccaaaacccaatcatggtttaaggcttggtagctatgaaaaagaacgtaaattatctttagaacatataccaatactttcatcattatgacctttccaacttcagagccaacctatggaccagtcagttaagaatcaattggctaaaaactctattaaccacatataaacattgaaaagataacaataaaatcataagagtacgtaacaaagtttcaagctttaagt

SEQ ID NO: 421 - DNA, 4237 bp, Cannabis sativa
tttctgcctggaaagcttgaaagaactaaccaggtgaagttcaagggaataaggatggagctcactataacgcgtcctgatgattggcatcttcaccttcgtgatggagacctcctcaaagctgttattcctcacaggtgacttgataaaaaaactcatggtttgattgcatcgttaaccatttatttatgctctctattgggttgacttacagtgataaatagaaaaagtcttacgtcaattatacccacagtgcaaaccactttggaagggcaatagtgatgccaaatgtgaagcctcctgtcactacaacagctgcagctgtggcttatcgagagtccatcttaagtgcactgcctgctggtagtgacttcactcctctcatgacactttatttgacagatacaactagtccgaatgagatcaagcttgcaagtaagtctaacatatataaagcaattcatatacatttttctcaagatttacatttcaagtagtgttaaattttgcatttcaaattgtttccagcatactgaatctttacccgctcttcttgtttttatttatatcacatatgacaatgatgattacactggcagggaaaagtggagctgtatttggtgtgaagctgtaccctgcaggtgcaacaacaaattctcaagatggggttacagatctttttgggaaatgtctacctgtacttgagcaaatggtggagcagaatatgcctttgctggtaatattactgtttaaatgagcgtataatggatcatcctctgcatcatgtcatctgatgttttctgtttttgtttagttaagttttcgctgcatttggtacaatttgtcttttcttgaaactcacagtgcatgctctatttcatttcaggttcatggggaggttacggatcccgaagttgatgtatttgatcgtgaaaaggttttcattaacactattttgcgacccttaatccagaggcttccactgctgaaagttgtgatggagcatataaccactgcagatgctgttaagtttgtggagtcatgcaaagaaggtttgtttaatcaccaagtagtacttcaggtttctaatattttgttttaaatctaaactttgttctaaactttgtttagtttttgttcgtcaggatttgtggcagcaactgtcacaccgcagcatctattgctcaatagaaattctatattccaaggtggattacagcctcataattattgtcttccagtcctcaaaagagaaatccacagtgagttctattcaacttttcattcattgtagataggaatagacacattgtccttcttaactccttcgtaggtaataaataatatgctgtgaagtatctagttactctggaagatattttattaatattttctttttactgggaataattctcaagtatttatattatctggttaaactcccaagtagttttaagctatcaaaacaggatgaatttgttttaaacttttgtatttagtctgtttctttcacttgcttgattcattattgtttctcatttaggacagacaattgtttccgctgtcaccagtgggagtaaaagatttttcctaggtactgatagtgcccctcatgatagacgaaacaaagaatgtgcttgtgggtgtgctggtatatacaactctcctgtagcactatcagcatatgccaaagtcttcgaagaggtaatactttcactttgtcaactcgttaaccttttccataggactttttaagccagggtagaattatgattgcgggttcaacttccaaatcagcctcctacataattcttaggctataattttccttgtggttgttgtgatggatatccccaacttgtttgtataataaagtcattccactgcagcagaattatctttttgctacatgatgatccagtttcaagtatttagattatagtaagttgttcaaattacatctatctctgtattgctcatctcaggctggggctcttgacaagctagaggcatttacaagctttaatgggccagatttttatggactccctagaaacacctcaaaaataacattgagcaagagtccttggaaagttccagattcatactcgttctcatttggggaaatcgtcccaatgtttgctggaaaaacacttgattggaaagcatccttaaattgaatctgctgtcatattaagagttagaggccatgattttccttttcatcatcatttcttgcagtgaatttcaaagcctaacagttctaagactcctttgaatcactcagcgttcatcaatatatgaacaaggttagagattgttctgaaccatcttttgcttatttgtgcttagaaaattttcaatcgaaccacactatatctgtaatctttaagatttgtggatcgagtttatatgtgtatgatttataagttgtcatccatacgcaagtaccccaccccaagaatgtcaacttgatattactatgccctgaaattcattgtccactaatattatatatttcttgggaataagcatagagaactataactaataagcaattacatagctgtatacagattatgctatatactcagcgtgtgttaattgttatcattgataatatttatatcattacattaataacatgattatatggtcaattaccaaataattttattttatttttgtatgaagtaaataaagaataataagagctcattatatcgacccatctgaatagttgatggattgcttaatttgattggtagccacactccacactacctataatctttatgatttattttacatactcgcccatgttaattgtaatcattcaataaatttatagcattacttttaataacatgttgatatgatcaaaaccacgagtgtatttgaaattttatcaaaaaaaaaaaaagtatgtcactactctatcacattcaactttagagctaatgaagaacaacacatactgtataatcacgattttcattgataaacgatataaaaaaagaacctcataattctttttaatcagatacatatatagtattcatcaatgtggtaccactttccacctttgcccatttcgaaagggtacctaactgcaaaaacatcaacagagatgtcaaagaaaaccaagttataattatgttttgtgacattaggggtcaaatttagacgattataatgtatatacctttaacattttctttcaatagacattttagttcctttattgtaaatattgtttctttcttaatgcttgatggagtcaccgaaacaagtggttgttcatgtccataaaatttcatgcttcatctgaattcaattgtctactgctgagcgatgacaatacactcttcttataatcttctctgaaagctatatttttgttccaatgggacataaaattttcaccctaatgaccaaaaattgtaaagagacattgtttttcttgattcttttggtgtataaaactataatgttaagtgaaaaagtatagaaggcatatagctttgctcaaaaggaaacggttttggtaatagcaacaattctggattcataaaaagtttgccactttattaattaattgttactgacataagtgagacacaaatgcatttttaagttgttccaaagaaatttcttcatatgtaagtggacattatacctctttattatactgttttctgaggttaaagatggtttgacatgcttccttctttctctgatttgtatcttccaattccttgttcaaagaatctctgacctttttcaaagcatgccactttttcgcatgtctgtgaagttcaactgtgacctcctctctttttttctctaatatttccaagtcataacatataatctacaatcaaagttatgacagagtagtgctgattaagattattttcatatcatttctctttgaggtgaaaaatcagaagaaggcctacgttgatcttatcttctatagcttgctttatgcccaatgagttccaactctttcctttctgagcagcattgtaaacaaagttgtccactttcattttgagttgcttaatgccatgtggataatggtctcgatcagaatcaattatgccattatttctcgaagtatctgagctttcatatagcccaaagattctggcttaagattaagttgaaataaaggttagagtataaatatcaaaagacaagtactaaggatatgtaaggtatgatataatct

SEQ ID NO: 422 - DNA, 1803 bp, Cannabis sativa
ggtgtatggatgtgctctcaatttatagcagtaagatagatgcaataaacaaaaacacaaagtgataaatcttgggaacaaagttggctatgttgattgaattgcctgtatcgagtgaagtctgggcaggcacgaagcttccctcagctgtgtttgtggtcagaacaacaatgatccagttgtcttcagaaccgattccaatgcctgaaaacttggtgtcgttaaggtaatttgagtactgggaacgtgtgaagttggtgaggacgagacttgaatccaagttgggaacacaggcaggcaaaacagccccatccctggtgttggacacgttcaaacggcatttggttaagatatttggatagttagcgaactggggttcggttcctggcacagtgttggcgcctgttgcgtttgtgcagggtcgattctggaactgttcagaaagttcatcggcaagacactctgcattgtcattcttcactaaagctgtcaagtttaaggaagcacgatattcgttgatgctttgaagaagatgatcttccttgtcacctggaaaacaacaaaaatatccgagtgccaaaatgaaaacctcaaaggataagataaatctaaaaaggttataaccttgaacgaagtcatgttacaggctaaacaacataactccggtcaaacttattcctgaagtgccagttgcagaaaatgaatttgatatatcttttgtaccacaaaaataattaatgttttgttagatctactaatatatatactttttctatacacaaatcaatgaaacatttgcaccaaagcaactgagaaacaaaaccttagcaactgtaaatagttgaaccatgcaataaacctaaccgttaaaattaaatgatttgatttcaatgtgaatttctatgtactttaaaagatttcaaagttatggatccctactttttccttttgttccataatagttgttcaaaatcccaggtttcctgagcagaaaaatggataattcctataacaatctccaccccaaccccaagaaagaacaaaaagaaagatcagagtaaggctttcctccaatcttaaactagcatattaccaggcaggtcaggatgaggattatatatatatataaaaagctaacttatttagtttggagctggttcttctctgtatgtaatattgtttgagaagggaatcaatgaatacatggacagcataggatagaaatgcttcaacagaatttggttcaacatgagaatggctctacagttcctattatcacataaataattttcttctctttcaacttaatcccaatccagttttgaggtgacaaacctctaattttcaccagcatttggaaaactaagttagaaaaattgacataacaccaaatacagatctagtaaacagtaagatggtgatcatagcctaactacagtatgagaaaacaataaaagttcatttagtctactttccaagtgaagcaccaaattcttctaaaattagcttgtaaatttcagaatgaacttgattcatgcaaagtaaaagaccttattgcttgcatttgcaaattagcagatctatgctagtattgtacacatcttaagataatacctctgtttcttcccctaattaaatttaataagccatacccagatcaattccctactcagatctaatcccaatatgatttcaaccataacatcaaacttacaatacagaaacccaaacacacacataaatgtcaacattcttgattcttcttaacccaaaatgtgatattgctcgagcatatactcattc

SEQ ID NO: 423 - DNA, 5553 bp, Cannabis sativa
  modified_base (5065)..(5067): a, c, t, g, unknown or other
ccatttttgggtatctctagcaactaattttatgttttatcgatagggaatcatacaattttgagtttaggtcttggagattgattaagatatttatcgaattgtcattgtcgtgacatagggcccaagatcgtcgagcatcatttcactcaggtcggtccgcacacatggctttggacatgaggtaagaaatgtcaattctaccgcttagcatgtcaaaaataagatacggtaattaccgtttctaagaaagagttattactcccttttgaaaccgctaattgatttcttactttatatattgctcaattatgcaacgatagtgacattagaaactcgttggtaacgagggttaaagatgctttataaagtatcgagtttcagcttatcttattagacaaatagatggttattagcatgtgattacgctttgattaactctgtaaactatatgttgcaatagatgctctgtgttgtttaaaattttgtactatatgtgatgtttgtattttacctatttttcttgctgagtctttgtgactcacgggtgctctgtggtgcaggtaaatgtaaagggaaaatagaccaactatgagtaaaaagtctctcgacaataaacatatcaccctcactgtcttttggttctcagcgaataggattcaccttttttaatcttttgaatatgtagtaatattttgtaacaaactggtttagtggtttttttgtagaagtttgtaactaaagggatccccaaatccaataatattttgaaaaagaatttatgttatacttaaattgattttctaaaagttttaatcaaatcacattttcttcctaaaattattagtttattattataaattaaattttaaaagcacacacatggcacccttacgggttagcgggttacagttggactcacagtacgaagaatttttttcgataaacttcactaatttccctgccatttcttcttaactgattgacaatatataatgctctaatgaaatagtcagaaattgattcagtatcttccataattaaagtttcaaaattacctctaagagcttcaagataaatcttttccacttgctctgctcctttgttgaaagtttgaagcttctcccatgcttctttggttgtcgttgcatttgagatcttctcaaacgcatcttcatccacccattgatagatgaggaagagagctttcttgtccctctttctggaatcccttaaggcatctcgttgagcttaggaaagagcaccatcatcttgctccttatggcctttctcaataatatttcacaaatcttgagctcttggtagtgcattcatcttaatatttcaattttcatagttgctcttggtgagcattagaacttggaagggtatcattcctccacttgttattttacttcacaaacttagttttggtaccacttctttggataataagaagaattttggagagaatacttaaatgaaagaagctatattttatatctcaacttgtgtgatttatgacttgatataatatgataagattacatctctatttttaggactctatggactattctagacattattaataaatgactagcttctacaatttttacacaattcttactactaacactagtgaaagacaattctaaaaaatttaagagtactcaaacaaataagaaaactctagacactttagtgaatataagaatagtctagaaaatttagtaacagcaagaaaactctagaaattaactatattaaatcaagtttaatacttcaacaatatgtccctttagaaaagtatgttagagataaagcatatcctgttatattattttgaaataatataatatatagattaaatatatatacatataagaaactaaaaatatgtaatatatgaaaatatatattagttgcatcattttttaacatatggtggagttacttgttaacctccacaattatcaccaatattaagtgtgtaaaaaaagtgttgcacatcttaatataaaattcttaaaaggtataggagttatagttgtgaaagaatgagttttatactcatttattgagtccataactattagaggttatgagttagaattttaaatagtaatatcctacactatataaataggtttaaggtgttcatattgtgacaatctaatttctattaacaaaacactttgatagaaataaccctaaatggtttgataattctcaaagatattaatttcttagagagttttcttagtatttagcgatagagaaataaatttttaggcaaatgtataatacttttttcaagtatggtgattctcactaatatacactcaaagttatgagtgtgtttatatacataatcttcttctatctttcttatattgttatcatatttatttatttaatctcttagttagtccatgtattatattacaatagagttgaaatatgttgattttcagtaattaaatctctaacatatcctattccctctcatgcttcttatagcagccacatattctcttttggaaaatctctatcgcaattcacaaccaatgtgacatcaaggagtgggaccatataaagacaaggaaatgtgaagctgtggaagggtccaaaattccaagctatagctctccaacttaaagtgccttcatatagtaatgattcataattttcacaaatacatagagtagtaaaaaggaaagatagaggagtatcatatatgagagtatgagtcattacgttgtaccaaaatggaatctaaggcaccaaagacaagaacaagtcgaaggagaagagggaaacagatcttctcacgtgcagaatcacagtagttgtagtaatagtactcatctagtccccatgtatgcacaccatttctctattgctacctatctccctattcatctttttaatgatctctatatacttatacgtatgattttcttttggtattgaatctacaatgaaaacaatatcattttttcttattatatatttttatgtaatttttcttgtttcaaatactttattaaattttaaaaacaaagttccttcttcatactcacatttttgccttccaaaagggattataagtatgatattcacttaattaaatagaaaatgtctaatacccttttcttttagcccattaatgtgttatcttctccatttcctcttattcaagtcattggatatattttccaaggattacttttatctcacaagctatatacatctaattttagtgtcattttcaatcatatattccttcactctactaccttactccttataaaatttatcattacttgttaacaaatttgtttatttattatttttttttaatccgtcctttaattaattttctttttttgactaaagaatctctccttctctattttttatgctagtagaaaacaaaaattcctctgaaacataattgttttttacaacatcatgtgcacaaagacttttaacacgctaacttattttttgttcttttcaactccttgtctcattcattaacaaaatttaaaattttgtcaaaaaaaaaacattcttctatatctaaccataagatttcatataattcgtagccgcaagatttatttatttgtttattttaactcattctttttattatatgcaaattatagtagatcgagatttaataacaatgttaaggagctaacgtgggagaatggccacctagccatgcatgggcttgatggactacttccctcaggcccaacaaagcctacatggggtacaaattgtgagacactagaatctatagtccaccaagctacaacatgcaacaatcaagttcaagacccctatgtgacatatcatggacagaccccggccaccataaccttcgaaactggtgcaacttctagcggaaaacgggtcgagaacgccttcatggccccgccggtgatgagaaagcgaaatcagtcaaattccaacaatgaagggaagaatttaagtagcaataattgtagcattcaagaagagcaaggaggcccaagtgcttgtgctagtgctagtacaacattttgcaaggaaagtgacacaactctgatgacatgggcttcctttgaatctccccaaagcttgaagaacaaaagtaccgatgtggattcagcctgtcatgatggcatggtaaaaaaaaaggagagatttttgaattgtagtaattaactatatatgacttgctcaaagttgtcagcattgtgtaacatcaacaaatttgaaaacttccaaaaaataaataaatagataaagttacaaaacacaattcccaggaaatattgaatttgattcttaactattgttgcaaacatatgccaatttgcaactttttaaatagtattgatgcaaattaagaggctaataaactgttgtaataactagtgtaaaacaatgttttctaaacttaaaatgtgtgtaacagggaaaccaagatgaagaccaagaaacaaaaggtgaatctggacgctctaactcaacaagaagtcgtgctgctgctattcataaccaatcagaaagggtatacaaatttgtacttataagctttgtgatcatcaatagaaatagtcttcgatgatgtttggcatatgaaatatttgaatagcttagatacaacctattgagagtttcaaagtctttttcttttacttgttctgtatagaggcgaagagatcggattaaccagaagatgaaagccctgcaaaagttggtgccaaatgcaagtaaggtaagtgatactgttacattacaatttacaacaaagtatcgccttttgtttttattagtaccttatgtgtgtggtatttgtattcatttttattttacagacagataaggcttcaatgcttgatgaggtgattcactacttaaagcaacttcaaactcaagttcaagtgatgagcagtttgagaaacatgtcacctcaaatggtgatgtctttgggaatgcaacaacaacttcagatgtcaatgctagcccggatgggaatggggatggggatgggaatgggaannngaatgggaatgggaatgggaatgcttgacatgagctcaatggccagaccttttcctcagtctctctcttcagtcatccaccctactgcagcaaccaccaccggttcaacatttgttccaccgccgtttatggtgccatcgatacttatggctcagggtgcaaagcctggccctgcagacacctccacttcttcttcggtttctttacctgatccttattgtgctcttatggcacaagtatgatccacagttttactattgactaataacctttcttattactttttataatctcttttattgattgattataagaaaattttcactgaaatgtcatttgtatgtaaatattttcttacacttttgttattgttttttttagccagtgaatatggagctttacaacaagatggcagcagcattgtacggtcaacaagttaatcagactagacaggcagcaaaaagtcctaagtttagtactcatgtt

SEQ ID NO: 424 - DNA, 1218 bp, Cannabis sativa
cagttcgggtaaggggttacagacaagttgttatacttggaccatacccggacctaattatcaatatgcagaagatgccaaagtacgttcatgcacatgttctaattatccattacacaatcaactgaagaaagatatcagttacaaaacaacataaagtgatatccaacagtcatacactattttctttaacagtcatcacacaaattttgtttgaatcacagctccatcttttttctctttcactactattttcccgctacatttaaactaaccttccactatctccacacaattcatacactgggtttaagtttttttcaaacttactacaaaaaatttgcagcagaatcaatatgcggaagcaccaaagtaagtttaggcacatgttctaattatccaatacagaatcaactgaagaaagctatcagttacaaattcatagaaaaaaaaacctcactcatcaaattacaagttttctccatagagactttgttcgaaacaaagctccatcttttttctctttactactaatttcttgctacatttaaactaccttgcactttttcctcacaattcgaactccattcatcaaaatacaattcagacatgaacaataacagtcctattcaacaatagaaaaccgaaaaagtaagttcttgcacatgttctaattatccaacagtcattagactcatcacacaagttttctccttagaaactttgttcgaatcaaagctccaatctttcttctcttcactcctattttcccgctacatttaaagttttaaactaatcttggactatttcctcacaattcatactattcaattaatcaaaatacaattcgtaaatcttatagtacctgcttcagaagaagattcaccgttctgtaaccgagattgaggtaacacattgggactctggtctctactctcagtagacatactatcagagttattactcacattatcagcccaactcttcgaagcaatatccaacaaacccttcttcttccccgaactcccatcctcaccaccactaattggtttagacaaattactcgctcccaacgacgaaaccttatcacctctaaacccaaaaaaactctcctgcggcaacggtcccgatcgcgtctttatcctattcaaaccaagcgaagaagcaagaatcggcgaaacagaagccggagccggagccggagccgaagccggagcc

SEQ ID NO: 425 - DNA, 2341 bp, Cannabis sativa
aagccaatacttctggccaagggccaggaagttattcataaggtttcggcttcagaagttgttacctgtcctttaaccacttgcattgtagtagattcttcttcttaggagagagaaaatacaactgctttgactatagttcctcttcagcaaaggccaattgatgtggacaatgaagaggatgatgacagtgatggacttgatttacgcagagaaagagatcaagatttgaagccaaggataaaattcagtaattggctgcttctaggaagcagagttcagaatcttccaaatgaagatgaactgatgcttagcgaagtgacaaaacatataggcagagcacttgttctggcaaagagattaccagctcttagccttcgccatcacaacctattcaggctctttctaccttgcccagagataagataagtcttccaccacttcctccttccaatattatcttaccagtctgcccttcctcattaccgaaagaggtatgtgctcagttggatgtagaaaataagttttacctcaagagattcaactctaaatatgatgagatagaggaaaaagtatcctttctttcaactaggaagagcgccaaattttctgatgttgcaaaattgaacgagccactttctcctatttttgaccgttaagtggttgctgagaggctttggcctagggtaggttcacatctagccttgtttgcagaagacttattaacctaaatgttgttatgtatagcaaattaggtgatgataagtttactaaaatggccagtaaagatccaatcttcattacagacaacctcaaaagctaaagtgttgatgtaagctttctaacttttgcttgagttatatctttcagacctttccgcttacatatgattcttatgtgctttctcttttagatgagtctaatagcggagaggtgctcttccttggtgaacaagttggcctatgaggttgaagcccttaaagctaaacatgataattttgagcggcagtgagaagaggcagtcaaagctttgaatgatgctaaatctcgagctgaagctatagtcaaacaactgacacaatttttagttataaagcttatgacaaagaagagaagtattgggctaaaagatataaagaatcttacaatcatgcaagttcacaagtttctaaattggaagaaaatcttgcagatgctcagaagaaagttaaagatatggagaaaaagtagaacattgtttctcaagactaaaacactcagactgatgctcttaatgagaagatcattacagtcgccagtttggagaggcagttgaagcaccatcaacatctccagtttaaggctgaaacttctgaacatgcagccttaaacaaactcaaggaatctgaggctaatttcatggcaaagcttaaagaagttgagagagctttagacgaatctcagaagaaagccaagaagaaagttgaagaggccaaagttggtgttgtaaaggcggagtcttatgctgagaaacttgaggagaaatgtgccctcatggaggtggagcacccaggtgatttgaataagtctctggttgtgaccttgttccatctttggaaaatcaaaaggaagtattgaatatattggatgaagatgatagagtaaaacttgttccccaaatcgtggaacttgaagcttttgaacaagctgccaaggagattattgaaaaggatgttgaagttgttctatcaaatgatgtggtcctcaaaggatcttctcttccgtcctcagagactgatctagctagtgaggttccaacttcagacaatgttccaaccactaatgctccagttgtaaaacagtctgactcagttcaacaagtagttaatccaggttagcaataagcccacacttatcaactcttttttttcttttatatttattttggaggaccaaggtccttctttttattagtgcgtagacaatgttggtgcccttgtcgcatagcttatttatgtaaataatttaagatttttatttgaaacttaactcaatatatattaaatgcgtatcgaatgaatttaattttatttttagattccttgaggttctagttctaatggcctgaattataggatttttacttaatgcttagactttattttttttttttgacaaaatatttttataaattccttagaacatggttttaatggcccgaaccttggaaataaataaattaattttaagaaaaagtttagtaattaattgcttttgaagctaggacttctttttaattttaattaacttggtttaatcagtttcgaagcctaaacttcttttggtgaacctgaattgattt

SEQ ID NO: 426 - DNA, 4040 bp, Cannabis sativa
aataaaaattaagggcataggcattaatttaaaagaagtatgtagtgaaattttctcaatttttattaggattatgaaacttgtgtagttaaagacagactagccagttgatcatatttgagttaaggataccaaatgagtattttagtgtaccaaacatgtatttagataaaaaggatggtactaaaccaacacacactcatgatctattcaatcatacaccaactgaccaaccaagattcagcaatgcaaacatttagcaatttgtgttcgtcaatcatgttcatatcatgtcgagacttatgtattacaaacaaatatcaaactcaaatctaacattaaataaaattgacctaacacaacctgtataactaaaaaaatcatgtttatgtttgccagtcaagcaatcttcataactcatcaatttttgtactttaataaaagtccaatcttcaataaatctgaacaaaaatatactgtcactaactatttagctctagtactcaatctgaaacacaaacttggctcttaacatttaacatttccccttgttgtggacatgaaatacaaaactatatctcaaggtctactgcagtcttcatcatggaacatggtaaaatcaggcacctcctcgatacgctctgcgggctgccagaataaaaaaagagattattgaaaagaaaattttgatgtgataatgaagaaggctaaaagtgacatggagaaactctaaacctgccacaattgcaacagtcgccatagcaaaaaatcgatgatcattaccaagcaaaatagcttgcctgcccatgatccacacgagagatacctgacaagaatatgaaattaactcttgagccttcaatattactaatttatctaatgttaattaatgtaaatagctaaggaaattatctggctaaaagtaattggatttaaggtggaaaaaagttgaataagcaacccaaatcagatgaccaaaacctaaaaaccaaaacatgtgttgctccattacaaagaattttgtgacatgactaaaattcacatcttgcaatcatattcaaaagttaagtcagaaggttttaatttgttttatttaggagggataagggtcaatctttattctttaaataacaaaatcaatcccatcagcatactacttttatcaattctatcccaaataaaggcaaagacaagggtgacaaaaaagctgagctaaatgctatccatgcacaaatacattgttctgagaaaaaacattgctgtaatcaataacacatatctttgtttaatgatatgttcagaagcttaccgagagagtctttctagaagactttgatttgtgcattttagtgcgcgatcatacacgatctctgtccttttggcaacatcatgccaatcataaagccccttcatctagcagcagtcatgaaaatgagaaaaaacacatttaaccactgttcaagtagtcaactttcacagacaatttatttaatatcaaatatccatactcgattgtgcatcacttggggatcaatcatgggaagaatagatattgccttcttgattgcatgaaccatatcaccaggatctggttcagctagtacaatcatgtcatctggtagaacctacagccagaaatggagtagttaagctaaaatgtactcaaaattactgaagtgtgttactttgtgatcaaacattgaacatgcatgataaatagttaggcccattatacggacctcgggaacacctcctacacgtgtactgacagtcaataatccacaactggcagcctctagtatggctatgcaaaaggcttctgttaaggaactgttatagggatgaaaccatgtttagatagaggttccggagagcacattaaatgcaaaacccattggtgtgaaatagctttactcgtgtatgtaattgatgagttaaaatattatagcagaaaaaaaaatgaattgacaacttaagctgaattataaggtacccctaccttgcattatcaagtacctgtttaagaatatatggccagaaacaaggacagaacgcacttgagcatgtgggactgcacccaacatttcaacacgatcttgaagggaatgtttctccctcatctcttctaaccgcacacgtttaggtccatctcctccgacaatgaaacgaaccttattacagatttctgaatgagataaccagagcaataaacaaacttaacaattttatgtttcaaaatggacaaaaaagagaaaaaagcaaaaaagacaggggtgtttgcaccaactagataggtcatttttggttttccacgaaagaacttattttctaatctttatatctccttgtaccaactctaacagctatttttttttttcttgttttgaaaaattttgcagcagcagtaataattattatattgcacagtgaagaagtgaaagtatactatgctgatatgatttcaaattgaaaaagatgaaaaccaaatcgagagtcagacaacagcagacgaaatatgatatcgttctcaaaaaactcacaaagggatataatcggcagacttctggaataacttcaacaagcagatcagcacctttcctgtacaccagcctactaataacaacaataacaatttcatcacgactaagtctttttgcagcaggcttgaacatagctgtgtcaacagcattaggtatcacaaaaaccttctctggcagcaaacccgagcgtagcactgtattttccttgcttgtatgagatacacaaattgcctgagttacatccgctaaagtaaactgtaaaaccttattcatgtggatgctaccaacatcagaaaaaccatagagtgagtgatcagtaaacacggccttataccccattgtgcgtgcgtgcatcaaagcttcatgacagagagttgagaatgcttgatggccatgtaccaatgatatattttctcttacaagtatagtccttataataggaagagttccatagaaggttggtagtgtattctgcatcacaaagggtgtccatggtatatagtaaactttcagccctcctgtcatatatctcactccagatcggttcccataggcatgtgtcattaccaccaccttaacaatcagaagaaaatgagtccacgaacacaaacataatataattatcaatacaacataatttccttttattatgagacaatccaacatcaatttagcacatgcactgtcatgtgatggaaaaggggaagaaaatacgtgtgcaagttttaaaaaaaaatggtccaacgatacatttgtattacagttataggaacaaaataaatataaatatagtactttcatatggctactatatgtgacaacattttctaaccttgtggccaagctttattagacattgtgcgaggtagtaaatgtgattctccacacccccaaaattggggtaaaaaaaatcagagaccattagaattctgaacctttccttctgctcacccatctatcccagttagctggaactgaagttcaatccaccaatattctatgagatcttggcgttattgtttggtctctaaggaaaaagtagcagacagttaattaaataaaccgttattggaaaattgaaaactgatgaacacgaaaattaatgcacagtttagcatctcaaggaccataaaggaagcaagtcagatggcactaaattataatgatgtatctctattgttctatgctcggcaaatatgtgcataaggcctaagctagtaaatagtgccagaaattttgaagcctatgcaacaacatttaacaaattttgggttacactgaactgggattagagagttaccctacccaattgaaaatctaactaaggtttatgagttaaaactcaaaccattgcaagaatctcaacggtgtcccacaaaacatctacaataagaacttgaaacataatcaaaacattcaaagctctccattttcaacaggcttcctctgtttaaagagaaaaaatctggagggtgccagtgtcttcaaaattaatgataa

SEQ ID NO: 427 - DNA, 2037 bp, Cannabis sativa
atctgcattaaagatacattacatcaatagtagtgacatagagaccattatacacttacaaaatccagaattataatgttctacatagatctgcaaattgtttcagaaggttataaatgtatattacctctatatgggagtatccatcatgttccattgttgttatacttcctagcatgttgtaacacaaaaatcgcctttttccaggctgcataggagtagaacctggctgaaaggcctcctgcattttgaacctagaagatattactttgcttttaagtccctcgtttgcatcttctttgctagctttatgcatatggtgtgtttttttatgagatttaactttcagaggcaaactcaactcctcaaagccatcctcctctagatcattctcaaatgtagactgcttccttagtcttttcctgctagtgggctcagattcaccaaggcaatcttcaccaagatcacttagactacccgaggcactaggctcttgatcctcttcctcaaagaaaagaagcccattactattcttcaaatgtaaattcggaatatcttcagtgggagatttcatagatgacggaacaacagattcccacacaccatactttcccataacatcaataacaaccagtgcattgcccgttggcttccaagccaaacaacaaattctctcttcaaatttctgcctatcaatatcctgctttttatcaacatcccaaatcagaacctgcttatctaaaccagcagtagccatgtatttaccatttggtgaccaagccaagaagcaaataggttgtgtatgatcgcctcttagacaaaatagcttctcagctgtgtctctatcatacagtaccacatcatttctcaaccctggaacagctaatgtttccccatcaggactccagccaattacattcattacagaagggtctagaccaatatcaggagcaatgcctttaagagtgtgaatggtacttccagactgaagttcccagtatatgagggtgccagtagagtcaatagaagctaagtattcgctattggggtcaaaacctaagccagttataggtcctttatgccctttaagaactctagcaatagaaccatctactgtgttgataagcttaattccttcgtcatcaccagcagcagccaacatggttcctgatttattaaatgccagaacccttattggcagggtgaatcgggttatgttagtctcaaactccccacctgttcatgatcaaatttgaaaaaatgactaaaaattttaagtaaaatataaataacagtagctcaaccatagtctaatcagaagagtcagagactcagaacgcgcgatagtaaagagggtaatatcaaacaacaatccgatacaacaacagcaacatacattatatatacatatatatttggcaagaccttttttctttgtctttttcttttttgtaatttttatgtgtaagtagctaattctaaaaatataattggaagagtacgaagccacaaatcgaacaaagtaacttcaacaatccggactcaaaactccattattatcaaaaaaaaaaaaacataaaaagattatatcagaggaacagtaataaccaggaaacttgtagagcttgacggaatgatcaaccgagccggaagcgaggcaggtggagttggggctaagagcgagggcagtaactccgtcgcggtggtggcggaggagcttgggagcggccgaaggaagaagggggtcgtggatggagatggttgggtcggaagaagaagcggtgaccaggtggttggcttgctggtcccacagcaccgagcaaaacgaagggcgtccattgctgggagctttgtgagcttctctcagcttcacagaccggactttcatgatcgtgatttgaaagtctcacaagtatggttgtgtagagtggtcgatctaagagactgggagaggttttactttactttgtgtttgttgctacttgctagaaagaaatggggattttgtttattaggttttggcggaaattggcgggg

SEQ ID NO: 428 - DNA, 1909 bp, Cannabis sativa
agattagtactgtaataaagtgatcttgttaataacaaaaacaaaagaaatgaataaaatggaataatattatgtgatcaaaaataattaattaattaattacataattatgtttttcaagtttaattagtatacagtcacctgaattaatataaatatatatatatatttatataggtcagaatcttgaagatccttcttaaaaaggagaccaattattatctatagtttttcattttttattgtatgaacaaaattaaaatcttttaaataagggacccattttataaacataaaatcgtgtcatatgttttttaaagagattttctggtaataataatacaaaagtttgtagtagtaagtaccaacattaaaatattccttttttttaatttagtactttttattacatatagctacgtagtcccatttatctagggttttgaaataagacccaattctactacaagggtttatataaatatatattaattaatcatataatataattaaattattaccttttgatttaggggaattttgcaaaaaagccatagttgaattcaaaatccatcactggtgatgatgatgcatggtgaagcttgagctatgatcatgttgatgatgatcgttattattattattgttcggtttattaagaatcggattaagcttcttcttctttttcttggtgtagggaattccacgagcttttgcttgggaatccctaacatcacgaagataaactcttatagctccacttgcaaaagggtttgtctcggggagtccaccattctcttcataggcggctctcagccgtcctatcagggcatcgagacttccccaagcctgcctaagtgggcaagagcaaggccctggtggctcaggttgaccaaaaaacacacaaccttgcatgtgaaccttagtttttccgaattgatctaagtaccttaaaaattccaacacatgattggagttgcactgtgatagggcaactggcggcctctggttcctcaggtattgcccaaaagtgttccaatccctcctcttctgagactcataacgactcagaggcggcggttgatctcctcctcctcctccttctcctccaccacctccagatctcgacgatccttctaccacttctttgcctttatcatttgacataataagaaaataatttttttgtgtttttgagagagaatttgaagatgaagaaatagatgatagttgaatgagattgaatttttttagaagagaacaaaataagaaaagggaaaaaaaagaagaaaatcacatcaaaaatttggagaagtgattaggggagacatggtttattggtatgggacccaagtaaggaagtgctttattaatatagctcttctttttatttttattttcttcttttctctctctcatatattattttcttgctttagtggtactaattaatattactttattattatttttctatatttttattattgtgcttccatcatcaatacaatcattatcatatatagctagtcttattaattaattaataatcttaattagtaataataaatttcaaagttaattttttttttccatttatgaccttattacagttcaataatctaagccgtctcccttttttgtgtttaataaataaataaataaaaataataaattattttttaaggaatatggttaattaattaattaattaattaaactaattatttggttgttgttttagaatttagataacgtggctcatattttattatttattttataaatactgaattggatagcagctatagaaatagaaaaacacatatatataccacttttgactaatatttaattggctttaattaaataatttacttcattaattaacatttaattgttatagtta

SEQ ID NO: 429 - DNA, 3101 bp, Cannabis sativa
ttttttttttttttaaataactaagtttaacttcatacttaagtttaagtttaatttttggcagtactaatatgtgttaatctgattagtctaggtcattaaatttttatttttattttttaaaaataatttaaatataggcgtataataatttgacatttaccgataaggtatttatcaattttaaaaatataatttaaatatcattaccatccaaaattaaatttaagtatttatatacaacattaaattaaacttatatagcaaattacactttttcttttttttttttcctttgcttcaaaaataaataaataaataaaaaacagaggtaacagaatcaaccatcatcttcttcagtgagcttactcaaaagctataatggattcaacactgatacgaatcccactcccattcaagctcaaaccctcattatcccctttctcaattctcaacaccaaacccaattattctcacaatcatagcttcacctgcaactccacccacaacaacaacaacgacgccgttttcgacgaggcagcgtacgagtccaacagactatccctcgacgccaaagctcgaaagtcaatggccgaagcttacaaatcatccatggaagaagaagaacaagacccaaaagcttggaaatgggtcattcgtaagagaatttgggatttaatggagtcccggaatttcgctcagaacccacgacccgtccaccaccgtatccccaatttctccggcgcttcagtcgctgccgataaggtaaaattactaaaaaccccttccacacattatcatttatatatgtggtgaaaatgaaatgtgatgtgggtattggcagtttggggaattggaagagtttagagttgcagagtgtgtgaaagtgaaccctgattcacctcagaaacaagttcgatttctcactctttctggtcagttttcataattatgaagatttggattttgatgatactgaaaaatggtttgaaaatgaaaaaagattaggtttttgctttcattgagagttgaactcaagacctcccgcttactaaacgggtgctctaaccaactgagctatgaaagcttgttgtttgttaaaaacatttatcattattcactaattatgtttgaactttatatcaatttttccttaaatgttgagatgtgaagtaatttagaacatgaatgaacataaagaggaaagaaattgttattgtcttttgattattgttgtcttgaaatcattcacttttggtagatggaaagaaattgttgactcctcaaccaaggttgaggacaggatttttctctgtgcttgaggcctctaagttaactcagggcaccattaaagaggcttgcacttcagttggagtcgccaagcatggacgtccaatcggattggatgaaaaactgaaggtggatttgattgtcattggctcggttgctgttgatccgaaaactggagctcgacttggcaagggtgaggtaatgagttcctaaccatgtctactctttatgatgatatgtaaagagaaagttagttcaactttgagctttgttatgcataagatataagactattctttttcatatcctagtgttttggttttggagtcattatggggtaaatagcttttctgagatgttttctaaatgggaatattgtgagacagggatttgctgagcttgaatatgggatgttgaggtacatgggagctattgacgattccacaccggtagtcaccactggtatgcaaactttctttgttggtacttcacttattatcaattagttttaaattaaatttaaattctactatgaaaaaaaccttgagttttttgcggctaaaccccttttaattggcgtttcacttgcatctaacactcctcacatgacacatgtacaaaagtgtacacacataagcaatctatattaacagttaactgtgaaaaatgaatgacactttaaatttgttatcaattcagtaatttagagagtttagccgcaaaaaactcaaaaaaacctctctcaatttgtaacatggtattaagagctcggacccgccacactccagggccgtccttagggtggggtggcctaagccgttgccaacccaagtccataaaagctcgtccaccctaactctgtttcgccacattggattctttggcctaaaatatgaaagaaacattttatactctaaataacatttccctcattaaaaactcattatacatttgctgcaatacttcacctactcatctttccaaaaacttgtttagcacccttttcccttcattacaattacaaccatttttttcttcttctataaatcaattactaaacatggttgatttttgatgaataagtttgctttacatgattacatatcactatattattcttcaagttgagatttttttttttttttgcagtgcatgattgtcaattagtagatgatattccattagagaagctattaatccatgatgtgccagtagatatcatatgcactccaactcaagtcattttcacaaatactctcattccaaagcctcaaggttagcaaaatttcattctttttttctgggttttgatataagataattatattctactaaaccaagattcattgattgatttgaataggaatttattgggagaaattgtctcctgaaaagttgggacaaatcagaatactgagggagctgaagaagaggattgaaagagaaacaggaaagaaactcccatctggcccatctgagaaacttcctcccactgctcagagaaaaccttaatattatttattcaattgaattcattcatgtctctgttaaacattttatgtaaaaaaaattaatgaaataaataaaaaaaacattttttttaaagggtggaaaagaataaaacgataaacgctagaggaaggggtcgaacctccgaccttgtggttaacagccacacgctctaaccaactgagctactccagcttatgtcttaagattcaaatcttataattttaatagatattcttaatgaataatattattcctacattctttttttgacaaatattgtttctacattgttagttact

SEQ ID NO: 430 - DNA, 2367 bp, Cannabis sativa
gttcagaatgagtatgattcactcgaaaaacataaaacaacttcaattttttttattgttacttagccttatgcttatgaatccaaatcattattaccagagacatcttgggcaattacagcatgcaagaatcttccaggtacgccagcattgacttcaacctttccagctcttagatataaatttagtctcttagcagtttcacactgttcgacaacttccataatcggtgagattccattgtaaaatgatgctgcacattgaggaagttgaatacttgataggtcttcttttcttttatttactagatatgttttttcgattggttttgaggaaccatgtaaggtttggtgatcttcatatttctttagtgttaaaccatgaagctcatttatggaatcttgtaaacttctaaaactgaattccaaatctgatgtagctcttgtaaacgtatttggagttgttttggaaactttttttgacttctcaagagtagcctgattaaaaggctcaaaattggactttgtcattgaatcttcgaatgaggattccatggacgtttcatttgcataaaaatcaaaattttcaatctttccatgaccaatgtctgagatagaccgtggaacgttgtggttgccagaactttttgggaaatcaaaggtaaaattctgatcattttgtttcaatagacccttataaaatggattctcacgtttacgagtgaatgtttcctgttaataaagtaaaaaagaaaaatgcattactatactgaaacacaaaccattcttagagactaaaatgaaaaatactagactggcttctaaaacacctaacaagcactaaaaccttcatttttaatggttgacatctaaagcatatctccttttgaaacaagtatcattttgataatggttgttacttgttcctttctcagtttagtaactcaggaagtatgatacaacttcccctaaggatttggaaatggaaaaagtaacaaacatagagatacttatgatcatttataataagcatatagcacagtagaattatggggttctatctcaaaagtaattggtgatgagtggagtagtccatgtttttatatatggttcaatacttttatatttgatccatgtgggacaatattgtccaataaccacgtgttgtgtggtgtactgtggtatggatgcgtgctcgcatccgaattcaaatttcaccgtaacttctctttggaagggattatacttggttttttgggaagctagcttggttggtgcattatcgataacccaatcaagaaaagatgacccctatagttgagacctatagttgagacgtggtctatgagattgtctaagactaaagagttagtgttgggggcacaaaaatatttaaaccaactatgaattcagatgacagatgctatttctactagaaatgatttcggagctccaatccgtagtgaaataaaaggctactcttgtaatgtttttgctgagcatcttaggataatccattaatccatacttgttccataacttgccaagttttccaataacagcaaataagatctcatacataataaagtttttttatttttttaaaaggacataggcatatagcatttaaaaacccacattggccacccttaattaatgaagctggacaacgagtcaaatatctatagtccaattataaaacattacttatactaccaaatattttaatttctttttaagtttctaaggaaaaatgtcatattaaagttttattagtaaacctatgtaaaatattacaattaaaaggagattatataaatttttttaataaagtcataataatgtattttcatttataggatgaaaaaattgtctagaataattttattaattttattttctgtaaaatattacaactgctccaacctaggtaaaaggaataatggttctatttaaatagaaactagaatggttaatatgatatcaaatatcaaaacatgggacactattgaaatgttattcattagtaaatacgttgttcttcttacctgttgctccctagcaaaaccactttgaggacccatgttagacaaacaaggagagaataatggattagaggagagtgaccagtggctttatgatgagctttttattagaacggctgagatgaagagtaaaaaaatcaaacaaacaaacaaggacaagatccttgatgaggttctttgaggaatccgccattatagtaaaatccttttctaagatttcttgttttccacttttctgatttgcctaggaattttatttttctttggaattttgtgtttgcttttttataggaaaattattgtaaatgaacccaaattataaa

SEQ ID NO: 431 - DNA, 8589 bp, Cannabis sativa
tggcattacaatttacatttaccattgttattttcttaatttagtaatagtttcgatactatggtttcttcaggtttcttctccgaccatcatagtagaacgagcaggatcatatgcctgggcgcacaaaagttggagagttagagaagaattcgcgcggactgtcacttcagcaattggtcttttttcagctacggagctccctcttcagcgtgctatacttcctccagtatgttcattgactatcattggacaatacatttcctcttttagtaatttttatggagcttgtgtgggacaaaaaccaacctatttttttttcttatcagattttgcagatgttgaatgatccaaatcctggtgtcagggaagcagctatattatgtatcgaggttagtggtagtgaatgataatgatattcaatattcagatcccacttatcctgattcctgaaaatacaacttcattttcgttttttcaatgttgaagaattcaacacatgtatctggagaattgattttagtttactttattcttgagaatttctttctttcaaattaagatttttctgttaaaaaaatttctaagatgctaatattcctggtttttattttattttatttttttatataaaaaaacatattatatcaccttttcataccatcttatgtatcaaataaattgtcatgtctcaaatctcaattgatgaattaaaacttatcacaaatatttaattgacattcacaacttacatgccatgccacataaggtattaaaaaggtttaagaagaggtgggttccttagcataatccattctcaaagggtttttatgctgaataatacttgaagaacaggaaaggctcaaatgggattcatgtaaataactcctgtttatatatgtttcacttctaccttcccatgcagccatgctgtggtgtttggttagtgaaatcaacttttgaaagcactcaaaactgattactgaagagcaatgtatatgagtgtctggtggatggatttcgtaaagtatttaatgcttatttaatgtctcaggagatgtatacccaagctggcacccaattccgtgatgaactgcatcgccaccatcttccatcatctatggtaaatttctcttttcagatttttcgtgttgtgaaactgacaatatgtttctttctgcaataattcagattaaagtggcacatgcagtttacagtttcaattgaggattagtttttgcaagttcatagtgcactgttgataaagtattaaattgcaggtaaaagacattaatgccaggttggagagaattgaacctaaagttcgttcttcagatggacatggtaacttccctacaggagaaaataaaaatatgagtcacaaccacaagaaaagtagtccaaaggcaaagagcacggcaagagaagtgtcactttttggaggtcagtatctatttattgatcatttaatggatgcctgcattacttacgcaatatggtccgcaaaattcgatcactttataaattgaagtgatttgccacataagtgtgtgtacatatcattactctttaggatttattgtaaagcgtattccccttcgatgcaaatttctattgtgtaatgagtaaggcttgcggcatctaatagtacccagcctaacctgaattacaaatggggcattgtacttgacacctgtcaagatttgaatatagtcagtttgaaccaacttaatctggaaaagcttgggttagatttggtttgaataaacttggggaagcctggatttgaaaacataacgagcaggcaacacataacatgaactttacgattgtatttgctattagagttgtgtttaatcatacacaattctggaaataaaattcatttgtcagtactagttttattcgaaaccatgttttcatgtcgtgatatttaaatgcagatgaaagtatcacaagctatgcatgatatatgctttgttgtaaagttgttggttttattaaatgctacattgattatcattcaattgatagcaccgactctttgttgcaggagacgatgttactgagaaacctgtagaacctattaaagtttattcggagaaggaactgataagagaaatggagaagattgcttctactcttgtgccagaaaaagattggtccgtccgtataactgctatgcaaagagttgaagcccttgtttatggaggtttgtgttgccttttttttttctcttctttttaatctctgtctctctttgctattagtgtcattacatataactttattagtggggttggggtgagggattgaacccaaaacctcctctataagaggagatgtattgtaacgcgtaggctaaataaatcctctcaactttcttcccttcttccatacagtcgagttggcaacacctataggaaaggggggaaatacaaaattaccaaggggaaggaagatattattattatattcttttttgttggccccattattatcttttgttgaatatgaaagtaattagtattggcttttaaaagcattatattttgttatggtgaacagttaaattttatttcagatttcttaaatactcttttgcttaaaatgtaacaagtctagtttcttaggttctcactttattttcttaggaacatgtcatttaatatagaggttttgtctatttttattattattttatgccatcatggacatgttgctaaaaagttagcttcctgttaaggtccaaataatatgttgcatctttgtgtaaaatgtaaatgatgctgattactgacatcactatattcttccttgattttctgcataccatgtttttgggtctgtccacctgtgaactagcatggggcttgaaagagtttgatatgtttcaattaagttatttccttatttgcttatatgttattatttttcattaggtgctgttgactatccatgctttcgtggactattgaagcaacttgttggccctctgagcgtacaattatctgatcggaggtctaccatagtgaagcaggtctgctaaaccgttttagtttccaggactttgcttattggtttcttcctgtgcctcaagccatttttgagtgatcctgaattgttccaacttccaagtattgcttgaacaactttttcttactgtccaaatatagatgtctttttcctgtgaacctcttgtgctatattataaaaacaataactgctcactttactttgctgtataatatttttaacttgttaatttatcccttcattactttatgtgggtaaatgtgtgcaacttccttttgacagaacaatctaggattgggctgtccttttttgtgccttttttcttgcacagtaacaggggaaagtgtggaaatttaataaacagtgatatgcaaatccaaagcaattgtctatgtttgttccttctcttagtattttgtcagttcattcagtttcatcctatctgatattttcgtttacatgctattttgtccctgttaattgaaattttcttgtattccttcataggcttgccatctgctatgctttttgtcgaaggagctcttgggagattttgaggcatgtgcagaggtgtttattccggtaagtttcgatgttttcttgctgaatatggaagtttcttacatgttagaaatatattattaatgatatcatatggtaatcaggttcttttcaagctggttgtgatcactgtacttgtaattgcagagtctgcagataactgcataaaaacggtaatttcagttcatcaattttatatttacatgctgtatgttctctgcatttatttttctgctacatacttctttgcaccttatcttccttgattttcagatgttgcgtaactgcaaagttgcacgtgtgctttcacgtatagcagattctgctaagaatgaccgtaatgcagtgctccgtgcaaggtgtgaatgtaaacaaacttttttgagcaaatcgatttatgattgtattgtttcattaactttatcttccctattgcattaggtgttgtgaatatgcactattggtgttagaacactggcctgatgcccctgaaatacaacggtcagctgatctttatgaagatcttataagatgttgtgttgcagatgcaatgagtgaggtatattatatcttatactttataatttgctaatttatttggatttcatttggggtcatgtatgcttttgttaaccttgaggggattgtttagcagtcaagtttgtaaattatatgttcaacagtcatgtgtagtgtgcgggttcaattgttgaggccgcgtaactggtgaataaccacgagttgcatgccttttcaaattgtgtggggtttcaatttttattttttttcttagctggcctggggtatttgaggatcttgtggaaagtaaatgaaattatttcaaatatattatatttcaaatgctatgcatgcttttttgcagtgtgcttttcatttatttttaaagaggattcattcatagtttaatcatcttgcttgatcatgtaaggtcaatgtgtttgtgtatgtatatatcttctatcatatatggactagggattattttcttatcatgttctgtcaagttatatttttcactctgtcaattaagctgtacttttttctttttctttttcaactggtggatgtgttctttatatagggctcataatattttgcagcttggttcctggttagtatactgagcaaatagtagccttaaataaccttctcacggttagcttcttgaaagttttttttttcctttttggtgaattcgataggtacgctcatctgcaagaatgtgctacagattattttcaaagacctggcccgagcgttcacggcgcttgttttcatcttttgatcctgtcattcaaagggtatttttgtgatttgttatggatgcttctacattctcggcatacgctttgtgttgtctatatgtgattttttttttctttttccttttcagttaatcaatgaagaggatgggggtatacataggcggcacgcttctccttctgttcgtgaaagattcacccagccatctgctccatcaagtttacctggttatggaacttctgcaattgttgctatggacagaagttctactttatcttcaggaacatccctctcttctggactgtcacaagcaaagtctttgggcaaaggcactgagcgcagtttggaaagtgtgttgcactcaagcaaacagaaggtcagcgctattgaaagcatgcttagaggtttggatttgtcagacaaacataattcttcaacactccgatcatctagtctggatctaggtaccttataactttgcctacctattagtgctgtttcatctagatgtcaattgtaattcggttaaatgtagtcatgtggggacattgccatattttggttgattgggttcataggtgagcggctaaatttctctctttttgcccctagtgcaggagttgaacctccatcagctcgtgatccaccattccctgctgctcgctcagcttctaataatctctcaaactctttaatgacagattcaactgcatatgctaccagtaaaagtagtaaccgcaatggtgggctggttttgtctgatattatcactcaaattcaagcttccaaagattcaggtaaattggcgtatcgaagcaatgcctcaaatgaaactctgcctggattttcatcatatacagcaaagagggctcctgagagataccaagagcggagttctgctgaagaacatgagtttagggaggctagaagacatatgcatgagaggcagtattcacctcacagagatggaaacttcagagattcacataacagtaatgttcctaatttccagaggccactcctgagaaagcatgttgctggacggatgtctgcaagcaggcggagaagttttgatgagagccagctgtctgttggggaaatgtcaaattatgtagagggtcctgcttctctcagtgatgccctaagtgagggcctgagttcttcttctgactggtgtgctagggttgctgcattcaattatctccggtctttactgcagcaaggcccaaggggggttcaagaagtggtccaaaattttgagaaggtaatgaagttatttttccaacatctggatgatccccaccataaagttgcgcaggcagctctttcaactcttgcagatattattccatcttgccggaagccctttgagagttacatggaaagaattttgccccatgttttctcacgattaattgatcccaaggagttagttaggcaaccttgttcaacaactctggatattgtaagcaagacgtacggtacagattctctgttaccagctttgcttcggtctttagatgaacagcggtcacctaaggccaaactcgctgttatcgagtttgctattggctcctttaacaggtattcagctaattctgaaggctatctcaacagcggcatcttaaaattgtggctttccaagttaacaccactggtccatgataaaaacactaaacttaaggaggctgccataacctgctttatatctgtttactcccactttgattcaacagccgtcctgaatttcattctaagcttatcagttgaagaacaaaattccttaagacgggctctaaaacagtatactcctcgcatagaagtagacttgatgaactttttgcagagcaagaaagagcgccagcggcctaagtcctcgtatgatgcatctgatgctgttggaacatcttcagatgaaggatatggtagtgtctcaaagaagagtcatttctatggaagatactcttctggttccgttgatagcgaaaatggtaggaaatggagttctacccaagaatcatcagccttggtacctagcaactatggccaagtagcttccgatgaatttcatgagaacttgtatcagaattttgacgctggctctaacactgatcttaattttaaatctaaggattcaacttacaacagtaattctagtgggcagaacctggcctccaggaccaatgtgttggaaagttttgacaataatgtaaatttagagcgttcttcaactcctcgacgggatggtcaggatctgataggcttggatcatacgggactttctgaaagcattggacatgataatgaagctgcctctgggttggacgttcatgatctaaaacttaaatctgcaaaggctagctcagtgccggaatcaggtcccagcattcctcaaattcttcacttggtgagtgctgatacaagatatttcctcataattctagcagtgtaatttttttaacacacccgagaatttctcaagttctttgcttcattcaagtttatctggctcagaataccatgctgacaggctatcataagttgtaagatgacatttaaaataaaaaaataaaataatgatgtatatgattattcatagatttccaatggagccgaggaaaacgatggtgcaagtaagcatggggcacttcagcaattaattgaagcttctgtggcaaatgattactctatatggactaaggtttgtataatgatgatgtgtggcactcttccatatctgtctattatgctgttgtcactcttcctcttagtttttctctatcattaaataatatggctcttctttttatttataacaaaagagggctatcttccttaaatttatattatgacttaaatagttttataaagaaagagggcttctttgatagtttattttagattcttttccatataatatatcagattctctttcaaataagttttatcatgtatatgtgtgcactcttcatatcacaaattctcttgaatttggtttgagataggtttgtacttgtaggatactctagcctcttctgcttatttctataaatcaaataatcaatatttggaaggtgtattcaatatcatatttcagtagttcattcctttaatcttaactaattatttgtgatagacaagtaattacttgaatttattgattattttgtaagttcttatttatttttgttgatgttggaattttagtttgtttttggtgaagaaaatgtaacttgcccgcactgatagtttcatgttatttctgcagtattttaatcagattttgaccgttgtccttgaggtgttggatgattctgattccacaattcgggaactttctctttcattgattgttgaaatgcttaaaaaccaggtttgttttactttctgtagtaatggccaattgtatgtttagcattttattccgaagtattgtgaaattttaacttataaaactctcatggactacagaaagatgcaatggaagactctgttgagatcgtaattgagaagctgcttcatgttacaaaagatacagtttctaaggtaattactttgcttatatgtaactgtaatcatgtgtgtgcttctataaatgtttcatattttaaaactaatccgtttttgaacaggtgtcaaatgaagcagagcactgcctgactattgttttgtctcagtacgatgcattcagatgtttaagtgtatgta

SEQ ID NO: 432 - DNA, 1303 bp, Cannabis sativa
tccaaccacgtaaaaactttgagtgttctcctcatatttgattcttttaatcaaattttctttagctctaatattaaataattcatttttttaaaaaatctcagtaaatattttggtgttttcattgagagttgacgaaagcagtgataccatcccaaattacgtatggtactctcccgaaccgagtctggtttttatttcaatgatccccaaaagggagatgctgatcccaatgctagaacgggagctgtagaagatccaaataaggcgatcaattgccacaagaaggatcataccagtaagaaacctatccctaaaaatcctatggccgaagatgatgaattaagggagaattattctgatgatgttagagatgatcaccaagactcacttgaggatgatcaccaagaaatgctcgaggatgatcaccaagacatgctcgctgacggtgatgctaaaaaggagggtgatctagacgagacagatcatgtggtcaccatggccagaaagttgaaataattgaagataaattatcattgcaagagtagttttctatgttgatgcacaataaaatgaggatagtggaggccataacaaagcactgactactacaagttgaactactcattcgactttaaggaataacaccatcgggaagactaatcctaaaaatcttgaaacttacgattctcataaggacaaagggaaagtaaaggtaggtaaaacttcaaagaaggctactcaagctgaacagcgaaagaaatccaaatcttccagccaacctcaaatgaaaaagaaaagaaatcatgcctcaagacaaggtcatcaaactgattctaaaggtagagttgcacagaaagataaatcttatccaaaagccaaaaatcctactgcctggaaggatataaattactgtgatgatgttgaagaggtggtgtctgccatcagacaacagaagtggaagtctttccatgaatgatctttggaggaaactaaatgccaaaaaagaaaaagttagactgagaaagccaaacttcacagggacagcctaagaaatcatattaacgaccatgtttgcagaagagaatctccagatgataaaactcaacatttggagcataaaattgaagagttaacaaagctcactaaccccaaaagtaaaatgaaactgtgtctgactcagaataaaaggacacgaaaccatttgtgaaaagaaatatagatgcataactacaggagcatgttagaatgccttaaatgaaattgtatgacggaagaacggactgttggaaattattttacc

SEQ ID NO: 433 - DNA, 1881 bp, Cannabis sativa
cttgctaaggctcacagatcatgcatagatacttggtttcgcacaagaggatcaaacaaatgcgagatatgccagtaaatcattcaccaaatttattgtcgtctaagttatatcagttatgaagctgcacacagtaactagattaaatcattttatgcagagaggtagctacaaatgtttcaccaccagagtcccagccaatcgtatgtattttgcaactttttgtgcaacttgtgataggtctatgaagataggattcgctaatatggcgattgatattttgcttgcataaagtcagctatttcatatttgatcttgtactgtctgattttcattttcatttttagagctttatttatttttcgagaggaaatcactacagatacatgatgaagttgaaaagaaaactgatgttctgtatgactaaagtgctatgaaaagccttggaaaatatctaaaattttactatattgatttcattggcctgtgaaatgttgactctaatactaatgaaaggcctaggaaaactgctaaaattttacagttaatctgaatgaatgtcttggcatgtgaaattttgatcctttatattttgttggagcagacaaattattgggtatggaggattgatccagcctctcggtcacagaatcaagatagggtaagaaaagttactgattgatcttctaagcttgtcttcaattcataagatatggtattttattcaacactcaatttcaatttcaatgatctatgaaacaggggtgctttagcccgctctgggtggctttttccattctcattggtggcttaatgcttgatgtcctaatatcaattactcttggtgtctctgcactgcctgtcaacattattataggtacaatcatttagacttagtggtgtactttaaaagcaacatagaaatgaaaacttcagttaattcttgatagcgtttaaagttttaacattttcttgaaaccattgtgaaggtgtcatcgtggtgcttggtcttggaaccgcgctgcgacttgccttggaattctgtcatgagtggagtatgagaagagttgcacaaagggtggaaacaaacgtggatcatgcttaccatccagctttgtaggtaaatttgtgcatggtcagatgttgttcttgaaaacaatcgtttaatttttgcattgacctgctctgaagtgtgtataatgttaccccttgtctgtatatttgccacggtttatgatagttaccacaccaacacattttgatgaactgaaattaaaacttcatttaatgaatgtatccattgagagtttatatctgtatctctatatttatgattatgggtctaattgatgccgactgtttctttggctgtaatttaaagaacatgctaagcttctttttttggagaatgatgagtgttttttgaagatagcagtgtaagattgtgtgtaccaatcaagtggctatcttagtttatttatgatggtttctcagtaacatttagtgttggaaagagtcgtgtttgcacccaaattggtaggtcaaagggtttggttttgtacaaaatctgaagttactgtcttgtcgagtactcatacacctattgctatatttatacgagaaatgttaaaaggcactagtggtgcttaacacttttctatgtgtcattattgttggtctaactatcgggtcgcatatagtttaatgtaataacttttagagagtatcgctaactaatcgcaaggcgacatgtctagaggtactaagcaccactcgtacccaatagcaatgctctgtttatatttgataaatattgtaagagaaaatagtcttgtttgcattgcatgtgtacaacaaacttggaaacattcaaaacctgct

SEQ ID NO: 434 - DNA, 2412 bp, Cannabis sativa
cacaggggtcatcttcgcaccatgagcacccactgcagaacccacatcctcaataagtagcacataaggggttggaattgaaatatccaacggtctagcacatgctttccaggcagtaagtctagaatactgccccaccgaaatccgattctcaacttgatgggactggtcagttgagatcttagcacctccaatcttcgcaacctcgtcactatccatcggctcctccgaagacgcatcttggtcatgagaaataggttctggagtcccaccaaccggcccagtacctctaggatagtctctgaccactctcttaaccctacagagagggacaaacggtctctttcctagagaggaagtttcaaggtccaaacgccacttcttaaccggggtagttctctcattacaatcagaagttggttggacaccaataactataccaaaagatttccttttatttttacctgaatacccaagggcatcaagttccttgatgtagtcttcttgagcttgaaaaaaactagccaaagcccttttttcctcatgttgggaagaggagtcacggcccaaaaaggaggtacaattaccgcccactaaataatcaccctcgaaaatgttcattttagacctcacagaaggtgagagcccaacaggaataatcatcggtccaggcccacccatcaagttagcattcgcagcagtcaaagtgtcatgggccttaatcacgcggcccgaattatccccaagaacagcgtccccaagcatttgagtattgagcttattaacccagtcatcacggcccacaaacgaacccggcccaatgtctttattacccaacttaaccagcccaacagatttatccaataaagggactggggtcagaggagacctttctttatcaccttcaaaaatcacgcccaaatttgaattatcctccaaattaggaagcgcagcaggctcattaccacggtccatccttgggttcgtcctgctcttaccagaaaaatgcaacactctcgaacccccctcctgagccttcaacaccattttagggacccacgccttgaagaatctggatcgtagtcgctgaccggcactcgagacaagagctttcctcgagccaggcaaagacccatccccaaccgccccagaaccattacccctcatcgacaccggagaagagagtaaagtcggcatcctcttcttaccatcaattcttttagcagcctttgacgattcacgagtgccagactcattgagcttaccagaaagcagcaagcataagaggagtttgaatttagccatggaccatacagtgggtacttggtaccctgagtatcctcaatggtgaccggagaaccccaagagcattccccatgttggtgtcccaagcatccacagaaaaagcaaaagttacctatgttctcatacttgatttgcacccagcagttctcaccattcaacattttaaagaaacaaccactaaacaggggcaagttaacgttaatctcaacctgaacctgtatccatttattccaagaaaatggtctagactcatccaaatcaataaagagcaccttacccgcctgagctcccagaatgttagcattaatacgggagaaatagtcgtgcggcaagaaatggatttgaatccacaggcggatgttggtgaacgaaggtgccaaagtgccgaagccaggaggccaagcaaggagaaccagagaaaaacctttgacacaccagggtccattgtcgagaacccttctcctatccgccaccttctcgaagccaaatctaaacacgttcgtagcaacccgtccagagaagggggtgtccaccttcacatgagttttccaagggtttccacagaaggcttccacttctctctcccccaaagatctggaggtcagcacttttccaatgagatagtatttagctagcacctgtgaagtagtagcactagggacaagtttaatggtggcctcattaagagagatgcatttgccccacgaggaagcaatctttttaccaaccaaatccattaatgcacaaacggccaccaaccgacaaagttaaagacaaatacctacccacccaacaaacaccaggaaacgccacacaatagatacaccccaaaaggaagacaagcagaacagtaaaagagagggaaaaggaaaatgaaacacagcaaaatggatactaagagcagacaaagtcaacttcccaccccaagaaacatagataaataaaagacaaagtcaaaacagtaagaaaacaagaaagaaaaggtttaggaatgaaggagttaaagcaaatggaaacgagagctggtagaagaccatctctcatgaaaagaccaaagggaataagactttaatcatccattttgacctaaaataagtttaatatatg

SEQ ID NO: 435 - DNA, 1172 bp, Cannabis sativa
ccaaagaaataatcataaaaatgtcatttttgtaatagatttctcaaaaactcctgcgacgttaaacagcccaactttttggattggacccatgtcatgaagatcattccttattatgttcaaattgcagattaagacaacagtgttcttcactctcatctctttgagctccaattcgaacatggcgaccgtacggatgataggcaagaaactctttccttactcattattattatttcgttaattcattattgaatccatactcatacttcgctccttctctgtgattttgatattcgctctctcacacattttctgaacgctcagatatagcagccaatttcacaggtcaggcatttcatcgaacaccttttagattatttatttcgacaaagtttgtcctttttttatgtttttattttaatacttctgaaattcgattgccatgaatgcccaacagatggaatgtttaaaggaatgtataatggcaaacagtgccatgttgcggatatagccactgttttgggcagagcttggactgctggcgttgaccgcataattgtatttctctatttaaatttatagcttttccatgcttaattggcttaataaaaagcttaattaagttgggatttcgtgatttatggattcaggttactggtggttcgcttgaggaatcaagggaagctcttgccattgctgaaactgatggttttttcagttgccatgtcctttttccttgaaactcacatacaatgtctaccatcaatcaccaccacaaccacagtttttgttgagctgaaataacttaaaagggttttcatgggttgttgcaggaagacttttttgtacggttggagtgcatcccactagatgcaaggttgttctttcttatctcaggtttttggaaaaggtttaaacaaaagtcagtgttggttagggttgagttattgctatgtttgagcattgcttgttttgtaattttggtcaggagtttgaggagagtggagacccggaaaagcattttcaggctcttttgtcattagctcaagagggcatagaaaaagggaaggtatggactacatgataaatctgtctcttcgtaacttaaaaggaatcaaatgcgttgagaacttttactagtttatattctgttatggagatatggttat

SEQ ID NO: 436 - DNA, 3034 bp, Cannabis sativa
cgagtcgagtcgaactgaactgagagactgagttgagccgagtcagaaatcagagcaggagaatcgttccaactcaatcctaactgttatgggaaactcatccaaagacgactccctcaccgacggtgacgcctccagcggcgacgctccaccctcaaaaaccagcctttacaccgagggtgagaaggtcctcgcttaccatggtcctcgcatctacgaagctaaggcaacaaaccccacttctctcttcttttcttaattcactaacttttgattcttctgttggtttagtattattatcagtggagttcattttcttttggttcgcttttttctatgttgaagttaattaggggtacttttgaatttgacttattatttctcgggatttgatttaggttttgtacttagggtttctgtttttcttttgaaaagtttgtttttttaaaatttttcaagtgaaattcatcatgttaggggttgattttgatataattatatgttttaagcaatgattaggttttgtaactttgttacaggttcaaaaggctgagctcatgaaaaaagaatggaaattcttcgttcactatcttgtaaagccttttctttttctttctgaaagtaaatgaattttgctaaaggggttttgattttgatattaatggtgggtatggttttgctattttgcagggttggaataaaaggtaagtttgtcatctttgttatcaaatgttttttagtttttaaagttcaggactcagattcatagttgaatgatatggatggatacacattggatatcttagttatattttctctatctctacaaggagttaatgggattttaattttagttactctttagtaagaacttggtgtatattttgctcatgaacgatggaattataattttagatgggagaggaggtagacaatggtgggtagattagataacaatggagattgtaaatgtgattaaactcaggcaattgattcatccatcatatatctatagctggaaaacagttctctttatcatattaccaaccttgtcatagaaagctagagctaccaacttatgatattagagagcagggggtacctagacgcttaaaagttcgatggaaatatttgctttcattttgataattataccctttcggaaagggatacagaaatcattactatggcttggacatcttgccaacagttgggacgaatgggtaggggctgatcgattgatgaaacttactgaagagaatgtgttgaagcagcaagagcttgacaaaaagcagggtgtggacaagaatgtaaaatcgggacgttctgcacatacgagacctaaaagttctgctggtaatttgtttttttgtctattaatatgatattattcattattctaaaagtagctagaggtaacactttttgaaatgttttcttcaattacatctttatttttctaccaaagtgaaatttttatttatttcttttaaaagttaattgtaggagttcattctatgttttgcagctattgttgcaactttcttagtctccttgtttcattccttatgtgctagttgtgttataattttttttctttttctgtgttagatgttaaggctgagaaagaggacactaagaccaatggtatgtattatcacagaagtttcatctcatttactgtttttttttggtatattaaatttatcctcaagaatccaatctttttatttgtgttacaaacatataaagttgatactaaagaggttccttttttaatgttaatatttttgcagtggtgaaaacaaagaaacggaagactgaatcagttgctgaggtccggcttgtattttgatttagatttagaatttagttctttttattttattggttgtcttgtctagacttttctttgtatacaatggtagtttgtcatgtacaattacatcatcggagagctgaaaaaagaaagaaaacatattcaagataataaacagattgtcttacctgtaaacttaagctattgttttagctatttctaaatgttttgatctagcttttttttaacacaactaagtgtggtttgatggttgttagaaggagggtgcttcttcggagaagtctgtaaagattcaaattccatcaacactcagaaaacagcttgtagatgattgggactttgttaatcagcaggataaagtatgtttcaagttgttgaaccacttctctcatattgtcttttcattaatatttgaaattatcttacccactatggtgtcaataactcataatcatattaagtgagttgttattggtgagctatctaaatcagtctataactttttgccttgaattctgcaaattcattctaattggagctggttatgccaggacacttcttagtgtcaagtctaactagtaattatgaatgtttactcgactaatattacatgacctgagataagtaggacttgcagtttcaattactttgctgattatttgtttaattatttagccagttctgtagttggttctatcaaagttctgatcttctttttctctcttcatgctctttcactttcacatttcatttacgcattttactgttctgtagcttgtcaaacttcctcgttcgccaacggttgatgaaattctatcgaagtaccttgattatcgttcaaagaaggaaaacacgtaagtatactttgtagggctgcattataattatgtttttgctcttgtgctatttgtgcacattcccattaattttacttgttgattccattattcagttttccatttagattctctataagtatcttttctagtactaattgcccaatcattattgttaataataaattgttttctcctatctctactaatctctcaaattttcacactttcttaatgtgaatcataatttcggtataattggatcctgggatgtagtttggagtttcaccctgcaatactaacgattcaagtactctgtttctcttgaatacaggacgtctgattccttagcagaaat

SEQ ID NO: 437 - DNA, 3968 bp, Cannabis sativa
  modified_base (1334)..(1336): a, c, t, g, unknown or other
atatttttctactaaaatcacgagggccaatttcccagaccagtgtccctactgtcaagaaaaagtgaagcccaaatggtagaaattgagtgagtatgataaaaatttgtaagattttgtagtactcgataggagggtgaagttggctgttactttaacttgttatgggctccaactcactggcatgtcttctagctaccagcaatataagattccttcatctcagtttacctctgataacaaaacaaaaataataaaaaattaaagtttacacaaaaagagttcactgagagttttttggcagagccactgcaagttatgtatattttactatgttatatttctctacttgagtaagtttctttcaataagttattggaaataattgggtaaataatattttcgatcttgtgttttgtaaaagttattaattggattctccgttttgttaaacgataaaatagaccttatatttttcaaaatagtaaaaatatgactctgagctcaattttcaacaattttatttttaatataattaactttgagataatttttaacacgaacagatacagaaaatgtaatcaaatttgtcacaacatctttatatcagaatattattaaattttattttgacaaaaaatcagttcagggttctatttgtacaattttgaaaaataaagtgttcattttatcatttaacaaaatagaaggtccaattagtaacttttgtaaaacacagagtctaaaatggtatttaacccaagaataatttatattactacacctctaaaaatatattttgatagactattttatatgttttggcatttaagaaaaaattttaatttttttttcataattctttacgttgtaatatttttttactaagaatttatgttgtaattatttaagaccacatataaatttttaaaaaattctgaagaatttataatgttaaaaataaagttaaaatagttgtttactatgatgccgtttagtaatactttcattttctaaagtaaaattttatttttgaaaaacaaaaatatattttataaccacttttatttttaaatttttaaaataggaaataaaaatgtgttgtgtaaagtttattttcatatttattttttattttatttaagtcaggtctagatccgagatcaagttcaagttcgggtcagggactgggttcggtgccagggctagggccaggtttgggtctgagtctggatctagtcggaatccgaaatattgattaagaaaaaaattgtttaaaaaaatattaaaagtgattttttttttcttttcaaaatttttaaaattttgattcnnnattaaaaaattaaaaaagtaaaaacaattttatagaacatgattttaaaaaatatttttgcttttcaattttaaaactagaatactgattaaaaaagtgtttccaaaagccacctatacgtataagaaaatagtaatgtttaatactgtaaattcttgaaaaaaatttaaaatttatcggcgactctaaataagtataacgtaaacaatcataaaaaaatattaaagagcaatttgcggcataaatacttaagtttgactccgagttttaaataaatacctaaagtttaatttttggcggaaataatactaagttatatttttagaactctataggtacctgaccattaaatgttaagtcattatccacctgttattttattattagtatatttaaattaatttttttttttaaaaaaaaaaatttaatgatttagaccaatcaagaattgccacgtgacaattacttaacacttgacaactagtattataacttagtattattaccgcaaaaaattaaacttaaatatttattcgcaaataaaagttaaatttaagtatttataccgcaaattaaaattaccaatattaaattaagaaactccttctaaatgcggaccagatattaggtgtagactttcccaatgtttttcactgcaacaaagcaattagcaaacaacagttaaagacaacaacatgcctttggcatttgctatctttgttaattatcctctaaagtatctctctctctatttctctccacaacttctccaatacccataatagtgacctttatgatcttttgattctctctattctgctccaactttggagcttaaaccaaacccagctaatctctgcttacttaactcagttgatttggtgacccaaacaacaaacaactgcagttggtcaccatcttcattctcaagctctctttttctacaccatgaacaactagtatccaaccatgcggagaacaagttctgtttcagaaaaaaatgagcttcaataccattaagggactccatttttggtggagggtcacttcatcatttttccttcttcatcatcttcttcaccattcttcttctactactacagctctcaattcagatggaattttcttactttctttcaagtatttaatcttaaacgaccctctttcagccttggaaacctggaattactacgaccaaacaccttgtttatggaaaggaatcacttgctcagaaatcggtccacctgggacactggacatgttcagagtcaccagcttggtcctccctaataaccaacttctgggttcgatctcacctgacttgggacgaattgaacaccttcgtcatcttgatctttccaacaatttctttaatgggtcattaccttccaccattttcaacgcctccgagcttcaagtgctttctctctctagcaatgtgatatctggtcaacttactgactctgtttctggtcttaaaagtcttcagttcttgaatctctctgacaacgcttttgccggaaagcttccccaaaacctcacttctttgcagaatctaaccgttatttccctgaaaagtaattacttttctggtaaagttcccggtgggttcagtaaggttcaagtattagatctgtcgtcgaatttgcttaatgggtctcttccttcggattttggtggagagagtttgagatttttgaacgtttcttataacaagatttcagggaatataccattggagtttgccaaactaattccggttaatgctactgttgatctttcgtttaacaatcttaccggagcaataccagaatcaagttctctgctttctcagaaaaaagagtttttctcaggaaactctaatctttgcggaaagccattaaaaaatctctgtacaattccttcgagtctgtctaaagaacctaatgtcactacttcttctccggccattgcagcaatacccaaaacaatcgactcaactccggtgacagctacaaacggagctccgccacaacaacagcagcagcagacagggctaaaaccaggtacaatagtcggaatagtcgtcggagacttagctggaatagctctcttagcaatggtgattctctacgtctaccaaagccggaaaaggaaacatcttgattcattaacgaaatctacttccgaccatggaaacaaaacgggttattatagcggaaaacaggacgaccctgacgccattaaagcctctacatggtcttgcttgacgattaaaggtgaagagacatcggaagagactagctcagacagtgacggagacgagagaaacagagaaccagtaagcggtactgggcctagtcggaatggggggttgctggttacagttgacgatgaccagtcgccggggctggagctggagactctgcttaaagcttcggcgtatactttgggggcaaacggagaaagcattgtgtacaaagctttaatggaggatgggactgcggtggtggtgagaagaatcgggaaaagtcagggggagaggatgagagatttcgagagccaagtgaggtccatatcgaaggtccgacacccgaacttggttcggattcgtgggttttactggggcgatgagaagcttgttatctatgag

SEQ ID NO: 438 - DNA, 1189 bp, Cannabis sativa
aaatcatcaagggatgcataggagcgataaacatcataactattcaagaaaggtacatcgattatttctctgttaagaatgtgaaacttcttatgtttagtcttccaggccataaaaggatcttcccatgatcccctgaaatataaagcattagcaagagaaagtgggggagccaattctacagtctttggcaaaatttctttgatgagacctcttgtctccttttccacccataagttcacattttctctaactttatcagcctacatatacaaattaaaaaaagaatgaaaatttgacaatatgaaaaactattatagatgtaaaagatgaaattattcatacctcaaatttaaggtcgacattttccacttttgccttatagattgtttccgtaatttctttgaaagatggaattagctggtattgtttatcaaccagtatagcgtttgcaacagaaaaaagaggttgttgttgttgaagttgttgaagttgtttttgttctgtgttgtggggaaatgtggggaagaagcccatgggatgctttggaggagcagaggaggagtggagtagagacatcatcagagaagatttttggttcaaatcttcgatactatttgaaccaagaaacttcaacaactgctctaatgtctttcctccagctccagaagccaatatattcagcatcaagcatattgatataggagacattaaaacgttttcagcactgctcacattcttattcatctcgttaagaattgattgtgttgcaatttgggtgcaaaactccatgacttgtagaatagagagcaatgcttttcaaagattgaaatttggttatttgagagtaagaattatatagggcaagatacaaagatcaaaacttggtagggtatacaatgtatacgatcaaatatagtaattatttatgtatttatttattttttttgaaaaggtttctgtttcttattcatattaattaataattaatgttttcttttctttcctttcttattggttaaggtttatttagatttattttgtaattaataacatttaatggtgggatccaattaatactattttatcgattgttttgaaataatttaaacctttccattgaaaaagacttgctaaaattgaaatcatttatgaaaattggaaaataatcaatatcaatatatctctc

SEQ ID NO: 439 - DNA, 2385 bp, Cannabis sativa
aatttagcatcacagacatttggtccaagttatggccaaggaacaatacaaggagaaaatggttttccttcatttgggatagtgctccgaagtagaaaattttcacttggttgacttgtttgaagaggctcttaaccagggattgtttgttcagatttggcttaatcattaatgctaattgtttgttttgtgatgaggagttagaaacatactaccatctcttctttaggtgtaggtacaataaaaaaattcttttgaaggtatgtgattggactggtttaaatacccaacaaaataatttagatggttgtctaaaaagagtgaaaattgtagaagaacgagatgtatgtgtggaatttgcacgacagctttgaatgctttggtctacaatatttgagaggctaggaattatggcctttagaataactaagtatatactatacattttattgtaaaagaattcaaaaggaaatttgtacgaggctttctcatttcatagagagaaagctagtatcattgatattgattggttagaaagtttaagtacaatctattagttgtgccttgaattgtaaacaagtgtaaagtgtcatgttttctaaaaatttattattgattttttattttttttaataagatagtgtactaggacatcttgcaaatttttcaagaaattcaagaaaaatttacttgccaaaaataaagttcagacagtgtattatctttttttttttatacacgtgtgaaatatattgtttgaaccttattttttaaattataaattatttcaaatttctcaaaattttacaagatatgttaaataactacaatatatgtatcacataaaaaattaaaataaaattattcaaatattaaaaaaaacgataggagtgcatcaaatgacttaatttttcatcaattgggtgttgcatttggttaccaagtgaaaatataatgggaatgtgaatgggaatatgaatatatgaataaaatagaatgaaattttttatttttttgtttggtaaagactgtgtaataaacattggaataagaactatcatacttggtattgtatgtaataggataaaacttttattattttgaccaaattactctttactcttcaataatattatttgttagataaggtttgatagggcaaagtgaatttttgttagtataaaattagcttttaagtcttttatgtcgaacaagtaaactcttagtttagatgaattgtaattcatttggaatgatctttgaagttataataaacaaaccgtacttgattggacctcttaaagaataacaaatttattctaatacttattcatgtgatccaaaacaccacctcaaagttaaataaaagataccacctaaaaaaaattgtaatatcactaaatattcgaattaatattgcccctaatactctcatcataactattaattaaccattcttagatggtaattaaagactaaagatgttataattagtggcacaaacgcatggtaataaaaagtgatacatgaaaagtggactggtttgtcgtttgaattgactaggatatcacaaaaatattttgtgataatgatgatgatgaactaatcatggagtcaactatagtacatttttattttttagataagggaaatgtccatgcgccacaaaagaaagaagaggtgtgataatcccactaataaatataagctagagttagtaagttttgatccacaaacaaagtaatagtgtacttttaatataaaatactaaaaaaaaggaacaatattagtgtgatgatatgactatgagttaataaataaataattaagaagcaggtaattgggtggggtgagggtgttggagagcaccaaatggataaaaacagaaaaaggtggggttgtggaataattgatgttcattcactcatcccactaaattggttttttgtggttgatttcaaaagaaaaataaaaatggtgtttggttttgcggaagcaaataaatatggcatagcattacataacaacttattatctatcaatcaaactccatctttaatttatagctcttttgtttgtattacgctgcttggcttcacctgcccactccttcatatttctctttaactatacctcacacactctagttttctcattacaacctcagtttttgtaaatttggcgacactctttttttttttttttaacttgctctaacccatgccactaaatattaaagggctctttgttttaatagtttgggtaggtgcgaataagaatgttgagtttttttttcttggttatttggcacctacatgcttcttttagtatgttttcactattccttgtacacttgagtttcaaataaataaaatagtaaatatt

SEQ ID NO: 440 - DNA, 3080 bp, Cannabis sativa
gtttctttaaatttatctatttatgataaaatttatttattgctctaaatatattttattaattattttgtgtttgaataattttttatatagaaatatgcgtatatattaatattttacatatgaaatgaataaaatatattaaaatttagaagaaaaaaaataaaattttagtgatgtattttaaaaaattaatatatagtataatataaaagtttaaattaaaataaaaaattactgatttattttaagaataaaattgagaagatgatagtgaggtaggtagatttttttatttattttttgtttacaaaataatcttagaagtaataattatgtaaaagttggagagagaaagctcagaacaagttgtaaccacattgaccatgtgccataattagtggccgactccattgggcatgcaacttgttcgtttttattttctgcctgtaaattaataatcatatatttattacaaatatttttcttcaaaaacattattaattaataaaaattaaggcatatgcataactcttttatatatagtttttaaatataaatataatgaagtgatttcattattaattaaggacaatatcgactgttacttatttaaatttgtaggttaattaaaaaaagaagaggaaatgccttgatatgtttgtgaacttttttattttagcaaaaaaaaaaaaagaaaataaataatagtaatagtaaatgactaataaggccaaaacgttcaaagtcaaaaaaagtggctttggcttaagaattataacattaaacggttgttgccccaacacaacaaacactaataagagtttgattgttatagttgaatgtataataaaagttgtaatgaaacacaagaagcttcaaaaatattattatagaaagaaataaaaagagagcttgaaaaatatttattacgaccgcaactaatattttatatataacatataaattttagttcaacaaataatataaaaaaaaaattgtagcattagtggtaaacaaataacataaaagttcacaattttattgtcacacaaattttttaataaaaatactgtctttttataaaataattgtaaaacaacaaaatataacaattaaaacaacagtgaaacaactaaaaaaacaatcgtagaacaacagcaaaaatttaacacggtacacagtatttttttaaaaaaaatctaccttacaaaaaaaaaaaaaaaaaattagtatgtagcgtaaaagctctttttttttttatgaaatactctgatatataatgtagcatttaaagatacaaactagtaaaaaaaaattttgacataatttttgacatattattactaaaatatatagcattcaataaagatattattattgattaaatattacattatcaagttagtttacgtggcgaaaaaaattatttattatatggagataaaaaatttaaaatttatattatattaaaatttaaataatatttattttaaatttttataaaaaaaaatctcagtataaatttcacgataaatctctgaacactttgaaatagccttatataccctttagaaataatcaaaacaaatattctttttgacaaatatatgaatagtgataatgtgcacgtatagaatactattactaatatttgttgagaatgttcaacatgatctcgtttactatatattgtaagaatattgtataatttttatttgtgtattaattattatataaaaagccaaaagaagggtgtttggttgacccgtaatagatcttctccacgttttactttcttaaagcaacttcttattatgtttttctaacttcttaaatatgtgtataatattttattccacgcatattcactacattccacaaaataggagaatataagtactttattttattctcattaaattaaataacattattacctcaaaagttaagacaatatttcacaacattagcaataagtttatttttagaggacatttttcttctacttaaacacccaaatcaagattttatgtcttgtttattcatatcattaacatgcttaataatgaacgaactatattaacctagataacataaatcacattgtacctcatattatacaccaaaccccagttgctcaattcaacctttgaaattcaaatatacaatgagtcaagtattgaaacatgcacatttctgaaccatgcgtagcaacacaacagagaaagaacaaaaaaaaaaaaaaaagcaagtgatcataactcttaacaaaattattacaaattggacagtaagaagaagcaatagaaaattataactttatttgaagtttattttggtcatcaactaagagttcaccatatgccaaataataaatctatgcttgggaatcaaaagcccactccataccacatgagcataatccactttatcaacattaaatagcaagttgtaaaactttgtaaccttgaatcgttcatttacatttatcaacatgtatcaaggactcggaaataatcaattaaaggttgaggagtttaagttaaaattagatctaaaatatagatagattttaaactcatgacagattattaaggttatcatacattttttttttgaatgtttaaggttattatattaatcaataagatggagaacatacatgattgatgattacatgatataggatacgagaagagagtgtaggtatgtgatctttcacaaactaatattttctctatgagttttctctcacttgatgggaatggagaaaaagagtgcttaaagattagtcttgggaaccaaactctgatgttctttatatagccaactaactatagcgctataaactctaattaagtttactaatgggtattagacacattgtaagcccatgtcaaacaagatgtttattatagactcatttagttgtatcacttatctaacacaattaaaaatattaccttaaataagttctttttttttttttgaataaatcttaaataaattgtcttaatttataaatctacatattaaattatttaaaataatccaacattttcttttaattagatttg

SEQ ID NO: 441 - DNA, 2283 bp, Cannabis sativa
ataataccttgacagcctctagaagcttgggttcatcatgtagaaacttgagaatccaggtcatgacgctagctgtagtgtcttgagcagcaaaaagcacccctattatgttatcagcaatctgatcattgcttaaaacctctcctttctcgtctttagaattcaaaaagcaatccactagatcatcattttttatatttaccactttcttctctttcctctcccaaataatatcactcaaaatcttacttagctttttccttgcctgtattatatatatcaacaaaattaataataaaatcaatatacacaataacatataattattgaaattaattaattaccaacagggctttcttgtaagaagttcctggaatattgttagggaaggagttgtagcctttgtctactatactgtaattctctttaagctcttttgtcacacgtgcctccagatgaccaaatattgatagtataccaacatcgaaagataactacaacaaatatacatagagagatatacattacacgtatacccaagtcacgagaaaggtataataattaatttttcagatgttattaaacgtgaaagttttattttaattatttatatatgccatataggcatacacatacgttacctttttcatttcgtgaaaggtgtttataacttgaccgttgacccatgaagtggaagcagagacagctgcggcttcaatatcagcaaccaaatttttaatggcgtcgagggaaagagagctctgaacaagcttccttaagcgaacatggtaatcgccttggtggaagaacaaggccgatggcccaattaaacgttccttgcttttggggtaagtgggcttgaataggtgagcttctgtcaccaacacgaactttgctgcctctggactcgccagcatcacacttgggcaccccagaatatgggtcttaaaaatatccccgtacctaaatatacacatatattatatatattgtaatgaaaaaaaaaacaaaaaccatttcgagtactacctcaattagaagaatttcacaaaccttttctgtttggaggcaaagaaagtgtttgggtcttgagaatagagttgaagagtctcgcctatgtaaggccaacccattgagccaggaggaagcttggctgatgatcggtttttggatccattgttggatgtgaatttggttattacgaaatgagagaagaacagagtaagaagaaatatgaatacgtaaaagagaaatgcatccattatttttgagagggaggaataataagtgatgaggtcccctttatataatatttagaccaatgaattttgtgttcaaatattgtgtttctatttggtatagattaattaagacaaaagagagacgacagtgattttttatttaattatttttcgattttgggctctaattattcttatcttttcacaaattaacacaacatcctgaaatttgaaaggtaatatatgaaaataatttattattgggattctcatacatccttctcaaacatttatttatgggtgtgaatcagtttcaattttttttgctatttatgtttaatattaatcgatttatttattatttattaatacacatataaacaaatcttattaacgtttttcaaaatgaatggaaaaaggacacaagtttgccaggctggcatatccttcttgattttgctagaaacaaaatttattgttcatggatagcaaaagaaaaattccaaaatttttacaatcactaagaattacacaaaaatctaaataatataatttcctgaaacagaaataattcaggcttcagttgagtcaaaaggatttttacagggtccttctagaagtttatatttttatctaatattagggcaattctaatgcatgggtaatttagtaaatgtaaaatttggtattaaaccaacatacaaaaattatcctaaaaatatattctttattattatattattttataaaattataaataaacacaaataatatatatatacaaaagtttaattataaatatattatataaatattaaaatctaataaaaaagatttggtgtagtttatattgtcacactattattagtaggaaactggacacaccggcataaatagaatgacttttaatttttaaagttatgttggagcattttagtggagaaactttaccaattttaggttaatttataccttatcattatttggagatggccttacaacttcttatttctcaactatttggcattcaccaattggcaat

SEQ ID NO: 442 - DNA, 2691 bp, Cannabis sativa
atatttaatatattttagatgatcattgttatttgctcttgttattgttacagtactcaaactaaacctaagaggaaaggtggcccagggggactaaacaaactttgtggtgtttcaccagaacttcagactattgttggccagcctgctcttccaaggactgaggttcagattcatagatcgtatttttttgttagtttttggtttctacttcaagttatatgattttgattgtgttccattatctttttctttagatagttaagcaactgtgggcttacataaggaggaataatctccaagatcctagtaacaaaaggaaaataatatgcaatgatgagctgcgattggtatttgagacggactgtactgatatgttcaaaatgaacaaattacttgctaaacatattatacctctcgaaccttcaagtacgtatgttttatagttgctcaatgctcattgatttctgtgtgtttcaaatatgtatgaaacaccatatacttagactaatgaatttgcttgttttttacgctcttagaaactcctaagaaggctaaggtggaggttgagtctggtgcaaagggcacagattctggtccttctgtgattgtatctgaagaacttgcaaagttttttggtgttggtggaagggaaatgctccagtcagaggttttaagacgtatctgggaatacattaaggtcaacaatcttgaggtatgcaccatactttctcaccactctaaaaagaaggaaaacaagggatatagaatggccctgcttgcagagtttgaatatccctctaaatttccatggaaatctcttattgagctctctttttgtttgattgttttatatttttaccacttcctttcacgtagttgaccttaatatagcacttcatcagtgaaactttcagttgtcaattgactcctgatttagtgtgaagatgttgccgtttggaacagctgtgctgactatttttctgtttttgctgggacatatgtaggatcctttaaaccccatggctataatatgtgattcaaagcttcaagagctctttggttgtgatagcatctccacactggggatgccagaggctttggcacgcagccatatatgccaaaaaccttgattggctgttttctggtaagaactgtatctaattcgtttattttatttttgagttgagaaaaggaaaattaccatttagctaatgcatgccaagactttgttgtcttatatgatggttttccagcctatcatttaaccaggtggtttctgtaaaagttctcaactttttgtccaaaaaaaattgatgggatgtctgttttgtttgcagttgcagatcagttggtatttgctcgttgatatcgatgatagggaagctatagttatctatataatgtatgaggtcgtggccaatatttgttagtggcgccatggatctagggttatggattgactgactagttaggttagaatgacccgtggaaatttctaacacctgtaaaaaagggcagaagtagaaggaatggttgaagaaaaaaacacaaagtatcatgtatttagttgttattagctcattttcagtgttgaatgatgtttatttatttattttgtttcaatggtctgcagcttacaagttctgtacgtattttcatggttttttatttatgtataggccttgttcttacaataccccatgtaaggatataattccccttgttaaatacgttcattatttttttatacaaaatggggatcggatgtcttcccccaagttcgcataccccccctcataccatcttgagttaacctgagttggttgatcattatgcattatatgcaatactatttttttttttttcgaaaccttgtactgtattgaaaacagtatatattatttataaaatatattttttttataagacatgaaacaaaaagatgaatttacaaaggcttattcaagtttctgtattaattatatgtcaaatcgccatatgtatgtaaattaacaaagacaattaacacttgtatttgtgaggtttgataatttgtgatctagtgcgacacaactttagaataatgtgccaattcattagtggacatgtgctgttcagaaccacgacttttctattatgtggttcttttgtcccgtgacctctcccacatggctaggttcacatgacaaactaaacataataacaaaacatttaaaaatcctatgaagctctcctataaataatattgtcgaatgtaagcccctcagagtcttagcttaggcagatagttatacaacaaaatggccaagagcggttctaaagtagtggtctattggatacttctggctattttcagcatgatatcattgttggggagtaccagtgctgtagttttgtgcaacattgaatccagcaagcttgcagtatgcctacctgcattgcaaggtaaatcaccggatgagcaatgttgtgctctaattcaccaggtcaacttgtcgtgtctctgtaagtacaagtctgcacttcctgcattcggtgtcgaccctgcacgagctgttgaactgcctcagaaatgtggcctgaaagcaccacgggaatgccaaggtaatgttactaaatgctcataattgttgcatttgaaagattatcttatttcttattgttacatacatacatgagcatggtatg

SEQ ID NO: 443 - DNA, 5205 bp, Cannabis sativa
cacatcacaacgggtggctcagtctgacaagttcttctccttgtttcttgctttgatagttgtaaaaggttctgtttctttcatttgttttaatgaaatttccctctaaaaaagatattatatgtattatatatatataattgaaggtccaaaacttattttcaaagtggtcttcttgggcaacttttctcattttattacgagccaattttatttagtaggtcttttgatgttctattctcatcacacaactttaatttttgtgtatttaattttaggtaaatcctgatagaatgaaattaaatggtatttttaaaaacaaaatatcatttgggcccaaaaatccttcaatcggatctggcccattaaaatccgaacccaccctacagaactcggtgcacctgacccgaaacatgtatgaacccaaaaattgagaaaccaggtttggttaggcattttaaacacccgacacccgaaaacccgaacccagccacccgaaaacctaaaaatccgacccatgtgcagccttaaccacaagaggagccaaatccttaattgaaacaaaactgtgtaaacgcccatttacatagcttatgagcaagcaagttacgagagcgaggaatccaaactaaatccacgtcagatagagaatcaagcacctccatggacctccaaaacaagcctgtcatgaaccaatcaggggccttccgagcttgaacaccaagcaccaatgcttgatagtccgaagcaatcaacacctgaatccagccacgagaacgacaaagattcaccgcatggaatagggcacaagtctctgcttccaacgactgactcgaatcaaaactcacagccaacacctcaatcacaatactttccaacttagtcaccgcgatctcaacagaggcacacaaatccttacaagctgcatccactaaaataaccattcttccagcataaagctccacgttatcgacatgcaacaaggaagtgctattcagggactcccacacatcagcaaggcaagaagcaactgttttgactcttgcaaggactccactacatgtggggctaatttggttataaaaagcacgattccttgcagactacaactcgtcacacagacatataccaaatcgattaaactcaccaagatcatccacaatagctcatctcgagaactctgggactaagagccattcaattatatccctaagagtgttgaaaattagagactcacttctaatcgaccaacgactagtaaaccacacagccttgcccagagcacaattgtagaacatataatgtaaattatcgagaacactattttttttttgtcaaatttcaaacaattgtgcaacgtaatatatacagggacaataaacaaacatttttgttaatttaaacatatatatatattttttttattaaaatgtaattaaattaacaactctaaacatttatattctttaaaaaaatatagtttcatagtatgaataaccataaaaaattcaatttaaatcagctcatctcaaaaataaaagatttaataagcacaactcatgtccaaatcaaatcaaacaacaaagacattacaaaatattaaatcaacacacatacatatcgttcacaaaattttatctggggaaaaaaatacaaaggaagaacaaaaaatcctttgatgaaccacctcaacaacccattcatcaaacctaaagccccagacaacctttcaagttcacaatcctttgatgaacccacatgcatttgaaagtgttaaatccaaaagtctttcacgacgaagccatacacttttgaagtgatgaacccaagaagaatcctgctattcatcctgagtatctcgaccaccccgatccatgtggcaaatacggattggttgacaggtctgcatttagacttgctgaccaaccgcaccccccatgtggatggggtagtcaggatactcgagatgaacaactttattgacccaaaacatcactaatgaacgtacataaaccttctacttgcatcttcacatatttggacaacaatgagtaattttaacagtttacatcattcaagggaaagaaatatttttgtcataatatttaataaagtcgtacgttataaaaagaaatttattgagttttgaaattaatttaatttattcatatcgtggagacaaaattaattaatttccatgtatgtatatttcgcgcgattatttgttaccattacagttacaaacctacttaactaattttcaaattaacgtacataactaaaattcaaaattcaaaattcaaattttaaatttttttaacgctgaagaaacacgcatctaaaatagcaatatttactcctaaaacataattaaattaaattttagttctcaatggtattaaaagataatagattagctctgtaaattgttctatccatcattatatatattttaattttaatttatatgatctaatctaaggtttttttttaattaaatcttaccctacctttactacttttctcccctattgtttagattattaccaattttatctagtaataatatttaacaaattaatataataacataggaaaatctcaacatactttcgatcaatttatttttaacatgatcaaaatatacattacaatttaaataatattaaaaaataattaatttgacctgatatatatgaccatatttatatattactaaaccttttaacaggtgaaattaattttaattttttctaaataaataaataaaaaattatgaaaagagtgttaggtgaataccaatactaatctctaataaaatgtaaggatcttagttataggtaataatcaaagattaaaagaccttaattttgggtttatataaatatataatagcaataagagtgagagatatttacattacaacaccattttttttttgccttttttcttacccattttcatgctcccgcttttccgattcggtctcagggtttcaggcagaactactgtgctcatcatcagatccgcccatctctggtaaattatctatcttttccctcaaatttcattgcatcacttcatgtttaacttttacagcttcagctacatggtggttttactcagtaacggtcctttgtttctcccttattccccaagataccttgataatgattctagaatttgtattggttttgtttaaatgttttcagaaaagggtattgttttgctttgcttataagccgattactcacatgtgggtctctttgtaatttatcgttttgtgtcaatcggtgttgtgttgtgcttgctcgtatctgagttcataattcacataattttgttgcgaattttcagctgatatttttcttgtttaatattagcattgtactttttttttttttgtgggttgaggcgtttgaattgccggggttttatagaaaagtgtactgtaacatcattagttttcaaagtttgattttttttggctgatattgcaaactaagcttatatatcaaagacattaataagctctggtgattttgatgtattattttgtaagaagatttattttaataggtatacctatggcctgcctattatgaatcattacttcactgttcaaattgagtttatagattttcttatgatttatggttaatccattcaatgtcccccatacagtacttggatcataatttgcttgctctaatatatttcttttttcattcttcatatgatacagaacatgagtagtttggttgagaggcttcgtgttagatcagagagacggcctatatataatcttgatgattcagatgatgagattgatgttgtgcgtgggaaaggtgggacagctcaagagaagtttgaaaagataattaggagtgacgcggtttgtttctactcttagttttattatgttcttattctttggcctgaaaaatagtggatattgttttatgcataagggaaaacactctttttcatttagttcaaattcatttttgttggaatatttgtgtacctcttattaattctataaagttgtgctttaacttttgtaaaatatttggtattcagttttgtgtatatgtttatatgcttatgtatcacctctgccctgcaaatagaaagaggattcatgccaagcttgtggagaaaatgggactctactgggatgtgaaacatgtaattatgcgtatcattcaaagtgcttgcttccgccacttaaaactcccgctcctggaaactggagatgccctgaatgtgtacagtttcttatctgaatcactttttccttcctttcaaatgatttttgcaagtggcatgctttggtgataatagagattttaaataattatgtttgcaggttagccctcttaatgatattgataagatattggattgtgaaatgcgccctactgttgcggatgatagtgatgcttcgaagcttgggtcaaagcaaatttttgtgaagcaatatcttgttaagtggaagggattatcttatttacattgcacatggtaattttaccatcgatgttctgcaattgttttatagacaattctagttttcttgggtatcaaagtcagtggaagcataaggacttgtattaaatactcttaacactgtaaatattttcagaaactataattatttatttttgtgaactctttttaaaatgtctaaatcttattttgttattattagatattatttattgttatcacttctttatgtctgaaacttgtaatttacatatggataacaatcttttgtacagggtgccggagaaagagttcctcaaagcttttaagacacatcctcgtctaagaactaaagtaagccatttccatcgtcaaatgactttgaataacaactctgaggatgaatttgttgcaataagacctgagtggacgactgttgatcgggttatcgcttgcaggtttatattttggaaaattttctttgttgttttattatcatttacccccactcttgacatctttaatttatacaagctgtgctgctttcaaatttaaggatatttagtctagcgatatgtgaagtcaaagttagttttctgtcaaatggaaattactagaaagtgatctataatactagttggctcaaaatgtacacacatacatttggagcgtggattggtctaatgaaataaacagtttctttttttttttttt

SEQ ID NO: 444 - DNA, 3651 bp, Cannabis sativa
taagtctttaagagacgtatgcgaattgaataattaagataggaataacttttacatataataatgtttatgtagaaactaaaagacttgcttttaggccatgaagtctttattgattggatttacaaacgcgtggatctccatgagacgagaataaccacaactaaaaaagtattgtataataaaacaataatttataggaaatttatgcactacagtacaccccttagatttgttatagattttctatctatttttacattcaaaatttttttttaatacaattttttgtatatagcatacattataactatttagtatcatttgtaaacttttacaatattaagaatatagttcaaatagttacttactatacgtataagaaaaaacacaaaatatttaaattttaattttaaaattgtaaactatttacaattttctaaaaatttacaaattattctaaataattataatatacacaattattaaaagaaaaagactaaaatattatcttgaataccaaaacaaataaaagtatactaaaccatcattttaactaggtgactcatataatattttacttatataatactataatattaggtggtgatgtgaatgtgataattatataaaagagcgtaatactatttattcaccttatattttttttttgattactggcccctcaaagaggaccaaacaaacaacacacgcaaaaacaacccgaaagaggctggaaggagggaagccccccaaaaaaacacagtcaaagatacagacagaacccgacaaacaacaactaaaaaaggaaaactaactaaacaagaacagcaaactaactaagaaggaaataacagaattcagaaatccaaacacagccatccgctcaaccaatgagcagggaaccgtcaaaatcggacagattaacacacccaaacagctgggaattaatcgcccatctagccacacggtgggcaacaccattgagtccccttggaatccaaagagcttcccaaagactcaaagcattagaggagttcttgaacttgcgcacaacatcttgaacattatggtgtagcatctgaattttgttgtctgcacaaaggatggcagtgattgcacttgaagagtcattgtggaaaattacattgttaaagtggagattcgcagccacttccgccccataaattagagctgcaatttcacctgtcaaagggtcacagtaattaagcctgattgtaaacatgccgatgatattaccttcctcattccagaataccccagcaccagcggaggtgttgtcatcgatggccacatctgtgctacaattgacccatcccggggggagggggggaagccattgtgactgaggagtagagtagatttcgtgatattcaatgattccttaatccttttatcaattagatttatcgtgacagagattggagaggggtgaacaccatgagtgatgctattcctttccttccaaatgcgctcaaaaattattactgccccttccaaaaacatgttatagcttaatcccactggtctcttgttgtcatccttgaaaaacgatagccaagagtcccagttagccggggagtagttatctgttttgatatgtcagtagctttcaaaccatattgctctcgcgtattggcaagaccagaacagatggatcgtgtcctcaacattagtgctgcagaagggacattttggatcgtacactttgaacctcgtactgagcttgctacgtgtgagtaggtagttagctagtatcttccaccaaaacatcttcaatctattgtggattttggccccccaaattattcgccatttggaattagcggaggacatcattcccaagtttttgactactttgtgggctgacctgatgctaaaatccccattagcttcaggggtctaaatccatgaatttttggtcggttccaaaggcagtgtgatgttgagtattcttcttgcttcctcacgattaaactagtgcctaaccatatcctcatcccaatggttattggaaatgaagttgctcacaagacttatgttaaccgaggcatccatccgaggttgaggttgaagagtgccattaggaacccaagggtgaaaccaaatagaagtggccttcccatccccattttcctacaaataccttttgagatatgatttctaacattcaagatacctttccaaagtagggagtcggagctattaggggcaatatccaaaaaacaacgattctttaagtactttgcgtccaccactcgactccatagacttgaattatctaccaaaatttttcaagcccacttcataaggaaggctgtgttggtggcttcagttgtacgaaatcccaaacctccacaaactttgggtcgacagagcacctcccaagctattgaatgcattttccttttcccgatcgagtctccccaccaaaaatctcgtaaggctttgtccaccttcttagcaatggttattggaatgacatcagaggaggctacgtagttagagaccgtcgatcctacagatttaatgaggcacatctttcccgcactagagagaagcttagctttccacccttgcactcgatggaggactttatcaaccacctacttattatccttaatgcgttcagtcgatctgaaaagaggaaggcctaggtaggctgcattgtcagccattttcttcattcccaggaattgggatatggtatgcgatttgcttctcgtgacgcctctggtgaagagaatcgatgatttctggaaattgatagattgtcctaaccacgtgcaatacttatttaggcattccaagataattttagcttcctttattgaggcctggccggatagtataatgttgtccgcgaacatgaggtgactaatagatagattatttcttcccaattggaacccttttaatggacccctgctctcttgttgaattagtagacgggataaagcttcggccgccaggatgaagagagaaggagagagggggtctccttgtctcaagccacgctccggtttgaactttccagcgatggacccattgagcaacagttttatttcctttacttttatgcatgcctttatccaattcgtgaacggagcagtgaatcctagccgttgaaggaccgttagtatgaactcccaatccatcttgtcgtaagccttctccatatataatttattcaccttatattgatcatatgttttgggtgttactttcataaactgattcaccttatattattcttctttttcgtacatatttatatataaatatataaatttgtctcatatatagtggcagattcaaaatttaatgtgaaaggcataattttttttaaggtaaaggtaaaaataaacttaaaaaggaaaaaaaaataatgctctttatacgaatttatttattacactaaaattaatattccttttgatatttattatgcattaaaatttaatattagattgattatttttttgactttcgttatgaaagtagggctgttcataaagtattcgatccgatccaatccaatctaatccaatttgcaaatacggatatccataattgtgcggattgaatgttgtttgacctttaaagataaccgattcaatccaatccgca

SEQ ID NO: 445 - DNA, 1533 bp, Cannabis sativa
agattgaaaataaaatttttgagagtgttgagcaatattcgtgatgaaaggtttctttttggtattatatttaacaaaggattttcgttttttattagttcccctgaaattacatcgtgaatgacatttgattaggattaaacatgattgcccaagaaaaaaaagaaaaacaggtcaattaatcaaatggttcaattacataaaaccaaatagagccattttcaaacttcgtaaaataaaaaaattccatggaattgagcattacaaagtaagtgatcatctagctattagagaggcctcacgtcattaatggtcacccacacctcttctacctgagtcagactttgtcaaagatctaagcctgaccagaaacttgatctttctcttcttccccggcgacgacacccaattctccggcgaccctctaagaaggacactctccggtgaccttgacccggcttctacctcgcaatattgactatctttcacctgttctctgcgtccacccaatatcctcgcctgcattgctgccactacctccctcattgccacgtcagcttctcccctgtttctcagtagtatctctccgatctgagctggcgtcaaggccccaccagatctcaaacagttatccaccacctccatcaaagcgtgggtgtccaaccccagatagttcttcaccaaagcccggaaagcggcgggtccgcacgcgccgaggctgacgtgcacgtccatacggccgcaccggagcagagccgggtcaacgttcaccttgtggtttgtggtgaagactatgattctctcttccccacagcaagaccagagaccatctgtgaagttcaggagccccgagagagtgacccgcccgctctgctgatcttcatcatcgtgaccgttaatcgaaggctgagatctttttctatttttggagcctctctcagccgttagatcaaccgagcagtcgatatcttcaatcacgatgatcgaacggttcgtcgtttgtatgagcagagctcggagctccgagttgtcggagactttagtcaactcaagatcgtacacatcgtaacagaggtaattcgccatggcagcgatcaagctagatttaccagtcccaggagggccgtacaaaagataccctcgcttccatgcacggccaactctgtggtaaaactctttgccattagaaaacgccattaaatcgtccgttatctgctttttcagctgaggttcgagagctaaagtgtcgaacgtcgacgggtgacgaaacggaacagagacccagccagactcataagaaccgtggccattattggtgaagagtctcctctcccttgaaacacgctcaaactcttctgcttttaagagaatgtggtctaaatacggggaaagaagtgcctgacggtgtcgttttgggagcttaaggacgaagctacgccgttcctcgagggagtcggggactgggtcgacatggtgggtccacgagagagtgtgcccggaaaagacgtcgcggacggagtggttcggggctac

SEQ ID NO: 446 - DNA, 1023 bp, Cannabis sativa
cagcgactccatggaattgaacttgtgaaacaaattaagaatactcgaattcctattcacttcaatcaaacactcttagtgaagctcaatgaccacaattttcttctctaaaaataacaagttcttgctactattcgtggacattaacttcagaagttcatccaagatgttacttctccacctcagtttctctcgaatgctgatcaagcagctcagatctacaatccataattcttgtactgcgagattcaagatcaattactcgtgtcatgccttctctcgtccatgaatgagaggcttctcattctaatggttgcgtaacactactaggcaaatctggcgagctttggaaaaacactatactcttcaggtttcatccaagatccttgaattttgaactaaacttcaaatcttaaaaaaggctatctatcattggatgattacctactcaaagtgaagcaacatgttgatctattggcctcttggagaatctctatcagctcgagatcacattgcaataatcttcaagagattaccaagcgagtatgacaccttcattatcttttccaatactcgaatagaagagtattctgtagaagaaattgaagctctacctttagctttagagtcaaggattgagaagtctgataaagggatggattagagtgtcaatcttgttattgcagattcaacaccaagatctgataatctgttgcaacttgaagcaaatcttgctcatttaaccaggaatttcaaacatcttgatacacagaatggtcagtactacccatcctatcaaaattttcctcctcttaactcctctaattccattctaatcgaatctcttatcctggaaatttctctcgaggagcatcttcatcttacaatcctgggagagattctaatactggaaccagaggaggaaaattgcctcaacatcataatagaccttagtgtcaggtttgtcacaagcttggtcacactatcatcgattgtttttatcgatttgacaagagcttcacg

SEQ ID NO: 447 - DNA, 1569 bp, Cannabis sativa
ggacccagctcgaacccaagacctgaactgcgagtaggatttggaccctagatcttgaacccgaggctgtgacctgacccgtaatcagcgtctgaatttgggactcagaccaagaaccaaacacaaaccaagacccaaacctagagcaaagttctaaaatcaaaacttgaaccggaaccggaaatggacctggaacctggaatcggattgagacaaggagccgaacccggacccgaaattaaacccgatcccgaacccaaatcgagagcaaaacccagacccagatcctggcgcagacccaaacctagatcgaaacccacaccccaacccaaacccagacctgaacctggaaccgaaccccaacctggaccttgatccgaaactggactcgaacccaaacccgaacctagaccttgacccagaccaagaccgggatcggagcctgagactcggagccagaacttaacctagaccgagattacgatttaaacccaagcctcaaacctggacccacccagactcagactcggacccagacccggaccttgacccgaacctagacccaaactagggcccaaatccagacccgaaccaaaacccagacccaaacccgcatctaaaacccaatgcccggaactaaaacctgaaccaaaactagacctcgacctgaataggactgggaccatgaccaagttttggacccggacctagaactagacttgaacccaaacaaagatcgaaacctaggcccggacccaatcccaaacccagacctggagtcaaaccaaggacccaatcccgaacccaaacctatacctagaccctaaccaggatccgaacccagacttggaccagaaccaagacccgatcctagacccagacctgaacccaaacccaaacatagactaagatagaaacccgagaacaggaccatgacccagacccaaacctagacctagattgggatccaaacttgaacccaaaactgaactcagactcgaaccaggtttcggactcgacccagacccaaatctgaacccaaacccaaaataggaactagaactaagattaggacccagacctacgatcaaaattgaacccaaacccagactaggacctagaccatgaccgggacctaagattcgagacttgaacctagataggggcttggacccagatcgggacttggaccctgacccaaaccgtgactagaatccgagacatgggacccaaaccggggacctaggacttagagtaggacccagagtaagacccagacttgaaccaagaccccaacacagatcgggaccataaactggccccaaacctaaactcagaccgagacttgggacctaaacccgaacccggacctggaccaggacctaggacttggacctgggtctcaggcccctgaacgcagacgcggatcagaacgtgggagtcgaacgcaaaccaggacctgggactggactagggactagaacctcgacctggacaagggacttgaacctagactcggaccctgccccagacccaaactgggaacaaaacctggactcagacccagac

SEQ ID NO: 448 - DNA, 1711 bp, Cannabis sativa
atgagataagcatatatgttgtcgatcaatttctggatttcaacgttttaaattttagttgcaaaccctgtgttaatcaagacctctctgtctcccttttatgcattctttttatgatatgttcttcctttcaaaatctagagctgctctcaaatacaacagtcatcaattcatctgacaaaatgttgcatacatttaatgtttttagtctttttgggggtatgctgatcttgtttatttaattgttgctgtagaatcgtgtccctctgcatgtctccagttaatgacagcttcatgtctggctcactggatcacagcgtcagaatatgggatcttcgtgtaaatgcttgccaggtctgtttcttatattatacatgtatctattcttctttaaattacaaagaaggtaatccatccatacaagagtaggaagaaagcactggtttctaaataaagggcatgaatttttgatatgcccatttagagtcatgcaactttttaatcttgtctttttttttttgttattatcctgttgttgactgtagttgcttgtaattttcagggaatattacggctgcgtggtagaccgacggttgcttacgaccaacaaggtctggtgtttgccgtggcaatggaagggggtgctataaaattgtttgactcacgttcttatgacaaggttgatagctatgtagttttctcttagtcactttttcatctttcatctcatggatctaacaaatttccatctttagggtccctttgatacattcctagttggtggagatacagctgaggtctttgatattaaatttagtaatgatggcaaatcaatgctcttgacgacaacagacaacaacatctatgttcttgatgcgtatggaggagagaaggtaagtttctgtatgcacatatttgttaaaatgttcgactgggtgtctcacagaaaaatttaagaaggaaagaaaaacagttcattctggaattacacagattcggttctattgcagttatgattttaataacttgaattttggtttatgcagcgttgtgggtacagtttagagccctctcctaataaaaatatagaggcaacatttactccggatgggcaatatatagtgtcaggtatccatgtttactcccttatgctattatcctatcctatgatataaacagtatgtactattgtagcagtggtatagagaaacttctttccatgtatcattgggatatcatttctatgctaagtttgatctttctttcgttgaaggctcaggagatggaactttgcatgcatggagtgtcaacagcagaaatgaggtatcatatatctatctatctccatcactctgagctctcctattgtattcacacccccaaatacaacaactaagtatgatcatgtactgtatagtataagttttttgtgtcatcaaagttgtaatttcatggattggatatgtgtaggtggcaaactggaacagtcacattggagtggcatcttgcttaaagtgggcgcctcgcagagtcatgttcgcagctgcagcatccaatgttcttacgttttggattccaaacaactctaatgcagacaatggtccaatggacactgaaactgaacatcattctcattgaaaatctcattattattttttcattctttttctcgaacgagtactgttgttcaatatttggttctaaaatgtag

SEQ ID NO: 449 - DNA, 6826 bp, Cannabis sativa
  modified_base (679)..(679): a, c, t, g, unknown or other
agcaaacacaaattaagcacacactaattgtttatagtttatatattaccattactgcttaccaaattgtaaatatcttcaaaaataatttatatttgatgcaacactgtccactaatcgtttataatttatatttgaatttgattgtaggaattaaaaaagatataaaataataaataatgcttaatgaatgaggtaagtgagcaccaataccaacaatattagaatgtatgtgatcccttggtctatcgcaatgcctgcattcatattcacaattagttattctcacgacgcatcatcatctatacatatattttcttctaattattaaaagttataggttcatgcctttttcaaatttattattccctcatctttacaggcaaagggaaacaactaaatcctcgaacgattcatactcatcgatcatatattctttgaacaagcttcgttacactgttattgctggcgaatagagctattggaggagactctgattggaaacggttgaatcgccatcgacgtgcgagagatctgggaaggagagaggaggcgttgagatatgattggagtttcgatcttatatcgtctaattttcaaacagagtttcgacagaataaaaaacttttttaaaaaaaaatcaaccaataatttagaattctgttatatagccacattntatatagaatagatattttattattttattaaataaaaattaaaaatcacctataaatttttcataaatcaagaattttaattatataagcacactttatatagaatagactatttggaatgtaatcaaaaagatcaactactttccatataatattttaatttaattaaacttctacgttagaattcaaaatagcattgtatttgtataaactaattctcatctcaagaaaaattagtttaatacacttggaaagaattgtccgttttttgtaattattattattattattttatttattttttttgaatggattattattattattacgttttctcagcttcgtgtagaagcatgatcagaatttcagatatatattttcacatgctaaggcaacaaatctgggaaaaagaacacctgaactgtattgaagaatgaagttcaatgctacaaataaacatttattttttattttattcttttctcagttattaatgtgttcttttgagaaagaaaattagctttaccttgatcgacaattgaataacagtacaaaacactgactaaaagtgatagtaaatccatacaattgactaaacaataaagctattattttgtatggtcactatgtacaacagcaaaatacatttaaagaattacatgtatctaacaagaaaacatagtacattgttctatttcgattcagattaatttgaatatgcaaatggttgtgaccaacaaggggaaagaaaactgagaattactagagcagttcaagtaatgtcaacaaagcatagcttacctaggatttgaaacttcacaaactccgtccgctatcatcaatcaccattcctttgagactctttgctaaccagattgcggtctctcttggggagactttgtctttcccgaaaggccttagaacaatggagagctcctctaatctgttttgctgcagcagatccgccgacaattctaatagaccttcaagtgcatctgccctctgcctaaaagacttaacatctagtatttcctttactggagtttcttcttcattcacagaagagctgactgtagttgactcggaggattcgatcttgggaattgttggactgacagggtttctaacttctgtctcctttgcagttgagtgatcagaaatatttgacttcacactctgaggttcagaggtacttggtgatttgagaatcacaggagaagttgcggttttcatctccgaagttgtggttttcatctccaactcatccctcacaacgttcattagcttaccaacatctagactttgaacccccatctccatagattcaattactggttgctcgctcccaacacgataactactatgccgtataacatgaatgatatcatcaaagactgaaggaagatgggtagcaacttggttgtcaattcttgcattttgaatggcagttcctgtattcagctgcaatccttgttggcttgaagagctgggaggagtaatgcatgtggtagcttctgttattgaggatagaagttccctaacggtgaacttgtcatcgccactagagacagatgtcaggtttgactctgtcgatatatcaggcctgctactaggcccgcatacagaggtctcatccttacaactaaatctttcttcagaacttggtacagggggagcaagagttgcagtgaaactcaccagttcattcccagtacttgtaccctcaatatgtataacatcctgagaggtttcaacagagcagactacggacttattttcaagtccatggttctcgttatgcatggttctaggcgttgcagaaggcaactgaataggagttgagcagcgcggtatatgggattcagtactgccattggcaacagtgccatgttcaggaggtattttgtctggcatctcaatgaaaggagttgtagcatcatcatagatctcaaatccttgaatggatattgaagatgaaatagagttgctgctatccgtttgcattcctttggaacctctttcttgagttctttgaggctcaataaggacctttttaggaatattaatcaggcaaccattgggcacttgagaaggagtcctctccacttcctcaagtatctcacctgtatctagagtaacagcattgctcacatcatttggagcatcaaaaccgatttgcttcatccgtccaggaaatgtacagcgtctaactagagatggaggcgttctttgcctaggcctagtttgaagtccatcttcaccaacatgctttgtgggagtaagtgtcactccgtcatgtttgggcttagcttttggagagtcaaacataggcaactgcaaagacaaataataatacatatagggatcaggtcaattcacaaatgagaacaaaatattttttggcagaatcttaatattaccaaatgctttagaggatgtgagctctgaatacgctttgtagaatctgaagctgcctttgaaggggcaagaggtggtgtgtcgtgagatgatttcaaaccaggaataacagtgctaggcttgggaattttagatgatgtttcagtgttaatttttggggtgggcatactgctgggccttgcacgattgcttctcattggagaactttcccgaacttttccttctttaatagccatcattatattttttatggtttttggttgctttaattcaagatttgatctctgatcatagtgaggaggtttcttaacatctttttcatccatcttgagagtaaaatgattgggaccatgctcatcttgagtaggtaagaactggtcaatgatatcttcatcatcaaaagaaaccaaatctgtctcagaacctttgctaccacagtttggcaccacttgtagaacgtttttgtcatttgaaagcagactatccttgtcgctgcttgaactattactgttttggctttcggccatatttcttcgagaatcatgaggtctagatataggcttctgtggagaaaaatttgtagacagaataaatgatggacgacattgttcaacataaggctgcaagtaggggtgcttcaaaatttcggatgcctgaacatattacaaatgcagattgttagtatgaggtcctagagtgtgaataaagaaaaatttctggaaggcttttaggaagaaaaaaattacacttggccgatgttcaggattcttcctcagcatgcccttgataagtgttttcctgcatgtatcattaaaacacattatacataattacaacagcattccttatttgataacatgtgatcaagcaagcatatgagcagagaaaatttgcaatattcaagaatcctacccaagcaaatattttttcataagctaacttggtagaagggaatggaaaattatgtatgcaagtttcaagtccaaaaggatcgtagaagctacattaccgattaatcagcttcgagctgtgtacaagacctaaattatatacttaagtaggcgaagtaggcataagaaataattgaaatagacttaatttagtaggttaagactgttcagttgagttcatttggggatcagtaattgttgtttaatatgtattttgcaatacatgcagtttgaaaatataaatcataaataaataaatagcattgttagatgattgaggtgaaaacattcttaactgactgcatacacaatttctccatgaatgatttttaactaacccgttgatttactatttaattaaatatcctagatgcaatttattagttaataaaactcaaacagaaaagaagtaatgtaaagcaaaggaaaggtaaagaaagggaatcactatatattgttaatggaataggaaggaagaatgaaactggtggccaaaaggtcaccatatgaattagcagaaacttataagagactatggtagagagtttggccaagctagtctaagggttgggtacttgtgaaccaaatgcgaaggtgatgcaacaaccaccaaccatggcaataggcaacaaagtttggaaagaaaaggaatattcaagtgaatcttatcttgatgtgagacagacagaactagtgggtttagcaaatatcatataggtggctcaaaaattgaagcatcacaaagtggtggcaagcacagcttggaaaggaaaagcagcagcaatatttcatagctaaaattatgcaaccatggaattttttatgtcaatttgaagtttggcattgccaaaaagatgaccattcagcataaggatatttctaagtgaaagctttatgcatctgaatctcatgtcaagaaagaaaaaggattattctgaagagaagtttataattgggaatagaagcagaactgcaggttttcgttgtgaatgatgagggtgtgtaattgaaacacaacgtgattacagaaaatcaatgggtgtagttgccttcaaacatgggagagaaggctgaattctcaattgattcagtaacaaggttatgaaccgctaaaaaggtgaagttaattagtcgtattaacaagcaactagaaatgtagtggaagattttttaattaatctggagggtacttgattttcagatgggtgtgtactcatttggtatatttgatcaaaatacaaatttggcgtgatagtgttttcaataatgtttatctggtaccccacattttgaaattgtacatatttagtactctaatttgatcaatatgatcaaactgtcttcaattatatgagttacaaattcaaatataattatttaattacatataactaagagcaatttggtcaaacttataaaaatttattgatcaaatttgagtttagggtatgtacaatttcaaaatataaggtacccaatgagcattattgaaaaacacatggcatcaaacttgtgttatgataaaatagagaataccaaatgtgtacacacttttgagaatacaattactggctctttgggcaatatgcaagttagttagaaatcattatgaacacaaacccattttcattagttataatgcattgaagaaggtaaccggttacagttagtgtcctattagtatgattgttgagcttctagatgatacatagggctatgattctattgtttttttaatccaaaaatgggatcctaagttaagtaaccatcaaatttggatctaaagtaaagatatatcatttgaatttagcacctgtttccatcttcaaatgcaggcatattaataagcatatccttcctgcttacagatgttaggagaaaagacaaactatgtgtgtattcattaagaaagtcaatagacttggtaagaaagtcatttgaaaatcaactgtaattctaggtttcaatctcccaatttatcaataacaaaatctaaattaatttccttagtaaaaagttcacctagtaccttatcagtatgttcaaaagcattctaggtatttaagtagtttaaactttagaagtgctccaaagtcaacagatgctgttaataactatatgttgttaaaaaaagaacaccgtgataggaagttacagtccacatgcatgaaaacaaacacacctccatgtaactatttgagcatgtgcatctgcatgtcttctatgtcaagatacagggagcacagctatgcaaagaatagcaggtcaaaccaatggccaccaactgggagtaaccaagccaatggcatctctttctttttatgtttaattttttctttctttacttttgctagaatgacggtgaaatgttattaatttattgtattgtatgatcatcaaatataaaaacacattaagcttaattaggcaacacttacaaggatggggaatagcaggatggcaaaggaccaatggaggagcgatttatcttgcttatcaatcccgccatatcctgattgtaaccaatgacaatgttagatataacataaaataacttgtgaagaaatatttgtagcggttatttcattatgagatacttaataattagaatgcaaatgccttttagcaaacaaatataggcaataattaataagaaacttacaaaagctttaaaagcagggcgataagcagacatctcatacatacagcaccctggtcagaagagaaccattttagcgaaagacaaaactgcaggtatatcacatacacacaaaacaa

SEQ ID NO: 450 - DNA, 986 bp, Cannabis sativa
gtgcctgtccaatcttcgagttcttgaccttattccacattctctcaatgcactgctctgtatgtattatgtgttagtttctaactgtgatggatctcgtttatttgtcagattgtttcaactggccccaacccagagtgggatgagagctttacctggtcttttgagagccctcccaaaggccagaaacttcatatatcatgcaagaacaagagcaaaatgggaaaggtacgcataccacgaaaccaaagttagaaggaatatagagagtagaaactctagtttttagtaatttgtacagcatacagtgcacatttttctcatatcaaattttatttttaaatccctttccctctattctccttggaatttctaaatgctaactaaattgcttttgttcattttaaagagttctttcgggaaagtaactatccagatcgatcgggtggtgatgctgggagcagttgctggagagtacaccttgttgccggaaagcaaaagtgggccatcccggaatttagaaattgagttccagtggtctaacaagtaatgaacataaaaatactgaaaatttgttgttctacagttctactgcacattgagttattgatagaattcattttctgaggggaattatttctttcttattctttattttcccaatttgggttatttatcacattcttgtacataatgtaccaaagattttgatatatgcctttttgttattattctctttcttgttcacagtcttaagtgtagtcatttgtcaatgtaatattttgtaacttgatttgcctgagaaaatgtaagcttttgatgttgtgtgattagccaattttagaggaattactaataagatgcattctgcctttactcttatcttttttctgttgcattttttagggtgaattgaagagaacccagatgaccaaaaataactttgtaatgacgaaattgtgctaactcctttaatttgatgactg

SEQ ID NO: 451 - DNA, 4993 bp, Cannabis sativa
ggtaaaatattcccaacacaagctaggggtaaaggtgactgccagacttccattccaacggtcatgaccacccgtcatgactaacgatcacctcaacggtcatgactttaaatattctctattaatttagtcctggtatttctgtgtcactgtcgttactcttgccacgttatcttcgttaaaatttggataaacaagtacattatacttggtaaaaatgttgactatatatgttttttctgtaatttaatccatacctctagaaaaatataataaaaaaaagaagaaaatggaaaaaatagtaattttattaaaaaaatatatatgtttttttttaaaaatataaaaatatatatgttgaaaataataaattctgtgttattagaaagaaaatttatcaaataaaattttatctatgtataaacttttcttcaatattcataatattatggtcatatctctcttctatttaattgttaaaaatcatcatacataggtcgcggagaagaaaaaaaaaaggctcatatgtctctgtatgaaatatatcattagcaatcaagttcaatctttgtatacagtttagatatattttccgtataaaatatcaaactccataaagaggagagtcaagtatatattgactgataaccaaacaaaaatttaacaaagttattaaatcaccatataaccaaatgagtgaaacacagaaccacaaacaaaatgccagcacaaaaactacttaaatcttacaaaaactaagtactcaaatcttactttgttagttaaaagctagtatagaaaggtctaacacaaagcaccatatcactaaatgaataaaacacaaaaccagaaatgaaatgtgaacaaaaatataagagctaaatacttgaaccttaccccgttattaaaactagtcaagtagaagaactttctctctttctaaaatagaagcaaatatttgctctctattttagaagcataatagagctttgtcctacattgtaagccagaaccttcaagttgctgaagcaaacctacaactctagattgatgttcaatgttctcctccacctttctaacatgatgccacaaaacttgaaaatactcacatttatattttgctgtagattttttttttcttaaggtaacgtttcacttcatgaaaaattgaaagttgaaaatctagaaatttcatgtcgttttagtgtccatttaattaaatagtatatcatatcttaacgttagtaaagggtttgtctcattttttttctttattaatgaagaaataaagtatgggagataatgccttactgaaaaaaaacagaatggtagaagaagattttttcttaaacgtttaatttaatccagttaaatgttttgctataaatatataataatgaccattataagagtttaatactcaccgtgttttatttcatcccatataataaattatataaattgtaaattaataaaataattagttatttatgaaaatttgacaatgcaaagaataggagaacaaattcatataatcggccactatatatgttatacactagcctactaggaatgaagatagtattactcatattcttttatagccaaaattctgtacaatggttccaagctattcgagatgcttggtatctccctgagatctacactccaatctctgacagaaaaattacttacttacaaatgtattagggtatttactgatttaggggtaagagcctaagacttgcatgacagctcattcaaaataaaacagccttagccaccagcctaatctgctcggttggtaatcttgggcagctttacactcatttcctccttggtaaactcctctgctcgattgataatcttgggcagcttcaccttaatatgctcgatagcctcatctgctcggatggaaatcttgcgcttgcatagagtaagcttctcaggaggtctatcatctttcctatacaaaacacttaagagccagttacatttcaaggcattgagaatcaacacataagacgatgactagaatagacacatcagacaaattaccactaatattccataacattgaagccccagtgctgaatctaccttctctaacaatttctaaatatttgacatctcacataaaaacattacatctccgcaactgaagacttgacaactcagcttacataatcaagatattaccaaagtgaaacaaatgtaaaatgggtgctgcaaagatggatgtaaagctcagcaaaatttgggtgctgttctgctaaaaaaaactactagcataatactacagccatacatttctgcttttcaccatctgtttaacaaaattaaactacagctgtgctgacaacagttacaagctagaagaaaatagaatcccaaaatactacgagggataaaaatgtgtaccgtaaatatacaggtctgtttcatggtggctttttttttttaagaaacagctgatgttcatgacagatggtcaatgagcactgaccgacctgggcttgtggagctgcagatatccctgtttatcgcaggtttcatctggagctatggccagtatcagcaggctgcttgttgtgtagtaagttggatacctgatgttggaaaagagtaaggttgaataaataaataaaaagtaaaactaaaaattccatgaaaactcaagttataaagaccacacatacacaagtacgtctatgacacaaacgcataaaccacatcccaaaataaccacctcacgacattcaatcctctacacctgtactatcaaatacttgattaaaataataaaaaaaaaagagttaattgctcaaacaaatgtggaaatacaagaacgtacctttatatatgttgtctgaccaatcactaatttccaatatactaactatttctaaagctcctcttttttcgattcataattcctcggtgaagagcagggattgcacgtgtatcaggctctagtcccttagaaaacatctcattaatgagagtaacagccccatcaacgtcacctctattacaacagcttgacaaaagagcggtataggccactgcatcaggctctaatccactttcaaccatttcgcggaacagaacagaagcgtcctgaaatttccctagtttgctatagccatcaatcaaaacagtatacagaattacatctggccttatttgcatttcctgcatttcactcaaaacaattgaagtacccactggttcactcattttccttgctttctgagaagagccaattgatcttctatgcgcttttaaaaggccatcaagcagaactgtgtaagtgatgagatcaggctcaagtcctttcctttccatatcatggaagagaataaaggcctcttgcaaacagttcaacctacagtagctgttcatcatcattgtgtagtcaataacatcaggagttaaacccttctcaacataaatatcaaatatatgctgggccattttcacatctccagtcttgcagagagaagataagagtttgttgtacataactttggtaggttctatgttcatggttaccattgtctcaaacaacacaagagccgtgtcattatcaccagctacacaaactttacagagtagtttaaagaaacaacttttactaactaaagttccttgcttcaacaacctaaaaacaaggtcaaatgcctttcttgtatggttggcttcacaatatccccgaaccattgcagaataattatccacactcttaagttctaaatgatcaaaaacaagttcagcttctttgaccttttcacctttgcataagttctcaattatcatattgtacgtaacagaatctggatttacaccctgttctttcatataatctaaaaggttaagtgcctcacttgcaaggccatttctagaaaacccagcagcaagcacattataagtaacgatatcaggcttgaaacccattttattcatttcctccacaagattcaacgcatcagcaattttcccttggagaagatgacccttaatgagagtggtataatgaataatatctaaaaccattcctttgctcttcatctcttcaaccaattctacagcttgttcaactttccccagattacataaggcgttaataacaatattgtatgaaatttcatctagaaagattcccaaacctttgaatttctcaaattgatctgccacatcagatgacattcccatgttgcacaaacactgaagaatcgaactaacaatcacatagttagttttcatacctttcaaaaccatatcatcatgcaaagccaaagctttaagcaaattatgtgtcttgcaatagccttgaatcattacaccatatacatgtaaatcagggaccaacccatcttttcccatgccataaaaaacactttcagcttcatccaatttcatttcattaaagagtccacgaatcacaacaacataagcatacatgtcaatgttaacttttgactcgttacaagctcgtagaattttgtatcctaaagctgacctgtggttagtgcagagcccctcaatgtaggcgctgtaagcaaaaggagaaggcttcaaaccagctttctccatctccaagaacacatcggcagcttcttccaaggcacctttcttacatagtgccttgatcacaatagcatgagtataatcattggggctcaaaccgattctctttagctgcttgtaaatggccacagccatatccattttaccatgctcaattaaacggttcaaaagataattgcatgtgaaaacatgaggaacaaagcccttcctcctcgtttggaacaaaacatctatggcatcatcaaacatggcaacactgacataactcttgaccaacgcattgtaagctcgaaataacgactgcccaacttcaagttcctcctccagcctcaaaagaaactctgatatcaggaaaggcaggttttcggggcctccaggttgttcttttgaaggaagaataatg

SEQ ID NO: 452 - DNA, 4279 bp, Cannabis sativa
ttttttgtttaatttgttaaaaggggttcgggtgcttgccttcgggactctgcatgtcgacgatgggacgccatgtttcgttcgaccaagctgttgcgtggaaagtacatgcttcggaagatatcaacagtgttcattgtcttgctttctcttttgtaaactggtcttttgtgtgaaaacactttgttatattttccaaacacatctttttccaactttgaatatacaaaaatgataaatttgaagaaaaaaaaagaaggaaaaggaagaaaaaacaaaaaaaaaaagagaatcaagttttgtaatatctgaacctaatcccaggtttgcattaatattaatttaatttaatttttacttttatttaccaaaatttttgtttctgcatgtaaattattggtttgtgctttctattttcagttagatttgtaagaattttgagttcataaaaactttggctaagatttaatttcttataattttgcaaatttgaatatattcaaatgaaaaagttagaccttgacttttggttataatagtttgaattcaaattggtcataatttatatattgaaataatgtttaatttagaatgataattataagactataatttatgctttgtttcaaatacaacaattttataatcaactcaaaacacatgattggagattgttactgtcaacttccaactttgtaggtatttattaattttagtgtgattgttacacaccaatttgcatttttaatatgaaatgtaatagttatatttatttagtatttgtgtactttttaatttggaataattttaagagttgtttgtggtaaaattcttttatgatttaaatttttacacttaatactcttacatctttttgtggcaaaatttttttatgtttatttattttttttttttgtaaatttgatgtgtcagttagataataccgttaaataccaactgaagtattacggtattgatttcaaaattttactttcacatatacactatacacagtggttatcttattggtatttaacggtgatatttaaataattatttaaatttgtaaaaaaaattaaacttaaaaatattttgccgccaattaattttatgtattgtttttattttaactttttgtttttaataaaaagtgaggtgtaccttgaaaaaccccaaaattatatattgaattccttgccaaatcataatcttcatccacaatttttttaaaataataataataataataattacataatcttcatccaccaagaacgagtttagcaagaatgagccgtgtgtgagtaatattagtagtcaaatcatgaaaattgtgattgaaaaatttgtgagtactaatatttgattagattgaagatgaataagataattactaaattaaatgttatgaggaattaactatgattactattattaaagaaaatgcttcgcattcttcatatataaattaatgaaagtataatgtgagatgaaggttagggtacaatgtccacaaatatatctttgttttgttatgttcttcttgtcctttgaattattccatcaagccttattcacaccaataccacatatataaaaatatatttattttatttattaaaattttttaattatcaatattttatatatatttatatttgtgtgtgctatacatacatatatagagtaatttgtggaaaaaccttttgtattttcagttttatacattcaaccttttgatttttttttggcaaaatatctattaactttactattctttacaaatttaatgtgtcagttaaattttactgttaaatatcaactgaattatcattgtgtacacatatacgtgacatattttgtttggtgttatttacatttatagataggtgacacatgtgcattctgatcaatccattcatcttaacaagtacattcactaagccaagatgcattgaacactaggcccatggtaagattcaaacataatgttcagatttaactggtgcttcaaaatgactaagtcagacatatgaatttggaaggttgacacttgttctattaacaagtatacgaagagacgaagacggataccctctgggtcattcgagaaggatattcgaaaagaaattcgggaacgaacaaatatttgggaaccatcctaagtggtacatccccgacaagaatctagagatatcaggcggtatgtcccctatatcaggtcttggaaacgctcacaacaaaaagaaaatcactttttttgagcaaacgtccactactctaacattctcacaatagactaacggctcaggcccatctgtcaccctcattcgtacatgtgtgtatggatgacggttgtccccaactgtaggcctcttcaaatcgaccaaaagttaatattttgatgtaatttaccccatcagtagacttttttcaatttacacacactaataggtccaggtcagcctgttccattagtgaaggagcctataaatatgacattttcctatgcaaagggttagaaaattagcaagaaagacttgtatgaaaatatactccatagcttgagaactaataatattaattcgtagagtaaagtttattaacactccaacacgtaaaaaatctccttatcaagtttaatcttatttttttctacttaatcttcttttaaattggttttcgaaaaattcggtaaacaattagctttgaaattttattgtcacgtgtacagaaaagcaaacaataacgatttcaattggaacttaacttatgcatcaagtgtgcaaagaaaattaaagttaaggtgatattgccaaaaaaaaaaaataaaggattaagtttataaaaattaaaacaagaaaattttactcctaattaatcctatatataataaattttaaaatagagaaagtggacttttccatatttgttacaatggaaagtgtgtggtgtcttgcatatttgattagttttattttatgcattaattaaaaaggatctaggttaatatttgcaataataatatatatatttcactacgtacttggtttggttaccattactagtgattggattttaatcactatttataattagtactttttaacatttttagttattggataaattgcaactatataagattttctaattttattttaaataatttacaatatcaaagtcaaaattttcaaataatttatcgcactctcatataaatatcaacaatacaaacatacctcgagaatgtttgaaccctaaattcatcatcctataaattatgaattttttgaaaatttatggagaaaatcccttatatacttatatctatgctactttaactagcaatttttcattcctacatttatatataatgtatatatatatatatgtatatgtatagggaatggtaaaataatttgaagcattgtttgttacaatagctgatttaaataaggtaataatgatgtttttagtgcgaaatataatagctttggctcctgatgagtcaactaaaaaactttttgtcgtgttggtgaggaacattaatgcatatatatatacacacattatcataattattatgtatattatgcttaattacttttgtttatcaaattaacctacctacctacctattaccttgtgaaacttttaatcattaggctacatattaacccactaattatccatctttttcactcttacgtttcacaattttagaggtttcatacatattatattaacaataattttacatatatatttttagttacaatattaatatttatttactgtgctaaaattaaattagtactaatttattatgttttaaattctgaaagtaattttttttatagtgttactagcaaataatataaaatattaagatatatgatatttatagttaatctatagtacactctctaataaatacttatgtctagtttagcatgtagaaaagttttttagtttaataatttttttttttcataattacataccttatacttatagttattgtaaatatttaaattttttgaaaaatttacatgtaatcttaattaattataacataataataaaaaaaaaataaactaagaaaccaccaaataccaaaacaaatataaaatctactttaaaaaaatatacataaatacatactaagacatatataaagaaaaatatattattttttattacgtacgtacgtgaagtgtgaggtaacatcatgcgaagaaaaagctggaaaagcaatgatgaaataaaatatata

SEQ ID NO: 453 - DNA, 8897 bp, Cannabis sativa
  modified_base (3069)..(3084): a, c, t, g, unknown or other
ggcataaaacccaacacgaagaacaaaattcatgcataaatatatatacacgtatataatctttgcataaaaacataataaatatatagatagtagaatattctacttaatattatgcaataaaattattatatgaatgagtattatatataaatatatacagataaaaagatagtcgtatatacatgtatatatgtatacaatactaataagaatatgtatatatatatatgaaataattattttgatgcataaaagatgttaatgttgaatgaatataataacctcaaaaatatgaatcaaaaaaattaaaatggaaaacatttctttccatcaagcatgaacgaccattcaaaacacacacatatatatatatattataaatatatataaggggtgcactttaaatgggcattatccgtttatggataatatcatgaaaatttgagtttttatgcttaatttttctatctaattaaaaaaatctctaatttttacattatatgaattaaaattgtttcattggctgaaaaaaaaaataaaaaaaaggttaaatttgacttaagtattttttatatagatacatttttaatatagtgtaaaaagtaatgatttttgacattttttttaattaagtagctaaattaagtacaaaaatttaaatttctcttttactattcgtcattggataaaaatctaatagtttaatatttttaaaattagtatttatatttaaatggcttcgtaaccatcaatgagtaatgagtaattctcattaagaagtgagaagtgtaagtgttatatatataaatatatatattatccgcggcggtttctgacaatagacatgtggattccaaatcaacatccaaagcccaccaatagttctataattgtcaaaaaatgattcaagaggcaaaatgcatttggatggttctatgattgtcaagcgacgatggacttttagacaaaaaaaaaggccatcgatggtcttgcgatgattctatcaaaacaatgattaagaaacaaaaatacgatgctcaacgatgatttaatgaacttgaatttagaaacataatgttaaaacgatgttatttttgatggtccaatcatattcagcttattaagtaaagaaaatgctaatagtgggtgcattttgatggttttacgtatcaaaagttaattttaaaagttgaataaaatcaaattttgatggaactatcgctaactatcgttggacaacatcagcgttggacaacattagcattagtttttatcctcttaaattaaaataaaaatttaatgggaccatcgcaagatcatcgttagacataattttattatcagattttgcctttaaaaataaaatcatgttttgattggccatcacatcacattgttttgggtattatcaagttttcttcgaaccatcacaaataaataatcatctagcatcatttcttgcaactaaaataaagttttagtatcattgcaagtcctcatttcagcatcctttttgtttaatattcttagatttaacattatttataatcaccttacaaaagacaaaaaataagaattatttataatgagaaataaaattactgtcaaaatcaatgaatcaagcacagaaatagacttagtgtgaaagttaatattttcttgtttttaagttttgaattaaatttgaagtcattaaaaacaaaaactgacgtgtgtttctatggttttgatgtatttttaattgtataccaatgtttaatctaaagtttatataaactctgatcattcattgtaattgtacagttgaatttttactatatctaaattagattcgacctggattagattttgaactataccttgttattacaaattacattaaacttttggatttaacaagaaattacgttggggtggtacctttttgacctttgactcaaactttagaaaaaaccatctaaatatagatttgtataactagaatctgtttcattagttcaattgttaaaatgtagttaatattatgtcttatatatatatttataaaaagttgttattagtgttacgtagtttttacctaattgtcagttttggatattaaacactattatttatatttgtagaagacagataacgcgtgaggataattgttcgtggctctcatgatcatcgccaagatttgatttggtgtacaatatatataaatattgtttattatatttatttggtaactcttaaatcgtggaatatacatatttattacaataatacaatacgtaccaaccaaaaaaactattctaattacagtacaaatgtaaagattcttgcgaggttgcaaccaaacacaacatctaattttcttaaataataaaataaataaactataaagcacatcccactagataatatacatattaaagaaaagtaactcctccattttagtatattatatataaaaaagaacctcttccatttcattcatatgaacataaattgcattttggactgaaatttcaattaactaaaagaagaaatgtttcaaactatgacggaaaataatttcaaaaaaatcaataaaaaaagtaaaaaaaaaaaaagaatggtcagactttgataggtcaccgcaacaacaacagagagtcttagtaatagggacccacgagtggaagtccgaatattatttacccaaaaagcaaaatggtaaattcgtaattagaattcaaaacaagggtaaaagagagaaatcaagtaaaaaaaatttgtagtaaaggagcgcacttgaaaaaagaaaaaaaaaatagtcctagtcaattccgtcacgtcagaacaaagccagaaagagatactggtagtaagtgttgggaccaacgttaaatttttatgaaaaatataaaagaaattcgcgagggtatatttgtccattcaaaataaaattaaaattaaaagaagtaaaaaaactcttcggtgaggtgagctgtggagatactcagatatattgttagcgatgttcccaagaaaaaaaaaagccggctcattaatcgcttcattttttatttttattttttnnnnnnnnnnnnnnnntaataataataaaaataataatttggggcttttttggtatttggggagctttttctctttctctatcttctatactgtgtctctctgtatgccttgtgatttgtttgtaggattccaattatcttatttttccaaacccaaagagagagagagagagagagagagagagagaggaggtaatgctcgcgagtcttggttatccggtgagtttgctttccggcacgaaggtttactacggcgcaggctgacggtttgttgttccaaatgcaacagtgaagaggaggagtatatatttatatatctatttagagagagaaagggagttaggggttggggggtttgagtgtttatgtatcgaaaatgcgtgaagcactactctgtgatgacccaagtgacgttgtctgcagcaccaagaagaagaggtctgaggaggagaagctagataacgaggttactattactgctactgctactgctactactacaccgacgactaagccggttttggtaactccgccggtgttggtagttgcccgcagtcgttcccaagggggaacacggagagtgacgccgaccacgaccgctatctcatcagtcgtaggagacaccaccatcagcctaacttccggtggttgtacaacaactgttgagagagtcttgcccaacggcgatctttacatcgggagtttctctggtactgtgcctcacggatctgggaagtacttgtggacggacgggtgcatgtacgagggcgattggcggagaggaaaggcttcgggtaaagggaaattctcgtggccgtcgggggctacgtacgagggagaattcaaatcgggtcgtatggaagggtttggtacctttattggatccgacggagacacgtatcggggttcatggagctcggatcggaaacatgggtatggacagaagaggtacgcgaatggcgatttctatgaagggtcgtggaagagaaacctccaggatggtcaagggcgttatgtgtggaagaatggaaatgaatatgttggggaatggaagaatggagtgatttctggccgtgggattctgatttgggccaacgggaatcgatacgaaggccagtgggaaaacgggattcctaaagagaatggggtcttcacttggcctgacgggagttgctatgtggggagttggaataaggacctgaagattcatcaactgaatggaaccttctatcccggggccgggaaagactttagtctgaagacaaatgggcctgttatgagtgataatctgaccataacaatgaggaaaaggtcgtctgtagatggagcaagaggaagcgtgacagagagaaatttcccgagaatttgtatatgggaatcggacggtgaagctggcgacattacttgtgacataattgataatgcggaggcttcgatgttttacaggagctgttctgcacccgaacacgatttgaggcagtttcggcgaaacccatgttgtttcagtggcgaggccaagaagcctgggcagaccatatccaaagggcacaagaattatgacttgatgcttaatctccaactgggtattaggtaattttgccaataggttttgcttttcgatttcagattagtcgaattgctagggtttgattttcgcatctggagtattttttctttcctttttttttttcttgatgtgggtattcattttttttaggtatactgtcggaaagcatgcatccatagtccgaaatattaagacgagtgactttgatcctaaggagaaattttggacaaggtttcctcccgaaggatcgaacaaaactccacctcatcaatccattgactttcgatggaaagattactgtccaatggtgtttaggtattttattttcatatcttcatgtttcggctttgatgatattaggcttatatatataagtagttgaagttgaaataatccattacaggttgctgagctgatcttttttttctctttgttgcagacatttgagggatcgattccgagtagatccggctgattacatgctggccatttgtggaaatgatgcactccgagagctttcctctccgggaaagagtggtagttgcttttacttgacacaagatgataggtttatgataaagacggtgaagaaatcagaagtcaaggtttgttgcctacttctttgacttttgctttattatggagcttatgctgtctcaaaagccatttgagtagcataatttgcggttttgaagggtcaggtaaaataacttaattgtaatattatttcaggtgctattacggatgctttatagttatcatcaacatgtctgtcggtatgaaaattcccttgtgacgaaattcttcggtgtgcattgtgtgaagcctgttggtggtcagaaggtatggtattcaagagatcaatttgagtttgtaattttcctctttattcactgctggaactttgttttcctatctctaattacatgtgaactatttttcagacaaggttcattgtaatggggaatttgttctgttcggagtatcggattcataggaggtttgacttaaaaggttcctcccatggccgcactactgacaagtctgagggagagattgatgaaacgacgacactcaaggatctcgacctcaattttgttttccgcctccaacaaaattggtaccaagaccttatgaagtaggtcaaattgagttttcctgtcacattgatagtccttattgcatgttactttgtttattgatgttcttctgaaaattcaggcaaatagatcgagattgcgagttcttggaagcagagagaatcatggattacagtctattggtcggtcttcactttcgtgatgataataagtatgacaaaataggcctgtcgccttttgtattgcgaactggtaatttttcttcttgccctcaggttatatggatgtagttatttttgtttttgtaaggatggatgtaattaatttgttattcggattattagaatgctgaatcaattgtgactccttgtaggccaaaaggactcgtaccaaaatgagaagtttatgcgtggctgtcgtttccttcaagcagaattgcaagatatggaccgagttttatctggccagtacgtattactgacttgatagttctttttctgtttttggttaagtaatcattgagtgttgctggctgaaaatgttgcgaatacattttaaaatagtttttagaaactttgatgaggaccatgcaggcaattatgtcaaactagtaaaggcatcatccttagctttaaggctagtagttggccaactaattctgcctcttatttgatttcgctaaaccaaataattgaatgtaactggggttgcttagcaatttatgagtattgatagcagttgattatgagagcacatacataatgtctctttatcttcttttgcacgtatttcttgtggcccaataataattgtcttttaaaaccattcacgatctgtcaattactacggagttatgccatcaattttgcttatctggcattaataaaaaccaccatttattgcatggtaattgaagatagtattttaattcgagtggccataaagttaaatcattaatgttttgtataagctatttgggcacttttgattttgctatttattggtggtgtcatatatccttgttctctattgacgttgaaatattttatctcaacagaaaaccattgatccggctgggagccaatatgcctgcaagagctgagcgaacatccaggaagagcgacttcgaccaatacatatctggtggaattagccatttgactccatcacgcagtggagaggtctatgaggtggtcctttattttgggatcattgacatcttacaagactacgacatcagcaagaagttagaacatgcttataaatcattacaagctgacccttcatcaatctcagctgttgatcccaagctttactcaagaaggtttcgagattttatagggagaatttttgtcgaggacaggtaggaatggtaaagaaggttccaccaacattaaaaaaaataatcttctatgttggatttttatcaaaatctagcagcatgcgttttccaccccctgaaggaagtggctccttaagaaagcagcagtggcgcggtagctttagctttagcttgatgcttgtatatgtaacgaaagacctacgccggtctcaaaccacgacaatggaaatacaacttccatgatgaccatgtgggaaaaggattggggttggcctttctggggagtaagtatatgattatggctgaattttggagattacagccattgtgttattgttattgcggtgtggaaagccgcagggatttgtacattcaaggtggtggggatgcaaagttggattctggatttttttttttgggtgaaatttttgtggtatccaaggaatatattgaagatttggaatggaaaaatagaggtacagggaaacatagagagatgatgtttccaccgagagaagattcaaaggggggaagggtgactacggaataagtgtacagccttatagaaaaatgttggatagtttatcaaattctatgaattttttttcttttttaattgagatatatatttaaaactgtattttgaatcacgatgtccaagaacaaagggccatggaatctctctctctcaacttttctttattttgtgttgtgtaaaaaagagcagagcagtgtgatatagagatggggttaattgccctacttttgcagtgaaagagaggcattggacatagagtagttaatatagagacatgaaaagtagagaaagcaaagagaaaaagatgtactgccaattcttgtttttgcccactttgtttactgactttttcactttcttctctcttaaatataataaaaatatgattatgaacaagcaatttttcttctactagaaaaaaaaaaggaaaaactcttaaataatacgccttttattgctttaacaataacaacaatataaatatatatatatttttgttattatatattactaaagaacacagatgaaagaaaatgcccacgaggccaaaaagcaaaaaacacatcatttgacccttgaccaacattgggtcctccatccatcaatcatcatcatcatcatccaagtaaagcaaagaatctcaccgtacacgtggtgggatctgattcataaggagcctgatggtgctattccaaggaagttgggggtattttagtcctctgattcgttagtagcctgatggttctattcctagtaggttgggggtattttagtcctttcattaaattagattagtttctggagtctcgtgtaagtggtttttattcattttatttttaatttatttaaagaggtcaaagttttggttcagaagagagggaaggcagggcagggaagcggtcggaggacagagccgagccgagccccttctgtgccactgtttacacgcacctctctctctctggtttaattatttttgacattttgctctttttgggcgtttcttgtgtctgcttgctcacacctatgtggcaagtggctgtggctttgggtccatgccctactcccctctttaatattcaaatattatatatatatatatatatatatatatatttaacatatatacttccaattatctctattttacaaacaactctattttacaaacaaaattatgtgcgtttggatagctatagaggaattagatttagatataattagagataattatacaatttaatttgaaccataggaatttgaataagatataattagagat

SEQ ID NO: 454 - DNA, 2772 bp, Cannabis sativa
tggattttcttcgttttgggtacttattcctcaaatttatgaaatttatctctgcagattcctcagaataaacttgcccgctgggggtcatcctgtggcagttgaattctgtgatgatgcgtcatctgtggttgtagcttctcaaactatgaccggttgttccttatacatgtatggtgaagaaaagaccaaatcttctgatggagctaaccagcaaaccaagcctcctcttcctgaaatgaagtgggagcgtcacaaaatccatgacaaaaatggtgtcctcactttatctggaactgccgctacttatggcactgctgatgggagtacaataattgcttcttgttctgaaggtacttctttcttttatactgtatgcgttgtattcatttggttgtttgaacctgtaactcagttgtggttactagtatacgtgtatagagggtcattataacaatgtacagataccaacagtttaaacattagaagggcaatgatcaatgtggttgtggacattatggtaaactgtacgaaagattaaattggtagactaagtcctagtttagtatagggccaagagtgccaggcttgttgaggggtcaatctgtgttatgctgtcagattgaggttacattcggtcacctcactagttaatgacccctgttcgatcctttattgggttcaggattcaataagtgcttcagctttataacggagcttggtaattggatttagagaatttatatgtgtaaaagaactaaaggatatttttttttccttaaccgtaagaaacattaaaatattgcatataggaaaagctacagatatttagtggctctgatataccccatctcttttacactagcctcttcagactctctttcccttatttgccgcagcatccttatctcccacaatcatttgtaatctcaacaagttagaaatggttatcatcagtatatgttattattgatatggaaatgacgatacaaaatctataaatgatttaagatgacatgttaggtgatgtttggttcattggaatggactttgataattaggaatgataatgaaatggaagagaattagaatgggacataggcatatgaatgaacttgattgtttcaatggcagttgtacttagtaggtgaacttataatactatgaggttacccatgagaatggtatgtaatatgaattgtaatgagaccaatgacaattccttaaagaagcaaaatggaactgtgcttaggaataaaggtttctacggctaatggctaaaccagatgttggaatgagaataggtattccaaatctattcacattccatcctacataatcaaacattccatactgccatgtaaattccaccaatacatgaatgtgccataaggaatccatatacccctctaatttttagggagccaaccacaaagaccagcaagtagcatgattgcaacattccactaattctttcttaaccttctctataaacaaggactaacccaagacaaaccaaaattcattgaaaacctagtccgaagctttattgctttggaacaatgcagaagaaggtgctgcacagatttgttgttatctattgacatattacacattagtttggagaaatatctaacatatgaaatcgatgattccctccccccaccccccacatcaagttatagctaacactaatcacatttcaattatcatgttagctctaatctttctagttcttatacttcgttgcttacaggtactgacattatattgtggcacggtaaatctggcaagattgtgggtaatgttgatacgaaccaactaaagaacaccatggcagctatatcaccaaatgggcggttcattgcagcagcagcttttacggctgatgtgaaggtgaaaagatctacatgcttttcttgagtcagtcatttcattatagtcaatccctgtttatcctacttatgatggattttccttggcctgtaaagataaatgacatgtattgtgatgttttgtcattatctatttgttgaataattatatattttttcctgtttaattggcatcaggtttgggagattgtatatgcgaaggatggttcagtgaaggaggtttcaagagtaatgcagctaaaagggcacaaggttatatttcaattttaaactacgcaatataattaaatctagcccattccataatacgacttatctgctatcacttctaaaacttttgttttgcatttttcttcaagtagttctgtttggtctgttgatcaacacatgtatactaactcttgttcacgctattgctgtttagagtgcggtgacttggttgtgcttttccccaaactctgagcaaatcatcaccgcatcaaaagataactcaattagaatttggaatattaatggtatgtttcttttttttttttttaaggaaattggtatatgttgttgggtccctttcattttattaaaatattatgttgtgatttaaaatttaatcatccatcctgacattgtttcttatccttttctttaaaagttcggtatcatatggatgaggatccaaaaacactcaaggtgtttccaattccacttcatgattcaaatggtgttactttgcactatgaccgccttagtgtatctcctgatggaaatatattggcagctacccatggctcgacattgcagtggttatgtgttgaaactggaaaagttttagacactgctgagaaggctcatgatggtatgcttcatttttacgcaaact

SEQ ID NO: 455 - DNA, 12476 bp, Cannabis sativa
aaagtgacttggaaaaaaaaaaaagaaaaagtcggccaaaactagaacacaatataaagaaaagatttttttttttttttttaagttttaataagtaaaacatagtaaaaagaaagaataatttgtgacataaatacttaagtttaactctccgttataaataaatatttaagtttatttttttgaggtaataatacttaagttataattatgaaacttctttaaatacttagctgttaagtgttaagtaaattgtcacgacaattcatgattggtttaggtcatgaatttttattttttaaaagaaaattaatttaaatatacccataagaaaatgacatgtggataatgacttgacatttaatgactagatacccaccgagttttggaaatataacttatgtattattaccgcaaaaaactaaacttgattacttatttagagctaaaaattaaacttaaatatttatgccgtaaattattcaaaaaaaaaaaacaaaaatcaagtagagaaagtatattaaaatataaatataatatttagagaaattaccccatatgttgtttttttaattttttttttttaaatttagggtttgggtttctaaagtggttgacgctagttgcaatagggtttttatacgattttttgttgcaatttaagttgcaaagctagttgcaataagagattttatgtaaaattctgtaaaaatacaaaataaataaataaataaagtgtaaaaatgaaaaaaatcctaaaatttattaaaaaaatatatataaatataaaatttgaaaaaaaattaatctttcatttaaataccccataaataaattgattaattagaatttttttgaccactgaagagtatttggaatcatcggagaggctacatatccacaccaaccaaaatctctggattcgcaaatctcttttctcagttagctccttcctgggtctatgcacctcctttaggtactcatcttcacttgttttggcctctacttaacctaagctatgtatttatctgtaaaagtagaaattttgaagctctttcctgaatcctgcctcacctgcagttgttgttgtggtcaccaattttaatatttttgttttggttttttctttctgttatttcatgaatgaataagcacaatataaggatgctcgttgtctgtgaaaggtttagttatatatatatatatatgtatagttatatttgtgtgatttcttttcttgtgggattttctttaatgttaaggtgttgcaaatcttgtaattttaagacccacaaaatctacaattgaaatttccaattttcgaccacagaatggggttggaacattggagaaaggtgttcgaaatcctgtaaaagggttttaaatttttggctatataacttcattaacttcaacaaagctaaattatgatgcgtagttcttttataagaatgaaaattgcagggtttttttcttggtaatgtttttcgcaggcttaatagcatagagatctttgagcataaaaggagcatcattaagactgtactgtccactagtttaactctatttctgtattggattgctcacataattcttttaactttaagttcttatgtttataatgcatatgcgggttaagagttgttacttgtgggtttgtttgacactttacattatttcccttaaatattgaaaagaaagtgtcacaacgaatccaaatagtaacagtgaagaactttttttcttgcctttattaattgagaagggcaattaaagaaaggaggaaaaaataataaaatcaccaaaagaacaaaaagaaagctttacctagaacttgtaatttttttacttttcgacagaatcccagagagaagcttaatttatttttcttactttctcctactgagtaactgcagctaattcttttacttcaatgatctggctatttcttacttcttagcaaaatgacaactacatttcattttcccaaataaatagttttctcaatcattacatcttcatatctaacaagaaaaacagaatctgtttcttcttcatttaatgtgttgcggaccaaagagttcttgttaaaatataaagtattggtattttatagacagggttttaaatattcaattatgtatggtctagcatgtggaatgtcaattacttatgctctaccaattgtgtattcgcgttcagtttccagatagttacaataatcgagtcatgagtgccaatgtgcacatttttattttctaattctgtattcaaatattatactctttcatgagatatgccattgttttcatgtcattgcccttttgtttgatttacgagtatttacattataacagtgcagggatgctaggaaagtcacttgcttctcctttactgacctacaagtatgcaccacggacagtcttttcgacagtaagtaccaattttttttgtctgtacattatttggccattgtatcaaacttgagattttcgaatgtgtcgttgattttcaaaactataagaacttcgattgcaagctttaatatgtttctttgatataattgtatggttagtatgataactgtttcgtatataacacacctaaattatgttgagaccctcctgaaaggatgaataaacaaactgaagaatctggtggaagactttgaactatatatgtagtcttaaagcatactctggggaacttcttatgttgctacttatctcatagtatcttcaatgattcttacgtttattgtatgaacttccagcttgatctaatgtatccttatctgcttcagccattcggggttgcactatttaggatattttacacatattttctgtatctttacatctacttggtcttggtgaaatctggcattgttttttaagatctttttgcagactgatgttgtaacaggcacaaccacaggaaatattgcattgctcaatgtaaatagtcattgtcagaatggagtcaaagtctcttggacatcgtgttcttcaaagaaatgggtattgaagtcaactgcacaaattgagaatatgatcgtaactgaagaagataaaaagcagtgggaagcatgcagggaagctctgtgtacatataaattcagcaatgaggaagcagataaaattcttggaaaagcttttggccagatacactcgccttactggggtgaagaacgcaaaaaggttgttccgaaacttgaacttgtgaatgaaattttggactacttaagaaatttgaacctatcagaagatgatctcgcgaaggtgcttaaaaagtttcctgaagttcttggatgtgatctagaagatgaggtaaaagtcaatgtacaggttttggagaaggaatgggaaatcaaaggaaaaactcttcgaaaccttcttcttcgaaatccaagactattgggttacaacattgactgcaagggagattgtgcagcacaatgcacgcgatgctgggctcgtttttaagctaaatctaaatctcttttgttgagggaagtttttgcaaccaataataaagcatcaacgtatgtatatttatgtaaaagtgactcccatgttcaaatcctacttagctggtatatggattaatttatttataccgatttattctattcaacattgtattttaatggttccaccataatacaagttgaattgctttgtaattgccactcaaacaatttaatgcgttaaaaaatattattgccagttttcaatactttcctttaccatgtttactaaacattgtgaattggtctcctcgaacctgactttcctccctgtgcaaattaaatatctgattaatatatgtcaataaatgttaagtgctaaattttcaattttaacccatgtatggtttagagtaggtaaaattcaatccaattaaattgaatcgattcaatttaatctaattataaaaaattagatatttaattacaattgtattgaattggatgttaaaagttggcttttaattaaattggatcagttattggatgttaatctcaaaatcaaattcaaaatcgatcaaatttaattatatttatatatactaaaaaattatttatttttatttaaatataataaaaaatattaaaaaaataaataagatatattttaattatatttttagtagttttttttttattgttaatatctagcacttgattgttttgtgcatttattttttatatgttttgatatattttattaattaataatgtttttgttttaattattttaaactttttttgcagtagacttataaagatggtatccttatatagtatttgttaacgtaaattttcgttaactaaaaataatgagcctttacgtaatagatatatcacaaaaataataataaataattaaattactccagatatttttacgtggttttacagttaaatctacagttgaggtccagttgttgtcccaaggggctgccgctcctgggtccttcattcagtgggaggcgccaatggtggatctactcttggaggcgtgggcctgccacttggatccaccgagatgctcacatcaggttggccagctgtgttggccggacttgttgcgcatgttgtggtgacaggattcaccacatctgcagtattcatgaggattccaattgtgaatagaacctgggtatttgaatctatgatctgtgggtcttgagggagactcgaagatctagatggtgcaataggagttcttcttgtgttcaccatgacatttgattagatcacgatattcacgctctcaatgaaagcaccaaactgttgacctcaaaaaatgatcaacagacactagggtcctgcagatctgatgcttgccacgtgtgtgtacaaataagaatgaaaggcaatagacaatatgatttgttatagaggttcgacccccttgtgatagcgggtaacgacctacttcccctttagttgtattatactgagggaattactatccatatcgctacatgtgagatctgctatagtacccttaggcttacaatgtatgaatcaatgcttggaagaaaagtgttggacaacctaaggtaggcgtgtgagagagagaatgagggagaaagagagagtttgttagacacttagggtttgagatcaagtttctagcttagaggtaacttaggttttcagtcaaaggttaaggcccttatataggaggccttaaaccctaggtttacaattcaaatcccttagcaattgtatagttagttagatatttataaaagaccaaagtgcccttgattccagatattattcagccattcaactgggcttttagggcccaattcacaacccattatgttgtctacgtgtagaagtgttcatcaaggcctacaaagcactccttgtccggccaggaccctgtggtggacaggctggctagccatggtgctgtccctaagctggtcggccatagggttggccagctcttaagagggagctggtctgtaacttgatctccgtttgggtaccggggtctttgtttgcttggatgctgatttggccttccgtttagtgagctttactaccatgtggcactagttctgtccacgtaggcatgccacatcacgaggaaaaaaattgagataacagatgcaaagtccatggccatttgtaatttagggaatagatctgatcaggcaattacctaaaggaaaagatggagtgtagtatgcagtagtggttgttgattactttaaaaagtgggcgaaggacgaactactggaaacaattcacttctagaaaaatgttagattttgcagtgaaaaatataatatggtggtttagacttctttaaaaaattgtttcagacaatggaaagcagttagatatccaaatgttcacagacttctaccttaagtagggaatcatcaaaagcttcttgccagtcgcacaccctcaagctaatggtcagttcgaagtagataataaaactcgcaaggacaccttaaagaaaaggctaaagaagctaagggtaattagcctgaagaattgcctgaagtacttttgttgtatagagccatagaaaagatgccaccgggaaaaccccatttgccatggcctacgactatgaggcattgttgctcatggagttggatcattcgtcccacaaaaggttgacatacgactaagaaatgaaccatgctcttttaacagaagcacttgatgaaattgaagaatggagagacctggcaaacttgaagttaaaagtcaatcaacaaaatgtagtttggtacttcaacaaacaagtgagagagaggaaattctttgtagaatatatgctgctcaggcaagtattctttaactccaaagacagtgcggctggcgtgcttgggcccaattggagaggtccatatcaggtaaccgaagtcacagagtcgagacccataagattggtcgatacaataattttggtaccaaggtactggaacggtgaatatttaaggaaatactaccaatgaaacatcacttctaagtgatggccttgtgtgcagttactgtgcaaaggttgattgaaatttctgtactaaggtctgttgaccaatttcaaagtactttttatttttatgttcatttttaattaaagctaaagatccgttcaaatcatgtaacaactttaatctttaataaaggtaagttacttttaagtaaccacacatatcgaccagtaaatcaaataaaacaatttttatcgttcaaattgtgtctgttttacttaacacatgtattttgatgaatttcaacaaataaaaacttacttaatatgcataaataaagggatcggaccgacaaaaaaaggaagaatgaattgtaagtgaccgacagtcaaaagtctgtttgatcactttgagggcacctatatccatacaaaattgaaataagtaaataacaaacaataaaaatttgaagaagaattaataagttcaaattaaaaaccaaggaaaaaaagcacgaattaagttcgggtttgaaagctgtctggttatccatttgtcttaaaaagagaaaccaaggataaatataatttggccgaaatttttctaaaaataaaggcctgaaggccgtacaactattcaaaagtaaaatagtttagaaatccattggagttgtcgggttgagagagttatgggtatcatcttggtcggccaccgagaagttaggatatgaagtcgctggcatggtagaagtttcaacttggctgcctcttcgatgtgtttggcctttatctcctctgctcaagcaaacatgaaggccttgtcatcctttaaatagtcaaagttggccgcatgattagctatccaaaactcatagaagatctccgtgttgatgttcataagggtgtcgatttctttgtcagctttagcttgagcagtctctagctcggagattcactctttattctttttgagcaaagtctggcacccttcctttttagtcttcaacccattgttgtcccggttaagctcctcaaggtctttctccaactaggcagttgacagagtgttggctatctgttaggtcagctccttaaccttcttcttttgctcagtcaaatcttgattggcttgcttcagggccttctccttcttagccaattccttttgaaccttcctaatttctgctttatagtcacagactccttggccatggcttttgtccgagaatagatatagcccgcctgtaagtttagctagaagtaaactaagccaagttaaaatacatgaaatggattgggtagacataaaatatgaacagtagaaggcaataccttcgtgcaatccttaagtagattacccattgggaagtcagttggaagaatgtctgttcctcctagtagctcctcggcctccacacggaacatttcctggtagttattgtagatgtcctcgacatgctttagctctgcaggcaccgtggatgtagctttgtcctttggtttttgagtcggtggggcaagagctaagggcgagccctttaagttcttggttgctaaggatttggttctggccatctcctgatcaatgttgatgacgaccaccccatctctagaagagaccttgggatcaattttctgcacttttcgtgggttttccttgcttgaggtaccacccaacttccttttgaacgaggactttagttttcccgacatttctacataaaaatagaaaaaactatcagaatgatggtcaggataataaaatgacacaacttgttaataatatataccctgaacttctgcaggagtaccctcccggacaagaattgaaggagcatcatcatgcgaggattcttcttcaatttcttcgaggatggcctttcctttcccttcaacattttggacgaccctgcgaataggttcttcctcaagatccctggggcgaatgggttattccataggcaaagccttaaccctgttggctttggtctttttcttcttgggagaggatggcttgaccaacacagatggcttctcgatgaacaaactgtctgggctcggatagagtccattcttagataaattcttgggggatgtcaataatacaatatgccaagtagaatcagataaatttaaaatggcttgggtcctgtcccaaaggccaaccatgaaagcaaatcggatgtatgtttttgtctgctgaaaaagataaaacctcgatcatcatcttggtgattatatagtagtttcagatgaaaccactaattttattcacacatttctcatttatgccgatcagccacgaacactccagctgtgaaaagtagaagatcctaagcgctcatgatgtggggaggacttaatttcaaagaatcaatttatgtcgtgcacaaaagtttttccccatcctcgttgcgcatagagggcaaacattatagctaagtatttattctcttcagcatgaactgcattggggattttgtagtagtcaacaaacttcacaaagtatgagtgaagtggcaggaggacaccatgctttggcatgcgtgtaagaccatgtgcacatccccttgcccagatcattgaggagttgtccctcaaagggaaggaagacatgtacgtcaccaagaaggccctttttgtccaagttttgaaggtgcctcttagtcaattcaaatggtggggaaacccacattggggcttcagcctcctaatgtttggatggttcggcctcgtcaatctcttcatttgtatagtcaatgcctatggtaaagaaacaacctcgaaagtcaaaaaatcgctcatcctccaacccccaaccggcaccttcaaaaggcatgaaggcaaacctatcattttcaacctactcttcaacttcttgaacctctgggtcccctacgggcaaggcgtcttctctttcggagttttccacacccagttcatgttgcttggccattagctggatgtactcccagtctcttgcgctaattttttggacaattttcttggtacgagccacttttcttgagcagaatggatagctcgatgaaggatgctctacggcagtactggcagtttctgccttgaccctagatcagagtgaaggtttaggattcgcctctagcaaagtatctgggaggcttacgtgaacaatgtacgtctagttagagggtaaaaacctcattaagcctctattgtactctcagacatacctcccgtacacactgcctccaatctggtctggataaaaatgatgttggacgagtggtatcgtaggcatagaatcgtcactcgacacttctcactttttgaagctagaggaagaattattgtttgaaagaataaactttgcacatgcttttggttagtcctcaaaaagtaattgtaaatggtctttataaatacgattactacctcctcaatagtcgcctgaattaatctacaaaagaagaacggaaggtaagtactgaacaaaaatgaagagttcaaatggaaacaactttttttattctggccagacaaatgcctggatcgatggaagaactccatccaaatgacgaagaacttgattcaaagattgggtaaacattcaaaagttgccaaagtactggatgagcctcatttcaatgaattttcttaagaaaaacatgtatatgttcaataattcaacaattaagccccacacaagcatattcagcagcaataatcaaaataaattaaaacagtagtgaagaacaacaatggcataaatccagatttttcgcaaaaaaatgtataatatcaaatgcaagaaaataagataaaaatgtacataaattaacatactcactgttagagatgctagttgaaatgtccaaatgtactcttgaaaatctaagggaatgagaatgctctctagttctttagagatttaaaagatgtaaaagtgtcaaatgagcttttttttttataaaagtttcatgggatataaccgtaatttgggcacccaaacaaaatgattgtttccccccaaaaaaattgtaatgagtactctacataagtacaatcgtcagtgcatgcccctaagacacgataatccatatcagagcattaaatgcatcaaatatttgaaaagatgcttcaaaaaatttaaagcgacagccttgtttgccatgattacccatccaacacgtgttaccacattcacgtagtacgtgggccaggaaagtccacgcaccaatcaaagttctcatgtagactctggggcaaatattatcccgaatcttgtccaagtgacgtggcatgtttctttgggtgacacgtgtcctgtcactgagacctgggaggaggaaacgttctttcgagtgtctgcccaagacattcaacttttcagatgcaataataaataaataaggtaaagctcgtcatacaggatggacgaagttgacttgctcggagagatgtagtcagcacatcatgcgacaagaccaaggaaaaacgcatgaggtagattcattaaagataatttccttttatacatgtaatcaaatcctaattttagagaattttcttatatatttctcacagtttaagaaagtcatttatttcctatttttacggttctacagtttttgaaaaactaatttttattgtaattatcccctataaatagtggagcaattcaattatgaagggatctaaaatcatattttcaagaaggctattatgctgctcaaattcttgtaaaagctttcgagagagatcaagttcttcttacttttcaactaccaagttaaatacaactagaaggggagtaagctattactaaaaaatggagttaaatttttataaaatctcgtgtttttagtttatgcatgatattaaatatattttaatttaatactaattgatttcatcatattatttttaagatttagtatcgttggccgaaagcgtgatcaacagaatgagacgaaactttttaaaagggagagagagaacctgtaaaaatgaataataacttagatttaaaatataagtaagaaattattaaaaaaaatatataagtaaagaaaaacaagaaaagagatattataaaattaaaaaagaaagttaaaagtacgtatagcgtgaaataaaatattttttttgagtttttaagttaatttgcaacatatagtattagagcacagtataaaagttaagctaaatatattattacttattttgagtaaaatttaggacaaattttaggccatcaaatagagacggttttaagaatatattgttaaagaaaaatattaaaagttgctttgtcagcttttttatttagttttttgatattgttgttttggattaattttttccatatccattttataccaaaaccatgtttaaaaactctagaaaagtttatttccaccaattacatacctctaaaataattaacattctaatttcatcacttgtttcgaatcggttagccgtaacagtcagtcatcaataaaatggaggttaggagattgaattaatgggaaatattgtacgtagctatagcatagcacatatatatatatatatacaataaatgaatatatgccaacaaccaagccagctgagctgtggacaacttaattaatactcagatagagtcaactatttgttttctcatacttaggccaaaagacaatatatctttattatatacatattaaaatgtcatcagtagtggatgtggatatatatgatacaatacaggaccataactctcttaatacttttcaaacaagccaaacaatgcatagctgtaattagtttcccatgcacgagcaaaacctgtaaagataataagaaaataattatataaatatatatatacgtagcttccaaaagtgaacttgtccctccttcccaatttgctcctaactttttcctataacagaccacaacactcaactcgatgcctgtgctcaaatcttaatcgatctctctttgcatgtgatctcttatttctctctctct

SEQ ID NO: 456 - DNA, 5434 bp, Cannabis sativa
cacttgatcatcaggagaactcagtgaaaatttcacaggagttcttggagagcttatctgatatagctcagtcaatcaaagtttacagttttgaagagcttcaactggcaacaaactattttagccttagttcattggttgaaggttctgtttaccgcggtgagattaatggaaatctcaaagcaatcaagaaaatggaaggagatgtatccaaagagatcaatttattgcaaaagatcaaccattctagtctgattcatctctctggggtttgttttaatgagggtcattggtatcttgtttttgagtatgccataaatggagccttgagtgattggattttcaatgaaaacaacaatggaaaatttctaagttggtctcagagaatccaaatagccttagatgtggcttcaggtttgaactatcttcattgtttcacaactccttcacatgttcacaaagacataaattgcagcaatatccttcttgacagtgatttcagggctaaagttgcaaactttggtctagtaaggtcaacaaaagctcaagagaatgagttttctttgacaaatcacatagttggaacaataggttatcttgctcctgagtacttggaaaatggattggtttctacaaaacttgatgtctatgcatttggagttttattacttgaaatgcttacaggaaaagaggtatcttttctgtacaaggagaatagggacttatcatatatttacaatggtgtgcttaacaatgatggaaaagagagtttgaaacagtttatggatccttcaatgcaagagaagtacccttctgaacttgttcattttgtggttcaaattattgacctttgcattaagaaaaacccgggaaatcgaccgcaaatagaggaagttgtgaagcttctttctgaagctttgagcagttcattaacatgggaatcatcattgaaataacattgtgagttaaaaagctcacttgaagctcttcaggttgttttttgttttacttcttattaataatgcaataatccaacttcctcatatgtgtgcacttttattagtagtgtaatgtaattatatattattagactgaacaacattattgtagtacctaattttgttctgagttttatattaaggaagaataagacatgttatctaattatataattggacatggatggttcattttatacatatatatatagagagagaatgagtttgtgtcaagtgatgagctttgttaaaatatttaatatcagatatgtattaatcactctttaaaatatcatatgcaagagaaaaacaaaagagctgccgacaagaaaataaacctgtccagaaaagtcaaccattaacatgaaagaaacaaaacataatgggcactatgcactctaaaaaatgggcttaagcagtgtataaaataaaagaagtatgtgtgtaacatactaatctataaaaaaattaagattaaaaccatataatttccttaacacaattattttgttgtatattttacttgtccatgctaaggtggtcactgttatcatattatttccacgaaacttcacattgcctaacacgccattctcactacaattcatctttgaaaaaaatggactattacaggtcattttctattcccatcttcccaacaaaaatggggttctcttgttgtcctttttctctagttttcttcctcaccattttcagttgtctttctctgagcctttcacagcagccttatgtgggaaagtccacaacaacttgttccattaaagatagttcaaactctgttcttggatacacctgtaatggggttaacagaagttgcatagcttaccttactttcagatcatttcccccatacgacaccgtttctgccatctctcatctattggcttcagacccttctcaaatcttagatagaaattcagtttccaaggctaaaactttcgaaacaaacaagttagtgattgttccagttaagtgttcctgttctggtgagttatatcaggttaacacaacttatgttattcaacacaatgacactttcctattaatagctaataacattttccaaggtctcactacttgtcaagctcttgaggatcaaaacagtaatctcactactaggctcttatatagtgggacaagaataaatgtccctcttagatgtgcttgtcctacaaagaaccaaactgaattgggtcttaactatctattaacatacttagttgcaaaaggtgattttgtttcaagtattgctaatagatttggttctgatactggttggactttacaagccaatgatctttctgagcaaaaccccaccatttatcctgttaccacacttttagttcctcttaagaatccaccatcaggttccgaaatcatagagccaccacccccacccccaccatctctatcatcgcctccttcctcttcaaccgaaaaagactcgaacaagacatggatttattctcttcttggtgctgttggaggaagtgttgttatattggtcataggcagcattatgttctgcattgtcttccataaaagaaagaagaaaacaacttctaatgttgtctcggaaaacactatggcacatgaaacattagtagaagaaaagttggaggaagaagaagaagaatccaaggacttaatggagagtatatctatgatagctcaatcagtaaatatttacagtattgaggaacttcagctagcaacaaatgagttccatccaagttgttggattaaaggttctgtcttttgtggcaaactcaatggagatttagttgccataaagaaaatgaatggagatgtttcaaaagagataaagttgcttcaaaaggtcaatcattctaatctgattcacctctctggtttttgttttcatcagggtcagtggtatcttgtttatgagtatgctgctaatgattccttaagtgattggatctataatgacagcaaagatggaatctttctgagttggaatcaaagaattcaaattgctttagatgtagccacaggacttaattatcttcacagcttcaccactccacctcatcttcacaaggacataaaggccagcaacatccttctagatagtgatttcagggctaaaattgcgaatttcgggctagcaaggttggcagaaggtgaggaaggacaattttctttgacaaatcatattgttggaagtattggttacatggctcctgagtacttggaaaatggattggtatctacaaagcttgatgtctatgcatttggaattctcttgcttgaaatgctcacagggaaagagattgctgtaatatataaagagaatatgaacttatctcatgcattgagtgctgtgcttagtgatgaagttgatcaagaaagtttaaagctttttatggatttttcaatggaagagaagtacccttatgaacttgctaagtttgtggtcagagtaacttatagttgcttagagaaaaatccaggagctcgcccaactatggctgagattgtccattctttgacaataaccttaagcaattcaatggcttgggaattgtcaaaaacaacctgacaacaacatggtatagctcatttgtagtttttaatggttttttgttttgtattcctaaattgatggcttttttcaaatagcattaggcagaagtgtttagtaatgttaaattcatatagaaagagcaataatccttcttgactgtcaaggctaactgtagtcaacaaaaatctcatgaaggacaaaagagtttgagaaagtttacttatgaatgtccttcaatgaaagacatttgcttgaagttaaatctaccaatggatgaggtgttgtaaactttgagtctatagtcatgcttgtcacttttttaactgtaaattttcaatttcaagttaatagtttgctcggtcgtttcatacatgcttgaggccttatcaattgttgcatatttttctgatgtgagacttgttgtctgatcacttcaatattaggtagactttcgatacaaagtatcatatagatcttcaatcgcaagattatcacattaaaagtttcttccactcattgcaaatgcatcccactattttaacgctcctaaacttttgattcgtttgttgaactgccacttcaccttaactcttatattagtacataatgttcactttgagcctatgccctgaatgtttcgattttgtttttagacaccttctaaaaagatgttatattaatagaataggtgaacacttatattcaaagcattacttattctttctgatgtgagatttggatggatatcccattattacttacatgtcccattttcatgattatatatttgtgttttcatatcatgtttttaatgattatcatgttgtattatacttaagcctgtacttttttaggccatgttcaaagcttatataatcatatcatgtgtcatatcatggtgccaaacccaaatttatattttttcgtgtcatatcatgtgtcaaaaagtctgatctgaattacactaatggcatgccattatctctcaaaacgacaatactaatacattgcataccacaatttagaaacgacaacatatgtaagaaaaacgacaatgatcaaaacttcatttcacctctctggagcacaaagaaaacaaaaggaaggccataactgaagcccaccaaaaatgccattcctatcaaaatcacaaaaaaacatcagaaaatcatgattcaaaaaatatgtataaaaatcaagaattggaagagaaaaatctaaccatattcaacatatcttgggtaactatttctgtgtcttttcattgaaacttgtggagattgtgttgatgatgatgatgctatcaactgcaaaatcattgagataacaactaacccacttccaattttctctctaataactctttcactcaaatccattgaccagaacccacttataccatccccaatatcttccattacaacctttataaacagaaagattccaaggcataatacagcctcacccagatggttgattggtttggaggagatgacccagctcacaagattcacaatacttgctccagaatagaggggaagccaaaaataccaatctatacatacatgcatatatataaatgaaaatgaatgagaaagttgagcttagttttgagtaaaataaggaagaagtgtgagtcagagttgagggtaccatggtcatttaactgtacagatgcagagtaagcgaagagagcagccattgcaagagagcagaagctcttaagctttgtgggtgtagacattttctggtcttgcagagctgcaatggagattttgggatgcagtaagccatttcttttatctgctgtagtgatcttaaaaaagtcaaccgtttctagaagctcacacttttcttttctttt

SEQ ID NO: 457 - DNA, 2259 bp, Cannabis sativa
tgatatgttctctgttcgttgatatgctctcaatgatgatctagattctatgctaatgtttctatagaaaggtcatcacagagttaaaattgcggcacttttcatatttaggtctctaatagtttcttgatgtcttgcttcagtttcaaaccactgcaccaaaaagttgctttatgcgtcctcctggagcaattcttgctcctggcgagagtcttattgcaactggtaatgcttctttgtaagacatttaaaacattgtgcatatcttcctatttaaataagatagactttttgaagttttaatattcttattgattgaacttgtccttttgctaaattggtattagtgttcaagtttgtggagcttcctgagaacaatgaaaagttggttgatcaaaagagcagggttaagtttaaaatcatgagcctgaaggtgaaaggaccaatggattatgtacctgagctggtgcgtttcactcatcctttgtgttaatatatttatcatgtatttgttacatgttacacatcattgcattgatgagcttctccttaacattttatttgagatttcaataaggtgtcgtttttgtggatttaagtatattacatactgcagtgatccttttcttgatcttatggatatgcatcttgttcttaatttttttgttactgccctttaatgaagtcatagtaagcactctttgaaggtttataccatacaaacgttcagtcaaattgaaatttgaagttgcttgtccgtaaccacacattgaactatttatccctggatttgacttgttttatatggtctatagaatcttcttccaaaatgtttttactttcataacttgaatacctgtactgtttcttaataatggatttaacctatttctttggaaatcatttaaatggttcgttgatggtcacagttcgaagagcagaaggatcaagttgctatagaacagatattgcgagttgtttttctagatccggagcgtcctagtccggtaagtgttatttgtctttatttcattgtactactagcatttacaattgtcacgctggttaagctgctgacttccaaatgtgtattttgcttcttatttaaagactttggaaaagttgaaacgccaattagctgaagctgatgctgcgcttgaggcacgcaagaaaccgacagaagatgcaggtccaaaaattattggagaagggcttgtaatcgatgaatgggtgagttttgtccattcttatctttttaaatattgttttgtgcaatgcacatgttttcccttttataacatccgttcttgtatatgtacttctgatgtgcagaaagagcgaagggaaagatatcttgctcgacagcaggttgaaggagtggactcagtataatgtggtgcttctttccttgccgttgtttttattgttctgtgattggatgggaatcaatatctattactatcttctcaaaaaaaatatataacatattaggactttacaatataagtcagtgtaaaaaaaaaagaatttcctggagaagctttcatagttgaggaactcagaacttggatttcaatacctgcctgtagataaagtgattttgtttcttttattttaagaaataaaattgagtctaatgggttgtaaatgacaaaattggtctgccagtcttgaagtgttaaatgcacttctatatatagttctttgttcttttctttttccttttctttttaataccttatttcggcctaatagatggttccaggaagatttggattgcggcttctgtagttttagacagacaagtatgattagcccgcaatatcagaaaaaccctccgatgagcttaatagttaatacactgtttcatttgtttgtgaccctttttcttcaacggtcctaagactaagacaaataagtgaggcaaaataaaaatatagttcacctagccaaaaatgatgcaaataaggtggattaataatgaacttatttgattttaatctaattatgtcttttattaaaaaaaaaattattttgatttttaataatgaacttatttttattttttaattacaattaattaataagaaaagaatgggtctgtctctttacacgatttgtgagaggcaggaaataaggtggaatgtcaccttaagttgctttctcaacgaaaaaaaagattattagatggctcattgcagaaaacaaaaaatataaatatgacaaaagaatctcttatcaataaattagtagtattct

SEQ ID NO: 458 - DNA, 3639 bp, Cannabis sativa
tttttttttctgctgttttaaatgcaaatatgtttaatcatgtaatatcaatttgtgaggtttaaaagtaactctatcataatcatgtaatgtcatttaattttgctacatttatatgtaatccatgtgcagattcttaaagattatttttctagtggtattggattttatctctttgcaattaacaataattcatatagttacatatgaggtgttttcaggtttcattttttttgggtactgaatcaattgaagtgatctaaaagactaaacccataataatccaaaccctagtattaggacatcattatcttcttttttggcagtatatctctatatcaaatttgggaatgggatatacatggaaaagataactttgaaaactataaaatgccaaacaaaaatgtccattgatttgagtgtatcttgaatctctgaaatttgttttggctccatcacaaaaacaatttacaactcccatatagattacatttagtttttttgctaaatgagtccatctcttgataatgatttctttttgattgtttgtactttttttttcttgatataaagagaatcaataaattacaactgataaatgaatgaaataataaaacattcactgggcgaaatatacctatgaaaataatatgatctgtctatgaaaaaagattaataatgaagtacctcaaatacaaaattctgtcctacggttgagccaattcacactttccaaactcaagctcaataactactcaagacataccattgattggcttccaagaaaaagtaaggtataaaatgaccattactaaaacctattcttaccaaagggaacaaggtgaaaagtaaaaggaaaaatttaacaaagagactcgttacagcacctggacactgtttgtacaacacttaaatagactctcttaagaagtgaacatactgctgcctcagctgaatatgtattgcattaaatccagtttgctgccaccaaccaactcctttttctatacgacttttccatcaaatattgttgcctgcttcaggggtgggctcctccactcgagcttctaatgcaggaggggatggcaatgcaagaaatcgccctttttgggcacgtggtggaagatgttttgccggttttcttgaaccatttgcccatggcaagaaaactccagttccatttccaccacgaggagctctcctaggactcataaccatggggcggactggagccagcatgactaccggaccacgcatgactccccacttgggcattaggtccatgggctcatagccaactcccccatttggcatcgcgtaagggtttggtattcccgctggttgccaaacagtcattgcaccagccgaggttggactggttggtgacaggcattggttcgattctggtcggactctgaagaatgtgaggctgacccttgtgcttggagacggacacatgacatgtcttgccatgtcactgctgttacctctcatcaccaaaagagacctgtaagattcataagaaataaatcatgacaatgtagaatattttgatgttgtactgttgtaaactgtagacttgggcagaaaaggaaggtatgcacagtttcatatatttgtttatttatttttttatagtggtttcgttcaaaaggacacacaacgctaaaggagaggagcactacaagaacgataatttttaagagaatttgaggacatacccctccttaagtgagagcataagagggcccttatagtttccatcattatcactcacaagagtgcgtccaaaagccatagttgactcattaagaagcagagttgataaaggttggtccaaatggggtggtttcagaaaaggctgcgaatattctccctgcaatgaaagaaaagtaattttagttgcctctatattcaactcaacaaataaaaaacaacaattcaagaataataataataacacaaaccaatagtgtgaagctccccactttgcagctagcaatgtgctagtaaacaataagagaggagtgaaggaacaatggaacatgaagttgatagaatacctcctcgaagaagctgatgatacaaccatttggccttttgtattctggaataagtttccactgtataaagtgatcaatgacactttgaagtatagctggaataggttctatgttacctacaaaaaccacaaaagtaaagtccaaatcataaagtgagctttagcacattatttacataaaccaacattacatttaaagaagaaagtcgtacaagattgatcatcaccagcagattcctctttgatttgtccaaaaattggaaccccaaattgaatcaactctcttttgtttccttttatttgctggttgaataagatataagtctcacctgtaatcattccaaataagttattataactaacatttttgtttttacaaactaatgaaattttgtcattattagttgcaaccttgtaaataagacaaacgaatgtaaataaagctacagatgaattcgaagtcacagggcttaaacaaattaaaaattcacctgacagctctccactctggccagcagctctgtattcattgacaaaatcaaccaatttagagatttcagaatcagtaaacacttgttcgtacagctttaatcctttcacaacattcacctgcacatttaataatcaatctgtcaatcacataaattcggaaaacatttttatttattatattatatgtacatacaacatataaaattaaaaaaaaaaaaaaaaaactcgccgtatggcccttcaattgctcctttgctgaaaaacctttagtcaatttaatctggtcaagacgtgcttcgcagtcttcatgattagaacatatctcaatattagcttcgtgaacctcatgagaacctattgaaaataattaaaattccattattgcctcacacgtttttaacccatctaattattttataaacactaccaaaaaaagcattgatctttgtgattactctcacgtttttctttttctatatttatttaaaattaaataagtggggacacaacaagtaatggtggtgctagctacaacaacaaaagagaagctgtcaatgagcaacgcacagaaaaggccgaccaaaaaggaaggagacattaaaacaaacaaagaacaaaagcacttcgttctcaccactatcacagtcttagactagcttatacggatttccaaacaccagtactatttaactaattttcattggatgcaccacctaacgatttcagagttgacccgccaactcggtctcgattcgtaaacattaatgctattcgtattaactattaaggactaaccccacaagggccacccaagaaaataaaaatgtcaataacaaccacccaacgatgatgcaaccaaccacgcgatgtggactgttaatcgacggctacgatcttgcgccgcctaaaggaaaaaaactaaatggcacgcatagcaaagcattacatcagagtgatcaaagaccgggattcgctcctcccaaagctaactgtaatgccggctgcagagaaactttttcccactgtgcatcgaaagtctcaaagctaccccaactagacactatttatagttttttttttttttt

SEQ ID NO: 459 - DNA, 6890 bp, Cannabis sativa
tctctctctctctctctcttgatgtaaacacacacacacgaaggagtacacaatcgacccacaaccttggtcccttctctccacgaccaccatgaccacagtcccaaggacccacggacccaatgaataccgcggacccaacgacttctccatcaaccacgacttcaccatcgataatattgttaaaggaataaattgtatgattaatatttgttatgtgtgagtagatgttagatttagggttaaaaatggccagatttgagtttcgggcaaaaaactaatttttttgtcaagcccgatggtggtccgatagtagtttgatgcattcctgttgttaaaatgagtaaaggtcaaagacgaaggtcggatggtggtccgatagtaacccaataaatatggtccgatggtagctcgatgccttcctgacgaacttaatgaatggagcttaaacataaatttccaaaaatttacctgttattattttttattttattttacaatgttacttatttatatgctggcgacgtgttatttttagtttgttttagaaaattgggacataattgtaaggaaagggtgaattgggtgttaaatgtgaagacaattaaaattggaaactcaaagtgacatatcgggaaaaggttgggccccgtaggttaaacccagattaaaactagagagtagagagacgagatagaggcgaaatttagtttggcagttagggttttacagagagccataatgggaggaagaggacggaaaaggagggagaaaaactacttagcggcacatggaggtaattacagtcggctaccaccgccacccaatccttcccaactcgacgctttgccctctaagcttcgtacactcatctccttgacttctcctcaacccgaaggtttttcttttcatgatattatcattatttatttatgcagtttcccctctttcgattgtaaaatatatatttttatatgtatgcaattttagaattactatgttaaccagtttgctacggtttttccagggtctaccagggattcaaagagtgcccataagaagaggaagaacggagacgaggcttctgagtcagtaagcatttctttatatattacataattaagaagaaaaaacacactcatttgcatccttaggagaaaatttgtgtgtacatatttttttcttctttgaaataggtgatttttgttggactgacacattgttcattttttaagttggaagatttgggcgcagtctgacgatgctatgttttgcaatagtttgatttttaagatttcatttaatgttttttagtgtgcaatgtgtacacttgatttgattccttattcaaatttaaatttaatgtgaaggaaactcactattgtgctcttcatacttttacattttaaagttattatagactcttagtgtgaaatacacatttgtgttataataattataatgctgtcaatgctgaaattttttatcaacgttttgtgtcaagactcaagagtaatggatttggcatgcattttggctacctttgcttctaatttccttgttgagaaatgctaaatgcaccctcttttgcaccctcttatctcaatacagcagcatttcactaataacctgtaatcattttgaagtatgtctatatatcacacattgagttaggaaaagtgcaataaagagtgtaaaatagagtttctctcaatcttaccaagctaccattacttaactgcatgcaaattgatttatttggttgcatatatgtatgttgtagaacaccggtaacaaagatgatgttagtttgaaaactactggattcaaagatgtgaattcgagcagtgatcacgatgacactgtcatgagtagtgcaaatgaaaagaaaaagaagaagagaaagagaaaggcagtagaagaccttcgctttgtagcagagatggaaaaatcaagcaatagttcaaaaagacgggagcacaagaaaaagtaagcatatatgtatgatagtcagtggccggttaaaacttgtatgttagttcttttggacttatcttagacgttggcattttaattctgttttgctggcaccagaattcagtacaatttagttacctacttttctgttttgaaaatgaatatttaagcctaaggtgagtgagcttgagttgaaacatgctttatacagtaggtaataacaatatttacatcctcagatacttggaagctcggaaaaacaagcataaaaagacgaagacggaagaaaatctaaacttcccaggacatgagaagattgaattcggagatattgtcaaagctccacttaagctgctaacagtccccaaggtagattttttaaaagttttgatacttggaagatcgtctcttttctttgcttctgattattatttctcttcactgtattcttcaggttaagaaaactcaagatgtttcacatgagctagttaggttacaggctattgagtcctataggaaaagcaaaggatggtcctcaaggcttgggattcatcttcctcttcctgcagcggctccaacggaagggctatagtcccacttacgatctcataatatttatctgattgttcatgtcatgtgagacacatctcgatgtctaaagtttctctacagaattaggttctctgctcctcaaaattttgcagtttataggaatagtttggttcaggggccaaatgaagtggagagttgttcgctttatgtattttgtaatgcttagaaagtgtgaagcgatagttttatggcatttgtagatcacgagtccttaaagttttcgtaaattagggaattaccatgtcgacaatgtgtaacttcaattcagtttttttttttcttcttcaaacaagaaaaagcttcatcttccaagggtttcatttacttgttttgtatgtagttttgagaggaagcttttcttttttattgggtatgaataaaatattaaaattattttttggtttctatataacacattgaaattataacaatttttaatagaatggttgaacccaccgcaatatgctaccaaagacgcattatatatttatttttctgttcatattatgtaattattacaagacggttatttctggtgcgatgtttagaaatatgggcctcaaaacattgaatggaacaactcgtattaattctgttctatgagggacatcttcaatattagtctggtaaaagatgccaaagctaatttctgggtagaacgtgaacttggagacctccatcgatgtgaagattgatcattgttctataatgggcaattttcttctcgtcactcaatttaaattcgaagtagcttaacaaaacggctgcaaagatcttcaattgcctataagcaaactcctttccgagacaaatgcgtggtcctgcctgtggatggatcaagagattttattttagattctttcaaatttgttgcaactaaatgaaaattgaaatgtgagctacctgaaaagctgtgaacttgaaagggctttgcggttgaaaaactccattctcattcagccatctctctggtctgaactgctctgcatcatcaccccacaagcacttcatccttcccattgcatacggttggtatgcgacgaaatctcctttccttaccgagtagccatctggcaatgtatcatcggctaagcaaatctttccgtcctgtttaacatgagtgagatttggtatgaaataacataagaattattatctgattacattaatatttgtttatgttttgcactctaccactggaactgcagggtagattctaagagtttcagtgattgccgcatgaagatattgcattttttccaaaacttcatcactcaaagactcagcaaactcaacaaagtttgtaacccctttggcatttgtcacttccctcagttcattcacaaccttttcctgtacagaaggatgtttgcaaagcatgtatatgaaccaggcaagtgtggttgcggttgtgtcttttccagctatgataacgttaagaattacatccctcaagtaaataggatcattctcagttacttgaagaaacctggatagaatatcttctctcttcatctgtgtgccagtaaacaatatcactaattatgatttcatggcattgttgaaacttgtaagactaaaatcagaaaataaagaaactcattagctagtttcactcacaagagacttgtccttggagctctccattaactcaatttttttgcggattatcttgaacacaaaatcattaatgattttgattgttttcttcatggaagcttctgctccaatgtttaaaaacttcttgatcttccagaagatgtcaacataacgaaagagggttatcgcacttgcatcatcgaatgctacgctgaaattctttccttcttcgcttgatccgcacatggtgtctaattcaagtccaaatgcaacttggaatattgaatcaaggatcgctttcatagacatatcctgtgttatgtttcctcacttagatattaatctcaagtaaacattttgttacgcaaactaggttgacttacttgaatatcaattgtctggttggttgttgcaacttcagacaaaattttggcaagcttcgatgcatttttcttaaagattacactgctgaaatccctcaaaacttttgttgagaactcatggcttgaaatttttctctgctgccgccacttttcaccatctacagagaaaattccatcaccgagaagatctttaagaatgttgtagttgtacgaaccctgcaaaagtttgggaaaaatataattaaaaaatattatagcagagtttttgtgagcaaaatattatgctcctgtttaaaataaacaccttctgcagctctacaagtacaattacttttttaaatgtcacaattcttattttttaacagcttacttttcttctcatgaatggataaaagggtgtcaaagtttgtgaactttttccttaaagaattgacttaatttcagttcattttcattgctgttcttgttaacacaccatcagtgatttagtctttgctgtcctaagtcccaaaaatcgtatttttgttttgtttgttaacgtaccttgccatagttctcaaaattggttttgagaatatattcgacgttgataggatccgaagtgtaaatttcatttctgaaggggctgaggagcctatatgttgtgtaattggttgcaagatcagtcatataatgatgcaatcttttgaagttgagcaactgattgaatacagttccggcaactggtgggtacttcttctttgccttgttctttcttagaaattggattgtgaaaagggttaaaaccaaagccaaagctgagaagagaactgggtttgagaggatatccatggataaatctttagaaagtatagtaataggagtttcaattccaagtttatttttagtttccattaaaaaagaaaaaaaaacacaagtttaattttactttaattgggagtgcgacatactctgacaagtgacaataaactaggaaagtttacaaaatacaaataaagaattaattgcatcaccatacctattttctaaaatatttacgtgaatgtgctccaataatttaagcctatcaataccgaaagtctttttaataaaattggtatgcgtgtaccgagacagtcaatcaacctttgcttttcataggcagctattactgacgagagttaacagtcttgaaactctcgtctatatttttccgaactctctacattttttttcttctaatattaacctgacttcatttatttatttatttttattacttttttattaatgaaatggtatctaaatacttttatattatttttttttatcttaataacatttaaattacctatttttcgcgcgctctctgctagggctctgggtttgaacccctgcctttcttttccctcggagacgaagggattccggtgatcggactggtgtgtactcgccatcacaatggaggaactgttagcaaaatctaataaacttcatgtctcggatgaagaagattgggaggtggatcatagcctatccaccatgattaccaaatacaatcttcggggaaggctatgttcgaaagtggatcacaacagaggattcttgaagaacttgctggggcggatctggaaattgaaggaatcggaatggaatattaagattcaagagaaattcacaacaggtatgttccttaccttttctttcaattccgaacaaacacaatctcgaatcctagcaagaatgtcgtggtatttatcgaatggggtcttaattttgggcaagatgggcaactcaagtgactcatggaagaatgacctgaatgtatttccaatttggggcagagctttgggggttcccattgattatctcactgagaaaaacactacaagattggcatctatggctggttcagtgattaatgttcaaaactccgatgtatcccgaatggtggcggatggattctttagatttcaggtgtggatgtcgattaataaaccgatttgcccaggtttcttgctaccgtgtactggacataagaaatggatggctttcaagtatgatgatctcccctttatgtgttttcgatgtggatggattggtcatagtcaaaaggattgctctcttgatattaaagaagttataggggaagatggaaaaacagcaatggcgtatggaacttggttgaaaactgagagcggagtgcgagatggatttcaaatggtgaaagatggcaataaagagacgatcatggtacaggagaagcacattcaagaaaccagtaatcaaagtaccaatatatctatgggcaactcatttgaacccctattaactgaagag

SEQ ID NO: 460 - DNA, 1245 bp, Cannabis sativa
tgtgtgcaaaaataccacaacataaggagactttacgtgcgcctactaggtctatttttaaaaagaatccctctgagctctcgaactcagttcccttggaggagatgtggcctcaggtgatctcttcacctcaaggtctgcaagaggctgtagaccaattcctgtccattggctccactttagtgactagtgtggctggtcatgtccatcatgtgtctctggtagtgtctttgacagcacttgtgccatgtctcaggctcaagttcctaccgttggtactactatcattacctctatccttcctaatgtccccatcttggtctcctttgttattactcacattgataaagagaaaggcattatgggcaagattgtcctagattcagggcccttgctggccctagacctttgattggtggtattagcattggacgtaccagtcaatctcacattaatactattgtgggtgttaaaaggtcatttgctaggcagaatgttcttatgggtgctttcatgaaaagtatgctgaaacatgctagggttatttacgataataatgaagctgtggttcctgctatttctcttcagagtgaataggcaggtgaggctgagcacattcgcccgcaaaaatgagtctcttgagttggaatgtctgaggtttggggagtcctcaggcattttgaaatatctccattttttgtgaaacaacattagcctccttttcttttcatcatggaaagcaagttgtagtcttgtttggatagtaatgttaggatcaagctatcttttgatagtgttttttatatccctatgactggttcaagggaggtttacctcttttttggatgaatgtaattaatttgaatgttttatcttactctactaatcatattgaattctttgtatcttttgattataatattaaatggcatgttacttgttttcatggctctccttatgtttctactaaatctgatacttggactcttcttagtcgtctttataatggttctcatttagttccttggatgataattagggactttaatgattacctctctgttcatgataggaatagttccaataattccgcttcatgtgccatgattaattttcaatcgttttttaataaatatagcttgtttcctttaccccatataggaagtagattcacttggaagcatggttaccttttgtagcgtctcgattggtgtactgttaacaaattctggtctgaggcttatc

SEQ ID NO: 461 - DNA, 1887 bp, Cannabis sativa
ccctttatcatatgtttgtgtggactatgaagaaacaaagatctgatacagtttatgtttttgtctgttttgattatgggaaggctgtaattgcttaatctttttttggtcttagaatcattggattattgaaaaggggttacaatgatttgtgcaggtgcaccaattgcagggtctgcagttgatcaaattgaacatgttgtagggtatgtaagtttgggatacccttttggaatgatggcctcagtcttatttggaagacaccacaaagctattctatcatcaccaaagccaaaactctttgtaatggggactaaggatggattcacaagtgtaaagcaactgaataacaagttgtcttctgctgcaggacgagtcgaaactcaactactagaaggtgtaagccacttcgaaatggaaggccccgcttatgatgctcagatggtgaatctcatccttaagtttatttcatcattgtaggattttatttaagagtaaatggtcaggcatgtggtttgctcctccaagtccttcccggtcctcatatattgtagggttaggcgagaatcctagtttcgaaaaaaagaaaaagtaattggtgagaatagagtagttcagcttatgtcacttccgaaaagccctcttagacaagatgtcgagtgtgtttagaaaagatctttctgcacagaattatcgaaaaataggctattagtttgtgtgcttcaacaaaatcgagtaggagtagcttcaacttcatgatcaaattgttatctttaaactcttcttctgtgttttgtatgtactaacaatttatggttctgtaatatgcaggaaattgggaagttttggtatactctttgttgatcaatcacagtaaaatttaagctattattatcatcaatcaaatcataggaacaccaccaataccaccaccaccattagaagataagagagagcaatctttacaagattctgtcatttgttacaaaaaaaagaaaggatttttacacatcattttcctcttggctttaagttaaaaaaaacttactagttacaacaaaatgagaaaacctactccttcctaaacacatttagaaaaaaagaaaaagaagatataaccctgcttgttgtctttcttgagtgactaaattagcattctgacacattacaaatacataatattttttagttggttggttggattggattgcacaatccaagccaagaacctaaaatgttacatgttgttgccctcgtaacgttgattgtctgatgcgagtcttccttccctcgccattttatcgccgttggatccttccattgctcgcccatcacccatcctccatccccgttcgtgatccattgtttgtccttgagaaaaatgatgatctctctcatctgtttccagagcaaaaagaagaaaagaaaagaaaaatagatatactgctacttagaatcatacatctcataaacttatgtacaaactccccagataaagaaaatgatataacatggtaataaaatttatactcctcaacacaattggggttcatattcaaagacttaatttagttaaaaatttgtacagaaccggtagatgtcaaatctctgactattcattcatgaattaagatactaagatacaacaacaacaacaacaacaaaagctagaataggctttcattgacattatgtatatatgtaattagttattaccactttcaccgtcagatgcatcttcaagcttagctattgcatcaattagagcttgttcatggtcctacaatataaaatttaccaacattacatataatactacaatgaagaaaaagataaaagaggagggtagagaagttgttgatttgttcttactttcaagactttctt

SEQ ID NO: 462 - DNA, 4727 bp, Cannabis sativa
aagggattgggttacctgtttggagacttctagatggctgaacagttgcacccgttgctgaaaggctcgcctccaccagagtaagatttgcggtttggcagcaaaaaaggcgctaaaaaaatctgtggcctttaaattcggttgccatgtgccgagcgaaaacaaaatggaccttttcatgtgcacattaatattgatgacttccatgaaaaggggaatgcaatttggagattgccaatattgctttaagacttcaagaaaacccatgcaatctggacattgttgttgcctttatcacgttggacttggctgcatccaacaatgggtctgcctcgagagccttatcaaaacaaaacttggcttcctcccattgaccctccgcaacaaatacaagaccgagattgttatacgcaggagcatagccaggtcggagttcgagagactttgtaaacattgctttggctcgttcatattgtttctgctggcgatagagatttccaagattggaaaatacagcatgtgcattattagttgtggccaatgacaaggctcgcttgtatacttcttctgcttgtgatggatcatctgacagttgcagtgagatacctagtcatgcaattagtatccaagttaatgagcaaaagtttagaatatggtaggagaatggattgttgataattgagagaaatatataaaataaatcacatggagcatagagatataaaatcagccatgagattgtacaaacctaaatttgtccatgcatagctgcaatccttaaaacgggcaactgctgctttgagatacttttgtgagttattgaattgtcgagtacagaggctatgaaggccaagttggtgccagtgcacaggatcatctggatcctcagctattgcctacaggagaaataaaagtacttagaaaaccaggcaggggaataatttttacatatgcataggtttgttacttattacaagctgattacttgcattcaaagcttcaattaaatgtaggaaaattattacctgctttaaactgtaaacggcacgctcttctacctctgtcagcacattctgttcagtttcaaatgcagcagaaatctcgtgttgggctttgtgaaccattgcgagccctgcccatgctatgggaaactcaattaaagcagaatctccatcccttattactgaagccatttcatttccagcccaagaaagctgttcactaggatcttgagatctttctgcatccttgatccggtggattgcaacagcatatcgagtagacatacaattaggctccaattttgctgcctatgcatcattaatccagatcatgaggtcgataagtttccattgagaacaaagaaaccaatgaacaaactcaagaaagaagctattaaggactgaagaaatgaaccgtgagtaccttctctaagcacttgctggaacttctatgatcaccaatcatataatatgcattagctagattagcccataaatgtgctgcctttggatctgtttgtaaggatgctaacaaacattcttttgcaacattgacagcagtaacctgatctgcagaagcgcactctccagcatctgctcctgcgcctgcaaatttagaggggtagaaatactatgaagcatgcttcttcaaccactttaatttttaatcaaccttgattgcacaaatttatagaggcaaagaagctaacagagtttgcactgattgaggtaacacatcatagcatacctgcaacaactgaaccatgtttgcacaaaagaagggcagcataattgattaaggatgcaggatggttttgatctttgagaagcaactcttgaaaacatttttctgacagttccaaatttccactgaggcgcagaatcataacagaaatattaaaggtgaaatgtttaaaatgaacaataaaatctcaaaattcatccatacattaaattagggaatatattttacatttatatgcttacatttgcctaatttcagagagcccaaacaggtgttacaaatacaatcaaattatgttttaaccaatatgatcaaactgttcatattagtacagatatttctttcttctcatgctccttaccaattacagtagttatagaagtgatagcaaaatcttaacacatcaagacacaagaaatgataataaagtatagtcttacctctgaaggtaagcaatgccaaggttcccaaggcaatcatagttgtcaggagtaatagtcaacaaagatgacaaaactgaaatagcactctacaaaatacaaaagctttatattaaacaaataggaaagaaagcaacactgtgaagaaaaatgatagaaaagttgtacctgcagacgaccagttctaagaagaatcaagccaagggtattccatacagctgcctgtcttatatcggattgtattgattcctttagctttgaaagaatttcctcaagctcatcaggatctagctctttatcccggctgttatcccccgaactttctaataaaaggcactgaaacaattacagaacatatcaattttgtattatcaacaagaatgtttcattcaccattcgatttttcacttttaaggtatcaaaaatttaaacgaagataatatgccaaatatagataaaatattaaagcacctgcgcatggtggatctgtactaatgaaagtaagtcaggcctgtcaatctctatctcagggcgaagtaagatctctgctgccttttcatatgccaaaactgcctaaaaggttccataacttaatgaagatagcacatggcaagaaagtgaagtgaacaagtctcgaaatatacctttgctggttggcccaacctttggtacattagaccaagaataaaatgagcatgagcatttttcggtgtcttccgtgcaacatgaactaaagcctataataagcatgtaccgaggaggtcagatgtaaaacaggcatatgcagagaagcccccaagtatcataataaaaacaggagttggatataagaatttgacactactacaggaaagctatatcaagcagtggggacagggcatctacttttcaatgttattactgtggttggattgtgagttacaatttacaaactaaggaaaatacaaacacagaatattgaacaaaatccaataatccagaatgaaacatcaaactcacagttttaaggctgctaactctctcctcacgggatgagggagccccttgaactggcaaatcaccatcagcatcagctccgcaatcatgtggggattctaccttattgcttctcgaacgggatctcccaagtttgtttgaccgttttccttcaccttccactgcatcgttgtctctacaagtaattgtactcttatcttgactagcttcatcaattaacaacctacattcaatatgcaaccaaaactaattaattctcatttcctcaatgtactacaatacaataaacaatacagtgcaaatcttctatcgctctatagcagacattcattatcctatgagtgagaaaaaaattctcttaatcgttaaagcttttaacaattcaagttttttaatttacaccactatcaaaataattttccaaacacaaaagaaattattgttcctcctactaaattaaattgttctttagctaactagaatcaggctcctaatacctgaaaatcaacaagtttcacatgacaaaccaacaaacgaattcaaagaaaaattagtcgtaatcatttttaatttcgcagaaactcggctatcaaacagagcttgaaaataatttctaaaattaaattacaaaacgaaaataaataaggttattttcatagaagaaagaaagaacgaacctggcgatgtccggagttgaaacttggagagtatcgccgccatcagtttcagagggatcgatgttaaggtcggctaaaatagcaagtttgggaggctgaagaggcttggaggtgttgttaatggaggcctccatagcccccgagtcaccaagttcctgtgaaacggacatttttgtgctttgagtttgtttaaaaagtagcaaggaagggaagaagaagaagaagaagaagaagaaaaacacttgtttgtttctgagagtgttttaactttatttagttctgggtcaacgtgtatcagttagttagatgggcttcaatttcagtcgggttagttggaaaagaggggaccactcatcagcccattttaatggtttgggccattcggcccaatattgataaactatggtatgtttggcattggagaaacataataaggaaataaaattgggattatttcataaatatacaaagataatttttttttacattttaacagatattattttttttctatatttttagggaatttttttctcttacaaaaatacaatcgttgttttcatgttgctgctataaaaaagtaaggtgaaagtaatatttttctctaaaaagaagtgaaaacttgtaaaaaaaaatagaatccataaaaatataaataaaaaaagctcgtaaaaatgtaaaataaatccataaaattgtaaaaaaaaaaaaaaaacaaacttttttagatgtaattgtgtaaatttcccaacaaaagtccatacccaaaaaaaaaatagttttttcataaatatggaaaaaataatggagtttacttttatatatggtagaaataaataatgttaaaaaataggaaaacttacaaaaa

SEQ ID NO: 463 - DNA, 1283 bp, Cannabis sativa
ataaaatccaaaaagcacccatcgatacataaatctctaccaaaaccacatcactcacgcccagttatttttatatccctcatcctttaccatcatcatgagtagagatccctattcaaatttcatgaatggttggttgaatctcaaccaaattcacaatcatcacaacttgatatcttctccttattatgattacttgaataatagtagtaattataatactaataccaccaccaccaccactaacatctgctttaatattcaaaatacctctttattatcatcatcatcacctccctcacctcctctcaaagaggctctccctctcctaagcctaagccccacaagatcatcaccacaacatgatcatgatgaatattgagaggaggaggaggaggaggaagatgttgatgttaatgagcacaataagaaaaaggtagagaagaaattattagaggatgaaaacagcttcttatcatcatcattatatgataatgatcaaagtgtaaccgtggctttgcatttagggcttccaaaccctagttcagcttactcatcagctcatgatttgacctcgaggctttcttccacagagatctctgataataatattaacaaaggagttattattagagaaggaacagaagaagcagaagaagaagaagaagaagatcatcatcatgtatcatcgtcatcatctggctaccattcaaacagatcatcatcgtcatcagtgctcaataacggccagtattggatccctacaccttctcagattttgatcggtccaacccagttctcttgccctctttgctttaagaccttcaacagatataataacatgcaggtaaatatatatataaatatacatatatagaaattaattatatataatccctctatatatatatatgccaaattacacatgtttacatatatagtaataatatataaatatatatacatattctagtttcccgttttcgtcaattttcgtaaatttcattttgattttgctgaaaaagagaaaacttaattgttcctgtatgtctttgctttttttttttttttaatgttctggctttggatcaaaatatttctttaactttcctcttattatatgctcggctaatgggtccgaatagcgtttttttcttttcctttcttgcatgctactttaatcatactttctttcttttgttaaaaacaatacattatatatgttatatttggtttgcactttacattaatttcttcttttctctgcaaagatttttctcttc

SEQ ID NO: 464 - DNA, 8203 bp, Cannabis sativa
taagatgagcagcctgattatcagaccatttgacaaaatataaagaaacatcactaaaaaaaataaaagttgtttacaatcctcagcgatacaacaaaaatgacaaaacattcaaatttctaaccgcttgtaccaatatcagacaatcagattcgataatactaacacttggaaaatcgcgcttcaaccatgataacactttcttaagagctacggctacagtaatctctggaagaacttgcccaatctgcaatcctgtaatcccagtcacgacccgacccttgtgatcccaaacaaccccaccaaaaccatgccttccctcattgtcaaacaatacaacatcaatatttaccttgagttttcataacctggtttagaccatagcttagctccatacaaaagataccaagtatcaaatgcaggaaacaaacttctttcttgagcttttctccactgatcaagagtgatatgagccaaattggcaacgaactccactcgaattttcttacccttccacaagagttgattttgtgggaaccaaattgcccaaaccaacatcaccgcctgaacactttgttcctcacccagtcgtgagaaaaaatgaagagactagtccccaaatgaccctgcatcaactgaaatcatagccaaactcgctacctgtaacaattttgggcaaaatcacaggcaactaaacagtgcaaaattgattcacctgtcccatgacaaatcagacacaacaaagagacatccacatgtttagccttcaactgaaccctcataggaagacacccaccaactaccctctatacacaattttttgcctttgaaggaagtttaaattgccaaaacttcttccaaaacgccataaccgccctgttcacactatcctcacggtttacctataataatttaaacacactcttaactgtatactcgctagaagagtcaaactctcaatatcagtaattcttagtaaccaaattagagaggggaatactaagaatattgaccgccactttctcatcaaacaaatctttaacaacatcaacatcccaagctttctcactcactacaaaaagactattaacatttttattagccaaactaggatccaaactatcctaactctgtattgactcatttggaactcacagagcatcaaataaaagtgtttgctctctattaatattaccagttcccttattcatccctttacgaatcaaatcctttaccgtaacaagatttttctaaatataacttgaattattaccaaattttgtggaaagaaagttctcattcttttgaaagtaaacaatataaatgattgaaattacccaattcagttaacaaaataatggaagacgtggctgcttacaaatttcatttggatttagaaaaaaaaaataaaaataatctgaaaaaatcataaatactttatttttcttaaacaaaaataataaatgtttgtaataattagttataacaactagaaaaaattgagcagagaaaagaaaaaggcaaatgatgaaatgattgagctataatctctctatctggtgggcgcaggtcctactactctggtggtatccacgtcagtttcttccaagtcggttggtgaaattctcagctggaacaaaaaagtaccaaacttcccatatccgtaccaccttcttcaaaccccaataatttctctcaaactcaaaaattatcaaatcaaattcattttttggatttatacacatgtatgtatatgtttacgtttatattttccaagctagaaagaaagtagtgaaaatttcattttcaatagttttttttttgcatttgagtttataaagttggaatctttaacagagcttagctaagctaattggttatgggtttgttttgttgcagctggaatcggcgtagtttgagctttaatgtcgttgttgcgcaaattcttttttaggaaacccccagatgggttgatcgagttgtgcgaacgagtttacggtgattaatttattggtttatgatttggtttttttttttttggtttaatgaattaatgggattcggtttgattgattttgagtttgaatgttaggtgtttgtggaaatgactcgttaaggaaaatggaggaattgaacgttttgtctctgtatgtgcagttttcgattgttgtttcagtactgaggctttggatgaagagagctacaaggcttatactgggaatatatttaatcagtttcgagattttttgcctgatgcttcgttcttggtgtttaattttcgtgagggagagacacaaagtgagatggctaaggttttgtctgagtatgatatgaccataatggactaccctaggcagtttgagggttgcccagttctcaaaatggagttagttcatcattttctgagatcaagtgagagttggctttcacttgggcaacagaatgtgttgttaatgcattgtgagcgaggtggttggcctgttcttgcttttatgttggctgcattgttgatttacaggaagcagtatagtggggaacaaaagacgttggacatggtctacaagatggctcccaatgaactgttacatttactgacatcattgacaccgttcccttctcagcttcggtatctgcagtatgtctcgcgaaggaatattgtagcctcagaatggcctccacaggataggtctctgaggttggactgcatcatgctgaggttcattcccgatttcgggaatgggggttgccgtcctttatttcgaatatatggacaagacccggttgctggtgcagatcaagctcccaaagtattgcactcaactccaaaaagaaacaaacccatccgcacttacaagcaggtgatttttacctttaatttatgtgttacttaaacactcttttcctggctgcaagtaagaaacttataatttgttgttaatagtttaggattgattgtattgttgcaggaagaaagtgaactggttaaaattgacatcaattgccttgttcaaggtgatgttgtggtcgagtgtgttagcatgaatgatgacatgcagtgggaagagatgatgttccgatttatgtttaatactgcttttattaggtccaatattttgatacttaatcctgatgaagtcgacatgttgtgggatgctagggataaatttccgaagaactttaaagcagaggtatgtatttctgcttactggattgcatttgttgttttgggttcctttttgacattcaatctgttggctggttgttctttggatgaagattcttttctctgagatggatgctgcaacttcaatcattagacgtagtgtctcgttatttgaggaaaaggagggtcttcctgaagaggcatttgctaaagttcaagagttctttagtcacgtggactggttagatctgagggctgatgctgccttgaatgccctccaacaaatgagtgtatccccccatactgtccatgaaaaatccgataatgattctcataagagtgctgaaactggtgttttgcagcaacttcagaaaacaagtccaaaagaggatcaaaagaaaatgaatttcaccaagtcagatgatgccttacctgagaatctggaggtcacttgtccaatgactgcatctttaggtgtctcaaactccactgttggtatatcacctgaacctttgggttccaatagtatttttcttgccccgttgacaccttgcaagcccaggcctttacaacctcacttgattggtaataccatatctccttcacaatcacctccacctccacctccacctgctccactgcaaccatatcacatttcgacttcagagcttgaaaattcatcaccaagaaaaggggccataacattatcacaagatgaagctcaaacatcaaaaacaagctcctcaactactcctggagctccaacctcaactacccattttggaaatatttcatctagcccaccctcttcccctacaattgatgcaattagttcttcaactcagcctcggagaactccatctagaaaacccccaccatctccaatcactcacgctccttctacgccatctttaagggaaagccttcaagctagacctcctcctcctccaccaccaccaccccctcctcccacagataatgcaattacgttatcaactcaattaactcaaactccatgcaaaacgactccaccacgaccacctccccctcctcctacactaccctcaagggaaaatacttctattggtcctagaactcctccaccacctcctcctcctcctcttcacccttgcgctcgaaccccttcttcagtgccaccaccgcctcctcctccttttcaccttggcccaagaaccccttcttcagtcccaccaccaccacctcctcctcttcaccctggccctcgaaccccttcttcagtgccaccaccacctcctcctgctcctttcctctcatcaaaacagtcaaagtccacttcacagacctctttatctgctccttcagttcccccaccccctgctcctttccttagtaggacaaatagttcgtctaatggtggaaaaggacgattattgcgcaccatcagttccaaaaacaataaaaaattgaaaccattgcattggatgaaaataacaagagcaacacaaggaagtttgtgggctgaggcaccaaaatatggtgaaaatgcaatgtatgatttacaatgctgaaaaagaaaaagatatatgtgtaatgaagttaaattgtgatttcactcttctgttattttaagccttaaatttatttgtttatttttctttcaattagagctccagagattgacatgtcagagcttgaaagtcttttctcagcagcacttccaaatttaacaaacgggaggaaatctatgaagcgtggttcagttggatctaaacctgagaaagtgcaactggtaatttaggttttggctctcattaagtctttgcttaaatattcaaacaggagctttctttgttagtcccttttttatttatttgttttatggcccatatgtaccatgtgaaggtaccttgaaataaattttgatttattagatctaagcagacctttgcactttaacgctggacttatttttggtataattatgtttatgatgataaagcacactggacctaagtatttgattgtcatcagtggagcattacaatttgtgtagaacttaggcaatggtataaaatgagggataggaaattaagagggaaacgggaaatgaatactgacttgataatctcatgctatagtgctctgaaggaatactgaaattagaatccatttgctattcccgattcttgcagattgatcacagacgagcatacaattgtgagattatgctttcgaaggtgaaagttccattgcatgtgttgatggtaagcctttttaaacatattttactcagtgaattcatttatctaaccttattaacttttaattttaacagtagttgaagaggcaatgtattgaatagtgttagaaaactttgcagtgtgtgtctttctcaatgacattagcttccaaaaattacttttgttcataaaagttgactgcataaccagttggctaaagtgtttttgtgtaaaagtaatgaagctaccattttgtttgtgttgagactaaccatatgtacatgtagaataagagattattaaacggcctttcaaccatggttcacatttgcaatacataatcctctctccatggtcatctcaaagagaaaggggaagccaatagttctcaaaccaattttgaaaagaaagagaggaacccaagaggtgtagctcaaaacaattaggcatgtagtgtgctctcataagatatgaggtttgagtatcttggtgttgggtatctacatagcagttagtatagttttatgtctctcaaataatgtgggtaggcgaggagcatattctcctccatcccaaaggagaaatttactctgaagtttagaaagatatatataaactgcaattgttgtatattagtcccttttcgagaagttttttcttaatggtaactgaactaactaaaatagaatggagctgggtgcttatttgatgtaaccctgtgaagagagttccttggcacattttttgctatgctggtttatctgtatgaaagtcatcaagtgggcactacctagtgatcataattggatttaagaagaatattaatcgtctaaattattttctggtattgctccttgcagtgcatgttgtacaggatttcaacttaattatgctttgttttgttcttcgagatttattgtgccaaattcattacacattaagaaatcattttctctagttccccttatcaatgtgaacttttatatgacattaacagaattcagtgctctccctggaagattcagctttagatgttgatcaggttgaaaatctcattaagttttgtccaacaaaagaggagatggaacttcttaaggtaggacacagtttttgagggattaccatcttcctgtctgaggttataattggcaattatatatgtgttcaggcctacactggagaaaaggagaagttagggagatgtgaacaggtcagtgagatgttattcttcctttccttctgttaacctgtagccatttattggaaatttgatatgagcatctccatgcaatgttccattttgttttctagaacttaagtttgttaagatctatgaacttaactcttttgctatatttctaaccaaattgattgcatttgagtttatgattgggtgagtaagggtatgtttttgtgagcagtactggttcatgtcatcataaatgcatcttattaagaaaatgagagtaggatgctttcgtgcgcatcctcagtaacagcatgcttccataggtttttttcttttctttaaatctgattttgaacaactgactgtagctaggccatgattaaacagatttggtgtgcatcttaaatagctaaatttatacatatacatatccttcctatcttttacagcttataacatatttttatttgcaacagttcttcttagaattgatgcaagtaccacgtgtagaatctaaactcagagtgtattcatttaagatacagttccgctctcaggtgaatacatatacaaaattagatcaagtagtgttttttttcttcctcttctttattccttacttacctcagcttttattttgttttgtaatttcatgtagatttctgaccttcgcaatagcctcaatattgttaactctgcaacagaagaggcaagttattctacctgctctcctttttttttttcttttcattgtaacaaaattttaaagtacaattcaaatctttttttaattttatcactgatgtttcagattagaaattcaaataaattgaaaagaatcatgcagacaattctttcactaggaaatgctttgaatcaaggaactgctcgtggtgagtagattcttgcgttacgttctcattatctcttcattatattccttatgttgatatttaccaacgcatctatgagaacgtagcaatgacaccccgtacatgcaaaggaacaggacactcatccacattgataaacaaagattatttagtgtattcttttgaaaaacataaaataaaatacagaagtaatagaagggagtcaacctccttgtagggacccaagtacactttcgtgtcagtatggtgttatccaatgtgtgataatatagtaattcaaaataaaatctaaataactcttttaattagttctactccaagatattgtaggcgatgatttgacgagggtatttctgagcaaagaaataggctttctgtgtggacatcagtaattgcacagcactgtaggagaggtttatgaaacccattcttcataatttttggtgggtatgtgatggcatgctaggccaccaacacccgaaaattgacatagctggattatatgtggtattgtgatttaaatttctttatcttattagttgtacttgatatgtcgtaaaattctctgttagggtctgctattggatttaagctggatagccttcttaaactgaccgagactcgagcacggaacaacaagatgactctcatgcactatctttgcaaggtataaattggtgaattttctttccattttataatttaatgtgattattgggtccctttaagacaactt

SEQ ID NO: 465 - DNA, 2925 bp, Cannabis sativa
ttatctgttacaaacttttgaaatagctttcttgtaataaatacatttataaattcattattgaaaaaatttaaaaactacttctaaaaaacattacgcaaatacctcgtttgttttttaaaaaccacaaatatgatgtaataacaccaaacaggccaaatattccatatttattttcttcaagaagagtttgctagacttctcatataatcctagggaatgacaaagtgttagatgcttagacctgattttaaagctttaactgtattgaaaaagtgcaagattttcattcactgatgtaggcgaaagaacttggcttctagattgtcatattacatccttttcgtgttttagctattttttcacttactagtaagtcaaacctacaagcttgcggtaatgaattgggaggattcttcctgcttcagggtgtctgcaacatgagcaacaaccccaacaccagcattatgaagccattcattcttcacctgaatttttaaagcagaaacaaagcttagaatccaaaaagagaagaaacgcatctcaaagagctttttttttttaaacaaaagcactacatgaatgttgttatgggcaaagaagggccacatcgcggagtgaaaactgacatcaactcttttccatcctagttgctgtaagccatgtatcatttcctctgtaaatataaccaaacacaccatcaatccattacagcaaaagatgagatttgataatgaataatattttagaaaaaaattattttaccttccataatttcgtgatattctacagtattttttgtgctaggttctttctgtgctgcctcctttgctttagctgcttccggaggaaaatgtgggccatcagaggaaattgggggaatatagtcaacatctactacatgcttataaccatccagagaacgacgaggtggctattgaaataacattgaatgtatgttaaaaatttatgttcaaaggataaggggcaagataaattaacaatgtaatgactgcactctcttgcaaaagaaaattttcacagatgattacaaccgccatcaacgaaaaaagcaaacacttaattttagaagtggaaaaagatgaataaaattatcttgcatcaactagagaagacatcatgcttgaatcttcctatgaaaatggctgttcaacatctgtattcttatcagttcacatcacacacaaagcaaatatctaagacagatggagaattttgaatgattgcctatattttattagaattgctcacatttatccaacgaaccagtacaaagaagccccaggttttaaagcttgtctctataatttttccaaacgacctaatcctttcctattttatagctcagccctatccttatactgattaacaacaataggcattacaaaaaaccagaaacagagctattagaagtgtaaactaaataaatctactggtccatgtcattacttcacttcttgcgtcttatgtacgtttaacacaccctcagtttaacaattggctagctataaactatttccatgctcttgggtttcaacaacttccctgacctcttcccttggttcttgagagttcttgatctttcttgattatctaagagaatcgtgaactgctgttgcaaggtttcttgaagctgttgttcaaccttggtgacaatctactccattgaatccttgattccatagacatcaattttcagagcttcaaactcgtcctcaaacccagcagtagcgtcatttttctccacaggtttctttggcatcgtgtccacgctcaccgcaccaatttgatatgatatgcttagataataaaatttatctatccaaattggtatccaaaattacgaaattcctcaaaaaaaacctctttattgatgatgaaataaaagaataatctaactttcgagatgctagcatctccaattacaacctttcgagagggctgctctttcctacaatctattctcttctatttccaagctaccttacacaatgaatcaaccccctatttataggtattggacagattaaattagttgcctgccacgatctaaaaagaattaatacaacacaaccctctaagacaaaatagccagctagataaaacaattgccaatcagataagaaacgaaacaattatagctggaatagaacataacagccctatctttaaatgtctcaagccttcctaatgtatactaacttgactagaggcttatcagaaagccataaaaaagatattgagcatagaaattgcaccttgacaatttctgtttcccttctaatggatgatgtccgccaaccaaccatgtctgtgtaatgtcaagaaattcacgttgaagaaaggatatataaatgaaaggtacaatagttatttcattgcagataggatggcattgaataggatacgatcataagatacatttgcataaacaatgcgagctctaaaagcacccaaggcggatctgcaaaatagatcaaatcaagcatttttaaattagttaagctcagtaatagggtgataaaaaaaaaagatacaagtagttttagatgcttcctacacttacataaactttccatcttcacaatcagaggccattcgtaacagaagagggggtttatcgggtttcccatcagtcaagaacagctgactaccagttagaccagcaagaataggagcaatgggtgctgctagtttttctaataggggaactcccagaagaaatggaagctggacaataatcagagatcagaagaataaattaaacttgacaatgtgaagccctgcagacaatgaaaataatctagaaaattcaagggtcacaggcaagcaaaacataacagaaatcacaagatagccaaactcttaaaatcacatacaaagaaagttaagcacgacaatcat

SEQ ID NO: 466 - DNA, 2999 bp, Cannabis sativa
ttttttttttttttggtgttgtgggtattagttgagatttactgtttttatgttgcaggaaattgctttgctaagtcggttacagcatccaaatattgtgcagtactatggatcagagacagtaggttccttgaacacatcaacttaattgcttatcttataatcttggtttggtgtgatatagaatgctcttccaaattctttgatgatgatgaaagttgttttgttattttaagtgggctaacagttgttttaatgtttcgaaaataacttgtgtatttatgtaagttgaacatttcatcattatctggttgtttggtattagtgagtccgtccaaaactattttaaattttctggctcgtaccttgaacaggttgatgacaaattatacatatacttggagtatgtatcggggggatctatttataaacttcttcaagactatggccagtttggtgaagtagctattcgtagttatactcaacaaattttatcagggcttgcatatttacatgctaaaaatactgtccacaggtgagtgtgaatattaaagcttgatatgattgcaataactgataaagaaattatttagcactttatcatatcattttctaattttaaatattctttttaagcatcttttagctaatgagtaagctgaaattctgttcagggacatcaaaggagcaaatatattagttgatcccaatggtcgtgtgaaattggctgattttggaatggcaaagcatgtaagaacaatatttgttccactacaattgaaatgaaaatgattggcccaatttatattttaggaattcaaaacaataatgtctgtgactctgttacgctaatggctaaatgagaattcaaaagtatggtgctatagggttgataacttgggctaaaatgagtaggctaccattttagctgtgaattctaatctagtttctaaatctttttcagattactggggagtattgtccactgtcgttcaagggaagcccctattggatggcacccgaggtcagcattctcacaagtctttgttaaccatatttaaaaatgaggcgatattttaatgttttctatcaattttcaattgtttaggtattcaacaattcaattggttgtaatcttgctgttgatatatggagccttgggtgcactgttctggagatggctacaacaaaacctccttggagccagtttgagggggtgagtaaattttatgcagaggcttgaatattaccgaatttgtctttgtaacttttttcaataatagcagttccatggcagacatatctgatgtttgacaagaatttttcatttgtgttctttttcaaaggttgctgcaatgtttaagatcggaaacagcaaggaactccctgccattcctgatcatttgtcgccagaggggagggactttgtgttgaagtgcttgcagcggaatcccatgaatcgtcccactgcttctatgcttttggaacatccttttgtcaaaaatgctgctccattggatagacccattccgagtgctgagccttttgattttgaagggccttcatcaaatgcgattgcagtgagatcatcggtattactattcttcttattcttctttgtatagactgtcttacatctccaactttttttatgagaaatagttcattccactatatattcccttccacatttctggtgtgtatgtgatccatatttatgtgaacaatgaaatctactcatcaagagtggtgcttattgctctttgttatgaatgctggtatattacgggtaattagtatgcttagatgcctcaacttacaattggtgcttactacagggcattgggaattcaagaaactattcaaacatagattccgaagtgatgggtaaccatcagtctagaggctcgaaattcggcacagggtccaggtacacgtgtttatttgtgtaaaattggtcaattggacaatttgtatgtgtgtgtattgtgattttttttgaacacaattaaatagataatctcgtgattcttcaactatttttttttaaatttttttattaagagttgttttttccttgtatttcccccccctaacatttgattgctgcttaccagtgatgctcattcgccgaggaacatatcatgccctgtttctcctattggaagcccacttctgtattctaggtccccgcaacatatgagtggaaggttgtctccatctcccatatctagccctcatactgcctccggctcctccacaccactcactggtggtagtggtgccctcccatttcatcatcctaaacagcattcttatgttcacgaaagtacaggaacaactcagaggtgtcaaaacggtttttatacaagtagtagcacaccttatcatgagccaaagcccgatctttttcggggaatgccacaagcctcacatgcattccgggatatattttcttcagataattccacaataggaaatcagatggggcgtcctactcctgtcgagttttatgatgtacagtcggttcttgctgatcgtgtatcccaacagctcttgagggatcatgtaaagcttaattcatctgtggagttcagtctgagctcgccaaagctggaccggacaaccggcatctgattgtttcactgagatccctggtcagagcagaacttggctttgatgcttttagccttttaggtttggttttatatctgaatagttgcaggaaggtccactctttaagttaggaaccaaagttggaccaccaagtttggatctctaggaggctttgaagctattgaaactttaatttgcctatctgttgctgcctcagaaaatcctgcatttagaaattctttaccaaggaacctatcagtcactgaaagaaaaaatgtatagtttagtcacacctgaaaaaaaaaagaaaaaaattaaatgatccattaccatttgaacccagatagttcctttttttttttttttttttttttttttttttt

SEQ ID NO: 467 - DNA, 3766 bp, Cannabis sativa
ctatcatccatatataatcatgtcttctttattatctttgaaattgaagaactggcgaaagtagaaggattatgtcaaattttaaagtctaaacatatattaacaattttaaccgttgataagtcagtttaaaatagaaaaaattatggcaacattctcgatcttgttctctaaccactgctcttgggtgatataggtagaggaactccctcctcatgctcaacatatatacataaagaactcccatttcatcatatagaaaaaaagactacgcacaattacatctctaaaaattgatcaccctggtgagtccatctaataatcaacataaaaaatttatgtggcacactaataacatttttgatggataataaaatgcttaagagaaatttagtaattatacggatttcccaaagacccgtatatatatatatatatatgattagtatgtataagatggctattacacggtgaaaattagttgaagttatatatgtatgtttcaaatgaaaaaaaggttcatacttttaagcgtacatcctcagattatactatatatttaagaaaataagattgatccagcaattaatacaagttagaaaatatgatcaaacatatcattaattccccaaacaaaggcatcgcacttaataatgtcagtctttaacgtttgatgatggtgaacttgcacctacctaatctcaaagttccaagggcacatgtcatgaaacaccaatacaactgctactaaagaaatgaaactttacattattataaaacaaaaggtaataacaagagatagtaggagtcttatgtggaaagccacaatattacatctatttttttcatactaaacatatgcaaattaactccatcatatatagaaaacttcatcagcaaacccaccaatctgaagaataaaaggcacaaatatcagtactcaaataagcagacaaataaaaaaaatcactacttttaggcagtaataacaatcaagatctcaatagcttaattttatttggatatttaacctccgtttaatacaattataccatacaaaaaaatattttaaattatgttttcaatatactaaattatttaaaaactagtcaaatactttaagacactattatgtaatcaaaataaatgagatatggttttttttttttttaattgatgaaaatagagacaaatctaggaaatatacttttcatgtagtctttttaagtgtaaactaatttatttttttttttcaattttaaaagatagttttaaattaaattttaataaatcttataaaaaaaaaaaagaaggattgaactacaatacgtacattcataaaagtattaatactaaatatattgtttgcaatctactttttcctatgagaaacttttatttacaagcacggcaattttacttactaattaaagaataatccattagtatgcatgcaatatatttattattacaaaataaattatattttatttattatataaaaaaaaatatatatctgtaagggtaaagtgtctcttttatttagttgttatttttatgagaagatttcttgaaattaatactaaattagggatcacaattaagtaaggtatggagaaggtgtaaaattaaaaaatgtgacacatatagtcatgtccatggcaaaaacactgagagaatatatgtattcaacaaaaatgtgtgggaaaggaaaaaaaaaaagtaatttccttgttaaatatattaatgtttggttcttagacgattcattttctttattattatttatctcaattcattactcgccgagagagggaatcaaaaactacacaagacaagctataaaatgaacaaaactagtagaaaaactatagaaatggagaccgttatatgtatgattagcatgtctaagatggctattgtgctgtgaaaattagttgaaattacatgttagtatgaaaaaagcttcatattaacatataatttcaactaacctcaatttcagtcttcaccgtttgatagtgaacttgcagacctaacctcaaagttccaaggccattgttatgtaataccaatccaactgctactaaagacataaaacattacaataactatatgaaatttgaatccaaaagctttctattctcaaattaaaataccacaaaacaaaaggtaacaagagatggtagagctccatcatagcataagtccaagtctaaccatagaaataaaacattacaattactatttgaaatttcaatccagaagctttctagtctcaaattaaaataccacaaaacaaaagataacaagagatagtagagctccatcatagcataagtccaagtctaactatagaaacttcatcagcaaacccaccaataaccacgtagtagtagtcccaatctgatgaagaaataaaggcacagatatcagccaagatccctgtagcataattttatttggatattaattaacctctgtttaatacaatttacctctgcctttgttcatcgaacgcgctccatttacagcaccagtttaaatgaaacccccttggacaagaaatcatccctaataaaacaatatacaataccaagagaataaagacacgctcagtcaagcccttgtgctctcacacaattattagttgatattgggacaaagtaagaattataaagatcaaacagataatatagttactaaaattagacaaagaattataaggaaactataactctagcttctctaataatcaacaaaataaagccaaatgaaaataactgaggggaaaagtcaatcacaattaccacttcttccctattggttgctgcttctccttctcattatttttcttgttcaggtcctcctctgcctctttccctgaatttggcttatcaactccaactccaatgaggcttctcacacatgcgatctttccacaagttttagtatagctcctcacactcttagcctcctttctttccagatcatagaccataagcttcttattgtcctggtcaaaaagaatttgatgggccttcttgaaatacttaagaggcattatagatgtaaaagacccagtcacatttgatggtaccactgtacatagcttagtccaggactctttaaccccgtattccttcataacccagaactcaacatattgtgctttctcactatgtcccccgtatttcactacctcacaaagccacccaccaagttctgtgatagttgagtaataggctttgcccttagtatctgtgtcagcacgtggaatttgcctatatttttcagtgactagatcaaacgcaaggataacggtggaaattttagtaccaagctgtaaccccaacaaccaatggaaagaactccccactagaaggcttttcccacaatgcttacccaagtaaggaaaatcagcaacccttttccaagtgttagtgtttaggctataaacattcacctccgaacgcaatgacctaacagggttattaccacagtaatgtaacattcttaaaaatttatggtcgtcgttcacagggtcgtacccaaaaccagctataccaatatcataaaaaatactgccaggaagctgattaagatcagacatgggtacctttctacactgtttggtggctgggttccaaataaccgtgtcataacgcggaccagtctccataaggactaccagtccattacagaaacccaaaatctcgaccccgtgcccggtgaatattgggggatcaactcgtacggaagactc

SEQ ID NO: 468 - DNA, 1651 bp, Cannabis sativa
atgtgcaaatataatcaccctatactataaaatttgttaaactaatttcttataaaattgaaaatgttaatattattattgcaattgtgaaaatataagatttattttaattttattctactttatgtagagaaacttgatggaggtaccaccaaggaatagttgtagtgtatatatggacatttatatatatattcatgtgtctcttaaaactcttcacaaaagaaaattaattaacttgtgggtgggagatatataattataaactaatacaatggaagaaatgtattgtattcaacatttcagtcacgatcatattttgtatctagatacatggtggcatgacatacaaatgagttgtgggttatgcaattgcttaatccttaaatgccaaaagtattactattgctttggttgtgactatcacatccacaaaagatgtgctaagttgcctcagtatattaacaactccttacatgatatacaccctctcaccctcattaggaagagatcatcatttgatgaaagcattatttgttgcttttattgtgagaagcccttaggagatcatgaatatgcttatacttgcaatctttgtgctttctacgttcacatcacatgtggttcaatcccattgcccaccataacatgcaatggccatgaagatcatcacattgttcagttctcttgccatcaaaatccaatgattcttgttgagcttggtggtgctaataaagatgctctaggaggtaatagtaatcgttgttttgcatgtcaattaccatggtccataccagcttattcttgcacaactcttacgtgtacaaattttattcataagtcttgtgcaaatcttccacaaaaaatccaacatcctttccattcacacaatcctcttaaacttcaaattagtaaaccccaaacttgtgatgtctgttgcaagaaagattgtatgctcaattttagttgtacccaaaatggatgcaactttaaattgggtacagaatgtgcaaatctttgtacaattgttaaatgtcaaatccatgaccactcactttctttagtggaaaatgcatcatctaacagtgttcattgtgatgcttgtcttaagtcttatgatgaattgagtgataatgatgattcaagtatcctggctaaaagtcatgaagttcaacaaactcagtcattcttttttcgttgtatggaatgtagttacaaccttcattttctttgtggtccattgccatatatcattaaatatgaatatcatatacacagtttgattcttattgattcaatcatggatgaggatttcgataaatattattgtgatgcatgcgaagaagaaaggaatccagaatttcgtgtttatacctgtgtggaatgcaaatatacagcacatatacattgcatgattgatgaggtaagctactaattctcttatttttatcaatgcagtcatattaataaattgattgttattaaattatgaatagtttttttttttattttttattattaattgtaaaaattgttagtcagaaacaatgtaacatttagttttttcacataggatatatagatgatgataattcagatgaaaaatatttcattatgtttgaaactttgaatattacttttcaaaaagatt

SEQ ID NO: 469 - DNA, 3117 bp, Cannabis sativa
caacataatgagccatttttaaaaaaaaatgaagtatccttaaaaagaggaagcttcataaaaaaaaaaacttacgacatgctagaaggagagcattgcagcaagatgctgggactggagaagacggcaactctcggaggacatgctgaacacatcatcatcagcacattcaaaattaacatgtaatgagtatattttataaccttcaaaaaataataaaaaattatttggaaggaaaatgaataccttaatacaatctgcaacaatgtgtgcatcctctattggagaaaactcattttttcctaaagtccaaaggaaaataatgctttaagtagggtagaaaggaaaattaggcattgagaaattaaaagaaagcatttgaaacaataatcatatattacaatagagagtaacttgcccaaagttaacaatgagatcacataacgtaaaaaattctaggagcaaacagtaaaatacaatataattaactcctgtttcttcatgccttgattcacatgacagaattctcaattatatctcatatgcatcatggacccatcacaaatactaaagatgtaaaaatctatgctaacatggcattatcatattgatattgggctcaaaacatgaattggaaaaatagactctacagtttatacatttgattttgaaggattcattttaaatcatagtgaatgaacataagcaaatatatagtaataaactgaccttgctcatactcccgtactcgatgttcaacatcatcaacatctgcagcttgccgtaagatcccttctactttaactcctggtaatgttaaattaaattttcagtatatacataaaagtaaaaagtaaattaataacctaattatctgcatcaaaacatataaataataaggccttaaatataacactcccgactgtaatataacaaaaagaagttaaacattatacattgtataacagaagtattcattagaaagttttgacttgacaagtatgaaaagagaggagagagatagataaacccaccatgctcttctataaactgaagagctttctccaaaaaagatggtgttccatcaacatcttctaaagcaagcaaaattggcctcccaatgactgaagatttcactgattgtcgatcagttgctgaaaaaggtaaatatgatcaaaataaaacatctacgtaaatgttggagcaaaataaggtatttattgaagtcataaaatacaatcactgagtactcctgcccatgacgcatctttgtgaactacagatatgtgagcctagagaaaactttaatttatcacacttaacagagcaaacagaccacaatatacagagacaacattttctatgttctaaactacagaagaaataattagctgccctattaaacttaaattatgaaaacaccagtccttcaaagctgtcatctctatccaaacatgtcttctacaataactctcattaaggtaattttacaaagaaacttaaagctggtgtcgcgtgtcaacaaactaacaacaaatacgatttggaggagacaataaaaattgattccatgatgcttgtaaacatttctttaattattttttgtgtgttctaaaaatgacttttccaaagctactttcaaagttgagaaatgagaaacattttttataattagataaagagcattttacaaaagaagagcatacactggtccaaggaaccatcaactgaatcaatctgatcgttcctgaagataccattttgccccgttgcatgagcagcagaagctggggcttgagccaaagcactctccagtgccgtcttccactcattgagatcctctaaagtttcagcctgaagcaccaagagaaacaagcaatcagcagcagaatcatgctgaaaacactagctttatgtttttcacattaggacaagagttaaaactaatccatttctttgaagaaataataaaacttaactaaaacactaatggttataagaaacatgggggaaaatgtccttaaaagggacatatcagcaacatagtggagacctatagatggaggagaggagtaccttaagtgtgaaagcacgtccctcacgaccatcaggaaagagcacagtcaagagttttttgtctgctttaacaacaacactagagaaatgaagaattaacaaagaaatgttagtaaattgcaccataaatttaaaagggacaaaaagtaaaaagggaagtaggaggagaaatattttcaatttaaaattacaagccaacctgcctgaattgttgaggtcaataccaccaagggtcaaattcacttcacttcccttttgaggaacagcactctgctatgcagataaacaaataaaaaaagatctagaatattaacgatggaataaatagggagacaaaaaaggagaaaatgtgggagggggagaataaacataataggtaatacacatgctgcaatctgcttatacccaatgaacaaaagcactgtcatactaaaccagatccattcgctctatttactttttcatcaaattatatgtaacttccaagcattcatctaatcctaccaaaaagggtaatcaaactcattgcaagaaagctacatacagaaaacacagtgcaaccaaatcactactttcttgggtttatttcctgtggtaaatagtggggacttctattcatagttaccgaaaggtaacgaaaataagaaagccctattttcaagtcaatgtggacagcattcaagggtactcaacaccaacaaccccttgctacagttaacaacaaccttagtttacttgcaatgaattaacaaaattgcaatagtctttcaaatctataaataaaaacatgcagcaaatgaaaattcatgcattcaatctttaccatcaaacactccttaccgggtcacttctgaaaaagaccaacgaagtacgagttaagataaaccacctcttcttccaggatgtccatccaattcctacaccgacaagaacagaataagaaatttacattcctttcttattaactgtcaagaggatagtatgacatgtaaaactaagcaactccacaaagcatttattgaaaaaatgaaaaaaaaaaaa

SEQ ID NO: 470 - DNA, 2777 bp, Cannabis sativa
tatttagtttatagactaggaggtacagaacattgtattaagaacaatttagaagaattgcactcattttagcataattattgtacatactaatccaaaaagtaaaagtcttgaacagaaaaattcaatacaaactcattttagcagaacaatatattggttttgttgttgttgatattattcactttgatttctgcagctacggtcttctgatctttatgcaaactccaatgcagacaaagattttgtagactttctcaaggtaacaaaaaacgcattcttgcccacttctttagttattctattgccgattttggatatcaacagattttctttaacagctaccatgccatgctcttcattcttgaataggtgtcctttacgaaatctaatttctccactgcatacccttacattgctgcaacagaggagtcaatggtcgattcattgatacaaggagttactgagacttgtggaaacaacattaatttgggtaatattgttgtctcggagtcatgctccctaccggatggaaattttaaaagacttgcgaatgtgcagtctgttcatgtaaatgtttttgactatggtatatgagatcgtatactgctaatgttaaggtgtaagataaatatttgatgtctttttctttcctctatgaatgaaataggattacctgagttcaagggcagaaaagaaagcaaatggagaagcagatgtgctcgtgttctgccatgaagagtctaactctttggatagtgctcacaaatcagattcagagagtatgttattttgtatttgagtagatctgtttgtttattgatcgattgatcacgcgattgtatcttaatttgggctatgcaatattacattccggtctaaggtaacttgtcttaccaagtattttgactaaatgtgcagctgaaacttttggcaagcttgttggttccatggatcagtctggggaaaaatacgcagttctatatgtttcagagccctctaagtctattcaatatccattgtctcgggatgtagaaaggtttttggctgaaggcaccaattctacaatctgtggtgaagtttgcaagatcaaatcatcacttttggagggacttctagtggtaagttctgagttttatatgaccatcttctattcctgtttgaatggctacacaatttctgctatatcaaaatccaattcatcagccgaaactcttaagttagcatgcttttcttgaaactaaattatgcttactgtgatcctttatttgtctagttttatttcgatacctttgatcttccctttgcagtttggtggttgtttttgttattctaattatgtatttacttatttggagtgtataaatggtttaaattatttctgcaaatcatttcagcttggaaaatcttttcttagttttattaggtgttctcacttggttgtatgtgtgtgggtgatgggtgtcagcatccatatcatcctgttttttcttggtaaatgcggtcatcccaagaagagtttgaattttttaaatctgtaggaaccattaaaaactgaccattactcttattttcctttggcaagttaacccttttcttgttttctgtccccacatacgtacatgtatagacgttgttatgctgaatcttagctgagcttcatgtttccatcattggttttgtagtaaaattctaatggtgtttaactttgtgattctttcagggcattgttttgcttataatcctaatatccggcatttgctgcatgatgggaatcgatactccaacaagattcgagacacctcaagactcttaatttgtagtatatctatcgctttcagaagcacaagtgctcaattcaaggcattggtaaactagatgatgcttgttttatagttccaatgggtgggagatagagatacccttttgtaatgattttgttatcttgctcagaggctttgttttttttccccttttcttcttttcaatagaaataatgcaatatgatatcttttaggtctccatgctgggttgttctttgtttgtaattctatttattactttggccatagttatctaaaaccccagctaacaggtccaaacaagctacctaccctcttattttatatcatttgttacataataaagggccctactgagaattattgttcactatttggagataatagtagctgtgattgaagatgatctagttgagttgttgttctgtgatatatttttctttctttcttttcattaatgtggtgctctgctgctacaatgacaagagaccccaccccatccaaccacttgtagggataagggcagagagaatccatgagtaatctttgtgttttctgatcaaaaaccccacctacacttgttattattagctagctaccaagttccaccactccccaaattttaccctcttaggcaatccttcttattttattttaataaaacagttttgtttttgtttttgtttttgatacgatcattccttaccacttaagttctgacttgtgaagacaaaaatatttgtcctttatagaagaaacaacacaagatgccatatgccattacaaagaaaagttcaattggagacagagacagagaggaagggaatcctagtgtgattgttgaaatagtttaaaaatggtgagatttttttttaccttgatatttgtaccccaattactctcttccctagaactccacatctacaatgtttttattctcagacattttggaaacagatacatatatatatatat

SEQ ID NO: 471 - DNA, 3148 bp, Cannabis sativa
tgtaaggagaagcttattatagaatagaacacattctattgcatggtgtcactatgtctgaataaatgtgagtaggaattgcttatcttagaacacgttcattgcctggtgtgttgtctgtctactgggaagattatgtatccttttatgctgcaattttaacaagttccaactttttttccagcatggcagaagtagaatgggcccgagcgacaaatcgacttcccgagaaggtttctttctttttaccacacaagattagttttatttgttatgttacatttgatggctcaagtcatttactggaatttctctaattgtatcatgtcttactaaacaggttgaatatgaaactgagattgttgaagatgtactgccaatccttaaaccaaagagaaggcttgtcctgacaacacaactcatgcagcaactgcttcaccctcctccagcagtagttctctcgtcagttgctacttcacagtatgagagtgtagcttactttgctgcaagattatcattaggagatgcatgcagtgcagtttcttgctctgaaagtgaagcaccatcatctgcagacagtaaaaacatgtatgatttatccttagttcacgtaaaatcgataatattgatgttttggttttattactatctgttcatactaataattttatgcgtgcatcacagtttgtctgaaaatcttaaaatgcccgagaaaagagagaagttcttctcaaaagttgttgaagacttcattggccgggcaaggaagctggaaagtgaattgttgaggtaccctcatgtcttgatatttgtgcttttttcttttcttttcaaactgctgttatgtgagttttatctttctgaattctttctctctctctctctctctaattactctaattacttaattgtactaatgctgcctccttttgatgtgtagactggacaaaagagcttcaatcttagacttaagagtggaatgccaggatctggagaagttctctgtgatcaatcgttttgccaagtttcatggtcggggacaagctgatggggctgagacctcatcaacttctgatggaacgttaaatgctcagagaccatgcccacagaaatatgttactgcacttccaatgccgagaaatctgccagacagggtacaatgtctttcactttgataatttaattaattgatgtttgccctctctcggtcatttgtctccaacgtccccatgcttcctatcttccattttgtttcaacttataaaatggcacatgatttgccacaaagtagcgcacagaagggactgtaggagaaagaatggattctagatgtctccttgaaagcaacggaggcagttagatcttttgattataggccattgatgttattcttgaaaattataagatggcctctgtatactttgaaaaatctagaaaggaatctgctatgccccatctttcttcttttcagtatagggggaggtaaaaatgcagtctggtgtttctaagttcacaatgctataatccccatccccaggtattctgttcctctttttctggagggggcattgactgacttgtgacagtcggcagttgaattggattgtcaacttactgcaggaattaggcaattgaccatattttttagaattaataccaattattggatcaaatcttttgaatttaccgagaagtatatgatttttttttctttattattctacgtttctgcatatcggctgattctaagaaggttaatgatctgtttctttctttagtggatctttcgtttgccatgaattttgcaacatgtattgaacataggtcagagactagtctaatgctgtctggttgacaagggttttgtgcctcagggaacctgcttaaagctaactttaatgaataatatctttgataagttggagtaggatatttgcagagttttgtatattacatggaatggaaacaccagactcttctaacggtattgaatagtatattgtttatttgttcagtcttccctttgtgggacgtgtttcaatgagtcggtattgttatttttgtttcctcatcatggcatgcgtttattgcatcgtttacttggtcattctacgcagacctatattgtctatatatactctttttagcggctggagggggaatgatgcagattttttcagctgttaaattaattgaacaccttcatctctgggaccctttttcatttgtctttaacactaatatcattcacagcatttattaaagtggagtaattttactttgtggcgtagtcttgtacgttcgtacgttttgggcattaaaaaatttaaggagtgggtcccaacttctaccattaacatgatgagtacgtacaaaacttgctttaaaaattaagaggcaaccatttaaaaaaaataaaatataaatattaagaggaaattggcgattctcttactcaaagaaggcaaatagttgagaacgtgtcaccttgatattcatggaccgctttcgattatttatcgacgatgttgggtttgccacttggcaacaataaccaagtgactcgtatccagttggcaacaatcaagtggatccacttagcaatttttttttagaattattttataaatacacagaaataataaaaaaattattttttcaattttatttataaaatatatagtgtttttatattgtatttttattaatttattattatttgcattttattttttattgttattttgatgttatttaaatattatttttagtttgtaaaaatataaaaaagattatttttaaacataaaaatataattattttacaaatgtaattattttatttttctttttgaaaaaattaactttgctgctcaattattgactcactgcgggtaccaacacatcacaatcacttggtgaattcacgtaatcacatatcttaatattccactgtgcgggacccatagattcacatggcccctttttttttttttttttggaaggatctatacattcctctcaagaaagatatgtttatttattttattttttttgaaggaaaagatatgtttattatattataggactatttaaccttccatgattaataagatatggtttaattaattaattatattgaccaatct

SEQ ID NO: 472 - DNA, 4017 bp, Cannabis sativa
aataatgagaaattttaaatttttacaaaagaagaaatctttcaaaaagagcagccatcacatcagattattaaaaatgccatgcgttttaaaaaataaaagaagcatttttactgggctgttgtttttttacacggccgttgagaaacttgaaattaaatttcataccttaaacaatatagtttataggaaaaggattaagattaataatgatagaccgaccagtcaatgcagttatatggaactagcctaatagtctcacgccacagcccccactatccactaaagataaacaaccatcggcccctcactctaacaaaggaaaattttaagaaaataaaattaaaaaaggaaaaggacgagagagaatttcgaccacataaatggacataaggggccagtcaaacaatagttgcagatttgcagcataggttggacctatttttgtccaaagcaagctacctaattatcacctttggaatcacaacaaagaacagctaatatggaaaatgccaccattataatttgtaagaataacttattggggtggaagtggacccaaatttctatacattgattttcttttccccatataaagattttaaaattccattaaaaaaaaaatatattcctataatcttttcagcctagagactagagtacacctgtgtctacaacaatgcgattctcacataagctcctcggtctgtaacaatccaggatagacaaatgatattatctgtttcaaggacttaactgaggatttcaggaaagcgtgtccttcagttgctgcaaaacaatgaaccaagaaaaatgagaaatataatgatagataaggaattaaacttgtcaatggaaagaagagaatttacctcttaacaacttcttcactcccttagaaaaatcttcaacacgtcctagcacgggtctcatgccacatatctgtagaacgcaaagttccaagtacaaggccatctccattatctgtagtaataagcaacacgcattctgtatttcttttttaatctggttcaatttgttggcttcgcatagctcggcaacaatgctgattgcttgatcctgcattgtgtacaacaaagggtgttaaactattcaaccttaagttcaaagcttcaagtacatccaaagggttataacagtacatgtgttaagaattaagacaggaatgctacctgtaagccgtgtaaaataccaggcattggaagctcaggaaaatgagcgagatccacataacctacctcctctgcccttctagcggcaccatcaacttgcaaacatagaaatttcaatagtagaaatgaaattctatatatctctagagaaacaacatcagagaagtacgtttgtgcagcatgattagcactttcggctggttgacttctgattatgagagatgttgaagttgtagaaacagctgaaaattttggtctcgagacacaaccaagaggtgaaagggcaaaccatccatttttgctgttcataaatgacggcttattgcagttatcaaactcctcttttaggacaggaggacataagagtggcgcattgatactggaagagtctcctagacgttgagatcctttgctaatgaatgctaaaagatggatactttgttctctcaattgggaatccatttctttgatggccttaacccacgatttccagtgtcttgcaagaacacacattaacatgatagtatgctcagtttccttgagagctgatagagaaatttctgatctttgagtcctaggtctttttttgtcatgatcatcagaaggaaagtctggtgcactgagataataagaaataatataccctttctctgagaataagtacggtatcacattgtctaaaatatctctacatgaaggactgtctcctaaggactcaaccatagctgtaatgacagccaaagcaaggccccaaacttgttgaggcttctccaacttgtcagttgagatagacaaaggtctaccatccatgtactctgtaaacaaaaatctcaaggatgagagaaaaccataattaacaagcatctcagcaccttccctaacacgagcaagggtcaaaaagaacttcataacaacagggacagatgaaaaggaactcttgtcctgaagtttcaaaataacatcgttcagctggaggtgagactgtataacggggaaccatgagttgggtgtcaagaaatttcttagtatcaagtcaacagttgtcagggagagggtgcagtgatcagcaatgactatacagttgcaaagaatgggtagtagtcccagacacacattagaaattttagccatgtcctcaacagattccttatctatcatgccaccaaaatgtgaactgagacaacaaaactccactgtcgagagaagcaatacaagtaaaagcttaattgttatgttaacctcagtagctgatggcctgaagtcacacagtacccgaaggccagaacctgctgttttcaacaaatgtacacaaacagagaagttgaggcttttatgtgcagatcgcaaaagatggagaagcagttctgattgggctgaaagaaaatgaaatgtgtcttcagagccactgcctctatatggagctaatgattccacagtgtccctgaagcacttgcatatgtgatctatacatgttcgaataagttcattagagatccctcccaatgtggcatttttctcctgcaataacagaaaataagtcatatgcttaaaaaaattatgggttctaaaatgaatcaaataataaaactatacacaatataaaacccaagggagcaatgccaggtggcatacttgaaattgctaccacacagggaaaagatgtattattgcacacaacaaacatttacattttcaggtttaggtttaggggcctcaacccaaaaaacatctccggttcaggtccataattactgaaacatcagtttaaagatggggacatttgagtaagaacagcatttaaaatgagatacttttagggtagatcccatctacgctcgtatctcatttaaaggataaaagtaatagaatacgaagctcaaacaggtgctaaactctagaactttattgccgaaatataaagtaattataaacagtgatgcatacatgtattctcagtcaattatgccaatgcagtactgattagtgttgactaatgtacagaaattactgtagaatccttaaccaatgcaaagaaatatcacaaaactttcagttactacaaacttcagtagattatgaatctacatgaattaatttcaaagcagataaaagtaaaaacactaattcaaccaccaccgaaatatccctaacttttaagaatgcaattacagcagctacagaccctaatttcactttagacatgcaacaagacaatcagactgataactcacatcattctcatagatggttaagacagttattaatgatttcaatgcagcaagctttgaatttctaagcaacaccgtcgaatttgcccacatcatctgagacagcattctttttgtgatctctttagatgttttccacttcaaatagtcccaaagatctgaccccaaatcagcccgtacacgctcgggatcaaacaagtacacatctttgtaagttataagaaagtcattgtcatacttatgttggtaattgtgcataacttttgaatcaaccaggtattcagaaagttctttaaatggcccagcgctaatttcacgaccctcaagctctccttcaagatgataataaagatcattaagtatcaaattatttagttccttcccttcactgaaacaagaaaatgattaagcatataagcatctcatatataaaagtaaataaagtgtacaaaaattatgaacatgtatgtgcaaatctagattaaaaaaaaatgcatgattgtggcaatggttagaaaaatatacaggggttagaagcgagacaaggtgtggaaacattttttactggcaatgaagtatatgaattataaaaaaaa

SEQ ID NO: 473 - DNA, 1485 bp, Cannabis sativa
tcttccttataataacaaaataatccttcttcacaaaattacacacacttcacagatttagaaagaaagaagcccttttcctcactcacttaaacgtactatctctactatactctctctctccctcctcaaattcctcgaactaactttcattcatactgtcccttcctctctccctctctctctctctcatcgctcaattgtttttttcagccaatccgtgaaaagcttgtgactttactattccttctcttcaattttgaacaatcgtttttcaaaggttcaaattttccctaattaaatattctgtctctcttattgtttaaccataaaccctagaagagtttcgaatccgattggttttgtcagactttttttttttttgccggtggaaaataaaaattgaaaaattgccgatttggtcgaattttcgagttaatgattccgggccggcatggtttttgttagaggcgatgcgcggttttagggttttggagttctgggtctatcaatgggtgccctaaccagcaaccgtaaacgcggagatgagtattcaagcttgaaccacggacacccatctctgaattcgcccaattttcaaattgcaaagagacctagattctcatccatgcagtcgagccaggataacgcagcacctgtgttgtcatccaaaagtgcgatcgctagggtctctaggtaccccgaagccaagcctccattgcctagagttcatgccccttgtagaacactcaagttcggttccctttcgagtcgaggaaatgagtacggtaatactcttttcgatcgtttgtatgaaaaatgttataggattaagaactttgcattggagacgtttcgttatttacccaaggaaaaggaagttgttgagttagatagagatgttgaagaagattcgagtatagaagaaattgagcttatagaagatgatgatgatgacgatgacgatgacgtcaaaatagtagaacccaatgtgatcattgttgaagaattggaaacaaaagccccgggaagtggttttcagacaactccttcgaaagtttcaaacttttcagacaccccttcgaaactagaggatgcggggctggctttggattcattgtctcttcattctgattctgattacgttccactatacaagaaattactcgaggaatatgagcagacttccaaattgtcacggttaagtttggatattgaattggctgagaagagccggtctagatatcaagctcagcgttctacaaggaaaacacaagcagttgaggtaacattctctttccttttttcaatttcctggttttacttgaatttgcaatggttttgtaatgacaagttatgttatttctgttttagaaagtcccgagtgaaccatttattcctcttacgaaggaggaagaagctgagattgctcgagcgttttcttcttctaatcggtatatgcttttgatgcctgtgctgtttttt

SEQ ID NO: 474 - DNA, 2232 bp, Cannabis sativa
aatggattttgaaccgagggctttgctgttgttgctattgttatcgtctctataaattccctgtctttgttttggtttggtttcgttttgtcttattcttcatctgagatcgcagtcggaatttcaatttcaaggaatagggatttcctttttcgcttttggatttgaggtatgatgaatgttccagttttgggattatttaattagggaaatgtatattttgatgctgctgattcaattaggatttagatttagacatccaaatatttggattgctaaagctttgaactttgatgttgtcacatatttatcaaattaagtgtttgtgcttttatggattttgtgtttaattataattaatgatctaaacttgtatttcgattttaattgttttaattttctatttttagcacaagttcttattgggtggattttgattttattctaaatttatttgcaggcttcattatatattaattgaagtgtttaatgtcttacacccttgcaaattaatggtgtctgcattcattgtcaatgagtatttgattcctcaaacttgtgaaccagttttcccacttgtgaagaaattagagcgaaagataagtttagatattttagattgtttatgtttgaataatcccattgctggttcatttggttgagtgagaatatgtaagggatgatatctgctacaatattgaagattgtgtcaccctgttttaaaccttcggttgaaggggatagagatagttcaggtaaagccggagatgcaaatggcagggttgatggtttactatggtataaagactcaggacgacatgttaatggagacttctcaatggcagtggttcaagcaaataatttgttggaggatcaaagccaacttgaatcaggaccgatgagctcgttcgagtctggccctcaaggaacatttgttggaatttatgatgggcatggtggtcctgaagcgtctcggtttgtaaatgaacacctgtttaaacatatcaaaagtatgttcttttgtatcacacactgttagtttctctcatgttttggttctctcttatttagatacctaattcatatttttactgacttcacagctattcatggtgcagaattcacatcagagaatcaaggaatgtctgctgatgttattagcaaagcatttttggcaactgaagaggattttctctctctagttaagaagcagtggcaaatcaaaccactgcttgcttctgttggctcatgttgtttggtaggcataatatgtagtgggaagctatacattgcaaatgcaggagattccagagtggtgttaggaaaactagaaaaagctgttaagcaagtcaaagctattcagctttcagttgagcacaatgcaagttatgaatctgtgagagatgaattgcatttgttgcatcccaatgatccgcagattgtggttttgaagcacaaggtttggcgagtgaagggtataattcaggtaaattcgatatgtgcaagccttgctttattcgatatgcattgcttaagcccccttgacaaagatgacaccttagcttgattttatatttgcagatttcaagatccattggtgatgcatatctgaaaaaagcagagttcaatagagaacctctactgtcaaagtttagactgtccgaaacattccacaagccaatccttcaagctgaaccggcaatatcagtgcaaaagcttttccctgaagacaagtttcttatatttgcttcagatggtctatgggagcacttgagcaatcaagaggcagttgacattgtccatagttgtccgcgaaatgtatgagcaatcaatccctttcgtcgatttattatgtttttttctagatatccatattttcacatgaattatgtttgaaacttcacacaaactatgcagggcattgcaaagaaactcattaaaaccgcccttcgggaagcagctaagaaacgagaaatgagatactcggacttgaagaagattgacagaggggtgaggagacattttcacgacgacattactgtaatagtgttgtttcttgattcgcatctggttagtcgcagcgtctggcgtggacctttaatctcagtaaaagctggtggctgaaacaatcattcatcatcttgtatcaaatcaaagacaattttacaggaatatttcttttcttttttattatttgtttttctttgatcttttaaatgtatagccatgatt

SEQ ID NO: 475 - DNA, 1695 bp, Cannabis sativa
tttttttttttttggagaaaagttggtaatttaatggtgtaataatgtaatgtgtgtagagccgaaagaagtccaaactcgaagttggacctggggaagtgggacccggttttctctccgccactgagattcgccgatccccgaaaccccaacccaatccagtaccatcaccatggacctcctctgctccgcctcccatttctcaaccctccgattcaccaatatccattctcccctctcacccatacgcagacatcacttcactgtcaggttcctctttagtcttctcccatttgtacattcttgcattctttttctgtttctcattctctctcaatttcaggtccactcttccttttccggcccagaacgccaagtaccatcgagagctcgaagcggcagtgggggtggtcgagagagcttgtcgtctttgtctcgacgtattctttcactctcatatctttatttgtttggttatcgacaaagtgttttacttttattcaaaatttcccatgcattatttgatttaatagtgaatatagctttgttctttcagttatggttgtttttattactctcacagtgtcaagggggatgatgcttgtaaatttgtgcattatcaatattaggtgaaatcgtccttgttttcaagtgatgggcgtgtagttgagaagaatgatcaaactccggtcacaattgcggattttggagtgcaggctctggtcagtttgggtaattaatcaaattcttatggcttgttctgtttgttccattcagtctattaataccttgtgaatgcagattttgctaattctaattcgtttataaatgttagtactttttatggtttttgccaagtattaactttatcatgctctgtaaattattactagagatattaacgaattccaacatttcatgtcattcatgatatagttgtcgttattgctgcaaatattgagttagaatgtgacatgattagttgaaaattcaaaatgaccaggccactcattattgtaagttgtaaatggcttgcttgtagttcaactaacattgatagaagagtaactgcgcaccaatggggaagaattccaaagcaacacatctttaagagatatgtttcaacattagtcatgctttaaattagtgcactagcatcttgaaatggaatagaaagtactttcttaatctatctaattgttataacaacaaaaattggaacttgaccgaaacgtcttttagtgagactttgcctgtattgcttaccaaacttaagtgaggcaataagatcaatgggtgattacttatttagcattttgtgaagtataatctgaaaggtgatgagttatttacttctgaatgaattttcttactgggttgaattttaacttgttcttcactttgcttacagagcttggtaacctgttcccctcaatacctctggttgctgaagaggattccaccttcattcggtcaaataatctagaagatttggttgtaaatgctgtaactggtaactcaagctttacagagagtacatgtacagaagctgatgttcttcaagcaattgacagaggtggaaaggatgcttttacttttgggactaaacctgccacctattgggtgggtttaaatattagtttaatttaagtttcaacaagggagttcgtcgtgttttttaataccaaatttttt

SEQ ID NO: 476 - DNA, 3461 bp, Cannabis sativa
gccattgggagcccaaggttggcctggtacaaactcagctgcatgtgggttcattattctaggaggactgaaatggtttccatcaacaatgtgttgttcaccattatggtaagttgttttgtttcgcgaaacacggtttccagctcggttgaatccaccagacaaccgtggaccatatggaacccttgctgttgctgactggtgaggtgatctcctgacgggagtaactgtcagcataggaggaatgtttacaggagggggcaaaattcctccatgctctttgaatccaggaactgggatagtgccaaagatgggaattgttgttggattgaatggaggtgcagctgcagaaagtttctttgttgactccttcccagtttcggtttcatcctgcttttctccttcagttggcaattgattatcaactgtgtcactattgggtgaatcgcaaggtttttcatctgcgtctcctgctttcgcatttgcatcggaggggatctgtttctctatatctttctcctgccctgctacttcaggctgctcgtttttactggccatagtgtttttagaagcaacggacttttcaactccaatgtttttcaaatcaatatttttagtttccacttccacatctccaacaatgagagtcttcccaaccttgaaggatacatctacagcagatttttcagccttagcatgttttttttcactgtcaagatttttagttttctcctcagaatccgatgtttgtttcacttctacaggcttctgagctttgtttgcacctgcatcctttacagttgacacttcactaactgaggcatctgttgcagcactctcctggctcacctgagagttattttcgaggggaaggggatctttcggtagttgttctgccacagccttaacaattgtcccaggtggagccaaagcaacttctttgtaggaaaaaagttttccggctgcctgaacacttggactaggagaagccttgggaactgaatctaatgaagctggggtaactggggtaactggggctgattttgggtttgatggtctctctgctccaccattaactggtgtggctgggttagctaacttgggactgaagctcgcacttttactgaactttttggtagggttactggttgaagcattaggctcgtttggggacgtctttgctggtacaaaattattgggttttcctcgatgtctcgtttgggatggattgataaagttagtgtttagttttgcaagacttggcctccttgaaccagaaggcttgcgacctgtaagtgaacgacctttgggaacagcttcttgccatccttcatctgagatgtcatcctctgctaaatcaacatttgtactcagcacaactgattgatcaggttggcttgaatcaggtttctcattactaggctctgcaatctgaacttctgattcagatttgttttctttatcacttgagttttcggcagatggaaaactaggcaacacaagttcatcctttggatactcatctgagactgcttcctcattttgccccaattttcctttgacctgggtggtgaagagaaattgcttcctttttagattgtttcaacaaaaaacaagtaaaatataagatattaaaactagggattgctttcttaccttagaacgagctcttttttgggcttctcttgctttcatatcagcatctggggtgatataatccagaaggtctgacacactgattagattcagaaaaagagtgagagaaccaattgttagagtctagaaccatgaaattatgttactgaaaaagaaactatgagcaaagcatgaggtacatacatacatatatccaatttattaacaagagcaaacattacctagtcaactaaacaatcatgtccataaacaaagatgttaataaagttacaaccattaccttaaatgacctttgctagagatggaagcatctggctttggagtaccgttacgtgcagcttcttgttgctccagggccttagattcaaaatactcaagccatgcagccgcatcctgaaaaattttggaaagcatatcaattggagaactaaatcacacaatatgacaggatttgaccatcaaacactatgagcaacgatagtctacctgagtacgtaaatcctcagacccaagctttgcctgcaaaatttgtagggtggtctgttcatgctgtacactcaaggagtatgcttccatcaaagagagcgcaatggctatggcatgatagctggcagcagtctgaaaaaagaagaaaataaataaataagagggagaatatgagtaatgattgtaaatactgaacgtggtaaacacacaaaataattagtggttcatatggttggcaaaagtcccgaacacattattagaagagcaagaaagtaaaccataattaagtgttggtaagatgcagagaacacttttgacaagcatttgtgttcttaaggtgacttgtagcacataatcattttgagagagagagaggggtgacctgtatgtggtcagctccaagtagtctctgattacacttcagagcttcatggagatatcttagagcaacatgcacattccccaaaccttcttccatcatagctacatttatgtacgttgcagcagtgttgggatgagaaggaccgcacgttaagtgtaaaaggtatagtgcacgattgacataccttgtttaaagaagaacatagagtgagttgcaaaatattaatgaccaagtgttgaaacattatgattcaaaagaacagcagcatgttataaagtcttgctatttaattattaatcaattaatatagccatatccattaagtttatggtagaataaaacatttaatgtcaagttagctgagctttaatttattcagaggttgtcttgtaaaatatgggtttgatgcttttttctgtgtgaaactaaataaaaggtgcataactagaatgtatgaagtaactttttcagttgagataaatatggaagcatacttcagagccaattctgtgtgttgaagtcgatagtagaatacagcaagatccccataactcttcattgtgtcaggatggtcgagtccaagttctctctcattaatatccagtgctttttgttgataaatggtagcctgattcaagtaaccggagctttgtcaaattctctaaatttataaattttaaaatcaaatcttgattgatttattctcaaatcattataattcaaagtatacttctattattttattgcatctttcattcttacaaggattgggtcatattgaatggtagtatttatgactagctatgcggtgaatacctgattaaagtccccagtatgatagagtaccacagccagaagactatatgctcctgctgtcattctgtgataaggtccacacaccgacacaagttttgcgagtgccttcatgattgaatat

SEQ ID NO: 477 - DNA, 7185 bp, Cannabis sativa
ctactatgaatatcattattgattaacaataattactgccaaaattagcaaaacagtttcaaattaaccaaggatagatgatgaaattgttaatggatgctagctattttttcattttattattattattattatttttgcattaacatattatgatattaattaaataagaagtgatatatattctctggtggccatcggcggtggtggtggtcgtcaatggcgctttcaagaacatcctcgaagttggggaatgtgaacgtcgttatcgccattaatagggacaaacaaattagccaatctctggtcaaatgggcagtggatcatcttttgcgtggccacaagaaatcaaattgttttattgttcacgtaatcaatcatgatactactcattccagtaagtatccctttcctttatataaatctatatatatatacacacgttgtagtcttatatattataattatttatgcagatactaattcgagtaacaaaggaggtcgctcatctgatgagttgcaacatatctttcttcctttacttggatattgtgctcgaaaaggggtcagttataacttatatatatatgtatgtattataaatatatatatagagagaggtttttaatatatggtgtgtatatatatatatatgttaacgtgcacttcaggttacagcaaaggaagtgatccttcatgatattgatgttccaagtacaatagttgattacattgttaaaaacgacatcaccaacgttgtcgttggtgcttccaatcacaatgctcttataaggttctctctcctagtcctaaccatatggggttttgtatataactctacttattcgattctctatttctctctttctctaaataacaggaaatttaaagaagcagatgtgcccactagcttactcaaaactgcaccacaattctgttctgtatacgttatatcaaaagggaaacctacttctgtgagagcagcaactcaaaccaaaacacccaaaaataatgaaggatccaataatgccaggtaaaattacttccttacatacaatgcataacatatggtggcactaaacaagtttatattgacttttgcttgctatgctgaagtcttgggaatctgattacttctggttctggacaattatctgtggacaagagtaatagaagcaagccaaacagcagggttgatgcatcatcaacagtccaaacgaatttatcggtgcataaaagcgccccatcatttgttagtactgattacacaggcacacacagcttcaattcaccgttgcatagtttccaatcatcaaccacctctaggagtttggactcgtttacaagcttggagagttcaggcgactcttttgtaacacctgtaagtgtagtgtaaatgtaatggtgacataacataagggctagtttatttcttattctataataaaacagcttttcattcaagttcatggcattactcatttgataggatgaattggaagttgagatgcatacactaaaccttcaattaaagcaaactatggatatttacaactcacttcgtgatgaagctaaagaagccaaacaaagggtatgctgatattcatagatgattattatgttataaaactaaatatgattctaaagcctttcacttggggcttgcaggccgatgaagttcaattgaagccattgaatgagcgtagcctacatgaagccaagatggcagaagagactgcaactgctttggcagagatggaaaggcagaagaccaaggctgccactgaagcggctcacattgcagaacggatagcagacatagaaactcagaagagaaaatttgctgaagcaaaatccaacctggaggcagaggagataaactctatgcagggtggtgtccaatataggagatatggcataaaagagattgaaactgcaacagattacttcaaccctgatagaaagattggtgaaggcggttatggacctgtttataaaggatttcttgatcacactgctgttgctattaagatcttgaggccagatatatctcaaggactagtccagttccaacaagaggtaactgaaaaagaaaggcagttttttttattcattttaaaaagaaaaaaagaatagcaaaatctatattttacttgcaggttgaggttctgagcagcataaggcatccaaacatggttctcctagtaggtgcttgccctgaatacgggtgccttgtctatgagtacatggacaacggtagcttagacgacaggttgttctgcaaagactacactcgccccattccatggagagatcgcttcagaatcgcagcggaaatcaccactgctcttctcttccttcatcaaagaaagccagagccactggtccaccgtgacctcaaaccgggaaacatcctgttagaccgaaactatgtaagcaaaatcagtgacgtaggcctggccaagcttgttcctgcatctgtagctaacactgtcacacaatatcaccagacagcagcagctggtacattttgctacattgatccggagtatcaacaaacaggactattgggtgtgaaatcagatgtgtactcattgggagttatgcttctacagataatcacagcaaggcctcccattggtctgtcatatcaggttgaagagtccattgagcaaggtactttcgctgaagttcttgaccccttagttaaagattggccagttgaagaggctttgtgcttcgcaaaactggcactgcagtgctgtgagatgaggaagagagatagacctgaccttggttcggtcgtgttaccagagctaaatcgtttgcgtaaccttggaatggaggatgggagcaattactagtgatattaacgttgaaactgaagacactgaccctcattgggaaaagtgttcagagggggcctgtttgttatagcaagaagaagactaattgtaaaacttaaaaacttgttatatgtattagtgtgtaaagtctataagatcgtgagataagtaatctgaatgaacattctctcccagtttttggtccaccaaggaacaataaaacagacaaatatcttacaattatagtaacaataaagcttataaacaaaaagacttgacaattgtaagatgacaacaattagaaaatcaagtaaataaatatcttattaaccaatgccttccattaatcatttgtttcaatcataaataaatatctaccggagttgcttgacaacatacaaaatatggtgagctagcctacaatattagtcaatacaagctagttggagtaactatttcccttcgtgaagtaagttgaatctgtcttctgaatctgccaggagcaagtggagcaaactaatttcaatcactcacttatagcattgcgaagtgaaaacatattgttaattcataagtttcttcgttcgaaatctatatgaatatgactgtctcaaagaattttgccttaaacctggcttcctgaggggacaaataggtggttacttgatccattggcaaaaaaagagttacctagttgtgggatattgaagccttgaactgtactgcattgccagttctatcaatcaaatgcttttaaataccccgcgtatccaacgcctgtggatagagtttacaatcaagaataaggagaagaacaaagtggaaagcaaagccatttttgaaggaaagctttaagaagagtgaagatttgaactagtgaaatccatccttacagtggttacaagtttatatttgtcatacagaaagtatcaagagtgaaaaaatagtattgaaacaaaataagaactcaaaatatcttaggcatacggtatgcagccagcatcctaaatgtctggccttgtaaagagaatttaactagagagtttgagagttcagaaatttgtatgaaagaagaatagttaattctccttagaagcaagaacatgtaacgggaaatacctgttcatcgtaacattccgagaacgattgtaaacctctctgcagtatgtgttcatatccacagtgtgaaagccagctcttagaaacaatgttgacaaaaaatcttcagagaagtagaatgagcactgatgaacataaataaaaagctgttataaaatgagatgcacaaaagatttttatagttatacgaaaaacatttgccagaaagtgcaaaatacttacagtaccatctcctcgaacataaaagtcctcaccgatcatcctatcctttttctgtaacttgacctaagatattgaggggcatataagaaatagacaaagttgaaacttgaaacccaccaaagtgatgaaattcaagtcactgaaagaaagaaaaatctttctttttcttctgagcctttgttttttcttcctcccttttgtgtacttatgaatcaaaactaaccatctctaagtaataggatgttgatttcacattagcttaatggctgagaaaagagcttcaagtcttaaaacccaacaaaagatttactaaatagataaccatgatagagaggggactaattgaaattaataggttatcagacttccatcctttgattcttcttctcttcttctctaatattaggtgtatttttccctatcattttcttgtacagattaatcatgcataattagaaagagatttatcatctccaagagcaatggtggatgtaaatatgcattagaacactcacttgagcaaaatctccagcagcataatctcgtaatagaacataaccattgggctgcaagaattaaaagccatatagcatttaaattttaggaaagtataataaacttactgggcaaatatttgaacccataacaggtacctttatcactgttttgatgttctccaatatcaaaggcattttacttggagaaactgcagataacatgaaaacctgtggataatctttagtgttcatatacgcagtttacccactccctcatagacagcataacgtttcatgtaattttgcttgtaattaactacttggtcttaccaatgtaacaacatcaactgaaaaggggtcaattttctcacaaagagactcaagtgtaacatcacagacaattgcattaaccctgtcttctatgaaattcacatttgactgcaatcattacagaaaaggtaacaattagcatactcagccggtcaatttgagaaataacagcacatctctaaatgcagagttggaaaaaacaaggcatttgatatgcagattcagtaatacggaaaatagtttaaaaaatgaaaagaaaacataagtaatgattgcttgataattaatatgtttaaggtcagattggatgatagaaacaaaagaacattaacaaagtatttgcaattgtaacactaagatgatcataataacagagaaaagctacaaacaaaccttaacaagctcaattgcatgaggtgagagatcacaggcatgaacataaagattgggaaaggcagccataaggggaaagagggtacttccagacccacatccaacctgccattttcaaaaatatcaaactggacttcgttcaaaagcaaaatcatataatataataaactaactccaaaaggtcaaataactacctccaaaacgaccttttcatttgagcagacttcatcttctgcaaagtaatatctccaatccttctccaagtaatgtctatccttgaagaactgcaaaaatttacaaagttaaacagaacccagaagagaaaaacagaagataaatgtattaagagagaaaaaaactttgtcttggtggcgtttgtagaaattgtcccagtatttggtggcatttctttggtagtggtcttcaagagagactttgttatggttcaaacattttaaggccgtcggataagtgtgagtttgcgatcgagtgacggtggtgattaagttagaaaatggaggtgagagtacaatggttggagctacagtagctctcattatgcttttccgttacatctttttctggagaatcctttggttaaatacatacatcgaccacgtttggctaatctacaattaactattgatttttttagtaagaaaaatttaaaaaaatatattttattctcacttttaaatactgaaaattaaaaacacagtaataatctctagaactgtaactatcgttgtagtttcttattatctaatattgtcgttttttaaatttaaagtatacaaaacgacttcatcaaaaaaagtatacgaaacgacagcgactttatttgtcgtttacccgccaaaacgacacgttgcattgcatatgaaacttttgcgcagtgcgccgccacagatagagggatccatcttctccacttcagaatatattccttttcttatttaatatattctcaaatctaaagaaaaaaaaaagaaattaaaaatatttctctttgttttcccaacgttgtggtggatcgctcttgcgggtctctatttcccgtaccagaagcaatctaaaaccctagatcagaaaacgagctacgattcctgccatggctggctcaatctcttcctctgatcacgaacgagatctttccaagccccgtctctacaacccctaccaggacctccaggtacctagcagaaacctctatcagctcccgacttcccccgagtttctcttcgtcgaagaagcacgtcgccagcgtcgatcttggggcgagaatctcaccttctatactggttgcacttacctcgccggtgccgttggtggcgctggaactggccttgtgactggagttaagtcgtttgagtccagtgacaccatgaagctccgtatcaatcggattctaaatgcgtcgggacattcgggacgggtttggggaaaccgattgggtgtgatcgggttactatttgcgggtttggagagcggtatcgttacattgagggatactgacgatgtttggaatagtgtggcggcgggtctcggtactggtgcgctgtatcgagcggcgaggggcgttaggtcggcggcagtggcgggcgcggttggtggggctttggtcggggtagctttgacggcgaaacaggcggtcaagcgatatgtgcctatttgagaagggttcttgtgagtgtcactcaaattgtttgtttaatcttccaattttgatcttttaggtaggttcggtccattgaaaaattataagaatggactttatt

SEQ ID NO: 478 - DNA, 4043 bp, Cannabis sativa
tgtaaaacctagctcccaccagtaataatacacaaaacataatccatgtcagttacctcacgtcatcatcgataatgccctcttctgagggtaccccaactctcattgctttcgcctcatcaggttcgtcctgatttgccttgagtgcagcaaatatctctgcagtagcatgtagactgcgggaccagattatgcgcaggcgagggaagtgtagaactagcaatgacagcttagatataacgttggttggtgtgacatcatctccaatatcagttgcagactgcaaaattgattaaatgcattaaaattcaaaacaattgagttttcaactcctatccccattctatattttctcatctacttacctgaaatgaaaagcttttatcctgtgaaaactcaataaggaggacaggaatcttataataccgaaccatcatttcaacctggtggtacaggcggcctgatgtaaaactcatgaaaagatcctggatactctttctctccacacatatagatggtgaaagaatataatccccaacttccaatgtcactggaattattcgcatgcctttctgatgaagaacattcggaaggctgctcatgaattccctcatgtcaactatgacctgaaataaaacagattattatgcatatagtcttgtgtgacaagagaaacatattgcagagggtgcaatccttcacctgcatttctttctcaacttcctttcttccccctgcttttctcgttatggaattttgggaagatgtaccttgtgcctctacagaagaattcaatcccaggtaatttgcttcctgataaagaatccagttattgatccacaattaaagaaggctatatgaatgaaacttttcaccgagaaataaataaataaaaattggaagataaagcagacaccagggaaagttgaaaggagataacacgaagaccaaggctaaacttttagataattgtggttctaaaatccaagtgaacatgattgtattggcatgttatctcacaaaatgaataccaaaaagaaaatcctatgatggggtggaagaaaaaccaaacctgatcgactgggatcatcatcaatgatttctgtctaatcaatgattcaaacgctccattctccctacgtatgctagcctcaaatttttgcacctctgtagaatcttcatagaatagaaaataaactttcaacttcttagagggattttcagccttgtggacttcaatttccctaacaaaggtcatatctggatgataaacaatgataacagaaggcttcaaaatgtcaagtataggttgaccactttctagggcataaaagtatgctggaggtattggtttattagcacttccagaagctgtagcttcaggcacttgaacatgtctccgcagaaccactttgtctgtggatgcaacatgacaagtgccttctgcaaaagcacctgcagctgctggatcaacttcattatcattattttctgagctagatccatctaaggttgccttctcactactcttattatcattattactacgactcttacaattgtttggggtttcttttttgttcttcactttttgctttcctcttccacctccttggccactagcttcaggctgaggatcaactccaacattttcatttttaagtcgttttttaatttctgatgctgctgctactagtgcatcatgttcctgcttgtttatgctgctaggttctacattttttgcaggtgatacaggtacaactccatcaagaatcccaaaacctttgggctcctttggtttctttttaaagcgtgtttgcaagtcacgcagctgtactttgttcagcaagtagttctcccattcttgttgcatgaccttcacaaaaaaatgagcaaattacaatttattctttttaaatgataagcagttagcttgtcccgtaagagtatttgtgttcagttgcaaagagaagtagaaaaaatagatgaaaagagaatccaaaacccccctttacccaattaataatacaccctttctagcactaaaaaaaaggtaatactttcaccaaaatgcttgaaattatgagtagccaatatacatgctctaatctcaactaatcaatttgacaccaaaataaagtgaatcaagatcaaagatttgaaagataaatagagttttaaatggaaaaaaaatatggcatgaatagttgaatacttagcaaactatacagtttcacacacttcataataaaaaattaatcaagccttctaacaaacattgtgaaaatatcagtgcatatgaccagaagaatcatcagacatcatcatacaagattgctttccaatactttatgcaacaaagtgaccaaactgatgtacaaaattagaaaaaaagcaaacctttcttggaccatttgtgatgcattgttcaagctgtatgcatgagcgctcatctttgcatgccaccagaacaataccactatcatcctcttcatgtctatcaagttcttcacttgataaagcttgcttttgtctttcttcttctatctcttcaaggacctccttaataaattaagaatgttgatttagacaaatctatcccatgatatcagacaaataagaagtaaaatatatctaattacaaagctctaagcttttaatcaaattgatcagaacagtatagctacaaaatgattgaggaatccaacggaacacatagaaacaggaactcactcactcacacgtaacaccttccacttcggtgcttcctccaaaacttcatctaaaacaatcgaaacattcgggttcactgatgaagagccaccaacttctacacaggaatgtgaaaagaaatagctattcagaaaagcaacaatacaacaatgagggtgaaatgttcaacaatataaaaacactcatctcgtacttttattttcattatcatcagcagtcccctttagttttctctttttactggttgaactcttactgggactgattaattttgaaccatccgatgccacaaaacgatatactcttttctttgccaactcaaatatcttgtagcttgactctgcaaacatccaaaccgacctataactctctgaaactcgaagtgtatccaaatacttcaaataagtcactgcatcatacctaccccaataacaaatcaaaataaatcaccaaaacccattattatatcaaaatttacatggcaaagtaactattctaagctaacaaaaatctaatgggatataagtttcatatgtatgtgtctgtctgtatatataattcccttgcactaaaaagtcatgctcaatcagaaaatcccattattaactcaaaattggcactgaaaagaagcaaactttcatctaaaaaactactgcattagtttaaataatgaaaattcatatatgtatatatacctaacaagatagtccaagagttttctgagtgtcttcaagtcaaaaacgagctgcttggtcttcttccccaaagtatgccaaatgggatcgagttgcctcctcacaatctcatcaaaagacttaaacaatccattctcaaccgtcagatcctcaacatcaaccttattcgtcttcctcatctccttcaaacacccatccatgacctccaaaatcgccttctgaatcgccaccatgtgtttagccatcggaaccctaatatccaccacttcaggagcctccttctccaactcctgagacacataaacatggaaccgaggccaaaggtgcaacttcctaatacacaaacacttcatgatcctctcagctttagaaaaccctgaaaccatcgagtgaggcttatcagaaaaagccctgacgtaggcatctcggttcagggagcggaagattctgacgatgaaagcctcggtggaggtctcggagagagaatgagcggtgaggataactagcccggcgatggcagaggtggggattttggagttgaggaggtcgacaatgagaattcgagctgtgatgaagaagacggagccggaagagtagagagagaggcgttggtga

SEQ ID NO: 479 - DNA, 2780 bp, Cannabis sativa
atatatataattaaattatatatgttgaacccagctaaattttgttgagatatatatctttacattgtaccaaattaaacactcaaacttattatcccatacaaaaaaaaaaatgcccacctcaatttccttcggaatttgttacaatatgatcgatacaaataaatgaaatacacaccaatatacaattatattcccatgatccaaacattactgaaccaaaaaaataaattaaaagggaaaaaaaatcatgttatgaacaattttcaactttaattcaatcatcatcatcatctcctcttggctagctggaaattccttttcaagaactggtttgccgttcgatcattcctgtgacacaaaactcttaatatcgtgtttggatcggacctatgccaccttccggtggtgggaggcataggaagcttttgtacaagtccagtattaccagaaccattgttgttactactactcattacaactcctattccactagtttcacatgttatgatactgaaatcttccatgagttgctcagtgcattgccccatcaaacctatcactccttccaccgtctccgcctccctttccaccactccctccgtgatcaacccttcgcctcctccactcgtgcagaagaccctcttcaagctctcaaaatcctcctctatcatttcctgatcagaccggaggaaaaccctagagcttcctccggccaacaagaccatcaggaaggcctcgaacgaggccttcatgacttccctcatggccagggcttgagcccggtcagtgagcatagcgctcattagggttaggttttgttttagggttctgagagccggacgaatccttgcattcgcgacatcatcaacgtaaagactttcgtagaagactgagttggagtcaaggaagatgagtctgtatgccgcgacttcagagacgtgttgtccggccgattggatcgacgagtgtgccctttcgaagtaagagtaggatgaagagggagtggtattagaagaggaagagttttcttgtgcttttcgagtgttggtgaagcgatttcgggtggagggaatgattcttggggacatggagagtgatttgtctaaggagttgatgtgtgtaaggagatagtgtaaggtattgagtcttatataaaggcgttgtgttcccctacttgttgattggcgtggatggtgtccttcatttgtgataccattttggtatgattcttctagatttgtaccacatggacttgctttcttccatagtttgaggaactttgagtctctattgcatctagttagaggaggtagtgttggtacatagctttgtttcgaacctaaaaataataatcaacaaacaagatataattaatgtgaaattattaattaattagcatatacttatgaagttattaattatatatatattaccacatgaggcaacaaacgtagtatagtcttggaagagattctccaaaccatcagcaagatcttgaactaaatcttcagtaattccaataggaatttcaaagaactcttctactgtttccttagccaacctcgttagctccacagctgattgtgcatatggctcagatttggactttggattccatgtctgcacacacacacatatatgagtaattattagtaattaatatataagagttagttaggtatataatatgagcattcctattaggtaccactggtgacccgatacttagttagaccaataggatattgacacataagagggtgctagacttacttcagtttctttagctctagtaagacattcatgtcctttggccaatttctcatgaatccacttcttcaaaaggttcaatataacataatcaacttcataaggaaccatttccctaacaatagatttgccaccatcatcacagtcaacagagtcttcgacaaccatttgaactaacatcttttctaatttcccagccctttgaagcactccaactgtctcacatgatagtgttgacaccccacttaagtactgcttcaaaacagctccataacagctgtgaagggtcaccgccgcaactcccaccgccgtcgagtgccatctctttaatatggggctgaaaccttccctctctttcaaggccaactcctctgtttctttggctaattgaagtagagcttcacttgcttcctcttcttttacttctttggaatttgcatgttcaattatctgccataataagttatgatttattagttatttaaataatttataaaaatgttaaataacttattgggttcaaaatgtaattctagcaaactattttacattaatataaagaaaaaatattcaaacatatgtgcaataaataattaaacactacaaataattataccttactaataattttttattcacaatataaattttttataattaaatattacttttagtcaaaataaaaattacttatcactataaaataatatttaatataagttgttattaatttaattttaatcactataaatattattataaaaatcacatttaatgaacaaattgttatttttgtaactaatacttttaataataatataaaaaatgataatttatgcttaattattttttcattttagtaataaattttattttgattaaatataattttttttagtgaaaacatttaaattttatgaggtctaaattatgtacacctataaatatagtctgtatattatatattataatgttcattttcattttaataaatgttattcactttg

SEQ ID NO: 480 - DNA, 11353 bp, Cannabis sativa
  modified_base (10803)..(10806): a, c, t, g, unknown or other
ccgaaaacccgacctgtgtgcacccctaatgttgcttgtagatctattgccactatctcataggagagcaacttatgaccaagatacgaacaacatcttgcatgtaaaatcccttgaaaaaatagaagagagaagagatcaagccaacctaaaactgcagacctaccagcaaaaggtggcaagacacttaaacaaacaagtcaaggataggaaattcttcatgggaagcatggtgctttgaaaagtattcctgaacaacaataatctagcagtaagagtctttggacccgattgggaaggccctagcaagttacagagataactagtaagggagcctacaagctgtgaaggtacaatgagaacatggagaacgcctttgcaaacactaccagtaagcagcttatagaatgctactttgcagtagttctaccaactaatcatcagtgtaaaaaagagctagtgcccacatccttttggttgtgcgcccaccgttcttttacagtggcctttgctttacaagtcaagtaggggtagccatttgatataaagaagtgaatctttattatgaaagcttgtagattaaatttatgtaagtttcacaacaacaaagacaaattaatgaataaaaaacaatttttatgtccatatatattgtgtctaaaccacttgctaaaaagattaacttcttagagttatttttatcaattccacatgtgtacaacaagtagcaccccaagaaaattctcaagcaaggtctacaaaacttggtgaattgcaagtgactaagagatcgtaaatatgcatgctcacttgggggcagtgacaccgtacaaggcatgacactagcacaaagaacttatgcaaagaaattttaacacttagtataagctactaagtctacctctaagtcatgtgcaggcatacttcaacttggcataaaataagtgaatctggatacttatatatcaaggcaataagaagatagccatgattaaaaactgcctggtcggtcacacaatccataatgaaaagctttagggctaaatagtagtaatgtacaaaaaattgaatgcctataggccaaaagtatgaaaatgaaagccctaaggctgaaaataagtagtgttcaaaagtaaaaggcgagtaggccatacagaacatgaaataaaatatgtatactaataaaatagtaaagccaaaatactaataatctgaaactacatgtgtgcaagtgtaggtggggctgactcagaagctgcatagtctggattgccgaagtgtgggtcggccatagcctttgcaggctggccgaccacctggtcgaagtcttggccagccacctccttagtaggtgtgtcgaccatctccttatcaaacttccccaaggatgattcttctggctgaactatgatatggtcctcttctaacctgctctcaattagtgttttcccttgggccaatgtgctctgcgggaaagaagcatctcacatgtgagaaagattagctctggagttgcacatcttgaactcatagatcagctctgaagataagccgacgtattcttcccttatggcctgctagccatcaagggctgccttgaacttctcctcatacctactaagtttagtccccaacctggggttctaagcagtgagcaaggtattctcctgattcgtggtgcggagcatgacctctaaactagaaataatgtctcagctctgttggacaagagcctccatatcagccaaagccttgtccctcgccagagatcagcctctagggtttttacgtgctcctagagagcactcgaggaccccctagagttgccatgcaaaaagctaagcttcataaagccctgaaaaataaaataaggtcaagattagtgccaaaagacaacaatggtcggccagcacctctatagtgcaatcaaggtcgaccagcatctcaaagacactactaatggctagccaacttcctacaacagcccctatggccaactaacttacaataacatagaaaaagtgagcaaagttaaatgtgcaacttacaaaggccaactcttgaagaccgacgaaagagagcctctctggatcacctcaccaagctcctacaacttactatccatagtaaaaaaaggctatatctagatacctatgaactacctccataactctatgcccatggctgagcctgctccttgactaggcttctgggtgcccctggctgaaggccattccctcctcactaaagggtcatccatcttgggctacccaactggcacaggcgtaggaggaggaagaagagatgaacttgcaacatcaccagcacgggtggtcaaggccaccttagccctcggacgccccaaaggctaatttgaaggtccccagctaaacctttgaatttggaagacatatatgtataagaaaaattaacaaagttagaatacaagttacaaatattcaatgaaagataagaatataaaatatggtgcaatgaactatcaaataccgtcattcttaaaagaggaatcatttgaatcctcaacgactaccttgcccttgcctttagatgtaagtaaggagtgagtaggcccagtagagctctgacctttaggcctaatctatagagtagcatccctagttgtgcccccgcaatccaagcgttggtggaggaccgtctctcttttctcaaaatcccagactattcgggatcgaggcacatcatcatccatgtcaagagcatgtccaccccaaaggcaggcctcctcagaagctggggctccattcacaccacctaatgggccctcagcccccataacaccagaattaggaggatacatgtcgtacttctaaaagttggctacactggccaaccttattatgttcttcttcgctacggggaaagacatgatgttgttcgctctatctctgatctacaaggtagggatggagtgcttgtaggtaggaactcacttgaagcggcaatgttgattctcctagacatcccaagcaatgaagtaattttgggcatatccactaactttggacataggtctgttgttggtgtcacccaaccactagtggctaacctgactgaagtagaagtaccccgtccagttttgatttggagtagatattagattaaagtaatacctaatctcataataagtgggttgaggctagcgtagctcagcatagagaacaaacattgctaagaggtatttaatactttttggggtgatttatgttggacaaatcctgaagtaagcgctatatccctaaagtatgggtgtaatgtcaacactgcccctacaagatatggtgctctaaccatgccatccaaccaaaggtgaatcggtgtgctctctgatcccttgtgggtatctcatcgtggacacctctgactagtccactcgccagtatcctatgaaaagtcttggcaggaatacaagatgaaggagagacccacatgtctccttgtgatccagcatcaagaatctgagcctctcaagattgtaccaagacatggtctagacttaacaccgagggctggctaagcccactcaatggcttcctgtcaacatcatgtgagcctagagggtagttggagaggacatcacaagtcctatacatcttcctccttaaaggcgcagccacctacacctcaaacttagtgtcagaactcttagcaccttcgtcaaccaccaacacctctgcctccctaacccttcgacctccattatcaaggggttgtttggcctcctctattatgccaactctttccatcactaccaccctagagacatgaggatcatatggtggtgcactaccacacaaccgcttcgttctggccatagtatatcactatcagtctagagaccacgtagatgggagcaagggaatagattggatgatatctctcaaaagtaaaggtgatagaacctacgacacagtggttgtcacctccccacaccaacactcaaaatcacctacatagaagagacaaggggaggtgactgacaaagctacaaggtacggaaaaagttttagttaatcgtacccaagggtaatttctagataaattacattgtacaagactgtgtatcaataaagtaccatctcaagtatatttacttagacaaatggtgagtcctaagttgtgaactttactataatggactcaccactaagtcttatacggagttcccaagggaaccatgcataggatcacagttgtatatgcctacaaggccatcacgagacccttgtcaaggtcaaagaagacaaaaaattggctgcccgcttggaaccttggtcttggcccaccaaggttcctaagcacatgagggtcggtgaggtcccatgacccagccaagggcctgctaggaaccttgtgtctaggcatgggccagctagcttttggggtaccccctatggccaaccagaccccgtggtgaaaacctatggctggctaggtcttgaacaagacccctatggctggccagggtatatgttggatctaaacatttgtttttcaagaactcaaacatgttcttcatgactcaaagagccaagaatcacaatgaaggtcaaaattaaatctttttcgttaagaaatcacacattatacatcctaagacttccatgcaaatcaaaataccaaaaaagattataatctaacgtgggaatcagaacacattcaaagcaaagaaaggcttcatgcaaatatggaaaaatcaactaaatcacgtaaatagcgagaatagaaagcttacccactacaagaaaactttagtgaagagaatggaaagcttggatcatcaaattggctcaaaaatcttgtaagttttagcaatctggggcttcgacgtatagagagaaggaggagctttcaaacgtaactttttctcgaaaaagaatgtaatgtggaaggtgaagaaaggtttccctccattaagctaatatagcttctgtgagaccacttttttacttgccatgcaatgttcaactaaaaagcatgtagaagtacaatgtagtaaacttactgaaacaaatgagatcaaacaatcaagagtagtgatttcaaagactaaattgcaacaagatttgctcaagtaaggctacatcagtcccaactaagccagaaagtccctatccacatagacgtccgcataaggacttggagggtaaatgttatcccaattttttcccagttatcgtggcatgtcaacatggccaatatcagtgccacgtgaccgtacaactcacaatcaagaaggtgaagtcatttacttagcagttcaacaaatggggagtccaagtactcaaatttgactgacttgttcactatattagcgtagatgggtaactgaacatagatttgggcaacgacactttcacctaagaaacctactaaggtcatttgcatctcttgagcatttagatctttgatttccatttctttcaatacttctacgaataggatgttcgttgagcatcctgtgtctactagcatttatttcatttgaatgtgggccatgtccaaagttattatcaatacatcatcgtggcgatgacttaactcaatagcttcattttgactaaacattatttggatgtctagtccctcattgtctattacagtcattcgtctgacagactaaactcagctagcgtgggtcgttgatgaccgaatcgagactccacttaaatttgaaccaccaaaaatcacattcatagtctttttgatttagggtgggggagactagctccaaattttatcgtgccctttctatacgtgtagcgttgaatccgtttctaaacaatcttggaagaagccctctttaaccaacctattcagttcgactttcatttgtctacattcataggtttcatgtccatgctctctatgaaaagtagaatatcagatcttatcccttctttcggtatcaatggtcatttttggtgagaacatagatttgggaaacgacactttcacttgagaaacctactaaggtcatttgcgtctcttgagcttttagatcttcgatttccatttctttcagtacttctacgaataggatgttcgttgagcttcctgtgtctactagcatttgcttcatttggatgtgggccacgtccaaagttattatcaatacatcatcgtggcgatgacttaactcaatagcttcattttctctaaacattatctggatgtctagtccctcgttgtctattacagccattggtctgacagactaaactcatctagtgtgggttgttgatgcccgaatataaactccacttaaacctgaaccaccaaaaatcatattcatagtcttcttgatgtagggtgggggagactagctccagattttatcgtgcccttactggacgtgtagcgctgatactattgataaacaatcttggaagaagccctctttaaccaaactattcagttcgactttcatttgtctacattcataggttgcatgtctatgttctctgtgaaaagtagaatatcagatcttatccctttttttcggtgtcaatggtcattttctagggccaccttgtttccttcatccctctcaagctttgcatcaattccatcagtgtgataatcatctaagggagttccttttcattttattgattctcggcttgcctgacttgcaccatgtttgttgcaattgcccctattgtgcttctgttgcagaacttccaggctttgtttcttctttatggatgtgctgtcattattctttcctttgtctcaaagagaaatgaatcttccaaggtcgtcgtttcctttgacacttactctgcatgttgtttttctttaacttctagtgctacatacccccatgccatagtaagagccctcgttaaggacaatcctagctctactattaatgctttctttaactccaatccatataccaatccttgcattagtgtttttgttgtgaccgaatctgtgaattttttgatactcagatactccccactaaaactgtttatgaacttttctaaaggttcatcatgtccttcatggaataatattaggtctgtgttaactttttctgatctaaaacttatcgcgaagtttgtttgaaattttagaattagatcgtgatatgaatttatcgtgcctaaagcgagtttatggaaccatcgtagggcggggcctctcaatccctgagtaaaggttttgcatttaatggcctatagatcttctaatggaaccgacactgtaagcatcttttgctcaaactagcatatgtactctgatggatctccaactccatcgcactctcggagttttggtgcgacatatttatgtggtgcttctacacgtaggacatggttttcgaacggaaattgcatggacccttccattgttccccattcactacttattcccatgtgacttttgctttcagggccaataatttgttctacatcatctcttacaatttctctgcttctttattttgaatcaggaaggtctctggtgtcattggtgccgtagtacgtctttttgggttgtacaaagtgcttctgcttctatgatttcttctacttcttgcctagttctcctcaattgttcttggggcgatgggttcctcgagcaaggttgtttttgtttccaacacctttcatgcatggggttgttgtgatttgaattttcattggtttttttttctgctgtttctgccggttgatggttatttgactcttccattggtggtgggtgttgatatcattgaagaactaccttcatctggctattttcactttcaagtttttcaacgtgttccttctgctaggctatttctatttcctatgttgctaatttttcatccttgttttttaacctctttaagatttcatgccctggtgggtttgtaggtggtgtttcgttatgctcattctgggtgtttgaggtggtctccttttcttgacttgaattttttgtttgtggagtcataacattttcttgttcattcgccatttttttaaaattttttggagaaaaaagtaggaaaatttccttgaaattttaattcttttttatgtaaaaatcttttggaaggaagagtaaggttcccacagacggcgccaaactgttttgaccaaaaaatagaaagatttctttataaagaaaataagtagagactttttttagtgggttccttttcttccatttcttaatccatgccccatctacctgaggctagttcccccttttattgtattacattcttcgcatgcatggctgatctgtctctttttaatgcgtgcgaatgacacatgtctttagttttcttttgttaactttagtcgacacgcgtccttgctagttgttttccatattctgaatttattgtttctatttctttaaatttcgtttattttgttgtaggtcgtgtcttgtcttattcaattttcattttgtatctttgcatggtattgtatttaaattttcttgacattgatccgtctgaggtcgtgtttatttttgaattgtttcttgtttacttcggcataaggtcatatttgaccttcctcgatcttagatcaatcttggcctgccctaacgtatggtcgcgtccagcttatattggtgctaagctatgctgatcttacctcggttcgagatttttcctgggataagggtctcgtcttgggcctgtcttataatttcttcgtcgaaaatcttatttgggctatccttggttgaaaatggccatggcttaacttagaataaggttatttttgggcctatctcggaatgtgccgttttaagtctatctcggcataaaaagtcctaggcttcccttggcacacacagctgcctcgggcctatctcggcatttgctgtctcgggacatatctcagcaagagtattcggtttggtttttattagtgttctggattttatttcagctttaatattatatttctcttttgtctttttcttttttttgccaatagacttgtccaacctgatgggtcgttttattgcgtccaatccaatagattttttattgggttttataatttttaaactggatttaagtgttttattttcttgtcttttttttcccccaaacaatcctcatatagaaaatgattttgttctagtcgtcgtagttaaaacaagaacgattaccgcacaatctagactctaatagtgacccttggttgaattcaactctcaccaaaacatttgaatattctttagtatttttcaaattccatgctatatatacataaatattattaatttctctattcacatcgtgaaaggttgaacacggtacgtacaatccgctcctgtaaactatacaataactaattacctatacacgtatctatatctagtaatataaaacagtgtcatcattattcaataattgggcaaacctctgttcaaaaaaataaaaaataaaaaataaaaaattgagcagaccttatatatattgaacaagtttcacttgtactatattaattaacatatcttatgaataaaataacaaacttttaaatgtacttaatatctttcgacaatgaaggatatataataacaacaaataattaattataaatttgtatattccaaaccatgtaggtgtgataattataataatgttgcagtagctactctccctgataattaatgtcaatattaatacaatatactatggtattaatttaaaaaaccctaactacaaatacataattaatttgagaaaaacattgtgaacgagagttgctaaatatatacttactgacttcagattcatacgtttccctattacattggaccttcaaatataataaaaactgaagaatatatcagtaattaaaatacttttatggaatcacgtaacatatatgcagtcgtaagatcaataattaagacttataatagagggagattcatgagtcttcaattattaaagttggtacgttgtcttgtattcttgtgctaatatgttatattatatttttacaagttgtagctaatcttaaaaattaaataaatatttatattccaattttcaaagggtctgactggagagggacaccacatatttgaaatgcacgtgaagtggactttagggcaccagaaacccaagtttcaactccaatgaacacgtggacccctgttagggcaaaggtttcttctcaagcacaaatgtcttatcaataccaagaacaagaaagctaaggtttcaaatccatactctgctcgatcttacttcaactgaaatttcctccagtgtgaatggcctacaatactcattaaccaccacaaaccgctagaaaatgatatatttacatatatatctaaattaaaagaaaatatttatcattcggtcatggtttaataattgtaatgagtcacttgaaagacaaaagttgctgtcctctttagcatttgaaggttgggtaaacgacagcgaaaaaggctgtaaggacaaaaatgtttctggcaagacatagcctgtttcttgcccctaacttttatttttaatagtataaacttctctaggatagagttgggggatgaggtttagtgatccgttcaaaaacactacaattttattgttagtgtcctacaatttagaagactaaaaataggatagagatacaaaataattttaaagaaaaaagttagcaattgtcttttttaaaaaaaaaaaataataaatagcaaaataattaaatatataataaattagttaataaaaattatattacatttattacatattattttttaaaaatatannnnataattaaattaagttatataattcatttagtattgcatattattacgaaatgaaagagaaagtaatagaaatcgatcaaagaacaaagatgacggacatgactatatatagcactcacaactaacactcagctaataagaagcagttagttaagaaaataactctaactaactctgttataaactaacagagtacaagaaaagaaagaaagtgtaacggtaataactacttcctatataactgtctattcctaatacccccatcaagatggagcatatatattgtagatggacatcttggagatatgagtagttaggatgggagaagacagaggtttagtaaatgtatctgttagttggagtgaactcgagataggtacgagttgtatggtggagtttttgattttgtctcgaacaaagtggcagtccaattctatgtgctttgttctttcatgagaggtcgaattgtttgcaatgtgaattgcagactggttgtcgcagtaaatgaaggcaggatgtggctggagtatctgaaaatcctgtagaa

SEQ ID NO: 481 - DNA, 732 bp, Cannabis sativa
aaataatagcaatactcctatgccaccatgagattgtcctataaaaggccccaaaaacaaagaaacagttttcttactgctctcgaaccaaacagagttttctagagaaaagaaaagagtcttacaccctctcaaaatgagtctcttcacaaaagccttacccttcggttctccggccacggtgaccggactgctcgcatttctgttcgctgttttgtttatggcacctcaagtctccgctaagcgttggattgttggaggaaagatgggttggactacaaatgttaactatactatttgggctcaggacaagcacttctacaatggcgattggctctgtaatttctctatctcttctcttttatggtcttagattcatttaccgaatctgtagttttctttacttaaaatctcttaaccacttgtttttttttgttcttcgttgttggctctttctaagcttactgctgtagttgtttacatttagatctgaaaatgtgtttttttctgtgaaaaaattgagactttattatctgaaaatgtaagatgtgttcttgatttagtgttattatttgttgatcttttaaatccttctagtaaactaaggattaatttagtgtggttgttatgaagttacattggtgaattcaaggattccattgttgtagctgagatttaagctcattctttgtttggtaatcaaatttggtttgcccagatctaaaatgcttg

SEQ ID NO: 482 - DNA, 5695 bp, Cannabis sativa
aaaaaaaaaaaaagaaacccaaaaacaactcaagtaccaactaacttagatccaccagcttcttcttcttcttcttctccccacttgttcacatcctctgcaattttctagggttagggttttgtaaaactgtttgaatcatataacgttgtataatcattaatatttctgtatcaaaagtataggctgtgtacaatgttgtagtgaattataaggtctagatcaaaatgccacccaatactcaaattttagctccaggtctaaatctctttccaaaactaaaacccccaaacaaaactctaacttttcaccaaatctcagtactaatcttaacttttattgcctatgcttcatttcatgcctctagaaaacctcctagcattgtcaagagcgtccttggacccaacatcaactcaaattcatccacaactgactccactgtgaacttggctgaatcaaattcgagctcgatcgataccggttgggctccttttgatggtccagaaggaactcagcgattaggcgaactcgatctagcatttcttttgtcttattcgatcggtatgtatttcgccggtcatgtcggtgatcggatcgatttgaggttatttctagtgtttggaatgatgggcagtggtataatgacgataatatttggtctaggctattggtttagtatccatgttctttggttctatgttagtgttcaaattgtttgtgggattatccagtcaattgggtggccttgtgtggtggcagttgtgggaaactggtttggaaaatctaagagaggtttgatcatgggggtttggaattcacacacgtctgtggggaatattattggatctgttgtagcatctggggtcttggaatttggatggggttggtctttcttggtgcctggaatgttggtgattttagttggggttttagtgtttatgtttcttgttgtgagtcctgatgatttgggatttgagcctcttggtaaggagattgagatgagtgtagaagaaggcaatgtggagaattctgtagagaaagtggagtcagagaaagctgggcttcttgatcaaactgagaattctgattctcttgttactgagaattcagatactcttcaagctgagaatactgattctttagctgcaattggtttcttagaggcatggaagctaccgggtgtggcaccgttcgccttctgtctcttcttctccaagctggtggcttacacttttctatactggttgcccttctacataagacacacaggtattaatcataactgtttctcttaactagcaatgttaggcatgtgaaacttcatgaacacattacttatgtagtgaaatgaaatactgtatgaaatgaattgttaagtgatcactgatcaaagccacttttaagtttgttccttggtttgtcatggcagccattgcaggtgtacattcgtcacacaaaaccgcaggaattctgtctacaatattcgatataggtggagtctgtggaggaattttggcaggtttgatctctgatgtaattgaagctcgtgcccttacttcaatagtattcttgttactatcaattccagcccttgttttctaccgggtttatggaggcgtttctatgattgccaacatatgtttgatgttcctttccgggttgcttgtaaatggcccgtatgcactcataacaacagctgttgcagctgatcttggtactcagaccatgataggaggaaactctcgtgcattagctactgtgactgcaatcatagatggaactggttctgttggggcagctcttggaccacttttagctgggtatatttccaccaaaggatggaacaatgttttcctaatgctaattctttcagtttttcttgcaagtttgttcttgattcgtattgctagaactgagattaaagggaagttgaacgaaggaaaatggtgttggaatactgtagacacacattgagtttagttcctttttttttcttttttgaaggttacacttacatgagctttcttccctaatacttttatttcatgttggaagaaagagcagagcacaatgataaagttgctcaagccatatttttgcatcttattctttactcattattatcaaatttcatatacatgtacaaagacagttactgaataaaattcttcctattctatttggtttaagataaacattttcctttctgttttacaaataattagcattcttaagttgtcaaaatactaatgttgtaacaaatattaaatactaaatatataattcttgaaagtggtgtatttggtgtaatcttgtactttatcatagaaatcatttaaatgagagtatccataaataatggttaacaatccaatcaatcagttatatacagtttcagtgtacgtttagaaaaactgatattgcaaagagctaagaataatgtatttacaaattatttcgacgaattatcttgacctcccttattgctgacatggtcaagaggtcaaagaaagacaaaactacaaacacttgtcccaaaatttggtgagcccacgtatctgttgttttctcttccatctatccatgaacccaatggggcatcagaaaagtaaacgagaaagcccaagaggcagttttcttttggtggctgaatgtgtatacaacacagatataaaactctgatgaatcagcttaactactactactactaatcttgactgattctgaacttgacctctcaatctcatgggaaaaattaacaaagctaaaggttcaaggtcccttccaacaggcttctgagattgttaagtccttcagcagatatgcttcttctgactcttggcctttctaccaccacttgaggaggtggatccaagtgaaaactcaccattacaactgttaaattgtcatccgctcctcgttttattgcctcctctactatagccttgcaacatagtttcacatcattgtgttcctgaagtttctttctggcaatgtctacagcgttttggttgctgaagacttcccatataccgtcactaccaataatcaagaactcatcatctttagtcaatgtgaacagtctgagttctggttcagcactcaagggacctcctatgtcccccatctccttcattccttcaaggtgccaatcgcctaaagctcgggtgacacctaactgaccattcaaataaccatcatcgacaaaaccacctaaagactcgacccgtgtcttttctttgatgcagcagggcctgtgatcccttgataattcgatagctcgtgcacatcgtgacaatactgcccggcaatcaccagcgtttgccacaagcaaagatctgttcaaaatatcatcacaattgtatagtaaaaacaatcaggatcaattacagccatcattacagaaggatttctaccagcctgtgttttcagtctcaaattcaatcaaagtttgtagctgttacttaattaggtttttgcataaaatcaataatgttattctcttaagccagcttgttctgctaatgtcacttccaagagaattcaatctgatgatcatagctcctactctttgtaggataacagataatatcaaaatggacagattatctaagatgaaaccgaaacaaagaatatgcttaccttccaaatatcattgcagtaagtgcagttgtgccagaagaaagggatgattcaatagagcatgattttgcaaatgcagcatcagtctccatgaaagaccttgttactaccttctcaagctgtaaaggaaagtcagcatcctcgacaataattcttggcaaatggtcacgaacaaattgtgctgcagcctttcctccatgtccatcaaacacctaatcattcaaatcaaatttgcattaaatttatgaggatacttcattgaaattatttatcattcgacactaccaggtaacaaaacatatatccaacaatcattcatgcccatccgactttttattttctttatttgttggtgaaatttacactcccaggccatagacttatgcctgctcaacattaagactgcaaggctaattatcaactaaaattgaaatttagataatttggtaatgaaaagaccaagaatgatgaaacagtattcccaaaatttctttatcaaagacagaaagcaaccatgaaacgatgaccagctaaaataaaggggtaagagtacttacaccatagaaggagatagcttctttgttgagtagattaaagccatatttctcagccaggttactaatgcagacatgagtatcctccatgtaaggacgactcccgatatccgaccactctccagatcgaagagcagggacaaagttaaactggttttgtttgtctacaattaccctatcctcagaaatgctctctagctacaaaatatcacaaatggtaaattggtaatgcaactatcagaatccaatatagaaaaggatgaccaaagtaataaaaaaaatataatgcaagagaagttgtctccttcatcaatactgtattgaaatctctgcattaaataagtcattgattatacgaaatcaagttaagataacaaaaacacgaaagaattgacacacaaaaccaaaaaaaaactcactgtaccttcaataacagccaacatattacatagcataatgaaagccaagtccaattatggaaagaggtatgcaccgacaggtagaccaagtacgaaacttgattattagattctaaaaatagtctaatttactctgttgattcctacttttactactaaatgtcacaagggttaccctcacaatatcagaataacaggaagttgagcctaaattagtagtatctagaatgaatcttgaacaatgccttagaattctttaaataagtcttaagcatcaataaatattataggtttcaatgaaagaatgaggggtaaatataaaagcataaacagaaagaaaatatagaccaacaaattaatcaatcaaagcatttataatttttttaaaaaaataaaaataaaaatcaatcaaatcaaccctcccaacccaagaacacagtttttgaccgttcagatactgatcgcttccagccaatagcaaaaaaggcagtgtttgaattcacaaattagaacaaaaacaaattccataatacctaagctgaaataagcaaaaaaagaaaatccaatccatccaagaaaaaataaataaaagaaagataataacccagaacttcataaattaagcaaatgggtctctgaaagttaaaaaattggagatgacccaacaaagctaaagggcaaagaatcacaaaattcttacaggaagtgaatttgggatgaagctcaacacaggagattcgtcattgaaattctccatctgggtatgctgcaaaggcttctgcttgtcgttattgtcaccgctactgctgctgctgttgtcaagatcttctcccactgtttcttcttcaacttgctctaagtctttgacacacatgacgattttgctgctggtgatggtgatgagatgagattgagatgagagtgtgtttgtttggtttttcttttcctctctttcctttctaaccaactctgtagtttggtctgtgttaccagcaaaggaaagaaaatgatgaaatagagaaaagtatatatgagaaaagattctcagaatatgtgaaaaaattaaaaaagaaataaaat

SEQ ID NO: 483 - DNA, 4859 bp, Cannabis sativa
tatatatatatatatcaataaagtaaaatttctatttaacaatactaaattagcttttgatttattataaaaaaaatgaaatttgaagttaggctaattacaaataaatataatttttaaattgtattggttatatatttttcaagttcatatttaaaatatatatatgtatataaaaacaattagaccttattaaataaatatatagtttataaatttatttatatgtaattaataattttattttatattgtattttactcaaaaataattttaatatgatatagtattaaagattgtttattgttattgtagtttcatttatacttttggatattttgattttttttttctttctagtatacctttacttagatataacctctcaattagaatataatttgttaatctcaactataactatagtcttagatagagtatctatggtatatatttatatatacctattcttaatctccttcaatatgtaccttaggaacatgcaatctatcccttcatccaatgaaatgctcataaaaatgctactacaaatgagacaaaaaaagatactctcactttaattgttttataattaaatagaaaaataaaaaataaaaaacattatattatatttctccaagtagattctaaaagccttgaaaacatgaaacttagatatatttttttttgttcctttaaaattatttgtgtgtgttctactaaagaaatttaaatcacagaataataattttttgtttctatcttacaggtactattagtactattggagctaatgaagattctcgagaaatagataagaaagttcttctctcattgcaaaaatttctcaaagactcaaataaagtaaaccaaggaagatactcagagtggaacaagcacaataagactgacccatgtcagtggaacggtatagagtgtacaaacaacagggtaacaaggatttctctccaagatagcaacattgtcggtcacctcttcaacaacttctcagccctcactgctttgactcacctcgacctttcgaacaacaatattgatgggcaaatacccaatgaccttagctggtgccgcaacctcaaattactcaatctttctcacaatctcatgtctggtagccttaacttatctgggttgcaccagttggaggtattggatttatctgtgaataggttttcaagtgatattcagtcgagttttcctgccatttgtcggaatctaatcgtggctaatgtgtcttcaaataaattcattggaaaaattgataggatctttgatgaatgcttgactttgaagtacttggatttgagctcaaacaatttcagtgggcctgtttggaatggatttcctaggctgattgagttttcagtctcggaaaacttgatcacagggaatctttctggctccattttcactaatcaaaattgtagcttgcagttcttagacctttctgagaatcattttgttggtgaagttccagctgagatttccaaatgtcagagcttggttagtttgcatttgtggggcaataagttcacaggaaagatcccgactgatattggtaagatttcgactcttgaagggttattcctgggagataacaatttccatagagaaatcccagattcccttttggatttgaataaactagccttcttggatttaagcaagaataagtttggaggtgatatacaagatatttttgggaaattcaagcaaattaagtttctagttttgcacagtaaccattataaaggtgggattagatcatctgggattctcactctacctaatatatcaagattagatcttactttcaacaacttctcaggccctttacctgttgaaatctctaagatgcgtagcttagagctcttgctctttgcctataatggcttcaatggtacaatacctatggaatttggaaacattccaagactccaagcactggacctctccttcaacaagctaagtggttcaattccaaccacctttgggaaattgaactctctcttgtggttgatgcttgcaaacaattcattgacaggttcaattcccaaggaattaggtaactgtactagcttgttatggcttaaccttgcaaacaacaagctctccggaaacatacctcctcaattggctagcattgggataaatcctgacccaaccttcaagttgaatagtcaaaagatgaatggaactattgctggttctggtgagtgtttggcaatgaagaggtggattcctgcaaactaccctccattcagttttgtgtataccattcttacaagaaagacttgtagaagcatatgggatagattactcaaaggtgttggactattccctatttgtgttgttggttcagcagtgagaacactacaaatttctggctatattcaactgagtggaaatgagttaactggggagattcctcctgaaattggtaaaatgaagaattttagtatgcttcatttaggttacaatagattcaatggtaaattgccttcagagattgaaaatttgccacttgtggtgcttaacatcactaggaataacttctctggagaaatcccaactgagataggaaatcttcagtgcttacaaaatcttgatttgtcatacaataacttctctggtgtctttccaacaagcttggacaaattgacagaattaaacaagttcaacatttcgtacaatccacaaatctctggtaatgttccatcatctgggcaattgtcaacctttgaagatgcttatattggtaatccaaacttagttctttccaagtttattcgtaactcctcagacagtgctaccaagcaatttagaaaccaaaaggggcctagaaagtttcctacattcttggtgttcctagtcctaatttttgttatcttaattattggagtcttgatacttatagtctgctcaatggtgaaaggccctgatgtgtcagaacagtatgtattaccagaacttaaataccagcacgatctcgcttcaagctccaacaactcatctccatggttttcagacactgtcaaggttattcgcttagacaaaacatctttcactcatgcagacatactagcatccacaaacaatttttctgagagtaggatcattggaaagggtggttctggaatagtttataggggagcactccctgatggaagagaagtagcggtgaagaaactacaaagtgaagggttagaaggcgagagggagtttcgagctgaaatggaggttctaagttgcaatcgcattggctggcctcatccaaatcttgtaactctctatggttggtgcttagatggacaagagaaaatcttggtgtacgagtatatggaaggagggagtttggaagatttcatatcagacagaacaagattatcatggagaaggcgagtagatgtagccatcgatatagctcgagccttggtgtttcttcaccacgagtgttatcctgcaatagtccacagagacgtgaaggctagcaatgtgttacttgacaagaatggcaaggcaagagtcactgattttggcctagcacggattgttgatgtaggggatagccatgtcagcacaatggtcgctggtacagtaggttatgttgcaccagaatatgggcagacatggcaagccactactaaaggtgatgtgtacagttatggagtgttggtaatggagctggccacaggacgacgtgcagtggatggaggtgaagagtgtctggttgaatgggctagaagggtggtaggtaatggccgaggaggtgtgtctagccgagcggctatacccgtggcgatcatggggggttctggatttcttattgaaggaacagaggagatgtctgaattgttaaatataggaatcaagtgcacaaccgagtcacctcagtttagaccaaacatgaaagaggttcttgctatgttaataaagattatatgcactaggcaaggagaattaaattatggtgcctctcctcaattttgattaagattttgatatggattccatgtaattttaagatgttaatatagtttattatacaagcagcaattttcgctgcaattcttgtttgtatacagactcattcatcattcaaattttacataaatagagtttcactaaattgctaattgatttctttttgatcttgatttaagattctttgtatagttagcaacactttcatcactaatttttaatttattataatctcaaggttcacgcttctttgtgattgttcaactaatttaaagcatttgttgattgactttatgggcattgcagaaatttcctatgcgcccatcaaattttacttgacgaaaagattattttcttaatgaaaaaacatgtccaatacaaagtatcacatgggtcatatatgaatttgcatatgccttttcacataatttagtttaattaaaaattattgcaacgtaattatacaaacttcaaaattactgcaaaaatcgtttgtgatctcaaaaaagaaaaatattttcagaacactttaattagtttattaaaaatagatgaaccaacaaggaatgagacaattactattttatcctaaacatgggcatgaacaaaccgttttgctcctaaaactattttggtaaagtgatgtaatccaacctttgaaaaacctttttgataaataaatcaaggttcattttaataggaagggtccacaattaattatttcattattggccgtataaggattaaggaataatcatagctttcaccaaaggacattaagatgaagtttttgaaatttgatcaaactgatcaagaaggtattaagatttgcctcctccaacatcatagaaaaa

SEQ ID NO: 484 - DNA, 5603 bp, Cannabis sativa
acgtatttttgcaaaaaaagtttattaaaaatgcaatagtgaaaagagcccatattattttggggcgataaaaaaagtataatcattatttttacaattattttaaagttttattatcaaattttaggattgacgaaaaattttattatttggaagatccatttccttcctattagtgttggttgcaatttttctttcttttgaataatcaaactaacaattttactaatgtaaggatgtttttttatataatgattcaaaactcttgtaatattatataatccaaagaagttataaaatgctcattgctctactacatggggaagtttataaacttttaaaatacaacacgaaaaagccaaattacaatttgatgagaatgtagatgaaagtaattttcaacaagctaaactgaagagttaaattaaggagcatctccaaatccaaatacaagatcttgctcttaacaataataactacacattttgatgatgggattagaatgaaaaatatttggcaacaacaaacaaccatatgagccaaattgtcatcctatagttagtttcctaatattcacagcttgcaaatgacaccaaaaggaaaaaaaaaatatactaacaaaaattgaaaaagaatacttcaaaaccggccggaatctagttctgagcctgcatccgacgactcttcttcttcttctcgttgcctctgagaagtgaaaggcgggggcggtggatcaacacttagtactccttccaacaccttcactacttccctcatcgaaggcctcattcgttcatccatttgcacacaccaaaacgcaattctcaacactcggtccagcatttctgaatcaaccccgccattgatccttttgtctactacgtttaaaccattcccttcgatccattccttgtaagcccagtgagaaacttcgccatcttctttacacccgcttatcaatgttaataccattttcccgaaatcttccacatccatctcagcagaaaagcccgagcttgacatttcgctggctacattgtgaagcccgaattcactcaccttggcttctaacttctcatccaacactacattttcgcatttcaaatttccatgacttacaaactctctgcaacctgtgtgcaaataagaaagagcccttgccacactcatacatatctcaattctctttccccaagttagcttcttacaaagtttagaatcttcaatatatttactcaaagaaccattctcagcgtattcgtagatcaaaaatctgtggtttaactcacaacaatagccttttagcttcacaaggttcttatgatgaatgcttcctatcttcgaaacagcaactcggtatttcctttcttcggtggttgttgcttttacgtctttgacagcaactggttgcttgttcgggagcgatcctttgaacattgtaggaccaattcgctgctcaaagttttttgtaagatccttgatttctgagaaggataatacagtcaaaccattcgagttcgggcctttgtatcctaaaacagctttcttcattgctcttcttcttttatatacaatgaaaacaattgccaactgaaccaccacaaataaaaccgatgttccagagaccgctccaactacacaagtgacacaaaatttagagcctttttgtggagtttcttcggaggaggtggttgccacaatactgggatcaacagcaattggatccgaacacaacttggcaaatgatactgaactcagtgatggatcagagtagccactaacgtatggagttttctttatgaagcaccgagcagttccatcgttcatgaaggttgcagctgtacaaagtggatcctttaggcataagctttcacattggtgtgaactaatgcccgaaactaaatcatcattttggtacattccgtacaaaaaagtgtgcttgtaattgagcaagttcaaaccagatctgcacttctgtcgacctggaattgtacacctcgggatggactcgtttgaaagcttaaatgggcatttacaagtttgggaacctgtttctgtatagacacagatgccattgtaaccacaagtggcgaaaacattgcattgattctcaacagcttgccagacatgtctccatgtttgtgaagcttcttcccatgagtaaagcctcagattaccatcaacatcaagcctgagataacgataatgaactgtatcgttatgatcttctccaaaaaccgaccaaatggtatcccgcctctggtcttggatttgtagggtcccatcagatgtgagcaaagctgtgaaatttaaaccgatcggactactacttgtccaataggtgaaatgactatcccaccttagttgcaactgacccgaagcattcatgaaaagcgagtagtaactcgacatatgattcttactcgcagctcgaagtgtatgcaaagcagaaaagtattgtcctggaagaagtgtatcagcaggaaaatcaaaactttgccaagctatatcttcattatcagtcaatagaacaaaattgccattgtcataaagagcagccgaagcaataggaagctgacttgttttgctgttccatacattaacacccttcaaagaatcaaacaaattcatttctccatccatggtaagactgaagtaagaactattaccaaccatgatatcagctcccacaacccaaacaacagcttgtttctcaactggaattgatttcgaattgaaacgaatcccgaccctgaacaaatttggatgctccgtcccattaaagaatccaaatgaaaagtcaccattaggggaaacccaaaacttattgtcagacacagaaagttttgaacccaaaggaatctttgaaacaacaggttgcagccaaaacccagcagagagacacagtaggaaggaaaaggaccatttaaacagatacccatttggttcaaacataactgaataagccctaaaagggaaaacaactaaagattagtataatgagacactgttctgaacttggaactatatgtgaaattagacaagtctcaacatttttcaacacaagcatattgagcaaaactaaaggtactaaaacttcttgttctacatacaagaaaagaagataacacatatatatatatatatatatttatatatatatgaaactgagtataaagaaattaatacctgacaaagggagagtcaaactccagggatttgttgaagaagcctgtgtagcatgccaccaagaccatatcaaaactatctcgtgcttaatattatctgggcccattacaacaaaattaacgagtaaaaatgagagctttgaatgtgtataaaacggtaggctgcctaagacctactaattcgatagaaaaactgggtggacatgaatgagctgtaaagtgaggaaattttagatttttttttttttctatgatttatccaaggatgactgatgaggaaagtgggtgttgaatgaaacttgaaaagaaaaaatattaaagaaaaaaaaaatgggacccaaaactcaaaccaattgagtcatagtttggcaatgcaatcactttcaggatcaaaaagttgaaaaacatgtacaatgataaggaaaacacaggaaattttagaaaaatacaaacttttaaaccccaaatataataagataaagaacccagttatggtataagcttcaccaatagatgctaaacccagaatttactcgcaaaaatataaagaagcaagagagagagagatcagtaccaaaattaagtcttcatatgaaaagcttagaagggtagatttcgttttctccgtttttctcttcctgagcaacattttcccgagaaacaaacagagaagtaaaaaagcgaagtaactgaaactcacttcataactgacaatggagttcctttctggttagattactggtcctgaacccccaaagaaacaaactttgagttaaacaactgagaaaaatgagagcttgagtagaaaacaacagagtatgagattcaaacgctagagaatataccataaatgggtaagaaagagagaaagggaaatgaagtgaaacgggaaagagaatatgaaagaagaagaaaatgtggagttatagagtttgaagggagaaaagggttgccggaattggattccgagaagggttcaggctgaagagattcagagaatgaatggcagtgtgtgaaagcaaagctctcagagagaagaagagaagtagtggtcagtgaccataattttttttttttttttttattattatttttttttttggggttgtgttttaataattgcatttatttatttttatttttggttttttttaataataaataattagattaaaaagggagaaaagaatagttggtacggtttgtgaaattcaaagtcaaatatattagggaaggaagaatccaagaagaatgtgacaactcctattatgtaggtaccatttctttctctatttttatctaaaatgcatttcattacatttgaaaagaaaattgtttcattatttaagagaggtttttaataattttcttttttttatgattatctatgttttatttatttaaggttactttttaaatttttcaaaaatttgtcaaaataaaatttaaatattttataacacgtttaactattttttcttatacacgtgtagagacaaacccattagtattaatgtgagatttatagctccactaacaaaaatattatttttaaaaaattaaatgtaaattttttaatttaataattatagataaaaataataaaaaaatcctcataaaattaaataaatctagtaagaataattataatgtaactataaatattttttatgataaatatgtcttcacaaaataaaaattcaggatttatcgctatacaagtgataagtagttatttgaactgtattttcagtactataaattattaaaaaaaaattaaaaatttatgaataattttaaataactataatgtacacgattaaaaaaaaaaaaacttttctcaatgccaaaacaaatagagtgtacaaaactttttttttttttttattaggaaaactataaatttatccataaatttttagaagaaagatatttttttattagtatttaaattttgtatttgatgcaaattttgtgaaataaattcaaacattaattttaaaattatagatatacaatcctaaattttatccttagactattatatttatataattattttttacataaacttttaaattacagtaaattattcatagatcactcttacacatcacgaaactgtttgcaaaaaatgagtaaaatgcaattaaatggataaattaacaattaatttaaaagttcggcaacattttttttaaaaaaataaataaataatttaggggcaaaattatataaatattaaagtttggggagcaaaatttttatttattcattattttatataatgatatatattgtaattatttaaaatattttgtaaaattttaataaattcagaataatttataatacaaaaaatagggttcgaagtaactcgagatttaatctcatagagatgataaatattttgtg

SEQ ID NO: 485 - DNA, 4638 bp, Cannabis sativa
agagagagagagagagttgagattacccacagttgtgatattgaggtaacccagggaggcaaacgtcctgacaagtaattgtaagacaagtctctgcatatattgtaaaatgtaagcaaaaaaagacttgagatgcacaaagtttaaaagacatgtaatatggaaatgagaacagcatatagaagttacaatagtttgttatcaaaaggggttgataacacttgtgtttcccatttgaaaaagaaaaaaaaaaagactaccaaggtagtttctatcaaaagatgcataaaaaatttgatatgagaatgtgttcttattggcagctacatgataatgacgaggattctacaatgtaccttactattaactatctatctgtcattatgaggcatggaagacatttcagcaccctaacaaattaattttcaaaaggaacagactatctgtccgtcatcgagatgtcaaagctagtaatatattttccatattaacagtctatctatccgtcattatgaggcatggaagacattattctaatttgtaagaattttgttctgccccccctcttcattttctttgaaaataccttcgacgtccagaattttgttctctaaattaagtaacaattcttacaataaaaaataagaaagttactgtaatgtcataaaatacaatgaaatctattcttaaggaagtatcagcatattacttacaagtctttattatgaagtaatccatttgacaggaatggttttacatgagtgcagcatgttattgaaggttgcaacagttgcagccagattcaatacaacacaaagttaatgctataacaaaaaatatggcttacatatacataagtgtgtcgctccattggagaggaagggctccagacaaactattgtttccaagaaatctgtagttttgatgatagatgccaaaaatgaaacagcaaagcagaagtcaggcaagttttaggcagatatcagattataatgataaaaacactacttaattctttacaagtgtgtgagattattcatattgaacagcaaacttgggatctcgcctgttaaattattgaaactcaaatccctgcaaaaaaaacaatgtaacgttacacaaagtaaatttaacagcttattggtattgtaccagtaataaagttttttgacatacagttgttttagatgctcaagttttccaatatcagatggaattgtaccagcaaacaacgcatttctgagaattctgttggaaaaggaggaaaaacaatgtgatgatatggtgagcataaacggatgggctgattagcgaaaaatctggtcagattaccaaataacagactttaatagtttggtaacttacaactcagttaaattcttcaaatttattatgaaatcaagagatgagctcccattgtatatatcactgattctcctacataattatttataaaaacataagtctcccactctagttggcatagtagaaagagagaatttcaaaatgcaatgaatatatttactcacagggattccaacaaggtcaactgagaaaaactggatggtataggacctacaatagagctcccttgaaatctcctacaaatttattttgagagacttgtgaacctaaatacccataataacaatgccatatatctactttagtaataacatcttaaaatttaatgcttacaaagaggttagcttcgtccaatttccgataaagtcaggtatttttcctgagaaaggactgtctgtggcccacctgatgttcaagaagccaaattatagtaagttgagttaacaaaattgtgtttctaaaacataagaaaagatttaaaacatggaacgcaaaatcttccttacatgactaccacatttcgaagattagcaaatgtagaagggatttcaccgctaacacctgaactgtctagataactgcaagaaaacacaaagtggaattctatgaatttcagatgagttatactttcccttacatgtttctataatacttgagctgaactaaactaagtgtcaattctacagactttactcaataacactgttggatcagacccaacttatctatgggccacatcattcttgcacatgtttttacttaagtttgttagtttgggttcttagttttcttggtttgttaagtgtttgttatgttagttaagtcctaacatgtaaagctactcagcctgtataggccactagctttgttgaaagtaagccaagagagaaatgagacaagagttctcaaaccctagattgtagtgagagagagagagagagagagagagagaggtagagagagaaacagagtgcacctactgttggtgtcagatggatctcgaagctatatagttgcgtctgtacagagaagttttcagggaccattgtttggttgccttgggttgtaacttcagacatgaatcgatatagtgcaagaatctaattccatttttgggagttcagaagaggggaataggctctccaactattgttggaggaagtacaaacctctataattcggttgtattttttctttgattttactttttttcattggttcgaattgtgtattgttttgttcttgtttttgtgctccactttatgatttattattgtttgtgtgcaaggatttgcgattggtgttagattgaatacccggtattacagctgggttcggacccagaatcaatctcaaggtgttaacgtcaagaattggatattagttccaaggcttcacgagaaatctgcagtttccaataggtgcatttacaagatcaaagatggaggagttggtgaagagaaacctaggtacgaggctaggctggttgcaaaaagattcacaccaaaggagggcctagattacattgaaattttctctccaattgtgaactacaataccataaggataatgttgccaactgtggttcaattcaagttggaattagagcaaatggatgtgaagtcagtctttttgcatggagaattggaagaagaaattttcatgaaacaaacaaagggttttgagcaaggtttggaaaaggatttggtgtgtaagctacggaaatcattatatgggctgaagcaatcgcctagacaatggaataagaggtttgatagcttatgatgaaacaagaatttatgaagagccatcatgacacctgtttgtacaatagagggagtacaattgagaattccgaatttttgttgctctatgttgatgacatgttgcttattaatgcaaagatagaaaacttgaagaaagtcctagagactaaatttgatataaaacagccagaagaattctagggatggaccttagaagaaatagagaagaaggaagcttggtcatcatgctaaagaactacatcagcaagctcgtggaaaagttttctatgaagggatctaagcctaccaaacagccaatgacagcccactatcagatttccaacaagcaatgtcccactacggagaaagagaagaaagaaatggaaaagatcccttatgctatagctgttggcgccattatgtttctaatggtgtgctcaagactagattttgcacatagcattagttgcttgagtaggtacacgtcgaatacaaggaaagaacattggtttgcaattaaatggttgctgagatatttaattggaacaagtgaagaagggttggtttacaagaagaacggggaatatgtgaacctggaagggtattgtgactcggactacgccagtgacaaggattcaaggaggtctacctcaacctttcaattcatggtgtgtgggaactatgtaagttggaaacacagctccaattcgtggttgcattatccacaactgaggctgaatttatggttgctactgaggccataaaggagtgtttgtggattcaaggactgtgagaaaagcttaattttctcaaggatactattgtgatatacttggattgtcaaagttttatacatttgtgtaagaatcctatgtatcataatcattccaggcacatagacatcgagtattatttcataagagagaaggtgacacaagggattgtggagatcagcaaagtgtcaataaaagagaacccatctgatatgggaaccaaagtagcgactctaaacaagttcaaccattgcaagtcactacttaggattggagttggctaatgaagtcaagttggagacctgaactcctgaggcatcattgttggtttgcatatcagaagagaacccacctgatatgggaacaaaagtagcgtctctaaacaagttcaaccattgcaagtcactacttaagattggagttggctaatgaagtcaacttgaagacctgaactcccgaggcatcattgttgttttgcatagtcaagttacgtctaaggtggaatttgttggatcagacccaacttgtctatgggccacgtcattcttgcccatgtttttacttaagtttgtttatttgttcgggttcttggtttgttaggtgtttgttatgttagttgagtcctaacatgtaaagctagtcagcctatatataaaggtctctagctctgttgaaagtaagccaagagagaaatgagataaaggttcttgaaccctagattgtagtgagagaga

SEQ ID NO: 486 - DNA, 3402 bp, Cannabis sativa
aatatgattttttgttaatagtaaaactagatcaaacttgttaaaacaattagttctatactatcacagcaattagctactgaggccaagttctaccattatgccttgactcatcttctatcccattactactttcataaagatcattacttctttttcttttcaatgtctttacacttgactggtcttcctctttctcatcaatgaatgctaagaaatgcatgacacgttcagaacgagagcttccatgtccagaagggtcattcacacgagggaaactcagtttgaattggcgtataactttgtaacagtagattgaaatagagacacaacacacaatgccagagatcacaaatagtccccaaaagctttgtaatggaagctgttctgattgaaagtctgatatttgtgcattacaagcctttttagctaaccattttgaatgaatcttttggagatctccattctctgagagagttaacatggctgttgacatgtcaatggctaatggtgagtcttttggaaatgcctacaacaagaaaaagagtgagaaaaaattaaaatcagttgcagcatgacataacaaaaatggattttttgtgtttgaaatgctcacaaatccccagccacttttggtgaattcttggccacgaattgcgaacatacaatgctctgaaaggaagagctcaatgtatggtctttcgtcgatgacagcagccacagttccattctcaagtgccatagcatattcttgaggtgagccaagagcaacaagtctagattgtgggatgttgagttcttcccttaagtagttttcggcgaatgatcctacttgaaatcctactggttgattgcttgttaccaatgtatcaattccagttatgggagatgataagtgttgtactgtgagaattgatgtcaggttagcagtatagctcgaggttatgatcagaacgacgaaaagccagataagcatcacaaaccggccaagagtgctcattgtgttttctcctgaaagtttttgtgaagatatatgacatagttggttggtactctattgtggaaagtgaattcaaaacatagtagagagacttactatgtgcaaaaaacatagtagagagactaaacctgcaagccataaagtaatcacaactgaagatgagaatgagaattcaaagttttctgtttaagatagcttaaattgaaaagacagaagtactaaccatatcattgtgataatctgtttctttggtggtcctctaaactcatcatttattctatgttcaagtacccaaaccactgcaccaacaaaaaagaaaaaaactgttgtgacagcccacatgagtggtgtaaatggtctcaagaatgcccaagcaattgagttcaacttcctgactggtgtcaccacaagtagccctgattctatataaggctgagtgaaatccacaatctttgttctgtttgtgacaatggtaatatcacctacagcagcatcaaaaacctgcagatttacaaggcttaaaaatcagtaggaacactctttagttcatcatatacaatttcaagtctttttttttttatcacttacaccagatgaaaccatgttaacaagctctgaatagcttggattcttatgaccatctccaaatagaataaacttataaggaactggatagggaagttgccttatagcagcgcgaaacacatcaatgcagtatccatgaaccatatcagtaccatttatttgtgatacaaagttcttataactaactctctttggaacaccaattctcagtttcctcccattgtcccgaaaaacccatccgcgaggtgtgatccttgttcctcctggccattctacactgtccaaatgttggtgtgcaaatgacttgtttggtgccttggtataaagtacctctggggaatcaacagagagaccagaatagttagaccaatatccaatctgtttgtatccattaccaattacattaataatgtcaaaagaaggtctccttgggaatctgtctagattgaatcctagtgatccagttaggcctatcattctggtttgtaatatgttgttgagtagattctccccaccatcaaaattgctcaatgcaccaagattcaaagtcccttttgagtgactttttaagtttgtgttactagagaatgaaatgttacccccttgatccaaaagccttttcaaagctctagcaataatccaaactgtatcataggcatacaaaccataagggttcaacccaatagagccattactcaactggttccaccgagcaatgaaggcgcttttcttgtctgaatcaggtgtatgtggacgaagtgtgagagctccttgaatagatttaacagtattagatggaagtggtgaaagtgaatccaaaacagtagataaccaagttgaagctatccaaacataacctgattccatcattccaagctcttttgccacttcgaaaacaagcttacccgaataggaaaatgtgtgtaagacaatcactctactctccatcatacgaatctgtaccaactgtttctcaacatcaattctagttgcttttggatcaggtggaagtgctgctttgtaagagattttacaaagcttttcagcaagtttatcacccaatgcagttaccccatttctactttgatcatcatcagtgaaaattgcaatgacatcagaccaaccgaaataactaaccatgtctgcaatggcagccatctgaaataagtcattaggtgcagtttgaacaaaataagggtactgtataggtgataggttaggatcaagagctgtaaaagacaataatggaatatgaagctcatttgcaagatgtgaaagtacatgggccattacagcattttgtggaccaattatagcaacagtatcagaccccatatatctaagtgctgcaataaataaataaaagaaacattaaataatgtcattacccaacaaaaagttaaaaacaaaaaaaaaaaaaggaagagtctttattataccaccaacaatgccaagaaatccactgaagttggaatcatgaaaagagatagacaatttagtcccaccaagaacactcttatctgagttcacatcatgttctgctgccttaatagcaatctttgagactctaccattgattgtttttaatgtgaaaatagctccaacattcacttctgcaggtcttgatgatgatgaggctccatttaagcattgtgcccagaagcatagaatgaataatattaagaggagaaaagttaaattcatggtgagcttctgaccattaatttaggagtttttcttccaagtttagtaatcttaacaagcccaaaagagaaaaaagcataagagcttcgatacgaaaggcatatatatatata

SEQ ID NO: 487 - DNA, 4521 bp, Cannabis sativa
ctctctctctctctctctttgctttttgtgaaggtggatgacgttcgacgggctttgtatttggcaggtttttgggtcgtagcttggtgtgtagggctagggttctgggttgcagcttgttttttgtattcgttctattttttttaggtttcttttgattctaaaatgtgatatattgtataactgatctcaatttttttttagttcaaaatgttttatatttgtttatttttttcggtaaatcaattcttatttgtgttttctgtatattcatttattattttgtagttttttttagagagaaaagctatttttattaatgaacaagttcatttataacaatagcttcaataggggcttgacaaatagccctccgaacagtatcattatccacccgtaaagcgtatctagcaagcccatgtgcagcagagttagcactccgacgaacatagctaagaaaagcacatggaaaagaggacatctgatagataatatcatgtatgagatcttgaaatcggccataatggtgaggaggatgatgaacactttgagatacagtaagagcatccgtcttaataaaatgaatttcgtaattaatatcctccaaccaatgaagacagcaggagatagctttggcctcaatttccttaacagagaattgtcccttcattggcttagaaatggcagcaataacttgaccaagagaattgggaacaatgcctccaatacccattagaaaaccctcattatttaaggcagcattcacagtaagcttcaacttaccattaagtgggggttgccatggttgggtgacagcaagcgagttttgtggaggcgtaggagagtggctattggctgtgagaaattcgttaatgtagtccatagctttttccataagagcatgttggggagtgtttttgggccatgtaaagaaccattgtgattgtaccaaataaaccacatgaaagtaagaatgagttccatttgattgtcatcatagcatgagaagaggtcatgaataaagttgttatcagtcgatgaagataaagccatgaagatccacagaaaagggaagcatatgccagaggtttttaacagccttgcagagaaaaaatgtatggtttagagtctcacaatggttaatgcatcgagaacatgaagagctctctataatgtgcatgtggtggagttttgcagcaagaggaaaggcattatggagcacatgccaagcaaagatcttaattttgcgaggtaacttaagcttccgaaaccggttccaccaaagaataggcgattgagattgtgagggggacacaacatcaagtaacatagcagcaaaatgatacccactcttaacagagtatataccagtaggagaatgattccatataagcctatcatcaggcgggtggtggctcaaaggaacctacaagatgcgatcgatgtcaacattagtaaagtgcctctgaagagaaacgatattccaagttctgtcatgagaaataagatcagagacaaataagttctgatctgcattgataacatggaatggtttgaaattggtgtgtctagagagccaaggttcagtaatacgaactgaagcaccagtgcctattttccatgaaagaccgctaataaggagttctttcccccattgaatacttcgacaagtataggagggattgttacccagattagaatgcaaaaaatctatacggctaaagtagcgatggtgtaggatgcggaacagaagggaatttggtttgtcaaacaagcgccgagcttgtttagccaatagagcttggttgaaatcaatgaaagatctaaagccaagacctcctatttgcttgcttcgacacaagtaattccatcttttccaatggatagggtgaccattagctttgaacccccaccaaaaacgagcaatcatactttcaacactactgcagaaagatgtaggaagcttgaatcaactcattgcgtaggttggtattgattgaacaaaaactttgaggaggatttctttcccaccaatagaaaagagcttctcttgccaggtagttaacaacttccaaattcgattttttatatcatcaaaagtagcactcttgttatgacctgtatatgatggtaatcccaagtaatgttcatgacaagattggataggcatgccaagaaggaggtgaaaagcattttgatctgcagtggaaatatttggggagaaagacatgactgatttatcatagttaatgagttgactagaggctttattgtaaaggtcaagagtattcttgaaggcaacaagagagcgggcattcgttcgataaaagaggagactatcgtctacaaaaaggaggtgcgaaagagtaggagcatgcctaataatagataaaccagtcaacataccttgctgctcttgagactgaagaaattgagagaaagcttcagcacaaataagaaatatgtagggagaaaggggatttccctgtctaataccatgctttggttgaagatgtccagtaacatgaccattgattaggaaggagtggctcgctgaacaaatacaacgcataataagttgaactataccatggtcgaaccccatcttaagcaaaacacactcaacaaaatgccattcaactctgtcaaaggctttgctcatatctagcttgagagctgcatagctaattctccctctagttttgttacgcaaacaatgaaagatttcaaaagtaactaaaacattatatgtaatcaatcggtctaagatgaaagcactttgatattcaaatataaccaaaggcaagtaaggcttcaaacggagaacaactgctttggatatgatcttataaatcacattacagaggctaatgggtcagaattgagccatagaagtcggaatccgaaccttgggaatgagtgtgattaatgtcttattgatccatgtaggatccttgttatggttaagcacatcaaggacaacagtattaatggtagggccaattatattccaatgatttgtgaagagcataacagacattttgtctaggccagggctcttgtcactactcatgctttgaaggacaacaaggatatcatctttagtaaaaggctgctgaagaagaacattcatttcagtggtgatcgttgtagggatagtgtctagtgtggagttaagagtagaggagtcaatcccattagtggcaaataatttggtaaaataagagtgaacctcgcctgaaattccatggggatcagagacaaaattcccattaagagtttgaagctttttgatatggttgtttgccttgcgtccagatgcacgggagtgaaaatatttcgtgttagcatcaccagcagttaaccaattgatgcaggatcgttgatgccaataagtttcttcttgatcaaaaagatcatctatgatttttttagagtgatgaagatctgaaaaaaaaaatttgcataaaaaaggttagtgttcctaagatctgaaattgttttttgagcttttgcaattttattcttcatgttgccatacttgctcgtgtgccaagattgaagatgtgttgcaatcgttccaatattgttgacaacctgatgcagagaattgatatcagaggaggcccaatgcaatgcaacaatgtcactacaatcaggatcattcaaccaaagagcttcatatttgaatctagacttgtgtttgggcttcggctgagatgcaatactggtggaaaattcgagttttagagctctgtgatctgatgaaaaataattaagatgatgaaggtatctccaaaaacttgctaccaatagtgattaacaaatgcataatcaagacactctttgacatgtaaatttccaagagttctattattccaagtgaatatgttatcattgtgattcacatgagtgagattcccatagttaacagcagcatggaaattatcaatcaaaacaagatctctattagcaccaccctctttaagatgagtagagaatatttcattaaaatctccaacaaccagccaagggtcgaaaggagaaacatcagccaagcttttaaggattttccaaacttcagattttaaatgtgtttctggggcaccataaaaaccagataaatgccatttagggccattgtcacactgaatataacaagaaatatgattcattgagtaattaaccaaagttacatcgatattgtctttccaaagcaacattaatccacccccaaggccttttcttggaacttcaataccattgggaaaattcaatacatttctaattttattaatagaaccagatgctaactttgtttccatcaagaacaagatgtggggagcttactgagaaataagcaagcgtaaatggcggagttttctcgggttccccaaaccccgagcattttagcttatggcattcatggcaagcggcggggttgcgatacactgcccgcaaaactagcttcaccatctatagtagaatgtgttgaagaatctgttagaaattattttacca

SEQ ID NO: 488 - DNA, 1062 bp, Cannabis sativa
attattattattattattatgctatataaaaatagatttatggatattttattttgatatatatatcttaattctaagattttttttttgagatgatcctaagatatataataacacttagaaaccaattctaaaaatttaaaatttaaggttcaaaaaaaaaaaattaagatttttatatgattattcataaacaaatcttttcctaaatgtcactactattgtgatgaggcattattatatcttaatttctttataagatgtatgctgtattgtaattaattagtcgataatacttttgcttataaaatattatttcaagtagaatgaaacttgtattatagtgagccaagccaaaagaattggtatgacatattataatgatttattttaccttattaaaagcctaaacaacctaattaatttttattaggtcaggggtagatatattactcttgtcttaaaaactattatattagagagagagaagcaaaaccatatactatatttagaggagtaaaatttgaattcgtaagtatgttaattactctcattggttagattttttagcagaagaatgacaccaagagaggggctgaattgaaatttagaaattttttctaaactctaaaacaaaacaatttatttttataatccagatttttcattgtaaaagagaaaaaatcagttctgctgagcagaggtgttccaacaacatttttagtgactataagatgaaaaaaagaattacttaactttgtgaattacttatgaaaaattaggtaagcaaatgaatatgtaattatgaaattataactatataatcatagggatgtaaatgtaaatgagtttaaagtgacattactatatagtattgggttttaattagtgactttttgtagagtttcctcatcctagctagacactaaaaatttgagatttatgtctcacaatgcgggacactaaattattaatttatatttctttttataactaaaatagaagtatgaggcatctagtgcgatacgaaaaactatatgtaggaaatttaagataggaatt

SEQ ID NO: 489 - DNA, 1186 bp, Cannabis sativa
ccttgttagcccattaattgtcttccatgaaatctcttgagtcgcattacatcacacccgtcgatcagtcccaaaaccctaccacccctatttacttgctaggttttacgaatcaaaaccccagagccaattgccaaagccaaaaaaccctcccccgagaccgagagagaacaaacccatctccaaccatggcggccacaaccccaaaggagtccgtccaatgcttcggacgcaagaagactgcggtagcagttacttactgcaagcgcggacgcggtttgatcaagatcaacggctccccgatcgagctggttgaacccgagatcctccggttcaaggcgatggagccgatcctattgctgggtagacaccgttttgccggcgtggacatgaggatccgtgtcaagggaggaggtcacacctctcagatctacgccattcgtcagagcatcgccaaggcactggtggctttctaccagaagtacgtggacgagcagtcgaagaaggagatcaaggacattttggggcaatacgacaggaccttgctcgtcgctgatcccaggcgatgcgagcctaagaagttcggtggtcgtggtgccagggctaggtaccagaaatcttaccgttagagaagaaaaagaagagtttgcttttcatgtatttttttttctctcatttttgttttgttaatttaaattcgaaaagaaaaacaattcctctttgctattagtagactctgattttggtttagattttattttaaaagggataaatgaaaaattttgttatggttgatgatttgtttcaacaaagagtttcataattttttgtttggtttttgttgttataatatgatatggatttttagtgcgtgttcgtgaacattgggtttctttgcttttgattctttgatgtttcttctatatataatagcattagcattattaagatgtagtgctttggaattttgagggtgttcttctgaatgttgggttttgttattctagttcattagagggattgtatgatactgtggaaaaagcaagcaaaatggccaaaacattgtttatgcgagagggactttatttcacttattgatatttccttatgatagggttttggtaattgcacacctaattctaatttcttaactcatataagaaatttttgtgatacatgagtaaat

SEQ ID NO: 490 - DNA, 2729 bp, Cannabis sativa
aaattatttaatatattatttcttcaaagataaaaccattaccgaacattaactccctcgtcaaatcatttctttgcaaacaagaaaattggaaacaatatcaaattaaataaattaaacaatataacattgtgtgaccaatcaatagaaaaatgaacccgaaatcaattgatatccacaaccaaaccaatggaatggagccatatatgtcttgaaaataaacaattttaagagaagaacctattcaataattatactgattcccacaacagagaaagctggaattaaaaataaatattaattttcatctttgtttgattttcattttttgttgagatctccttcatgcaatggttatgatattattatttgatagttgcagctggtacatcagctactggtgaagcaggttcaattgctttgttagtcttttcctcatccaccttcacttcctcaacattatatttctcttctttttcttctgatgatacttcaatttcttcttttttctcacttacatcaacatgatcagctcgcttttcatctttccctcccttctgtcaacatatatataaattaatacagtaattaattaataattaatgtgataaaattaatattatgcaattacggtttttgttttagaaagaattcataaatttagaaaacaattttcataatgataataaaaacatcaatgtggcagtgaatagaaatgctcgattattttttaaattttgtattttcattttcatggaaaatttctcaaattttaattataaatttatcctatataattaaggaattatttcacaaaaacattaaaaaaaaaaacaaaaaaaaattacaaaagtacaatttcacaatatttttatgattttttttttattttatttaaagaatatatgttctttttatattgttatctgtatgttattttttgttgttatttattgttatttagatattatttttatgttagtttatttagtattcttgttattttgttatattttatatgaaaaattgtaaaaatataaaaaaaaaaatctttaaacataaaaatgtaatatttttacaaatagtgtaattaactagggtttcatggacacacaaatatagcattttatttttgctaaataaatataacatttgtagaaacatataaaatatacacaaataattcagaaaaataattaatttacctcatcatcaaatgaagcctgaaaagattgaggatttttctcatcatcaagagcaggcttattagtctgattatcatctccatcgccattctcagaattgtccttcttctcagcattgaagttatcatcagtagtaatagttttctcttcttcttcttcttctacctttgtaaccttttcttgatcattatcattgtctatcttcaacaaatcttccttgtgtaactccggtgccggaacgggggcatcggcttcatctccctttgtctttggaaaacttccacaattacccatgttgagtaatagagctactgtttgtttcccgagaaaatattatatataagaaaaagaagagaatgaccctcttattctttctttcccctctttttcaatgttagagagagaaaggttgaataaaagaagatcgccaagacaagaaagaaaaattattattattattgtttggtgttgtgaggtagtttgtgctagggttatgtacccctttatatagggtttattaaggcacttgattctatatatatattcttatatttgcggacggcgtagaatttttcaaggatcaagaaagttgtcaaattcatatttactatatatatatatgtactaatttacaaataaataataatattagagatttattgtggaaaacatagttgtagtaacagttgggtcattgtcaatcacaggctgtttaatgataattatcattttttttagtgtattttttttaataagaattcattttaaaacatttgaatgtgtattattcattttatattaatctcaattattgcatcaaagaaaaggaatgtaattgcaaaacaaattaaatcacaatatctcttgtgggcctctttagatgtggaaaagtggaaaatagagtaatgtactcatctaatttttttttttattattattatttaaaatagtttaccaataatattttttattattattttataagaaaacggaaactattcttataagttaataattacctaatttgctaattttattttggcaaacaagaaaatatataaaattggaaacttaaaattaatcttgaattgattgcaatataaatgtataattagtaatctttatactgtacatgtacgtatccgatcgggttttatcaacttttcaaaatatgtttagcatagtcgcttgatataatataaatataaacatatatagaaaaattgttcactagtaatttcactagtcatgacaaagtatatttaagaaaagaattattattatattaaaaaaataataagagtttttttattagtactttttttaaaaaaaataaataaataataaaaattgaaatcaaaattaatttgttagaataattacttaaatatttttatattttgagtgaaaaatttaagtattactaatagataaaaaattttttaggggaaagatgcccttaagagaagataaggtaagcaagattacaagagtcatcttcaatccaaattgaagcttcatcta

SEQ ID NO: 491 - DNA, 2528 bp, Cannabis sativa
aatatactcaattgttatccttcttatgaaagttttgattttgctatctgggttttttatttttggtgtttataaatacaaatttggcaggaatgttgtaaatttggtgtttaaatttttttcttctgaattgaaattcttagcttagaaggctgtgatcatctatatattttcttcttgtttcccattttgaagaaaaataataaaatttagtgcaagctttgttatattcttttggataaactatagaaattagctcttcaaatatcaaattaggtgattccaataattgaaacttaatttctcatcatcacactgatcttatattgatttttccttaaacttaatgggggggaattcttgaagtcggattgtgatgcctttgtcagtagaagaggtaaatcaagttaaaaagtttatgcctttacatcttataacaattttaagcacagtgtagttctaaattcagaaatgcatatccaataattctaagtacttgttgaaaatgcagtatcagattgcccagatgtacatggtgatgaagatgcaacaacagaacacaagtggtagagaaggagtggaagttttagagaacaagtcatttgaggatgatgtatttgggaagggtcagtatacttctaaagtataccatttacaaaggtaagtttaagggcattacacattacatgttgaaagatttgatattggctaattgccatttgaaattcatgtaccacgtactcaatataatccattcttgagttaggaaaatttatggttgattctggtgctttatgagcttttgctatgtggtgatttttttatatgaccaagatgctttgcttgctataaaagtgattttttttttggtttactctctcttttctttgtctttctaagcttgcaattaattttagctcattacatcatcagcacagtactacatgataaagttagtccatattgattccactgttgacactgtatctccaaagattatctgcccttttgttcatgttagtaatttaagtctcttatgtttgtactctctttccagtaaggttccgacttggcttactactttcgcaccagctgatgctcttatcatgaaagaggaggcttggaatgcatacccaagatgcaaaacaggttggaaaatcttacagtgattcacttctcttgcatatatttttcgatttcgaactgatattaacatacttttttgttttttttatctgctatgggcacattgtcatccagtaatccaggtgactttttttcaatccatccctaattttctcttctatggatttttgttttccttttgcttacagtgggagcatactcactttctttgcatttccacagtgtccatactttacaaagtttcggctcactattgaaactgttcataaggctgacaatgggctctcagaaaatgtaagtttgcttctgtttcagttttttgatcggaacaggtccatcgattagtgttcaaattattttagactattgaattgcaggctaattaagatttgtcctcccgaactttgacatgtaccaaatcgtgcttcccaaactttttagacctttaaaattttttccttaactattaaaattattggattcaaggatgtctgttcaatttcacttacagacacctgacatggatggaagtttgggaggcacgatttggtgcatagataatcatcacgttaggcgtccattagtaaaattgaacggcaatggatggaagtccttgaatccaacaatttcaatagtttgggagaggagggggtagagttttaacggccgggaaagttcaggagacgtgatttagtacatgtgttgtttctgtgctagctattaattatgggcatgtcaatttaggttcatggtctaagcaaagaacagctagcagccaggcaggttgaacatattgatatagctaccttgtcaacagattactggagttacatggtcggaggaggtagtggcgtggatctttctaaatttaagtcagcgagaacaggccgtggtccacttttagagggatggcaggtttgaatcttccccaacactagtttgatcatagcttttgcatccatttatgtatctacatgcctccattgccttgcatcattatttttcttttggttttcgattgccatatggttttgatctagattgtacgtgtagttactaatcttgtaggttactcttttcttcagaataaatgcaatccagttatgacggcatacaagttggtcaccgtggatgtcccatattggggttttggctatcgactcgagcaagctcttctagcagtaatttatttcttacatttcaacattatttacttattatcttatcgaaaagtcactcagatttttgtgttgtgttttagttatcgaactatatattacgaatttgtttctttgttgtttagatgtaaaacatatagttatagagaatgtaatttgaaaaccttgtagtggaaatatcttaagatctaatggtgttcattg

SEQ ID NO: 492 - DNA, 10501 bp, Cannabis sativa
gtggaagtacctgggccagcagaatatgggcttctttaattctgaaatggatcttaaagtcctgtttcgtaacctttaacttaatacgtcggtccgaatcaattttatttagaaatctcctgttcctcttgggtttggctcttgctttgaccttttctttttttgattttgacgtcgacaagtttccaactcctgaaggacttccaggtggtccattttcagattccagaatcccacttttgtcatccttgctaaattcaactttgttgttaccatcatcattttcactttcagaatcatctgatacatcctctttattatcctcctctccagagctaccttcataatccatctcatctgtaacttgtcgctttcgtttttgtgcatccgaaccaaaatcatccaacccttcaccatcatcctcaccatcatcaccatcctcttcctcacgtcgagatctttcggaagaatcttcatcattctcatctggaccctcggattgagattttacttcaacatcttttattcccttgatttttttgagcaactttatatgagattctattgcatcctccaacgccctaacaaagtcaacacttagggtgtcttcccagtcagctgtgtcgataccagcataaactggaggtttgtaaagcttcatcttaagcttataaatacggcaaattctattatcttcaagggcaaatggcttaacagttactgtcatactctcaataatgtctgccacagtgactttcttcagaccattagcgagacttttcgcatcttccctgcagatgaaagataaaaaataaataaagtgccaaccaatgcatccatattgcaggttatgttcatattcaacaaaagaagatgaaatgaagcagctggcacattatcacaaataaatttgattttcctcgattgatttctttttccttggaaatgatcagcacgcatggtgccactacaagaacactaacaaggaggtcccaggttaggtttgaacctaggacctccacccttaccctatccttccctcatcaccgagctagcctcggtgaattgagactacatgaattctaataaacactaaacagcctgtttcctccatttctcaactcaagaaatttccgcactacctagtaacttccatgcattaaaaaccattaacaacttgtatcacacacaagggaaagaaaaacctctagtgcccaaaatcgaataaattgtaagctacttactctgatctgtcatcttgcagtggacatgtcataactggagtcttaatatctttagaagcagtcatcaggatttcttggagacgaggaattccaagggtcacattcatctcacctcgaccagcaaggtgaaaagtgttcagtctgaagaaaaaattcatatccaaataaacaaagttattcaaaaaaaaataataataaacaacactagcaatgaaactctgttagtggatagatacaatgacttagcaagagtgtaagaagtcaatgatattcacagacctaacaaccacatacataagtgccttttctataagatcaaattaagtaatgagaaaataaaactcacgtcatctgtgttgatggttctcctactgactgagaagcaagaacaccaaccggttctcccggttgagcaagacttgagagatacttatgctccattaacttcaataaatcctgatttgagccattatgatttttctccaatgataacttttttataagtttcactgccttcttttcaagaacagatggcaaattcttaatgtaaggatttgatttttcaaattggcgacaacacttcttgaagattgtttctttattctgaataaaaatcaataaaattctatttagcatggaaattcatattatcaggggaaaaaattatacataaaatgaacaaattctcaccactgccagtgcttcaaaatttgcaagaaagcttgtttgatgaacatctacaccatcttctccataacgaaattgaacaattgaaccatcagaatcacgaacagtatgatcatagttcactttaaggccttccatattttttaccaagcaccgttgcaggtatccactgcgagatgtttttactgctgtatcaaccaatctacacaacagcaaattcatcattaggaaaataaagctgacagagggtacacgcaactgaggcagggtaccagataccaattaactacaaattgaccagtttgtattatcataaatcatgccagaaaaaaaaaaagaaagaagagcttcggttcaagaagactatacttctgacctggtgcatgataactccaatatacaatttagacaaaaacacaaaacaaaacatagtttctctgcttaagaaattcaaacaaacattacccttcacgaccagccatacaatggaagtaatactcctgagggcgaagaccagaaagaaagcgatctactacaaggcctccagcacgagatgcccaatcccagggaggaaagcaaggtaatgtttttccagaaaccattcgaggaactcgctttccttcaagttcttgttggcctaaatgtgaagatatttgctggaaattcacctgttcaaagcataaattggtagagaaaataaaaatccaatacagtgtttcgactcttattatcaaggcacatacgatatcatacatcctggtcaattaatatgatactcgtaatagaaattttttcaagctgaaaaaacttaaattatatattatatcacgctaaagttgataataaaatactcatataatacaactgagattaagaagtaagcctaaggctcaattagccctatactcaaagattgacatctctcatcttgaaatgcaatatcagcatcaccgtccaataatgcataatgcaagacacaaaaaaaaaagaaaaaaaaagcatcaaacacatttagccatacaatgaacaacaataaagacaagaaaaatgttaaagaaatcatatcaacttcataaagaaccatctcataaaaacactacaggacgaaagaaacttacagcaccacctttagccccagatgttgtcataagagaaatacaattcttgctagggtgttttagtaatccaacagacaacaaccctttgatctcctcagatttgcttgttatatcattaagtctactaatcattttccgatccaaggatgccaaggcggcttctccatttacacgaatagttttttcaattttatgttgcagggtaaagggatctgcaacccaaatagattaagattattcatcaacccatacaagtaactaatgaaaacagtgataaacatggagagaagataaatgggagcaaacttatatttcttataaatttcaggcgacaattaacagcatgctctgaaacaagactcaagataacatagggttcaaaatcacaacctacatgaaatgcctatttggtgaagtttctcctagtataatatatttaggtttgaagtgtaatatccaaatagcccttggtcagcttctgcataaagaactctagtctgaatttgaaacttctcatgaagaaatcaatttttgatgtacctgtacaaacctttattttttggcgcaaaagcaatataaaccatttacgcacctattttttcattatctttgaccccaacaaactcacggtgaacttcttcaccaacctcttcacacttttcaagtaaactcttcctttctctgtctttactttccactagcaaaagatcatcaactccacatgtgaatccatgcatctgggtaataaacatcacatcaagcaagcttatgtaactaaattttctttatttgaaagacaatgaaagtcatactagacaaaaataggtttcaaaataaacaatgcccaacctgcaagaaaacagtaaataaacgactcaatgcagaaagcaaaacaccagctgtatttgagccatagagttcatgaactatatggaccaaaccataatcagcaaattgagccttgtcaatgacaccacggacaaagttgtttttatagataaataatttgtcctcctcaagctcttcattcatcttcaattcatctttatcagattttttttcttttatcgaatcttcctttctctttgattcagaatgatcagcttttctctttttctttgattccttttctccatctttatcaacttcttttttcctacttgtttcatcatcaattgctttactgttaaaaaagtcacgggggattttcccactcttttcaacagtaaatggtagaaaccccttagtgatatggtttagcaaggcagtaataacctggaaagaggcaaataagaaataaaaacatatagtcagcttttcaagcatacatcctaacaaaatgtgattaaatacttcaattgagaaacttcaaaattcttttagccaacatctaagccagaaattgttatgcttcacaaggtcgaagtttccagataaacttgcaatgctgaaatgaaaagattgtatagaaaattagcattaattacctgttttcctgtccagaggggctctggtttccaaatagcaggcataagggattgaatctcaacttcgaaatctgccagaaaaactttattcccagagtttttggaggaagcacttgacctagtagttgaaagaccagtactataaagaagctggttaaacttatcccgatttagaaaagtatccttctttgtgaggagaacagcactcacaatatgatcctaaaaaattgtaagattgttgataagctgatcaaaaacttctacattttgttttttaaaattaaatgtgtaaaactaacctggatcaaggctcgaataggttcgccactagtaggcttgacatattgattgtttgcatttaagatgttatatccttctgcacgagaaatttcatcttgcggaaaatgtacattcatttcatcaccatcgaaatcagcattataagtactgtaatggcaacgaatacattaaaaaaaagtactagttggaatcggaaaaagaactctgagtatagatacacaaaaggtgctactacagtaattctatctcattattgataggtactagtaattaatggctttaaacaaatttgtgaggccacccaaacaacctaagccactaaagatcttatgattcagcatgaagtcataagaattagtgattattctagatcacccccaaaaaacctccatatacaaatataaatataaaagtaggtgtagcaaacagacatgaattaaggacccccagctgttaaaattgacatcattgcgtttagagactaattagatcatccgggtactttccatgtatatagatataaaaagtaggtgtagctatcgaacaacctatttggcatgactttgaaagcactttcagagattaagagctaccgtagagaggtaatgagtcaaccccagtttctcaacgaagctcttttgaaaaaaaactagggatgctttaagttttaaggaaataaaaaataaataaataaattattgcccaattttagaagtagatttcctattttatccttattctaattaaagaaaacagttattcaatcaaaacatatttttgtgattttaaatgctcttttatagtaaactatccaaccaacaactataaaaacttcagaatatacttctcttcttctactctctagaagtagaagtaaaattatgccatacaagcatatatggatagctacaagtataaatggcgtttgtatgcatgtccatatctataacacgtatcatgtatgagttaccaacctgcagtttgcatagtgcattcgaattgttttctctcccttcaacacacgaactacatgggccattatactgggcttgtgaagtgtaggctgcaacacaaaaatcaaaactaacattgaaatataactatggattttaaaacaaaaatagaaaaactcatgtttcatgtcccacagagcaatcaaaaaacaaagcaaaaacggcaaacctataaattaaatttcaaaaatccaacagaaagcacttttttttaaataggaccgcaactaaccatcaaagagaaaccactttttccgctgctctacatctttatgttattgaacaagaaagaaatagtttaacaaatagatattatctgcagaacacctccataggtctactgctaactaaacactatgatccatgagacattatgcatttctattactaagtctttgactccaaattctctgtaacaataattacagtgcctaaagcaaaattaagtagggaacataaaaccaatgaacacccaaactttttttagtagagaacagatgggaggccataactcgtggacaataatgtatgatagagacaagacttgcacatttgcttctgaagatagttaccgaaaaaagtaagtacatgtcttgctggaggcacacatccataatagaaaaggaagaaaaaaaaaaaagatcaagacaagttatacctgtcgattgacaagcacgatatcaccatcttgcaagtgacgatgtacaaacttgccttcagattcattatcaaaactacttccattttgcacaatagcccctctagaagaaggtaattttctcgatattgaaatacgtgctcttctgcttggtgctaatttgatagtagacatcttgtctacatagtgtgtagccccaggatgaatttcaggaccattgacgatagcatcccttaacttcgctacattccatggagtaactctctgcaaaatttcaaaatgtataaataaataataattaagaaactatacatcatgacccaaaaaaattatagctctacaaatttacttaaaactaaagattgaaaaggaaaaaaaaagagcatatacatctaattactctaatctatcttccaacacatggcaaatcattgccgattgagtataaatagcaagagaaaaaacacaggcaatacagaagctctattgtaaagcttacttcaggatatgttaatcttagagcaaagtaaggaggaattccaatttcattgacagccaaatagggatctggtgatatgacagaccggcatgcaaaattaactctcttccccatcattttctgtcgaaacaagccttctttcttctccagcaactgaattattcctggagcagcattttttttccctgaaatcaaaagagaattgctaagtgaaaatgttagagatttcatagccaagcaaattggatttggttggacaatcttcatgaactgatacccctcaacaaaatggaaaagctgagagaaaaaatacgcactagcatgtgtgaagagactatcctagaattatgaagactctaactgcttgcctcaaaacttcttttgcaaatgtaatattttcaatgccccaaaaggaaaaacaaacgagattctagaaatttgcaccaaaagaaacatttccaaattcatcctacctaaacctttaaaatgtgtgtgatatgtttcaaagctttatcatttatttatttatgctttcacatgataggttcactttactttctgaaacaaaggcattggtgggatctaataaataaaaataaactgtggctattctttacaagaagaagggtaacaaatcttatctcaaacacaacgacccaataactcaacaatgatgacatttgccaccaaaaaaaattttaactgcagaaaacaagaaaaaaaaaatgtctttgtggttttgaaagtgaagccggacagagattagtgtttcttatatgattgttttaatctttgtttttttacccctagtgtgctcacttcctgctgttctacactgctttccaccatatagtaaagcaaaactacaaaactatgagtacatttaacccaaaaaaagagggagtccgggtatgatttaccacttaatagtaatacataacttaaacaccaaatctgaacggtaaggggaaaaaagaaaaaactcaccagcagctgttttgctatcaaacatcaaatttatagactgctgaagatccatccacctgcgtacaatcttcgagtattccaacttattaatatgagcgtttcccaaatcaatattggcctggagaaccttacttaacaaaacagtttgaggatgttccatcacctacattaaacagaagccgtaaggaaagatacatctaaattgtggcttcaaaaatgtgaaagtgcactgaatgcatgcctaagcattgaaacagcttactctcataatctatacaaaaaaaaaaaaaacttaataaaaaaacagtcatatgttaaggttgttcagaatcttcttaagaaaagttctaatagaagcaaattttcacaaactcaataaactggtttatttgcgaagctaagatagggccatctgtatagatttaaaactacttacagaatcaccacccttggacggggggcggaatttgattggaggtacaagaacagtctctaagaaaaacatagattgatctgctttatttccaactccccgactctggatgtcactaattaacgtaaatagttcagcctcatttttccacaagagcttcataatctctttaacctgtcacaaaagcagagaattcaattcatccctttggaaacagagcaaaatatttaattattaattatgcagaaattaatcagagtaggtttattttaacgcttacagagaatataactaaggaaaagttaaggcttaataattaaggcagccaagcaagaagcacacctcttgtggcaacagaggtccagtaaaagcttttctctgtttgaattcctcaccagtgttgttgcactcttcactttttttacgactctttgtagaggtagcttgagtatccatgatagcatcaccaccttcagttggtgaatcatgaatgatttcttcctcaggcaacaactctgcatctacaagtggccattttaatttttttcccgccataacattacttctaatatcttgttcattataaggttcctacagccatcaataaaataggaacctatttagaaactaagaaatgtgacaatgatgtgactcccctgccacaaactgtgcaattctaataagccaaatcaaatgtgtgcataaataatcaaaaagaaagcaatcacgatcgaatttcaaacaccaaagattaaaggagattaccatgtgaaaccatccaaaagtaggtttgactattttaggattatatgcatcgcaagattcacatttcttaggtttaagcttcataaagttcttcaaaacagtcattgcttcagtgagctcaaaagaggtccatttgtgctgctttatattcttgacaccagcatacttgctcttcctcccaacattgtcatttggatcagaagacttgtcaggcaaatcagaatctaaggcctttgccccgacaacatcacctttcaagataagttccaactgggaaacacatttcttaaccttgattgacaaacaaaacatgtcaaaaagagcgattttaggaagatgtgcaggcttaaaaatacataaaaccccataaaataatcatagtatactcacatatcttaatcatcacattacacttaccgctattggacccgacctatattgataacagaagaaacaagttctttgtaagtgactgtaaaggatattgaatagcatgggattatagaccggagaaacgagatcaatatgaccacaatgacctgggcagctaaatgaacgctgaccacaagatttgcatctgcattgaaacaggagcaaagtatatttacttagttaacatcattagtaacaaaacccaacaacaagtaaaaatcaaactactgcaatgttacagaattgtttcacttaataatatcttttaggtgacagtgtgaacctttcaaaaaaatgtttaaaaataaattaagtcttcacattaaagcaatttgcagctccttctacttcacccaatccattcactttaggtcaaaaaaaaacatataaacaactcacaaaccagagcagaatttataatggaaaccataatagtaagtaataacaataacgttatccttataagcaatacaatcaaaatcaaaatttaaccaatatgcacatgaagaaacacttacagtgttctttcatctaaagatcccaaagccggatcatagagtccaccggggatgggtctctccacattatcaagcaaatttgggcttgtaatttttacaaaactctgcttacgaacctcttcatctgtatagaaactgaactgaaccgcctcgactgactccgtcgcaccctgcaaaagaaacagaacccaaaaaccctcaaaaacaaattccagtgattcaaacctcaaactgactaaagcttccatctttcaccaaaaaaacctgaatcaaagaacaggctcacacccaacgaaaccacaaaaacaaaacaaacaaaaaaaaaacaagtttttgccacatagagagagagagagagag

SEQ ID NO: 493 - DNA, 1914 bp, Cannabis sativa
gaagaagagggatggggataatgtccaggtggatatggaggttgatgatagggggaagaggagagaacaaggagacaagggatctcttggaaagatggaggtgataagttttctttgggaggttttgggagtatatttcagaggggaagcgacaacgtcactaattaaacgagtaaacgtggtaaaaaagagttgatcaaagagaaagctaggagattgggagcccttaacaaagaatctaagtcggctatcaaaaaaggtacatttaagggaaccatctctagggtggatgatctaaaagaaagtatttcttgggatgctaatttctctctttctactgagaatactgatgaagcaagccttgctaagcaaggtcaccgagaacaataaaaatctttagctggaatatgcaaggtttgagaaactcttgcacattcaaaactttgaaatctcatattgtggtgttttaacctgatatgatttttctatccgagtgtaaactatataatgattgtgatatggaggttagttgatcatgtgggtatgattaatgttttgtggttaagagagtggggctgagtggggtcttttgctgggatggaaggatattgtttcagtgcgtgttagatcatcatcgagatttcatattgatgtggtggtgtgtggtggaaatatttagtggttccattttattgggatttatgggaatcttgaggcttttttgcgggaactaacttgggaattaatggggagagttagggatgcagtgtaagggccttggttatgtgctgaggattttaatgagattttatgggactatgagaaataggggttaattataggaaatgagaggctatgggaaggttcaggagggctttagatgattgctctttggaggattaatctaaagatttgaagaccttctggtgtaatggaaaaaagaataattttattttggagaagttagatagaatggattggatggatggttttcctaaatactacattcaatatttggattaggacaattcagaccataaagacatgtttattgccctttgggaggaggagagatatgatgcggatggagccaaaaataagtctaaatttcactttgaggaggcctaatgtgaggaaggggaatgtagggagattattgaacgtcattagaaaaatggtttggattgtagtaatccgagtatgatcaaagctaaaactagtagatgtgggaagtccctaaaggactgatcaaattctaaaagaaatgagcttaatggaaaaaaaaaaaaagatatacaaatgaggattgcagagttaagtttgcatatgacaccgcgaaattgggatttattaaagagagaagaaaggaatcttaatccactgcttgagaagaaggaagtatattggagacaaagaagcagagctatatggctaaagtgtgctgataaaaataccaagtattttcaccatatataaggcaacactaaggaaaaagaagaacataactgagaagttgattgatgagcagggggtggagtacgctcagagtagtgagatttctaatattgttgagagatattatgcctcgctatttacttcttccaacgcgatggaggaaagtattttggaggtgactaggacgatgtagattagggtgactacagaaatgaatgattgcttactaatagagttcactattgaggaggtgagatgggttgtgttggggatgaaccctctaaaaacactaggtaaagatggtcttctagctctattttatcaatagtattgggatgtggtgcatgtggatattctttgggtttgtctgtaggttctgaatgaagatataccgctatatcaagtgcatgagacgctcattactcttatacccaggattgacaaatcttgcaaagtgga

SEQ ID NO: 494 - DNA, 3959 bp, Cannabis sativa
tttgtaagttcacccctataagatcaatttattctgcaagacttgtaatattagaaaacagaaaaacagaaggaattgcaattcttctcctcattggtttcttccctttaactttcaggcacacgtttaggcgaattattagaaacagttcaaccgaacagttctcagggttgccatacatttacgccctattgaactgcttgatctgcatgtggtatggaactccaatcgtatctccagagaatactttaattttgacagttaattcagttggtgcagttttccaactagtctacataatcctcttcataatatatggcgataagccaacgaaggtttgcacatgttttatgatcaacttgaagcatattagctttgattttccaaaagccttagttgttcttggtgtaaacttttccctttcattgctaatggcaggtgagaatgcttggtttgctactagcagttcttgtcctatttgctgcagtagtatctggcagcttgcagattgcagacccttggatgcggcgaatggctgttggattgttaagttgtgcctctctcatatcaatgttcgcttctccgttgtttataattgtgagtaagctccataccgttttagttttcccttaaacaaaaggtatattagactattagtaacaatattgattcttcactcttgtttgctcagaatttggtgatccggacaaagagtgttgagtacatgccatttttactctcactttccaccttcttaatgagcacctctttcttactatatggaattttgaattatgatgccttcatatatgtaagcttttgttcaacacatgtctttgctattgcttccatttttaagagttattttcagtcttgagttcaatattgcatcctcttattcgtatccatttacttttccattgtgttgtatatcattttgttgtttgttgttgttgttacattttcaggttccaaatgggataggaaccattttgggaattgtacaattgttattgtactcttactacagtaaatcatccagagaagactccacagaaccactgatagtttcatatgcataaaatacatcttcctaaagagtcttacctatacatagtttcaagtgcaatttgctcctgttgttttgatcatatgtttggacagaaattctgtattttttagacttggctatatcgaaattgatagccataaaatctgcatattttcgacgtgtgtatgagacaaattcattgggtgcatctggaataagcgatgacaatgcttctgctcaagaacattttggcatttcatccaccacaaatttttgttgtcaaccaaactcttattcttttgtattgtagacttgtaaatttgagagttttaagatttgttatatggttttccgaacatggattgacagtgtcctgtgtccctattcattgttaattggttttgaaatgaaaccgaccattcaaaattagtgatcgaacttaatattatacctaagaccatacttccacatggcttaataagtgacattaaattaggaaagctgcaatttattttcatttaaacaacatttttcttagaaacgacattgtgcaaaaacgacagttgtataagatgtaccgaaaattgatgaatgaaattccgatggatcgttgggttgggtgtatcatgattggccttaattaattaatttgtcgtcattatcattattagatcactactagattagtggctgtggtggtccattagttatttatattttaaaacgtgtccagcataattatcagatgcacctaacaactgggatagccagtcaattcaattggaaaagtgttacagctatatatacagtggggaatttaacgcagaagaaaaactttaaacaacattttccactattgcatccccacaatcctatgcctagctagctatgtaagtcttctctatctcaaacataaattcacagcaagtctctgagtgttgtcctcattacaccagttctttcttcctgcatacacacacaacacttaattattttatttttattttcaaatatatataatccatacaaatgaaacttatctcaattaaagttttacacaatacactaaaattgaaaaaaaaaaaaaaaaatacaaaaataccttatcatggaaaaaaaattatttttattgtttgaatttttttatttataaaaattaaaaatatgttttacagtaaaaataataaattattcagtatttttttttattattttatagttaattctttcgttatattttgttattataatggttgtgtcttatttttttcctaaggaaaaggttcataatcttaaaactttagaattatattttaaataaaaagtttaagcagtaaaattataaatataacataaaactaatatatttatgaaaaatcccccaattaaaaaatagcaacaaatataatgtgcgcataaattcttatgcatttatattattactcataaaaataatactagcatgtgtaatgaatcagattaaagtaattaatgtagatatgctcattttaaaaattaattttagatgaactaataattacataaaagagaatggtataattggtaacattgttacctgaggtagattgaggttgcatgaattgcgagcattgtcacaaagcaagcggccattttcatcgtagagaataaccccactaaaccttggaagctcacacttctctcccatcagaatcggtctctgccacaccggagaatccttgttaaggctctgccacccaaccccaaccccatactcatcatcatcatcatcatcaaacccctgatttctactcatcaccatcttcttctctagaagcggcaacggcgaattctcaccccagctcccgccgctccccgtctcccccggccactttctcggcccactccacctcaccgagctaatcaacaccctctttactaccgctgccaagccacacgccggctctggcgggggcagttgcagttgcgcttttcgaaactttaactgctttaacagtattgtggtcatggccacgatgagtccaaggacactggcggcggcgaagaggaataggataagtgcttgtttggttgaaagtctcatcactctgtctcctatatttctcagagcagtgtccatagtttgttattacttagtctgtttgttggtatagtgagaaataaaatacatatgagaatgagaatgagaataatgagattattatatatgtaaattgaaaaaccttgttaataatgatgatcagaattattaagtgtgtatattcacgtgagttgaaccgctaaatttgggggataaatgtacgatatatatatatatatatatatgtttatttatgttttgaagccgttggagaaatttgcagttctcaccgattactaataaagttgttatacttatatagtaatggctatctcacggagtttccatgctttgtggctaccatcttcaatcactcttcactaattttctactgtttaatagctacctatatttttggaataggataattttatgctagtactagcagttaattgaatttgggagtgtgttataaattggattggtttataaattataatattatgctaattgttataatctaattaattaaataaattcaacttttatatataatccaaatatatatgtttgtatatatagagaggtgttgggagctcagaaggaagtgctcgatcaacatcacgagtgtgtttaattctcgtggaagacacatgtattataatattagatattttgttaagggtagaaatattagacacaatatattgaggttttacctccaaacattaatgcaaattcatactctttggggacctatattattctcttttgctaaaatatataaactattatttaaaacatgagtaatgatacaatgggcacata

SEQ ID NO: 495 - DNA, 5206 bp, Cannabis sativa
cagccacagcagctaacggcgactaatggagctttagttgtgaagaagccaccttccaaggaccgtcatagcaaggttgatggaaggggacggcgcatccgcatgccgatcatttgtgccgctcgtgttttccagcttacccgtgagcttggccataagtccgacggtcagaccatcgagtggctcctccgccaggccgagccctctatcatcgctgctacagggactggtacaacccctgccagcttctccaccgtctctgtttccgtacgcggcagcgccggcaacgggctcggcggagtctcagcctctctttctacgtcttcgggcaattctgggtcgcttgagcacaagcccttgctgggtcccacgccgttcatactcggaaaacgcgtgcgcccagacgacggtgtcggtaaggataatcacgacggtcatgacggtgtttcggtagtcggagccatggggtccatggtggggtctgccacgactgcgcccggaggattctgggccccacacttcggacaagtctggagctttgcggcggcaccacctgatatgcagccgtcggtctcgcagcaacctttgtttgtccagcagcagacgatcggagaggcctcggcggcgagagtgggaaattaccttcctgggcatctgaatttgctagcttcgttatcgggtggacaaggaaattctggtcgtagggaagacgatcctcgctaattcgagtctccaagctctctagttatggcggcggcggcggtgtttatcgtatatataaatatgtgtatgcttatattgcttttcgtgtgcggggggtttgagagattttttcttctttgcttcagttaatttagggtttagagttgtattagcttttgttggggaagaaaaacaatttagggctcggttgaaattcggggaatttaagccatgtatgaatgaattcaattaggatttaggagttccaattgtttattaggattttgcaggggtttttgaggagaagagggaaggagtttagaagaattagaattcttaagatggagaggtttgtttcaattatcaccattgtagctgggaactaggttttccttcccttttttttttacctaattttttttaggaaaattccattggtcaagaaacacatttgggattttcaacatttcggagctatatgtgaaatcagctcattatcgtgaagatgaagttaattgccatattggcaaaagctcatttggttgagcaaattgggtggttttgatgtttgagctttgaagttggtatggcactactgttttgaagatatgtcgtttgtggaaatgtctcttctacaaatagggtctccctggaagctttaatttggtcactgaagcccataatatccacatgctgaagaaattggagtttttcacttgtggttgtagtagtacagaattggtttgtgcgcttttaacaagctcctaaactaaattccagattttgttgctgaaattccccttgcaaatttcaatggtgaagaacaaacagaattggcagttcatggtgaatgtcatggtgaatgcttttctctctctctctctctttctctcttttccgctttcatatgctctttgttgttggtctaatgaataatgatattaaaaaggtgactggtgtgtgtgaaagataagatagaaaggaaagaaaatagctcttgctcctctctgtaatacctgtttttttcttttttttttttgggaaatttggtccgtattcctttagccatttcttagatttatcagcgtgaagaaaaataataatgtgtttattgtatgtgagtggattgtttttgggtgcaatgtggtgtgaataaaaaaaaacccatctgttcttttctttcctgctgctcttttttttctaaatgtcttatcctttatctttccatttcttaaatgtatatatgaacttaattaattcggtgacccatgtgttggatctatattgttgactttaatgtgaagagtttttgacaagccagtctgtgtgtgataatgtagctaactgggttctccttgattgagaaacttattatcttttccttttgtgattggagtaaaggatattttagttagacatactttgtatatttatgagagtctacctagtacttattttgcattttgagattttatttttcgaaaataaaacgtttggacaattagacctcaagggcatttcatagaatgtttaccagtgtggaggagacctcaatcataccagttaggttcagggcagaggtctaattagccacattatgggcagcaaaaatactttgtctacaaatcttaataaaattacaacccaaacaatttagaaaaactaatacaattactaatatagttctcagtttcccaaagacctctaagagcacttataacactctgattcactctcttgcatcacaaaattgtggcctctagctactgcagtgtccaggaagtgcagcttgtcaatgagggggtctgaaaatgggagtcttttgacagccttaatttaaggcttaacaactcaacttaaaagttttctcagttaaagctaactaaatttgccattcaaaagtttatatcagtctatacaacggtcattcttatcatttttcagtcatttgtgcaggatttcactctgtacatttgcagggtggcttttgctttttgtccctattaatctaattgctagtagtagtgtcgtcaattttatcactattcctccctccctctctttccccctaaatgtatggaataactttctgctaaacttcatataattactagtaaaggattcaatccatgcaatttatacacacaaattcattaaatttacaagagatactgcgtccctatatttcctgtatgcactagaaagaagagacagaaagggttattggattgactgtataatgacagcagtaaaaaatttcagcagctttcaatttcaacccaagtaagaagagcactgtgtgtgggtgtgggtgctttaaaaacctttaaataatataagttgtctgcaattgttaaaattttccactatggtatgcccacaaaagaggtaatggttaaatacttcctattcagggtgaatgcagaaactcgtaggaaaaaaaatcccaagtcgactcgtaatattggcacagttacatttacatgcaaaaattgtactttttatgttaataaataattgcagtagaaaggtcagagtcggacccaataattgaggggtccacaaaattaattgccatggtgaagagttgggaagcatgatttattgattttttggggaccatattgaaaggacttgattacgtttacacaggttgaaactctgaattggaaaacggattctttcgtgttgagcccactatttcctttggtgggggaccctttttatgtcctggacctgacccatttactatggctgacttattcaacccaaggtctttgtgcttctttgtgggctctctctctctctcactctctctcattaaagaatcatcaatccaacctctcattggtcatatctacatttctaatgcttgacggtgaatgcttattggttaatgttttatgcagtggattttgggttccattgataagctggattagatactagatggtttttggtgggctaagaaacatgttatctgtatatttctattgttatttataagctcaagtttgagtgaaaactactatgctttggctgatttctgtatgttttgaatgaaaagacggtgttaaactcaagtttgtgaatagtaagtctcaaacgtattaaacaatttagaaagcaacacaccctaacgttttaattaaatgtcataagaccaggccatgatgttaaactcatccgagacttttggaaaatattcattgatagtgaattataatattgtaataatttactcttcttttttttttgttggaaatgcatacttgacaatgagattaataaaaaaaagatgataaaacatgctgtgtatgctgttaaatataaaagaaaactacagtgaaataaaattggaaaaagtatgttgcactgcagagtatgactatccattctctaattcattgttcagccatcttaaccttttcaattaatgaacataataacaataaaagagagagagacaagtaccgaagaaaacaatttaatgtgcatattaaattatatgtacaattaagatttagtgtcatcaattatggctattaacatgtttttgaatgtcacaaaaacaggataaataatagaataatagaccgccgaaattaaacaaaaaatgcccccatgcaggatcgaactacagaccttcagtttacaagactgacgctctaccactgagctataggggctttatgattttcgttaagaattatttgttattaataataaaaataataaatgaaatcatcacactgcatctgtggggaaaaaaacgaagagtaagatgaagagagactcaaataggtagactttattctccaagatcttatacaaaagttatggtaacaatgttaacaacattctacagattttacccaaataaaatcattatacacctttaaaagttacttgacaaacttttggggaattgtcatactatatagagaattgctaaaagacgttattgttattggtgcttagcaccttctttttcagtgtcatactgttattagtgtaattaagtattgagtctcatataactttaaaaaatagttttaagaaatatcgttaatcaatcgtgaggcgtcacctataaaaggtgttggacactactggtacccaatagtaatgctctattatatattattcatgttcatgttatatattttatacgtttggattaagaacttttgctccagaattatgacctatgaattattgtacccctgaacttttcagacagttaaaaataattctggaactattcacaatattgtaaagtggtcattttatcaggttttgtcgcacgtggcaaacataatgataacatggatatttaaaaaacaacatgtataatttatattaaaaatataataattaaaaaaatatgtaaaactaaattataaattttaaaatagttttttaaattaattacacatttggcgttgatctaacgctagtgtcataattgtttaaatagacatgtcatcattctatttgtcac

SEQ ID NO: 496 - DNA, 1082 bp, Cannabis sativa
tatatatataattttttttaaaaagatatttcagcccaattgccaaatacaacaattgtgtaaattacaaaacattagaagaagaattaaaataagaaagaaaaaaaaattattgacttttctcttgtcaattatcatatgcaagcaacaataataatcaatcaacattggttttttcccctctttcatttgcaatgatgacttaactgatccgacggcagatagtgactccatcaccaactggaagcatacagatctcgatcctagggtcagcagcgagtgctttgttaagctcaataacaaagtctctgtagtacctaacgtactttcttagtggcgcgtctggtggtgcgaccacagaaccgttccagagagtgttgtcgtacccgattacacccccgaccttaactagatcgatcaatctcttgtggtagttcaagtagttgtccttgtcagcgtcaacgaagataaagtcaaaggttccatggtacttaccctgtggttgttaacacacaattaatcaaacattcaagacaaaaatgaagaggtgaaagaaaagagggaaagagattttacatcttcaatcatttgatcaagaacagggagagcagggccttctctgaaatcaatcttgtgagcaacgccggctttttcaatactaggaagacccaattcgaaattctctctgttaatatccatagccagaatctgtggtaaagtaattagagaaataaacccaattagaaatttatatctggttcgatgaatcacaatcagggattattatttatcttcatacctttccgtcatctgggatagccagagctgtggcgaggagagagtagccagtgtaaacaccgatctccatagtgttcttggcattgatgagtttgagaagcatgttcaggaactgaccttcatcagctgaagtagtcataatgttcctgttttgatcaaatcaaaaaacaaatcagaaaacaaaacccccaaaaaataatcagagtgaagttaaaccaaacccaccatggatgcttagcagtcacttccctgagctccttcatgcactcaggctctcttgggta

SEQ ID NO: 497 - DNA, 1665 bp, Cannabis sativa
agaggtgaagattatgggaggtgactgctttgtgcttgtccatgtgattgaaaaggaataagaaatctttgagaaaagcaatgatattgtggaaccaacccttatgggataaaataagattatggtaattttggctttttatgcaagagtgttctttttgctgtctttatgaaggcttgaagtttgtcaacataattttgattttggtatagacatcttgtccgcgtttaaaataaataaataataataataaccgctctattaggttccttatcataggacaacatgatgtttacattaggttgtggatggaagaatctgtttgaacaccagtggttagaataatttcttctaccaattataactttatagaatgcttaaaatcctttcacgcaccaaacatggccaaaataaataaataagaaacaataataaagatatctaaaaaggcttaagacacttttgaatgcatgaatgacacataatattctatgcagaaagagaatatgtacaccaataattttacctcaatttgttgaagtttagcttcaaagagcttttccctgtcttcctcctacaaaacagaagggtgttaatgtggaaataatataataacacaagctgacctcagaccataatgtttaatgaaatatatccaactaaaggaaaaatcatcctaccttgagagtccggccatcaggagcaggatgagcaagaacaaagacgcgatctattaaaacaatcacaggttctttgcccaaacttttccagggaacctatggtttaaagcaacaaaaagttaatcaggaaaatgcacgctagttgcaattaaatattaaggaataacacttcacacaacttcaatagcctttagaatacagtcaagaatgcaagcaataaaaggcctgaaatatttagaaccagcagtcactcacaaaggaacaaatggagaaaatctataaaatcattacgttccaaaacctcataaattctacctgttctttagcccaacaaagcaaacacctagggtcatcctgtctagtgaggaacctaatataaatacttttttataacaaaactacttgtatcactaaataaagtttgcatgatacaagtgaatggtagaaaaaactacgaaaaaatcctgcaaactataagcagaaatgcatataaaatttcaaaaggacaaatatctcaactgatctgagaaagaaatattcttaaattccttcacattatgaacccacaatgcaacattcagtttaactatcccattaacctttctaaatcattcacaccctcttcaaaaattctcataacctctaaatcattcacctgctcttcgaaaactcttaaattcctttccaactataataccccataaaatagctggctgctattgttacctgccacaaaatttgtttgtagttcctacctttcaaccacaacaaaaacacttccacacatggtgctggaatacaccaactcaaatcaaaggtctccaatagtttatagcatatttgtattgaacttgttacttgtacaatatatgaataaatgtttaacaatctatgtactatggttttcctctgccacaagtgaggctttaataagatcgggggagacctaccatgtggtctccttctctttttttttaaaaaaaaa

SEQ ID NO: 498 - DNA, 2207 bp, Cannabis sativa
acacaacacatatatttttatatgaaaatcttaactcatcatatatatatattcaatgccataattccataattttctattctattttccaggcacccaaacaccttatttagcctctccctctcctccctccacgttcttgccaactcagactacttcaagctaaagaatttcagccattagcgccatatatctctctgtcccacacaaccctatattaaaatttcaatctttctctcttgtctctctgacgccggaaaatcccatttccggcggccgggaggagggccggccggtgattcacccatctgggatttctcaaaaaacttcaaaagcttgtttcagctgctactttgagttttttctttgtttctgggcttctgggttcaggtaggtcggagactttacggacgaccgtccatggcgatgtctgtggcgccgtcgccgagagaatcgatagctgagaaggtgtttaagagtgttggaagaggtgggtattcctattatcttggaggaaggagtagtaatagtagaagcaataatagcggtaacaacaagaggatatgtgggaatgatgagatggaatttgattatgacgaagatgatgatggtgctacgatggagctggcccagattggagccgagagaactaagaacgtgttgattctcatgagcgacaccggcggtggtcaccgggcttccgccgaggctattcgagatgcctttaaaatggagtttggagatgaatacagggtctgtttgttcattcattcaattctctctttgcttgagattttcttccataacttttcttatttatatttttgctctgttttcagttttctaatgtttatgattggattatgatattttcctcttctacctaccaaattttatcgtcttgattccatttgtgatatcttaatttatttattttttattttccttgatgggttttccaaaacattctcaccccctctttcctttttgttgaattcttaatcaatcaccttgaaaaagaaagaaaatgaaaacttgtgagacaaactaataagaagtttcttgctcttacggatggtgatttttattcttttgtattttatagatatttgtaaaagacgtatggaaagagtacaccggttggcccctaaacgacatggaaagatcgtacaagttcatggtgaaacatgtacaactatggaaagttgcgtttcatagcacctctcctcgttggatacactcttgttatcttgctgccattgctgcctactatgccaagtaagtaaagtacatcatccttattacatccacttttcttggcttcaagttaggttgtaaatttcactacacaatttggttaagattttgtggttttggttaaattttcattgttatgtgtttgaagggaggtggagactggtctaatggagtacaaaccagatattatcattagtgtgcatccattgatgcagcatattcctttgtgggtactcaaatggcaggggcttcagaagaaagtggtttttgtaacagttattacagaccttaactcttgccatcctacatggtcagtttgtgttgataaaaaccaagttacaatcatttcaagcttaaagaaaatttgaattaaccattctaattttgatgctattatatttaggtttcaccctggggtgaacaggtgctactgcccatcacaagaagttgctaaaagggctttattagacggcctagacgaatctcaaactcgagtttttggattgccaattcggccatcttttgctagagcagttctttccaaggtggatggctaaaatttcacttttttatgtctctagctttctgttatggttgttcttatctaaaagttttgttctttttggtccaggatcaattgagagaagaactcgaaatggatcctgacttgcctgctgttttgctaatgggaggtggtgaaggaatgggacctgtaaagaagactgcaatggctcttggtgaatcactttatgacaaagaagctggcaaaccaattggacagttaattatcatatgtggccgaaataaaacacttctatccacacttgaatctgaagaatggaaaatttcagtcaaggtgagtaattgactataattagctttttattttttcttaccataactgagattaaactcgaaaacagtactaatatttctttgtcacccttttt

SEQ ID NO: 499 - DNA, 2471 bp, Cannabis sativa
ccgatctcaccaccaccaccaccaccgacggaaaaccctcctcctccttttcttcttctccctccgtcataaccaacgaccttcctactgtctcatcttcctccaagtcctggctccattctcttcgcaaacccaaaaatcagaaccctaatttcgacgctgaagatgacgaaggcggggatgttatggttggaccgcctcggccattgccggagtccagttctggtgatggtgaggatgaggatggtgaaatgattgtcggaccgcctcggccaccggctgggttggttcagagtgatgaggatgatgagattattggacctccgaaaccacctccacggtttaatgccaacgattctgatgaggatgctgatgatgaagatgatattgaggtggagaatcgctttcggattccattgagtaatgagattgttctcaagggccacactaaggtatctttctctgtaaattcttttattttcttgttctgtaagtttaagtatttaatgggtattgtaaattagtgatgaagcaatgaaattggtgataaatttacactgttgtagttgttgttgtatgatctttcattgcttgattttttgttgtgttgaatgctcaatgtagactttaataacctgcaaattaataaccttacatagtgattcttaagttttactggcatgatcatgtcgaggagcatgaacaccccctaggatcgttaggactcctaagtttacttggcgtgttcacctcttgaataccccttaaggtgtattcatctatgggcctagagatataattgaatgtagtgggttgctgaagaactacgaggtttagattgagcatcccttaggcaatggtctccaatcaagtcttttaaaactagtgtataaaagagaaatctaataacgatacgagaagattagcattggccccttcgcaaggatgacatgcacaaatcgagaaattgtccaatttttttttaaaaaaactagtatatttcatgttgtagtaacgaaagtcgaagttgactaacttggattcttttgcctgatgtagggttcctttcccaaagttattttagtctgctttcaatcgtacaatatactcggatttaagttattagagtccgctttcaattgtacaatatactcagattaattatgacgtttaagttattccagtccgctttcaatcgtacaatagactgccatggccatctcgagcatgaacactctttaggatcgtcttctgaattcccgctaaggtcaataaggctcttaggttttactggcgtattcaactctatgcctagagatttaatagaatgttgtcggtcgctgatgaactatgaggttgagattgagcgtcccctaatcgacggtctccaatcatgtcttctatagctagtgtataaaggagaagtccgaatctaacaaccaacacactagcatatttcgtgttgtaaccacaaaagtcgaatgtcacttggattctttagcaagatgcggagtttctttcccaaagttattcctgtccgtttagctgatactgtaatttcagttctctttaaatagtttgggcaatttagaacatgaaggttattaaggtctagattgagcattcaacacaacaaaaaacaatacaagaaagaacacaatagaagtattcatattacaaaaaaacagaactgaaactatgaaacaacacacaagaatattatactggctcatcttataacataagcttacttctagttgatccctttggtgtttagaataatagagtactggttctatgaagggaaacttatttgcctatatcttttttacaggttgtttctacccttgccattgatcattcgggttctagagtactctctggcagttatgactattcagtccgaatgtatgatttccaagggatgaattctcgtttgcagtccttcagacagttagaaccatctgaaggtcatcaagttcggaacttgagctggagcccaacagctgatcgatttttgtgtgtgactggctcagctcaggctaaggtactgaataccaaagttaatttatttcacaatgttattattttgtcatttcttcaatagttatgacttatatgatcatacaactcacatctgcattgaataccttttagatttatgatcgggatggactcacgctaggagagttcgtgaagggcgacatgtatatccgtgatttgaagaacactaaaggccacataactggattgacttggggagaatggcaccctaaaactaaagaaacaatattaacttcctcagaggatggatcattgcgcatatgggatgttaataattttactagtcagaaacaagtaagtgtaacttacatacttttcaatttttttggacaaatgattcagctgattgtttaaattctggcaacatttgccaaaatgagctgctccagaggatgtttatgttaatg

SEQ ID NO: 500 - DNA, 5286 bp, Cannabis sativa
gcggaggtggaggaggcggaggtggcgtcattaaatattcatctagcgagccaaagtctatcttatgatcatgacgtttcggtattgtgcctaatctttgcacatttgtgtcttgctcattttgtggcttcgggatagctccagcttttctagtctctgtatgcatattctcttttggtctagttgcttcttttgtgactgttcaccaaaattgcaacatatgagacattaaaatcaacataagaataatgcaacaaattaccagcttttctactaggttgaaaataaaaaaaataaagaaataaagaagatttatttgcctttttgaatttgattggttggttgaaccaaggtcccattgtctcttggaggattttccctgtccccttgatacgcacctatttgatgccgcttggaaactctatcagcagatcttctttgtttactacatcttggaacgaaaaggacaagggctaatactaatattataaatgacaacaccccagcaattgatatccaaaccacctttttagtggtaagcgatttcttcggttccccagattttgaagtctcagatgtggatggtccattagcttgttttggtggtgtttttccagtagggaaaaatggtgtcctagaggaaggtggtccagaaaatggtggtgaaggtggtgaaggtggagaaggtggtgatagagttggagacgctgagggagataatgcttcagtagtagaattaaatggatttccatcttttctgcaataaatatcaagttaaggaatgtatgtgtaaagaggtaaaactagtttccaggctacctagtgatataccaacccataacttaacaagttctcttatagctttcaacagtaagattctacttcctaacatagtattgtatgaattacatggatttcaagttaaaaaagagatttatagatacaaaatacatatatttatatataataaattgtgttttggtcgtaacagcagttctttgagcataaaatccatgcaaatgttctatttttaacttggaatatcgtttacagggataaacatgtatcatttattcattatcacttttcttacattttctgcaaagtgataaaatttcagtttgcataaacaattataggggaaatttttcaaaatttaccatgaaaacattttcagtgcctagcattagtatatacgagatcaaactcttgttatatctctaatagaaactaaaaggctaagagtgtcataatttatcgctcttacttgaagcttgggatattgagcaagttgggtggaataggtccagggaaaaggttgttctctatattcctgttgaacaagggaacaaagtataagtctacagcaataataatgataataataataataatattactttaatgccaaaatgaaatgtgaattagaggagtacaaatctttcaagggaagatcttgtaagacatccagtggtccagaaagctgattgttctgcaaacgcctgccaatagaatagttagctctaatcttggtgagttggtaacataacaggtgctccataaattacatatgaaacactcacagagttgttagagatgacagacttcctaaagagggtggcagctccccactcaaattattactggataaatccctgaaaaatgacaagtggccttgtcatttataaatagacagaataggccatttgaaggtgagagtcaaaaagtttagaatgaagccctacaaatttatcagcccagtgagagttgtaaaggaatctggaattactccggttaaaaagttgttgttaagagacctgaaaggcaaaacagctcaagtaagattatggcaaatgtgggggtggcgcctgaccaagtatcaagacatattaaagtaaattacatacatggctgccagctgattcaacgttgataaagaatccgggatgcttccaataaattggttagccgaaagaaaactgccaagaaatggaatcatacaagttgcataaggtgatgagaacaagtagaatatttttaaatcactcattacttttagatggtaagatctagatgttactgtattacagtcaaacatacaagttttgcaacgtagctggcaaattggatggaatgctacccccaatgtggttattgcttaaatcactgttacaagaaagatcgcacacacattagtgattataatcaacaggtgcttcaaaagaaaattagttagttaatattttccaatatgaagcacataattatacgagtaataaaaatcttatatttttcagctagcatctatatgatgtttctttttctattttctcctttatgggtgtttggtagaggggtggagagttttttgtataattttggggttaaaggggttgtttaacaaaatatttggagcaaagagagtaactctggatctcaaatcctcaattttaatacacttctatcttccaccattggaaagagtttaggaggacactgtccactcttgtcgaagtgtcattttacacacaaaatttattcatttgttgccacttttgagaggggatttttgtttctccctttaccttcttagaaaatacacctttcattatttcatatattttctgcctcttacaaagcataacataaaagagggaaaaggaaaagaaaaaaaatagggaaggtgatgcttagtgtcaccagatatcagaggcaggccactttcaggtgtccacccccaaaacccctattacctaaacaaatcatagtcaacttcaaaagaccaaagaccatgcaatgatagtaaataccaactgccttagatatgtcttttgactttggtatcttgtaagctgaatcaaaatgtataaattaacacaattttccaattaaaaaagcaatagtaaataatgaaaacccgtttgcacagagagtgggaaagatggtaccacttacattaccataatagaagtgaacattccaagattaccacccaattctcctcccagattagcagcattaagaactctacaaatcccatacaaccataagaaaattgcactgtcacaagactaagcagtattcaattaataaaaaatttgataacagaggttaccatacattctcaatatttgagactcattgcactgtacaccttgccatgcttcaccacaaggatcccctccagacgcaacccacccaggaataacaggagaacccagtgcaatatataagtcattaattgcagcaactgaaacaatgtagacaatttggatggaaaaaaatgaagatatttcttaaagtaaaaaaatcaagtcatgctagtggaacagattgaactaatcaccaattctctcataacatacatgtaaaaaaaaaaagtgggttgggccacagttttctgaatcttctgttaactaaaattttgaaccccaacaccagttaaaaaaaaaaaaaaaaagtagaaaccttcagtttaagagagttaaaaaagaacttttgacgacattatcaaaaagttagaacactcattttgcaaattttctctggacttaaacaacagaacaaactaaaatactaaaagcatagcccaagaaaattcttaccatcattaggatctgtgataccaaccgacacttgggccaagcagatcaatactaacccaagtagcaactgtaaatggatcttcaagttcttgcagttcaagacagatctcctccaacccatttctcccaaacacttttcccacaacaccattcaccaaaacattcttcaatctgaaaatctaaacccaacaaatcctgtgatgttcttacagtacaggtaactacccaaaacaaacagagacccaattgacaatattaaaagagaacacaagatcaactagaactactccataaaaacctatctccgtacgatatatgtaaatgtttgtacgggaaataattataaatatagaaatctatacgaaaatagaaagggacttacagaggaggtgagtagcagtataaggattttagcaaatgtgggaggtagatggagcgaataacgagaccaaaagtgaagacaactttctgaaaaagctgagagatttcagtaaaaagaaaatttgagagaaaagttcttagctataaccattaaacttaagagctaagattcaatgaaaatggaatgaagtagtaaagatacgtaaccattaatattattattacttcaaaaaattgttcataaagttatagttgttattacagaaaattattatagaataattataataatagctcgcatttattatttacaaacattgttataaaattaaaaaaaaaaatgtaaccactgtgaaaccctaaccttttagaaagaactggaaaaataaaattcaagagaaggaaataaaattaaaaagacaaaaggcaatggcatttggagtggggtatggtatttatttctgaattaactttgttttttttaataaataaaaattatgattattagtttctgttctattttggtttttgtttttttcttatctatctttctgtttctgtttctctctccaagaaccaagaaccaagctactctactagtctagtcatatgcatatctgttttgcatgtcttttgagaacttctccatacttctccacgctctattatctgcgcgtacatgacacagcttcttccttttctcctttcctaagttttagttggtaaaataatttttaagaatatatatattgacttgagagtcaataacaattgttttcttcaactaagtaattttttataaaataaaataatggggtattcatttcttacaacatatgataatgatgactcaacttactgtatatcaacttgttaatttaattttaactacaaaatgtgtcagtcaactagccatatattaataatggtgaaccaccgttttttattttatcccaagataatttgttttctaaaatgaaaatagatcatcttggtgtaatagggaagtagagtagacgcagagggtcagcgcgtgatggcggggtggagagagagaagaaaaggagacgttatttttaaggggaaaatgtagttgtcaataatagccgccagtttttccatgggcttcacgtgttctgtcaaatgatttttttgggctttgtgctgatccaattatacaagcccactatttcatttttcgtcttttttttccattcattttaattttattatattttaataaataatataataaaggagattattcgacgaacttgtttttaaaatacttaatataaca

SEQ ID NO: 501 - DNA, 4021 bp, Cannabis sativa
tagtgtttttcttgaacttttgcagattgagctttcttttgttcagataaaaatggcatctactcaccaaaaaaacaaaagagcaaatgtcagtaacattttttttctgttttttgggtaatcttttcaggaaataaagcatatttcacttgttttgaattcaaattttgtgtcaactttttgctatttccatatcatgtgtgttatgccacttatggaggtgttgataatataatatgccttcttctggtcatattcttttcatatcacttattatgacattgttgcagaagcactatatgacatgaatggtgggcttgtgagtcaccaatcaacaatcattattattcatcttcatgttcatcacttttgtttcgcgaaaagggtatctatttttttttagagtaatttgcggataaatacttaaatttagctttcgcatgtgaagaaatacctaagttataattttagaacttctgtaagtacttgatcgttaaattttaagtagattgtcatgacaatctttaattagtctaagtcattcaaattttattttttatttaaaaattaatttaaatatacaaataagaaaatagcacgtgaataataacttgatacttaatggttaggtacttacgaaaattcgtattattaattaaacttaaatatttatttgtaattgaaaattaaacttaagtatttgtgctgcaaatattcttttttttattccttttgagatttcaaacttaaatttgttgtctttagtgaaaaaaactatatttgaaatacacaaaaaattagttacagaaaacttcctataagttaaagatattgctgaaaaattcaagagagatctgaaaaagaatttaagaaaagtcatgaaaagtattggtgactacatttaatggctaattatgtaaagtataaacctttgttcaaaacccctcaaaaaaaactttgttcaaaagaaattatagtacaatggacccccattgcataagactatatataatgtgtgtaaagtgacatcacatcactagctcttacaaaataaatactatcactaaacttgtctttgagttttggcattaaaatacttaagcataaatcttggattcttaactttgtcttaagttaaaatttgtgggttttatgcttttaacactaatcttaatgaaatggggttaagtaatgaaaaaagaacaatcattatgttctttacactatgtttagtaggaggaggaggtgggtggatggagaggggtggaggaaaagtgatggaaggagaaactaaatcacttatttggcaaaaggaataggagagatagatggagacattctccctctaaaccttcaaaatttaatcctcctaaatttggaaggattgtaaaaatagacaaaatacaataattacccttaaaaaataataaaaatttatttttaaaaggacaattttgtaattttactaattaattttttctccatccttctcacctctcacctaatagcaaacaatacaaggtagattaataatcatcttcatccctcttactcctcatcctctctaacctttccatccatcctaatctccctccttcccaccaaacatagccttagttagacttttttgtaagtgaaaaaatattaaaatcatttaatagactttggacatgtatttatagaaaaattctcacttaaaatgttgtcatacattaatgaagaaaaatgtaaaagaaacaactaggtacacactgctactagatatcgttttgtgaatagttagctatttttttataaaaattattaaattaaattataaaatttggtatttaattatactaataatcatggccggaaccacatgtagactaagtgaggcttaaattaaataatttttttttagtcttttatacaaatattaatccactcaatattatcaaattatattctttggtgtattattatttggatttgaacttaataattaatttaaaatgtgattatactaaaatttatttaacataattatttattattttatattttattatagtcctataatttttattaaatattaaatctacatgatataagaataagcattactatcttataaatagttattagctttctataattattattaaaagtaaaataaataagtgagacttgatatcaaattacacaaatagcttatgacacttcataaaaagtattaaacaccataaatattgttagcatttcactataaaaataaataatcaccctacctaagatttatttttagttttgccataataatatgatagatctagtaatattaaacactactagtgttatctactttttcaaatattaacataattaaatattatactttttgggacaagaatttaagaattgttgcttggatagtaggaggaggatccctaatttctttttgtagggccatcaatctcattcattcctttaaaactctctcaaagttttcaactttgcctttagataccttaccttctcatagttcataagtccccacactcacacaaccccaaataataactcaattcaaatcaaaccccactttgacatttttgtctcttgaaactttaatgagtacctaaatttaagttatattattgtctcaaaattatcatagaatttagtttgaaatcccaactattaagtagcaaaacagaaaccacttgaggctagctcaagtggctatagaagagtgcgtgtgtgttagaggtcctgggttcgagtctcatattatgtatggttgtaatatataaatacttaaattaaaaaaaaaaaatagcaaaaaagaaacttcaacaaacaaaaaattgacaaatttgtattctgttggagaataatgtgacagagtaattcttttagttagaaaacaaatcatttgaataatgaatttatgatattggataaatgaaatgtgtgttttttttttaataaatgtacttatatttaacattataaaaatatttcaataagggagattaagaattgggtaatagctatttctctccttgaattaaggaatttgcataactttatctttttgttatttcaatttgcttatgtaagactaatattgtataattcaagaattttagcagaaaatatatgtataataacacattttcgaaaatatatgtattataaatagcagtgattattctaaaaaaaatatatataaatatatatatatatatttaatatcaataagctcggcctttctacaacatttatagccgaatcataaaaataaatatgaaaatatattatctacattttatatacaaacaaaataaatataatagttaatgagtgtccatactacatcaccttgagatgtagttacatgtgtgactattgtttttttgataagaaattttatttttagtatcacaaattatttaaattatttagagattttgtctcatattattgtatttcttgaattttttagtatgttaaaaataatttttgaactatttaaagtgttataaaattatttctctgtctgattttatcatacgcgacaaacaaaataatgatgtagttgtttatactattattacatcaacgattcatgtaacaaaatatcaagaaaaataacttttcagaatatcgaaataaatttaaagtgtactgaagtgttccttcatagaataaatttttctatataaataataatatgtaggcaattataattttttttttctcttaaattttaacatctgaaaaagtttgaatgatataatttggtagatgtcaatattcatggaggaaaaagggtaaaaatcattttgaactatgttttgcaaaaattattaattagactctctattttattaaatgataaattagaccctgtattttttaaaatagtttaaaatgatatattagactaattttttgttataataaaacttattaattacatgatatagagatattatgattaaattagttgcaatttttttatttattagtgtta

SEQ ID NO: 502 - DNA, 2715 bp, Cannabis sativa
atatttaaaattacatttaaattgacctacacaacttacattttccatgacaactgtaagtctgtaacctcttctcttggccattagaacatagtgaagaaacaaaggtcatcactatttaaacatgattgcatggaccaccacttgctaattgataatatccgtacatagaaattatagaatacatatctttcttttgtacgtacgttgttgtcactataattactctactacgatgctactttctcaattattaagttgttattatctattaatccaaataataatcatcaattcaactttcatgtgtgtgtattattcgacataaaggcttgattttttaatttgaaatatcataaaatattattatgtatacaataattaatatatatatatagaaatacttttggaaatttaggttcctaaaaatacatacttacatctaatgtcttattaattacacttttttttaatgaaaaaatactttattaaacaaaataataaatcggttggaataaactctatactgaaacaataaataaataaaataacaaatttataagttactatattaattaattatttaacaaaaataataaaaataaaattcaactcaataataagttgtttaattagttgtccagatgaagaaaactataaaaattgagctttgaataacttgaaatgtcgttaagctgttcatttctaaaataacgttatgctatttaagttctttaatctaactcaaagactcagacacaccaactacaaattctgggtgacagtggttgaatggaagttggtgcaaacttaccaaaattaaaactaaagcaatatccacattaactttaatattatcaatttaatttaaactaatttaaatttaatggaaacacttgtatgatatattcttttataaaaagttcttatctgttcccttaaaaaggaaacatcaagttctcttcaaaaaaaaaattttaagttcttttcaatctaaaaagataatgaataagagatataaaaattaattgatatttatgaagttcccattctaagctaatgagaattttttttaagagaaaagctaatgagaaatcgtttctctttctctatcaaaatcaaacaattaacgggagaaaagagaatccacaaacagaactagaacaataaagattatagataatagaaatatcaaacactacataaatcaatagaaactaaaatatattagactcattattaaattacaacaataaatacatataatatcttcacgtggggtataaaatatttatgtaatgttggtcaccactcacaccaaaatattattttatatttaaaaaaataacacaaaaatatattttaaacacaaatttaatcacttatcataattttattaaattccacatgtttttaatatgaaaatataaagagaaataatagaaaaaaaataataatttataaaaaaaaaaaacataattgaaattgtgttaactccataaatgccagaccaataaattctagtagatcgcgcagtgttctgagaaaaatatattaatccacaacatgcgaagccacgtaagcagtttcagatgggcccaattccacgtcactttttatagccattctcatcaaatcactaatgtccacatcacaacaaccaatcacaaccaattgcatccgacttccgtcgttcaacaccgtgttccgtacgcatccccacctacactccccatccaatatctcgcactggatcactacccccgggtcagtcgggttatgtaaaaagacgattttgcccatcgccgccaccgtaactgacgaaacgcagtagctttctccgacgaacttctccaccatctccatcggcatctctcccatttcttcgcactccatagattcgtcactcctcactttccataatttcacgccttcaacactctcggagctacccaataacccgaccacgatcaaattcccgtcggccaatccgatggcggagctgaaaactttctgatcgggacgaagatcgtacggcccacgccacgacttggttacaggatcaaacgagtaggtcagtccggaggatttctcacacacgtacaaatcgccgccgcgaacggcgatcgatatccaggtcgaggcggcggagttattaagagttgaaggcatggactcgcacgtgtcccacgtgcgagttctcaggtcgtaaatctcgacagcgaggggatcgtcctcgaaatcacacgcgccgccggctacgacaacgctgtcgttgactaaagcgacgatcggctcggttcgccagacgcgcggcggcgcgttggctttggtccaggtgaggcggagtgggtcggaggtgaaggcgaagtgggaaggagaaagcatgtagaggaaatttgagtgggaggagcggagggcggagatgtatttgaggtttggtagttggtggagatggatccagacggcggagcgtgggtcgtacgcgtatgaggtagtcgcgtaggggtgtcgtctggtctgaacgtgaacaaggagccatggtttgattctgttgacgtggcggagagaggagtagacggctgtgttccaatccctggaaactctagacgcggcaactagatcggtgagtggtactcgcgataggacggtttctaagatgtctccatctattgttgcttcttcttcggttttctgagccatttttaagttgat

SEQ ID NO: 503 - DNA, 4515 bp, Cannabis sativa
agggtccaaaatagtatttaccaatttaataacatcattaaattagtttgtaaaaaaaagttatcaccaattttttttaagtcatggggtattaatttccaaataaaagggaatttattaataatttctctattatctttttattctgataatttccttttactgatgactgtcttttctttcttttttttaaaaaaatccaactagatagagtaataaaataaatcttcaaatccaatttttttttttttttttttattaatttttttattaaaaaattttattaaaaaaaaaagaaagaaagaaaaaaaaaatctccaaatcataaaaccaaaattgtaatttaccatatttccataaataaataaaaaagaaacgtactaaaaaatcaaacaagagcatgttaagtcggatatagttagaacaacaattatccactacagtcgaccacactgtatacgataatgaacacaatctaaaacccaattaaatctccaccgttagattcatccacttttcacttacgtactaaccatatctatccataatttttatatctatccataatttttttttttaaaaaaataataataaataaaaactcaaaatttcatctgtaccatcttgttcttatccaattacttattcaaaattaaaaaaataataataaataaaaatcacatttttatagttaagagagaaaaagatctttctttctttctttctttctaactttctctctctattatggaaggtgtatcaacaacgttcttgattttccttactcttagattcatttacctctgcaatacccacatatgaaaaatcccaaaagaccaaacctttgatcgaaactatccaaatcccattatcaaaatcgaaattttatcatttcccaagaaaaaagttttgatttttattttcagtatgttatcgggatcatcgcgtttagaccagttgaatttgctttccattgacgatctctgggcaatgaatcgtttcccaaagctcatgtctttaccgggagtaatatcaccgccgtcgccgtcgtctgagtacgaaaacgacgaggtttcgtctccgacatcctccggtgccgtacaagaacgacgcatcgtggtttctaaccagttaccgatacgagcgagaagaaattcagaaacctcgaaatggtcgtttgaactcgataaagacagcctcgtactacaactcaaagatgggttcggtccccaagttgaagtaatctacgtgggttgtctcgaagtggagatcgatgtttcggagcaggacgaggtttcccaaattctccttgaaaactttcgttgcgtcccaactttcttgtcaccagagattcataacaagttttaccatggattctgtaaacactatctatggcctctgtttcattacatgttacccatttcaccaagccagggagcttcgaggttcgacaagtcacaatggcgagcctatgtttctgctaacaagtcttttgctgataaaatcatggaagtgataaacccagatgaagatttcatttgggttcatgattatcacctcatgattcttcctaccttactcagaaaacgattccaccgagtcaaactcggtttcttcctccacagcccttttccttcttcagaaatctacagaactttacctgttcgtaatgagattcttcaggctttgttgaactgtgatcttattgggtttcacacgtttgattacgctagacatttcttgtcatgttgtagtcggatgttgggtttggattatcagtctaaaaggggttatattggtttggaatattatggtagaacagttgggattaagatcttaccagttggtattcatatgggtcagcttcagtctgttttgtctctttctgaaactgcagaaaaagtcaaggaattgagagaagaatatcatggaaagattgttgttttgggtgtagatgacatggatttgtttaaaggtattagcttgaagtttcttgctatgggtcaactcttggaagagcatcctcacttaagaggtaaagttgttttggttcagattactaaccctgctagaagtcaaggtaaagatgttcaagatgttgagaatgaaacaagctccattgctgaagagattaacagaaagtatggtgatgaaaataatggttacaagccaattgttttcattaaaagacaggttactacattggaaaagtttgctttttatgccattgctgagtgttgtgttgtgaattgtgttagggatggtatgaatttggttccatataagtacactgtttgtagacaggggagctctgttttggacaaggcaatgggcattgttggtggtgttaatgataagcctaaggagagtgctttgattgtgtccgaattcatcggttgttctccttctcttagtggcgctattcgggttaatccttggaacattgaggctgtctcggacgccttgaattgggcgatttgtatgccggaaatggagaagagattgaggcatgagaagcattacaagtacattagttctcatgatgttgcattttgggctaagagttttgatcaagaccttgagagagcttgtaaagatcattactctaagagatgttggggaattgggtttggtttaggatttagagttgtggctttgggaccaaatttcagaaaactctcattagaacatataatgacagcttataaaaacacaactaataggttgatactattggactatgatggtactattaagtcacaagcttcagttaacaaagcaccttctgatataatcatctctgtattgaatcacttatgtggtgatcctaaaaatgttgtctttattgctagtggaagaggaagagaatcacttagtgaatggttttcaccatgtgagaaattgggcatttcagctgaacatggctacttcacaaggtaacaacaactcaaatttgacaccattttagttttttctctcttttcaaatcttcttatgtgttttttggtcaaatgttttgattaggtggaatagtggttcttcatgggaaacttgttctttagcagtggattttgattggaaaaggattggtttaccagtaatggaactttatactgaggcaacagatgggtcttttatagaacaaaaagaaagtgctttggtttggcatcatcaagatgctgacccttgttttggctcatctcaagctaaggaacttcttgaccatcttgagagtgttcttgctaatgagcctgttgtggtcactagaggtcaacatattgttgaagtaaagcctcaggtaaataatctcttcaatcaattctgttattcattggtacaaaaaataggtactttatgtgttgttatttgatcataatataactaatctatgtatgaaaattagaaatttgtgaaacttcaccattttagctagtgatttttagtagttttttaagaagagcttcctgagaaactataagcgaaggtagaaactcagccaaacaagaccttaaattatatttttgtttttagcttctgggaaaagttggcttttgttaaaagggtttttcttaagaatcgttttaatttttacataatttttttaatggtcattttgctaaggaaaactcataaaagttggtttttgtttttttggtttctttaatgaaattttgtaactatttagggtgtgagtaaaggcagagctgttgaaagcctcatatcagcattacaaagcaaaggaaaggcaccagattttgtgctgtgcataggagacgaccgatcggatgaggacatgttcgagtcgatttatcgatcatcatcatcgaaccccgcctcgctaccagccatagctgaagtgtttgcttgcacagtagggcagaaaccaagcacagcaaaatactatcttgatgattcaactgaagtcattaagcttctcattggtcttgcttctgcttcagcacttgaaccaaaaatcaataatgcctcagattcatttgaagtcatttcttaagaaataaagaaaagaaaagcaaagcaaagcaaaattgggaagtggcctttgagttttatctcttaatatcttttgttaggagtttatagagaatatatatatatatatatatgtctttctttagagtttatatttaaaggtgttatacttctttgtacagacttttaatagttttacatcttttgtttggaaagggaaaaaaaaaactacacaacaaaacaaaacaaatcaaccttagaaaaatttcagatttacttaattcaatttcacatgaaagtttgtgtgttctttgtttgttattattgttgattttgattagtgtcaaaatatttgtgttggcaaatacaatttgaacttgtttagcttactttcttagaactaattcacttttttttttattaatgaaatgtcaacctcgttgaattaaaaacattctgaatacaagatagcctttaaattggtccagacatcttgcccaaaaatgctatcagggataatttgaa

SEQ ID NO: 504 - DNA, 3938 bp, Cannabis sativa
cgttggtcagtagtttctccttggcttcatttgcatatcaatcttgagccttcttcgagtcctcgccaacatgggatcctccaatgacaatcaagatattgcaaggagtcctagagccactcgcttctttttctttgtcaactctatttgcgtggggatttgcctcactgtccttatattggtcgaaatgccttaggcaaatcaactcttcgatttcatcctggaaataccaacactccaaagtagtatggctaatattcttgtgatacttatagtattttgcaggtcccttttttttgcgattgcccctgattagaggtggctttccgaggacacccttatgctcttcaataacatgtatgtgatcgtgaggcacacttagttctgtataattgatgaagcgtgggcctcccttatactttggagaactttcttttctcgttggggactttgctagttttgggtttcgatgtcttgttggactacacctagggttgtgtcctcttgagctttttcgtcacgaactccttgaccgtgccctaggcaccgaagatcggtgcttttccttagctttctcaagtcttgccaatgagttctcaattcttttgtggggctctgccatggaaaggaattccaccaacgtctcgagatgtcgcactggtaattccttctagaagtctacttttgacaatacccctactatgatcatgcagaccagcaaagactcaagggccttctctacctttgttacctcgacattaaaacatttaaaatactcttgtaaggtctccccttgttcttgtttaatatttgccaaagtcgtgtaagtcggtttataagtcattgtcgtctgaaagtgagtgagaaatagatctaccaatatttcccatgtggatatcgatgcttctagaaactgattgaaccaatcgtgtgcgttgtcctccaaagttacagcgagaattcaaaatttagccagttgaggtacttaatctactttcataattgtattaaatttgtcaagataatcaataacactcataaaaatatttcattgtgttttcaagcacagaaattaattaagaagttgtaataagaaattgacaataacactcctataaaattaatggaactatgagagttgaaatcttccttttggcatttcttgagagacttttgaattgggcaaaacttaaactactaatgtatactgttaaacacgtctagaccaattgctcaaccataaattccttaatctctctctcccttttaatacactagacaacaaagcaaaacgactttggggcaagatagagtagactgacttgtgaccaagtcaaaatcaaataacatacaaagatagtgtattttatgtcaactggaacttacaataacacagctcgtttatatatatttatttctattcttttcttcttcttcttcttctttttttctttgcagagatagactcacagacgatttggtcactagtatgatgattgattaatgccatgtatacattctttgtagtttaaaccaagtaaatgataatgtcagagagataaggatgctgaaatctagggtcaacttcatacaaaattgtttacctgaactaagatataatgtcaagtaatggacattattaaagaaacaatctatcaacatatatatttatatcattcctttctgatataaaaaatcacagaaagctctgtcatctctgagaatatgacaatacacaataataatgaactgtcatttcctgtggctgttgtggtaaatgactaagcttaagaagatagtgggaatgagctgaactactattagtattttcttatcctgtcctgtggtgtatggtttaaattgtagacataatggtaagaaagagaaaacctaggactataagacatgaagggctaaaaattggcctgcaaagtctgacaatgtaaagagtatgagagagaataagatgagaactctaaagcaattcacgggagttgtatggtgaggataagatgcacatgcacttgaagtctgattactcttgttcttgttaatctcctttgtagattttggggtagaattattgcttagtcctgcagcaacagcaggaggcacattggtagaattgggattttcagagaaattagtatagtcatcaacatcataacctgcattacagcacccaattcagtaagaaggtataagagaaagataagaaaaatgaaagtatttataaatgaaatgaacacctacaatcaaatttcttccagcccaagatgagtttctctctatcaaacaccactcgatagccagtcatgaagttctctgtcaaaagttagttatggtagcataagtaatataacaaagaaaactggcccatcaaaactgataacactgtatttgtaactccccacaaaaaataaataaataatgaaagtgtatattcacccatagtgaaataagaaaggtaaaagtcatcacatggttgttaaggcctaggcaataacaggcatgtctcatttgttgattgtggatatgataacaatggattggaattaaaaagaatgatttaattgatcatttgccaagactaaattatgagaagatgatctatatataataatcatcctaagttcctcaatgagattaaactatctcattctagatggattagtttcacagttgtatacttgaattaacttgtaatatattctttaatttcatagcatacacacatgagaaaaattgtcaattcctatcctgctcttcaaaagtaacttaggagttccaatatactactaacatcaccaatgtgcatatttgccattatattgattcattataatcaactagagcatatgcaatcgctcaacagaaaatcctgccaattacaatgttaaaagacttacgtccaattatattcagttctgcactcttgacaactgccaggcaatatacaatttcattctgcaaatcaggtgcaagaaggattagaacttaaaggatgtagcgaatatataaaaattcagcaactaagagggaaagagacaggaataaaacttacctgagtggagatgacaatgatgggatcaacgacagcaaattgacttccacctttcatagttaagcgcagagtaggaatcaaactagaattcacatcaacactgcccatcaccatccagaaagaattagatttggaggtaaactttttttgaaaggaaatacgcataaatgtatgtgcgtactcaaaatgatgacaaacctcatatcataacaatattcaaaaggaatccttgagtctgatggacgtcgtgtatcatgaacctgtgaatgaaactgcaaaagaatatgaatggaatgcaagtgtaagagcaaaattacaaaaccataaatggtgagcatgcatttcactgtttttcttacactttctgcaagctttgtataggctgggtcaaccaaatatgtgaacgaggtccctgaatcaaaaagagctgccaaatccacatcaaataaagttgttccaactcgaatttgggtaacactgatattgtatgttggactgccagaaaaaaaaaacaagaatattacataaataacaatgcaatggaaaatttgtgtgtttgaaggttattcagcatctgtaaatagcatagtgcatgagattcaaagagttataaagtataggctgtatagtatatatagtaaggatacaaatgcttgtaatttcagattagttaatcgcctaatgtctgttgagtaggctttgtccaggcggtttttgttgcctgtttggtgtagccttttggcttgtttgctgattaatgaattctttttcattgatcaataaaaaaaacaatgccatggaaatcttctacaatgcccaaatttaatattccaacttaaataattatcagcatcaagtacaagagaatttacca

SEQ ID NO: 505 - DNA, 3394 bp, Cannabis sativa
aaaaaataagtatagattgtaattttcaattcgcctaattacctatacgacgaaatgcgactcacgtgcacaaccaatcaaccaatacataacaatactattatttcatctaagcgcatagcgcaccctatacccagttctacggcgcaatttagcacaaaacacacctctctttctttctctatcttcatctttaaccttttccccttcaacccaagaaaaaacccattataaactcaaagtctccgctctcttggagaccgaggaagccataagaacctaagataactatagagcgagaaactggggttggagttatctatatatatagagagaaagtttgtgtgattccgtacagtgagattatgggaagtggttcagcaactctcccagccaagcgttccgtaatgtccgatcccacctctcttaacggatcctcgaaacgatcgaagaagcctccttcgtcgcagcagcagcagcaacaacaacctctcgttgttcctcctggacacgtggccttccgcctgctctgccacgcgtcgaggatcggaggcgtgattgggaaggccggcagtgtgatcaagcagctacagcaggctactgggtctaagattcgggtcgaaaatgcccccgaagagtctccggaccgggtcgtcgcggtggttgcgccgagttctttggtggggaaaatttcgctgaagagtccaattgggggtgatgggtttggtcttggaggtggggaagagatggatgcgtctaaggcccaggaggctcttctgagggtttttgatcggattcttgaggttgcggcggagaccggcgctgttggagctagtatcggcgttgtgtcgtgccggttgctggtggatgctgctcaggccgggtcggtgattggaaaaggagggaagattgtggagaagataaggaaggattgtgggtgtaaaattagggttttgactgagatgttgccggcttgtgctgactccactgatgagatgattgaggtaattgttcaattttttggaatttattgcctttaattggagtacgcgatttagttaatttaaattatggttttgtacatatgagaggaaaaaaacttgcttagattttattcttgaatgagaaacttttgtgctctttttatgattgtgatgaagagtcattggggttttgtatgtttttgatctggtctctttgattcctatagtgattgtgaatgtaattttttttcttcacagatagaagggagtgttttggctgttaagaaaggacttgttgctgtctctcggcgtgttcaagattgtccatcggttgataagtcaaaagctgttgttggtagcagacaacttgaaactttagttcctcaagagactttacctgatctgcgtatggaacatctttctcacagaaatttgatgatgcctacttatactattagctcccttagtctgcctaccagctccatcggttatgtttctggggttcgtcccttggcgttggagtctgaaaggatcccagcaattgaagaaaaagttcaaccacaggaggtttctttcagaattctttgtgaaaatgctaggattgggagtgtaattggaaagggaggttcagttattagggctcttcagaatgatgctggtgctaatgtaagtgttggagtgtcagtggctgattgtgatgaacgattgataacaatttctgcatcagaggttagccattttgtgtttaaaatgttgatttccttgttttaattctgcccaagtacaactttatgtgttgtctatatgttattcaattggatttgttacttcactttttgtagaaccctgaatcaaggtattcgccagctcaaaaggccgtggttctcgttttctcaaggtttttagatgctagctgtgaaaaggggcaagattctgatttcaataaaggctcatctgttactgcacggcttgttgtcccatcaaatcaagttggttgtttattgggtaaaggaggttcaatagtttccgaaatgcggaaggtaactggtgctaacataagagtaatagggggagaccaggtcccaaagtgtgcaacagagaaggatgtagtggtacaggtgcggtgatgtctttttccttagatttaataagtgattactgcttatataattgtttttccaatttcttgaagtattagaaaaggatttgtaaaataatctttttcaatttatagaatttcattacaactcttcattgtattaaacatagttttagattcacctgatagaagtaaccctatcattacccttctatatggtgttggaatttgtgatggattaacaataatatatttcttaatttgattaatcaagttctacttggtaaagattttcatgttttggttaaacaagttaacaatatctttgttcactgtaatcatttctttgtcaacagatatcaggagatttttcaagtgtgcaagatgcattgtacaatgccactggtagattaagggataaccttttatcaagtatagtaaacagtgctgcaacaaggaatgcttcgactttgctaactaatactagcccctatgcaagaatgagggaccctgcccctcctacaataaatacttcaccgccaattggtgttcatagtttcactcaacattctacacttggtcaacgcgtagatcatcttggactttctcacgctttaaatcattcttctccaagacaatgggaatcacaggtaaaattaaaaatgtctctttttcttttatctattctttgactttgatcttttgaataatttttactagctgatctgcagatgatggctggaattagtacaaggggattctctgaagctggtggtggattctctgatgctgttaggggactctcagaagctggcgggggattctctgatgctgttaggggattctctgaatctggtggaggattttctgatgctgttaggggatactctgaagctggcgggggattccctgatgctgttagggggttttctgatgctggtgggggattctctgatgctgacaggggattttctgattctggcagaggattcactgatgcaggcaggggattcgttgatgctggcaggggattcgctgatactggcaggggattttctgatgccggcaggggtttctctgattctggcagggatttctctgatgcgatcaggggattctctgatgctagcagggcattaagttctctaaaaggtggcttggaactggccgggtaggtatttagttatagagcacaaaagttacccgataatgctaatttatataatttcgcagaaactggaatgctgacagaagccaccagatagtgaattttgattagttcacttaacaaggaaaccatcttataaattta

SEQ ID NO: 506 - DNA, 2774 bp, Cannabis sativa
atggaaacttttaatggagttgacttatctgatactactgtggtgaatgatttggtcaatcataaaaaaatatagtgggaaatataggaaatcaaggtgttaatgggttgtcaaataatactatgagacatgatgagagtctccagcacaagaatcatgggaaggaagttattagtgatcaaaatgatagcttggctatttatgataacaaaaaaaggcaagtgggagaagagagtagcaggggtcatatggagttgggccaggggattagtggaattcccgggccttgtaaatgggactcgcccacaattatgaaaatgttgagttggaactgctgtgggcttgggccaacactgaatgttcagttcctaagagaacttattgctcaaaaaaggcccagtgttgtttttttatgtgaaactttaagtaacaaaggaaggattgattctttatgtagacagctagattttaaggggtcctttgtaattgaagcccaaggtcatagtggaggtattgctttgctttggaagaaccaagatgaggtggttattgactctttctctaaaaatcatatagatagtatgatatcaatagaagtgcaccgtcaattttgatttactggcatttaggggaaccaaaccgtagcttacggaagcaaacttggttacttcttaagactctttatgcgagatcagttgctccttggtgtatcatgggtgatttcaataatgttcttcaccaaagtgagaagtgtggtggtaatccttatacggcatggttgattgaaggctttcaagaagttctgcagcaatgtgggttatgcgatttggatatgtaaggacatccttttacgtgggaaaagagcagggatactccaagttggattgaagctaggcttgacaaagcaatggtgaacaatggttggttatctaattttccttttgctaagctttttgatttagaaatttctccttctgatcaatgtccactccttttagatgccaattaccgtgaagctattgctcatgtttgatcttttaggtttgaaaattgttggacctcgcaccaggattgtgagagtgtaattcgtgatagctggagttcaatgtgtggggctaaaattgatcaaaaaatcagccattgtggtcaggttcttcaagaatggggtaaaggcattacttgtaattttggtgtgagaataaagcaatgtaataaagtcttgaagcagttgaaaaaacggagagatgtcgaaggaaaaaaacaattttatgaagtaaaaagacagctgttcgatgtactaaatcaaagagaatttttttggcggcaaagatctaagcagttgtggttgaaagaaggcgatcaaaacagtaagttttttcattcaaaaacttcttctcgtaaatgcaataatcagattgtaagtttgaaagatgcttcggtaatactcgagattggaataatggtttgggtgagataatggttgagtatttcaaaggaattttccaagctgaatgtgggaattgggtggaggttattgattgtgtgttgccagtagttaaagatgagcataaagaatgcttactcggccgattgaggatcaagaagttaaagatgcggtgttccaaatgcatcctaataagtctcctggaccggatggtatgaatccaaaattctttaaaaaatactggggtattgtgggagatgatgtacttagctcggttaagaatttttttcataatgcgaagatgcctgagggtacgcaaaacaccaacattgttttgattcctaagaaaaagaagcttgaccaaatgagtgagttaagacccatttctttatgtaatgtcattgccaaagtgattactaaagtccttgctaataggatgaaaggtatttgccaagaaatagagcgagctataagcaaattttggtggcggtcaaatagcaacaaaggaattcattgggtaagttgggataatcttaccaagcataagagtaatgaaggtatgagtttttgtgattttagagattttaatattgctcttcttgctaaacaaggatggagattgctcacttgtggtgatagtttggttgggaaattttttaaagaaaggtactatgcaaatgggaattttcttacagctactttgggaagcaacccgagttatatttggagaagtgtccttgagtctcaaagtttgattcgttctgctgctagaagaattgttggaagtaaatctcaggttagtattctcaatgatccgtggcttattgatgatatgaacccttttgttgaatctcaacacttggggctagttggtaagatggtgaactcgttgatggagatggacgagcttgaatgggatgaggagagtttgttagatttgcttactgatagagatgtggcactggtgtggaaaattccacttgctactgctggtgtagatgtcgattggtattggggaaaagaggcgtctagttttttttattgttagaagtgcttatgcactactggaataatctaaaaccagcaacttacaactagataactctggtttttggttgaagttatggcaactgaaactccctccgaaggttaaggattttttatggcgtgtgtgcacaaatagcttgcctaccaggttccagttatcaaccaaacatgtgcctatcaatcctttatgtccactttgtatggctgctccagaaaccgcccttcacgtactggttagatgtgcttttgcacaacaatattggcgacagactcgggtaacaac

SEQ ID NO: 507 - DNA, 2877 bp, Cannabis sativa
aaccccatttgggtttgtggtaatgcagagcttggagcactcatgaacatcaaagctagtttagaccctgaaggtttgtacctttcttcatgggccattaatggagatccttgtgatggctccttcgatggtgtagcatgcaatggtttgggacgtgtggctaacatttcacttcaggggaagggactctctggcaagctctctcctgccattgctggcctcactcacttgactggcctttatctgcactataacactttgtacggagagataccaaaagaaatctccaacctcagaaatctcacagatttgtatctcaatgttaataatctctctggccagattcctccttcgattggaaacatggccaacttgcaaggttagtagtagtacttggcaaaagcctttttttttttttttttcatttagtgataaagtttggacttttgaaacttctttccttactttatttcttttaaatctctctctttcttcattgttgttttttttttctcaagtatttgttgtttttggctaattttattgttgttttcatttatgtttaagtgaatctaatcatggatttaagtactactagtttcaccttttatatgcagtatggatcattgatgcaacagtttcatttttattttcttttgtgtatagtttcaaaattcatgtaataaattgatattgatatattttgtttaatccattatttttacagttttctgaacttgtttgtgcaattttggtcaatagttttacagttgtgctacaatcagctgactggaagcgtacccactcaactgggatctctaaagaaactcactgtccttgccttgcaatctaaccacctcactggagcaataccagcaagtttaggagatgtggaaatgttaatgaggctagatttgagtttcaaccatctctttggctccatccccattaaactagctgatgcccctttgctagaagttcttgacattagaaacaatagtctttccggcagtgttcctcttggtaatgttagcttatgagttttctttgcttagttgattatgctttttgtaaaggttatgttactaattgtgttttctattttctatgcttgatgaagctttaaagaaacttaatgaaggattcggatatgaaaacaatctcggattatgtggaagtggatttgcagcattgaacccttgtaactcttcagatcatgttaatccaaatagacctgaaccatttggcactggctcagctggtttgccaacaagagacataccagagacagcaaatgttaagctgccttgcggtgaaactgggtgttcgaatgtgtcgagatcccatcaagcctctttcgttgttggtactgtggcagtatctattgcattgttagccataggaattctatctttcactcaatatcgtcggaggaagcagaggctcgcgacctctttagaggttgctgagggacggcttagtactgaccatcaagctaaagggatggttaggaaaaatggatcccctcttatcagcctagagtattctaatggttgggatcctttggctgatggaaagaatatgagtgcatttgctcaagaagttttccacagctttcggttcaatttggatgaggttgaggctgctactcattacttctcagaagtgaatttgttgggaaagagtaacttttctgcaacttataaagggatattgagagatgggtcactggttgctatcaagggcattggtaaatcatgctgtaagtcagaggatgctgagttcttgaaagggttgaacatgttgacctcattgaggcatgagaatctagttaagctaagagggttttgttgctcaagaggccgtggcgagtgctttctcatctacgatttcgtgcctaatggaaacttactgcaatatcttgacgtgaaggatggtgatggtgaggtccttgaatggtcaactagagtttctattgtcaagggcattgccaaaggtaatactcaaagttttgtttgctttatatttttgttcaagattcattcttgatcaatttctgagtaaatctttaatcttctgcaggtgtagcttttctacatgcattcaagccaaacaaacctgctcttgtccatcaaaacatctcagctgagaaggtcctcatcgaccagcggttcaacccgctgctctcaaattccggcctgcataagcttcttaccaatgatgttgtcttctcagcactcaaggcttccgctgccatgggctacttagctccagagtacacaaccacaggccgttttacagaaaaaagcgatgtctatgcatttggcgtgctagtactccaaattctctctgggaaacggaaagtttccaactcaatccgtgttggagccgaatcaggcagattccaagatttcattgatttgaacctccaaggcagattctttgaatatgaagcttcaaagcttgcaaagattgctctgttatgtactcacgaatcacccattgagaggccctccatggaatcagttgttcaagagttgagtacctgcagtagctgtttgagtctctgattcaaccattatttggtaatggtgaaaagctagagatatgactcttactaacttggcttactggtagttatataactgtaggagttacctttttttttactccatgttttggaattggaatgtccttttctttaggaccaaattagctttgttgggaagtgttaaatcttggggttctattgtagaatggatatgcattgtttttgggggctcttttcttctgtaatcacctattttgtgtactgagataattggcttgtaaagaggtgaactttgtcctccattaacaaagcttttgacctattaa

SEQ ID NO: 508 - DNA, 3635 bp, Cannabis sativa
ctagtggtcctaaaatgaaaatcttaaaacaatacatatgtatcctatcctataaatatatacctaaataaaagtataaaattaattaagatatagagatataattaaccttgggtattcagcattaaggatctccttttggccatactttctccaagcctggccatcttctagtgttgatacagtggtggtccatgattgagagttcttcctgctaccacatatataaaaataaaaataagactgtatatatagatagtgtcatatatatctcagttcccaataatacaaaacaataaaaattaaaagtaacacacatgtctctttttatatacccatgtgtgatttcattcatatctcccaacccaagtggggtttcttattatcatatatgtttttatttttatccatgaaatgaccacaaaaacaaaaggactagctagtactgactcatataatgaacgatccacatttacacacatagggctttttaattcatcaattataatattattgagatacaaaaagaaaaaaaaaattaaaaaactatatcatcatcatcatattaattaacaatattaaaataataattaatttacaataatacatatatgtatatatgtatataccttcttttataacagcctctgcgatctttgataccatgtgatgatctctttattttactctctgcaccataatcatcagagctgggatcatcacaatgtgatgcctggtcatgagggttgacctgagaagtctgatctgaagaattactatgaataatattattaatagtattatcattattgtagccagtcaccacagaaagagtctggctaaaagaatttaaaatctttgaagcaagttcttcagcagatgatggtgatgatgatgagactgacccaaaaccaatattttcttcaacaagaggcttattattatgatcatgaagcataagctgaagcttggttgccatctccttgccttgaatcagctccttaatcaatctcttagacaaattttgaggtagaatacaagtacccatttggccactaactactatgtactctctctcacgaataataaacaaaattttgttgtatatatatataagatcaactatcactcaatctgtcattttaccttttttgtgtgattttttattgagtgggggggatattttttttttttttttttttgtgttttaagtttttgggtgtgagtgaaaatgttttgaaggtgggatttgattatatatggtggttgatgggagaatagtgctttagaaaatgaaagggtaaaggaggaaagagagaagcaattatgtggagagaaggaagatggaaggaaggagagtactgtgagtgacataattttttaaatgcttccaaaggaaaattccacttaattacatttatgcttacaatgttttgatgacgtttttgtgatgatgtcagagtacacaatttttctattggtaataaatcaaaatccaaattcattcaactcttttgctagcaaaatatggaggatttttgtttgtggatgtgaagtgaaccccacattgggtatatttatttttattcaatctaatggcttgtgcatatccacttctctacccagttctactacctattccccatctcaccactttaattattgcatataaaaaagacaaatgctaaaagtatcactctaatataatttaatataataatttttaaccaattataaaatgacaagtttagaaaatactatctaatagcaacatatactttaatatataagtaataatatagattagctccataaaaaaaaaaagagagagagagagattagctaggtctggagtaatcgccactctcactttttgcaagtattagaatttatatgattgagtgtatattaaaagaacatgttttattcatttatgtgttcatcactttacttagtaattaatatactaaaatgacatccatcaagtttgcttattagataaattaaaaagtcattagaatgttacacttactgatataattttttatttttcactcttgtttttccaagctatacttaataataaatcttattaacaaacttttattgagaatatatatcacaaaataaattggaaaaatgtacaataatgataataacagaataacaataaaatagttctaaacatgtggattcttgcaggcttttgcattctattattactattattattattattaattatacatgatatataattagtttttaagtttgtttttttataaaagaattttgaagtgttaattaaccaggtaaataatatatatatgtataatattgaggagcagaatcggaacggtagaaccttctagtatgtatgttttaagaaaataacaatttattaatttttaatggatagcattaagtatttaaaggtgtactttgtcaaaagattgagacatggatatggcaaataatcaaacaattaattaaatgatattagagctatttctagaatatattgaccaaactattactagaccagttgccgaagaatttaaaagatatcgaagccaaatatttaaattaaactcagacaatatccttataattttctttttcccatttttcaattgatgcatgctacttattataggtgtttgtagtgcgggtagtgtggtttgtaatattttttttcaaaccaaaatatttatgtagtttttataattttttaaactcttattatatactaatacgaaaaatagtgtataatttaaacagtttatactatcatcaatatcaaatattagaataaaaatttgaaaaatcaatctataaagttttaataatacaaaaaaaaaaataaaaaagttttaacatcataatatatatactaatcatcaatttattatattattgaattttctctaaaaaaaaatataatatacatattatatatatttatttttatgaaaaaaaaataaaaattagtaactttataatatatagtggagtgcagtttgaatcataattgttaaatttaaaactgtaaaccgtatcgtaaggtgtggtttgaaaaaaatacacaccgcaatcattatagtgatttaatgaacacttttattatttatagatatattcactatttgatgccatgaccacacaaaattaaaattaaaaaagaaggaagaaacaaaagagatacatatccttatccttgttaaaccatacatgcacaaattaaacacaattatatatatatatcaaaaaaaaatataaaaataaaactcaaatttccctttgttttattatatagttgaaaaaacataaaataaatagaaattatttatttatttatttcttttctaacaaaataatattaataatcttttgatcacacgataatttttgtataattgaatactcctttttcttttcttttttttaataaaaagtctaacactatgtttggtaggacaagagtaagaagtgaagggatgaagaagagagaaagaggtgtgaaaagataacaaatctttttgttcgataagagattgaaagagagaaagaaggtgagatgatagtaaattcactcaaatctctaatttagaatccctccaattatggaaagactg

SEQ ID NO: 509 - DNA, 1216 bp, Cannabis sativa
acccacttaagagcataagatagcaaacagattgcatgtgtgataaataaacttccccaagtttatgataatacctgataagataatgatttcacccacgcatttctgtcaacaccaagccaagcagttgaaaaccaggacaattttgaaaatgaactttgctctttaattgctagctcgaaaacccttgccgtgtcatgtaaaaattgaacaagactgtcgctctcgtcactaccgccctgcagtgaccgattcagtttaaccctcatttcctcaacatcactcctggtgcttgcttggggagttccattgacagtaacaccatcatcagcagaagcaagaggaaccattcttcttgaccttcgaaatgtcaaatactgcttcctgaatcccacttgtccaaaattaagactatgattgttgttctctaataaagcaaatcttataagacatctcttccttgaattgccccagcaactcaataggtgatccaagtcagaaacttttttgcaggaataatgcattttagttggctttggtggaagccatcgatttgtagagctgaaatacaaagcacaattatgcataacccaaaaaaaaacatctacaactacaacagccaagattgagagctatcctgcataccaaagcatcccaaaagctatatctcatgacttagccaaaccaaaattctaaattatcacatgttatgttatgttcactcaaacccaaaatacctttaccattttcacaacgcttcaactaagttatgttcacgctacattgagctatataaaaaattgctataacagttaataactatagattccaatacttattcttcttttctcagcaaccaaacaggaaattttcacaccataaagattgtgaaagtacttcaacaacacaaacgcaagcaacaaaattgaataatacagttgcgaacaaaggaaaaaaaaataataataaaagcaggagaaaatatcaaaccttgacgatagaaagctgtggtgggtaaacttagctgccataaatgggaaagagaaaaagaaaatcgaagggagaatttggttggattgtcacgaaaattcatgaaatggtagaaagtgattaaagaagagtcgggtgttggggaaggaagcttgtgaggaagagagaaatgtggtgacgtggcgagagtggtctatccgtagacgtggagaagcgagtaatcaca

SEQ ID NO: 510 - DNA, 2370 bp, Cannabis sativa
aactaattaactgcagtgttttatattcatacaaagtgaaaaaaaaaatgtatattatctatagtttatacaaggttaaactaatggatgttaattaacgaataattaagagtaattgggtgatttatgtatggactcctgtttagaactgattcttaattaaagatatactattcatgtttgtgatcggtttttcatattttcaaagtttttttaggttgtactttctcaaaatacgcaggaaaggagggacttattaaaccattatatatgtagatagatatatatatatattaattaagtttttattttactataaattaaagtatataaagcacttactaaattttgttatacggaattcaaaaagtagcgtagatataataaattataccgctaaaatttaatataatgctacatttgaaaaacaattaatactttttttttgcttttgctaaaaagaaaaattcaagcccacactgagccaaaattatatgcatcgacattcttaacattaatttatcaatgaaagttgtttcagctttgccggtggttttacctgaggctattttccaaaacataaataaaatacaaaccaaagtgatagaaaaatattggtaaaatgtaaaaattaagcataggatactcgaatggaatgataggtccaatatttttatgcagagttggatgagggtccgctgcctggcaaacccaacaatcaaccctaaccttgggtcccatacaagtctggtcacgtcccaccggacccatataacctacaaggttccgcaaataatgaacttttctttcttatatacatattaatattacgcaatatatcaatataatattttctttttctcaaaggataaatattatttggataaataatgttatagtttcacaatcacgcatgactaaactgtctactcgtgaccaccatgcacccctagctaggtgaggtggtggggcctgtgtacgtacgtaaccaattaaggccctcggcttcaattaattctcctcttattggtaattaatactttaaaatgtcttacttatactactactatagggttttgtacgtattaaaaatttattttgtgtatatattgtgtactgtattatataaaacaaactaacagaagcttgttcaatattagaaacaaaggatatatagcctatgctgctaaattatgagcttccacattgagtctgaaggggaatccaataaaaagttagctagttccggccaaaccgagaactatcatacaaatcagtatgatcacttatgagatcatattggtgtggtgttgttactaacttacttgtagtagtactatactgccatgtcactgctagtagtgccactacacaaataacactcaataaatttagcctggccatccaattgagttggggcctttggatcgttaaaaaaatcattgaaagtgaatgattgaagggtgatataaaggcaccttgtttaattcacaaatgacaaagttgtattgggacccaacacttccctccaatttcattctacaccatccaatgtggtcatcatgaatttctctttcttcttcttaatgggattatttattatttcctttaaagtttattaataaacccacaaactatacatcttattgcgcctaaaccatgatcaaattatcaattatgcacataataaattaatattaatgtcaccatcattaacttctccgcaacatactaaacattatgtatatacttctatttcatttcaaaaatgatatatattttttatttatacatatattttttttaaatagtcggtcactgtttgcccacgtggcatgaaaatgaaaggttaggtgggggacccacttgtatttttggaagggagaacgtgtcgagtcctgagatgatcaaatgggagtgtgggttttggaggggacgcccacgtggactgtgggtccctagatcgatgcatttgacgtagtcaaacaagatagatgggttgataaagtggggccacttagttaagtgaattaaactgacgtggacttacattttgagcatttgtatttaacaccatctgaaaatgttatctttatcactcattattaataaatattttcattatgtctagtattataataaaatatcattttataattaattaatgattttttataatatttattaaataagatatatgagatttaatattaaattacactaatattaatattatagttcagaaaaaaaaataactaagtgcaggacactattcctaaaaagtacttgacaatacttatatttaataacaattgtattagcgatactttataaaaattattaacacaataactaataataatattacac

SEQ ID NO: 511 - DNA, 2365 bp, Cannabis sativa
tatatatatatcttactatttatggaggaccattcatgtttctgcatctgcaatatattttattgattttggtgataatataaaaacttgggattcatcgtcctttagaaatttagtgtgcaatctttttattttgatgtcattactatttatcttatgagtaaggatatgtgcacacataaagtacacatgaacttattgataattgttttagaagagaagaataaccaataaagaataaaagagatgtgaaataagggttttattcaattgcaaagtaaaagtaaaaaaatacaactaataagaaagctttatataggcaactaacataaaaagctaaaacgaaaaaaaactaaaataactctaagtaactatttaatacttatcacacacttatgtatgtagcaatttttcttttatcaattgtattgttttatgatgaaagtaaattgccacataagtgtgtgttaagtttgtgtgtaatttatgtatgcataattgcatatatcattactgttatcttattttgctcttagtgtaactagtcttgttatggctactcttttctaatatcatgtgaacaatttaatttacagttggtgctaatggctctggcaagactaactttttccatggtatggtttacattctcatctcactcatactttacttttagtggttttgatattgttttttctaataagtggacatcatctttatctgatctgtatgaattttcaaataaattatttgcagcgatccgttttgtactaagtgacctctaccagaacctccgcagtgaagatagggttgcactacttcatgtatgtgttattccctggcttgtattttccatgccttttggtgcaactgactttttaattttaacgtcttttttcgtgtatcattgaacaggaaggtgcaggccatcaagttactactgcatttgttgagatcttgtttgacaattcggacaatcgtattccggtactatcctaatttaaaatctgaatgggaaggatagaggattaaattgagaaacatgagaatgcacattttattatctaatgtgaacatttctaacacaactggcaatttgggtagtctccccagcccttcactttatttgaaattttctagagagagatataataagtaaatcataggattttcttcattttatttttctacatatttgtattctcatgtttattatgcatttcgcatgagaaataactaatataggtgcttccttagagagttgacctcagtccggaatcattattcatctattaggccatatctccatgtttcaggttgataaagaggaagtgcgcttgcgtagaacaattaatcaaaagaaggatgaatatttcttggatggaaagcacatcacgtaagttatttacatctagcaatttgctgtgttctctacatacttttttgttggaaactttgaatgatgacagataatgattttcaggaaaacagaggttatgaatttactggaaagtgctgggttttctcgatccaatccttactatgttgtgcaacaaggaaaggtatgactcttctagtagtctgaagtatgaattctacttgaaaatcttcatgcaagcattttagattaatgtattgcttccctttaacagatagcttcattaactttgatgaaagactctgagaggcttgatttactcaaagaaattggtggcactcgagtgtacgaggaaagacgtcgggaaagtttaaaaattatgcaggaaactggcaagtcactgttaagctgcttgtgttttagtacattactagtgttcttttaccaaactgtggttatttatccttgcaattttttttttttttggttaaacaggtaataaaaggaagcagataattcaggttgttcagtacttagatgagagattaagggaattagatgaggagaaagaggaattaaggaaatatcagcaacttgacaagcagcgtaaatctctggaatacactatttatgacaaggaacttcatgatgctcggcagaagttggcagaggtaaatgatcacttgtttaattgtttagaggctgttatttttcgcttggactgtgcattttgttcatttatattatagttgttcttgaattttttattgtccttgtttgtttgtgaatctgtttcaagaacaacacaccatatgagctctagcaaaactagtttttacaggactatcccaaccttaagcacaaatgtgtgtgatacgtttgaatttcatctttacacatttatttattttgtcagaaaacagcattattgtttgtttatttttgaaaaaagaaacataaattgaattgataagcaataatgcaaga

SEQ ID NO: 512 - DNA, 3970 bp, Cannabis sativa
aattagttaaaagtagttaaaagaaaaaggatcaaaacttacttatgtccacagaaccttctgagcttgctccagcacgaaaaattactacctcaaatgaaatatttgtctccttaatcaaaacaaacacacagacatcacctacttctaaattattttcccgaacaaattttgcccaaccaccttggaacctgggttttgccctctcatgttctctataagtgtatgttacagaccaagttttcttctcatttggaactttgagtgttaccttatatgatctgtcactgagatgtttctttgcaaatatgcgtggaaatgtctgtaacaaaacaaaattgaaacaaggaagctaagcgatatgacaaaacaaaacattctaaatgggatttggcaaacatggaattggtatagagcttttagcaagtttataatgagacttgccagtttcccaccaaggagatagtatggttgcatgaccatcttaaaaaatgggtattcagatttgaaaccattagacctcttgagagctgcaattctttcgctttcatccaacgttttcatatatttaggaatcccatatggcatcttttttgtggtggtattagcagatttatcccctttacttttcttaggtgaatcaaattgccctatttgcagaagaaaacataaaaataataacataaatcagttcatttagaactcaataaattattataagagtaatttcacaagccttctagtctatcttagaattcctggagctccctttgatcattgaattctcaactattattgcgctataatgggcgttagtactttcaaacaaaatatgttgctttgagtgtttacctgtatagcttgttttcattctcttaaaaggccgagaacatgaggattttagtcctgtttcgtggcattgggagatatcatccaagatttcaatgctgtcaacaacatcaataacttccctcttgggaactcggatttcaccatcgatcgtagacttatcaaaacaaacagggatagaaggataatctatctctactgtatttgtatcaaatatgacagcataaatctcagaattcccatcatatctaaaagttagcatatggcctcttttaagagaataatgcttcataaactctggccaaccgttttgcagccaaaacttcccattgtcattttctaacttcattggccatttggaaccacatggaagcttaacaaacactctttcagttaaagtttctccacatttttccacaaaatattgtggaacccgctgcaaagaaaatagaatttccttgaataaatttgagataatcaatcactaacatgtcaatatatttccctctgcataagattcacattcctaaaatttcaattgatggtttcaacaaataactttctttctcttgaacaaaaatgacaatccaacaatgtgaacaactcccatgttgtagtactactacctaacatttaatgtttttcagtcaaaggttcatcactctgtttggtcaaaagagtatcatacatgtttttcatataaagaaaaacagtaagagatgcatgcaagcttacaattttgttctccttgagagtttctgtcagaattatcttgaaaaaatgtggattcctcgatgaaaatgtgggcttttcacttagcatctttccccttcaaaatcaaaagctttggcttgagactgaggcaacttatatatcaagactatgcatagtaagtccaacaaaaacaaaatgtagccattatcaaagctattaaacaaaataaaattcaaagttatctttgatgctaaaatgaagctgcattcagactagtatggtaaaggcacagcaaaatacaaatacaaatgtgggctattatatgcaaatttgcttaggtatattataaaagtttccccacattttcttataaatttgtggggaactcacttgctgcagaatgaaaagataatagaaataatatatgtaaagattatataagatgaagatcgcagactgctaaagtagtttgtgatttcttagtatgatcacaaaaagtacaatattattttatgagtacgatttcaatatacaaagatcatatatacttttgcttttcaaatttataaaccaaaccatgagaatagcatacttgagaatccaatatcttgtataatacataaacagaacttctaatccatagactaatgatatacaggcccaactacttagtaatataggatgtttttgttacaaataaagtaaaaatcagtaggtcaatgagtgtgcataaacaaactatatgagtgagattttcaggtttaaaacgcacccaaaaaccaaattaaaatgatagtgaagcttaaagaaagatttcttgactattcctgtggctttgaaccacaaaaggccactaatcccaatgaaaagaaaaaacaaacaaacaaaaatgacatttgaaaaacaaatctttgaatgtgaaatctgtatgattgttcaaaacatgaagtataagaggaaagcaaaggaaggactagtaaatccaagaaaaatgcaaatagaaagaaatggcattgccactttcaaatctactccccagtttttttttatctatatatgtagttttttttttcttcttcttcttcacttttttgttttcttttttcactgaattctaataccccatttccactttaaagaaaaacaacatgttaaaaaagccaaagtagaagtagaggaagaagcattgaaacatcaagtgataacaagtattttttttcttcttcttggttaagagaaaaagagagatgcatgcttacaagttgaagaagtcttaaggagttatcttcagaaagtaagaagtcccagatgaaaatggttgctgcctagtttctcctacaggtccacgtgacttgtattacttgataagcctcaaaaagattagaaaatgagtagtgggccgagtggctaagagaaaatgcaagtcaaagtaaaaggacctcaatcttcaacaaaaaaagaaacaaactttattcagcaagaaaaagagttaattctgaaaatagcatatactttacttcatcaatatagagagggacagatcaccaagctcatttcagtaataagcactatcacatatctaaagaaagaaagaaagaaaatggaaagcttcactaaagttgcatatgggatatggcttgagctaaggtcatgctgttgcaggtaacccatttcatacaaaaatggcccataatcaaagctatacatataaaaagaaaatgaaaaatataaatcagaatattctttaatgctaacaattaagctacattcaaaaggaactagaaaacagcagtttcattttacagaaaagagaacatttttggttaagcttttctatccaatgcttgacaactggcctttggtaaaagaaccagtcagaatgtgtctttgtcaattggactttatgtgggtagagtcagtagactaaaataatgtcccacactcatacaaattcaaatataaatgtggggggttttttgatattatatcaaattttaatttatattaaaagattatatatttacatgctcatcaaaattaatagcacttaacgtatattaaaatacaattcaatataatactatacaatataatacaatgtaaaaaaaggtatcaaacaaatccttagtgtattggtaattaattagtggtggctggttaatattgttgtgttgtttctcacgtttgaagcattgttgtgtaaagtaattttatacatacgaatgctctgcaaaatctagaaaacacagaaaattgaaagcacagtaacaatcaaacaatttttttatggaagagaagttttaggggttttcaaaaaaaccaacacatactacaaaatgattttatataactttacatgcgacaaatatacttgaaaacaacaattacacatcttatataggaaaga

SEQ ID NO: 513 - DNA, 2991 bp, Cannabis sativa
ttggagaatggagtagtttgatattgcatttgtggccaaatttgatggtatatccatgctttgaagagtcagttgcaagtaccaatggaaatatatattggctattgaaagtaggaatgaatgaagtatagtctcatgtaatccttccatggaagaagttgatccaaaacgtcctccttttaggggtggcaattcaggtcacgacgacatgcaagtttgccacgaacacaacttgagattttacgggttcaacacgacacaaaaaattattcgagtcatatttgtgttggtgttttataaatttatcgcgtcacagattgtgttcgtgtcaaccattttagtaaatttaaaaatttcacacgacacatgacaccaaaaacaataatttagcttacaacccgcaaatagggcacgaagattttgcgggttcaacacaacacaaaatttattcgagttatgttcgtgtctgtattttacaaattcgcaatttttcaataaatttaagatctcaacacgaccgaacacaacacgccaatacgaattgcacccctagttttagcgagtttcccaaaagttgtgttgagaattcatggaagaaggtttgtaaagagagaattcgcattggaattgttagagagaagttgtgattatcgtttgttaggaatgagggtgtcagttatttttttttaagaatttgggagttgaatgatgatgatgaaaaattattatggtagattcccaagagtctatgcttaaagttttatgaaaaagaatcttcctaataacttacatgttttcactcttcaatccctaatcctccatctccatggcctattctataaattaagctctccaatctccatgaatgatcctcacaagcattccttttcctttcttcaatttcttgtttcatttctagtttgttataccagctattctctatttcttatttcatcaatcaatgaagagttctttgttttcatctattaaaaatttagattaatttagcatcatatatcttgatttgttaagttactatttccatccaaaggcatttgttaaaaaaataatatctaaacaactgttaacatgtcccaagtcagcatcttctatatttggcaataaaaggtagttaattaggtacttacttgggttaagaaagaaataaatagaatcacttttcttcagggaagaaataatacatagaatcttttatatataattttgctattgtgttctgtaatgacagtaatgtatacaatcaatctaatatctatacatcatgatcatttttatccaaatgatcttcacctttgatgaactgaaaccacatctttgatctgcacagattcatcaaaaaataccaaccaattccaaacagagtcaacaaagaactaatgaagagaacagttttggtagccacagtcataacatacaccaaaaacacagatggaatcaaacacatcacaaccaatcctggaaactccaatggtacactgaatggtctcttaacttctggtgactttcttctcaaccaaagaaaagaagcaaattctaataacattcctaaactatacaagaaatttgcagaagatattatgtcagcaaaatccatgtatgaaacaactaatggtactaatgttgagatcagaattcccaaccaaggagtgttgaaccattcagaccgagcaccgaaaacccgtggcaagaatcctaattctgccattcccaatacttggtatgcactgctagttaattgagcttcatacaatccaattacagataaaacagcaccaaattcaatccaaatctttaaccatttcccagctatcatttcagccacattggccaaatacccttctgtccaatcctcttgatttagaggaatagcaccagttgcagccatgagaggtaataagtaaccaaaacaagagagaatcacagcagagaaaagagctattggaaatgttttctgaggttgatcaacttcaccagctaaagtactagcattatcccaaaaattcaagttccaaaaaagagtattgaaaaacaaggtccaatctttcttcacattcacacccttttgacccaaactaagccacctaacaggttcaatcattggaatagcaaaaagggtcatcaccaaaaatggcaaaagtgatacaatcccaagtgtcacagcagtgtaaccaacaatactcaaaccagtataattcaaaaatgaaagcattaaagttgaaacaaatatagcaacataacgaggaaacccagatgagaaaataggtattaccaatttcaaataatccacacaaagaacaggataagaagctaaattaataaccccactaaggaatttccaagctcccattaaagaaccccaaaagggtccaaaagcatggtttgcccatataacaaacccaccatttccaggaaaagcagtagcaagctcagctgttattaaagcctctggaatactccaaatgaagggaaagacaagaaaacccagaattgcaaagaggggtccggcggccccaacggccgattcctcgccgtaagggccaccggagacttcaaagtagatgaggaaaacgagtggtagtaaagctagcttttttgggtttgaagattggtgttggggaagaaggtgggatgttgttgtgtcttcattggagattcccatgtgtgttgtgttatctttcgatctttggactggaattttcccagaaaactggtaaagtttgcacctttttttcttttttaatgtaatggaatttattatgtttgtgttgttgttggaaaaatatctttgatgattgatttgggtagttgtatgtggtccaattaatcaacaaatcaatcatgtaatataataattatttgaccactttgatttgggcatttataatttgcacaccttatgtatatacatggtaacaactatcactcccaattctctattctagtgattattgcggcaagagtttcaaaaaa

SEQ ID NO: 514 - DNA, 3573 bp, Cannabis sativa
ttgttctgttgatgcatctaataatgttgcttccactgaaacaaattgcttggttggtaaaataagagatcctatgatagtttcacaaacatgttccgcagatacatatgatgcagaagctacaaggttctgcaagggtattgtaccaatgaagaatgaaggcgtgccattggctccgttatctgatgaagactcttctagaatgcatgtgttttgtctagagcatgctgtagaggtagaacaacagcttcgtcaaataggaggtgtccatatactactcctttgtcatccaggtgtgctgtgcttccaatactgacgctcttacaaagttaccgatattataattttctctctttttgctatcttcatgaattagtgacaacaagattttgtattaccgaaacatgctaggatctgttaatggaaggacctatgttttgtgtgatcatctttatgtttcccatttcccagtcttttatgtttggtgtatttaccttataaaggattggtaactccccgtgtcattttatgttaatttgttttttgcagattatccaaagatagagactgaagcaaagtcaattgcagaggaactgggaattaattgtgccttgaatgatactacattcagggatgccaccaaagatgatcaggagaagatccagtcagctctggatagcgaggatgccatgcctaagaatggggactgggctgtaaaacttggaatcaatctcttttatagtgcgaacctcagccgctctccactttatagtaagcagatgccttataattctgttatatacaatgcatttggtcgcacttctccaacaagttcgtctgtgagatctgatggatttgggaggagatctgtcaagaaaaaggttgtggcggggaaatggtgtggtaaagtctggatgtcaaaccaggtacatcccttactagtaaaaagaaatcctgaggacgaagaagagagaggcatccttgcttgggctacaccagatgagaatcttgatagaaatcatgacactccacacagaaatagtaacaccatggttgctaaaaagtatgtgaggaagaggaaaatgaaagtaggaaatgagtcaatcaagaaagccaaatgcattaagggagaggatatagtttctgaaaattcaatggatgatgattctcatgagccccataggaggccttttggaaacaatcaagccacgcggattggaggtgggtcaacgaagaaaggaaaacaacatattcagagggaagatgcagtttctgatgattcaatgtatgtttctctcaagcagtgtaagaggactcttagaaccaaggtagccacttctgttgagacagatgacatagtttcagatgattctttaggagttatttctaattaccggaaccgaaagaaccctagaagtgagaaggccaaacatgtaagagatgcaggaatacaagatgtggtttcagatgactcacttgattttgagtctaatcagcggggtgggaggattcctaaaagcaagcaagctaaattcatggaggaagaagattcagcttcagatgatcttcctagtactaatttgtataagcaacagaccagaatttataaaagcaagtatgctaagtccattgagagagaagatgacgtttcagatgagccagtggaggattatgcttgcgatgaagacaagagagttcttcgaagcaagccaacaaaatctcctatgcagccgaaaatgaaacaagggactgggcgcaatgtgagacaaccatcgtctcagcctgtgaaacaaggtactcgccagataatgaaaaaagaaactcaaaaaacaaagctacacactccacggcttcgaaatagtcagtgtgaccaggacacttcgcatatatgtgatgacgaagaggaagaaggtgggcctagtacacgccttaggaaaagaactcctaagccacaaaaaactacaggaaccaaaaagaaagagcagcagcagcaacaaacaagcaacaaaaaggcaaagaatgtttcagctgggaaagctcaggctggacgcagtgatacaaaattaaaagatgaagaagcagaatacgtgtgtgatgttgagggatgcacgatgagtttcggggtgaagcacgagcttgtccttcataaaagaaacatttgtccggtgaaggggtgtgggaaaaagttcttctctcataaatatctggtgcagcatcgtcgagttcatatggatgatcgccctctaaggtgtccctggaagggctgcaagatgacattcaagtgggcatgggctcgcactgaacacataagggttcacacaggtgctcgcccttatgtatgtgcagagccagggtgcgggcagacatttagatttgtgtctgattttagtcgccacaaacgaaagaccggccattcaacaaagaaaggaagatgattaatctgacagcagaagaccaagtgtaatgtaactttggtaatgaatttgttgttcagttgactaggggggaggggttaggaataggcttaaaaagaggtttagtttttttttttttaccttgtatttgctgctattatgctattttagagttacagtaaattctgatttgcccagggcagggtcttcattggacccattcatttactgcaagaagagcaattgcttggatcttgaagaaagacatttttcctctctcatctcattctctaatgctaatctgaatctttctcattttaagttttctagcatatcatcataacaatttttttaatttacatataatttttcattaaattacttcattgctttcactattacacacctaataattctagtgatccttgcatttctttctctttctttctttgataaataattattaactataagttttgagaaaacagaagactaatacaagtgacagattttatcatatttttcttatgagaataataatatgtgcataataacttttgtacattttttttttgagtatttatcattattaatcttatcttatagatgggtctgagatgtattatattaaaatacatatcacgtgtgtgatatttgtgaacatatcaatatcttaatttgtagagcagtgctattattgtctattttttattatacttttttagttaatgtttgtgttcaaaaacatgttttaaaatatatttttaaaatttttttatcgcgatatttgttatgcttacaatattattcttgtaattgttttaaaatattcgaatagtttattataccgaaaatacgtttgaagctttttaaacgtgcatgataaattagaatatcagaaattttattttcggcattataaactattcagaattttaaaaattttacagaaataatactgtaattataacgaataatgttatgaaaatatttttttttaaaaatattctaacatataattttagacgtaaagataaaattataataaaaggttgtaattaacactctttaatttgtatctacatattaaaatcagctgcagtattatctcaaattaaattgaccaagttgagaggactgtgggaagacacagggagag

SEQ ID NO: 515 - DNA, 4229 bp, Cannabis sativa
aagataattgaaattatcttaaaacacagtttagctaatgtatgtgctgtaatattccactcatgaaagataaaatgacgagaaccaacattacacacctaaaaaaaatgttgaatatcaccaacaataaataacactatcttcactaaagcctcctcactcaaatataatttacattcttatttttatactttcattattccaacaacaaaatgtactcttattttactataagttatgtgacttatttgtgtggaaaaacgaatttaattatcctttattataatatttgcaattaatttactaattatttgatattatacattgagttatataaaaatgaattgagtggtacaaattaaaatcataagtatacaaataattagagaatagtttagtttctataaacaccagctcatcattatgtttatatttaaactggttgacttatgttaaagggattaccaaatatattgtccagaaaaataatgaacctttttataaattaattgattaattatgaccatttctcacaagaaacgacaacatatttaccgtcgtttgagcttgggtaaagttaaaaaagaatcgtttagttagttgaaatgggatgggacccaatctgctatagtcagacattgagccacgtgtaatccagcaaactatagttgtatgcacgtctactttgtttcgagctttctcaactccgacgtgatttttcttttctttaaagaaaaagaaagaagaagaagtttagttaagagaaagatctctgttacttgctatctaaaccagtcctgtatagtcccaaaaacgattggttttccttatttctagggacacattacataaccatatccgaaaatcattcttccattcacaaccaaatctcaaaatcataacaaagttttcatttttccattaatgcccttttcatttttcattctccggtttctctaaacatgatcatccatttttattcaatttttttcgaacatctgaaaagaaaacaataaaatccggcgacccgaaattcaggttgtgtgaaaagtttggaactttctgccattaaacttgatttgttaatgagttcgaggagtacccagattgagctattgagggaaactcttgttttcccaggaaaatgcaggatttcccatttggttaatagtaaaatatttgcaagtcgaagcctccattgacgattctcatacaaattcaggttcccctgtttttaaaacatacggtttataccgttaagatatgggttgtatttgctcaaagggagcatcggaaaaggatgtagccgaaaaatacgagaaagaaaaggaattgggtaaggcaaatccggttcaactgatcgctcctccatctcaaaagagagaaaatttcttggttgaagttaaggcggacggtggctctgttcgtcctttatctagaacaacatcaagagccaacacttgttctcatatctcaaatggctctattcacagaaagccaaaggaagaagacaacagagttgtggtggtcgttgaaggaccctcggttagtaaatcatcaaaaccacaggtgactaggatagctagtgttgttaatggaagaaattcgaatgaagaggctggttggccgtcgtggttgacctccgttgccggagacgccattaaaggatggacacctcgtaaagcagagtcatttgagaagttagacaaagtaaagtgtttgactttcttttagtttttggtaataaagtttgactctttttaggcttaattatatgtatatgtatatgtatatgcagattggacaaggaacatacagcagtgtctataaagctcgagaccttgaaactggtaaaattgttgcattaaagaaagttagatttgttaatatggatccagaaagtgttcgttttatggcaagagaaatccatatattgaggagacttgatcatccaaacgttatgaagcttgaaggtttagtcacttcaagaatgtcaagaagcttataccttgtttttgagtacatggatcatgatcttgctgggattgcagcaaccccaggaatcaaatttactgaatctcaggtactaattagtttcttattagtatgtaatgctctaaagtgctcttatttaatttgcagtcaaaccttatgttttaaattttacacaattaacccctgatcctaatttgtgagaattgcaaaaagaccactcataccgctatcagtgtaattaaatatcgctaaccaattatattgggcactactaatgcgtaatagcaatactctttaactttttggtgacactagtttccttatgtatggaaacatgagttctgtctgggcacgtttaaaaacataaaaacttgcaaccaagctagcataacagacaaattagacagaaattttaaaattggtacagtttcgagtatttaactacataaaaatgaatacatatatgagggggtgtgacagcaaattactctttcttttctaattttattatatgatatgatatgggatttgtacagataaaatgttacatgcaacaattgcttcgtggacttgaacactgtcatagtcgtggtgttctgcaccgtgacattaaaggatccaatattttgattgacaacaatggagttttaaagattggagactttggtttggctacattttatgaccagaatcaaccaatgactagtcgtgtggtgactctgtggtacagaccacctgagcttcttcttggttccacacagtacggaccagccattgatttgtggagtgttggttgtattcttgcagaaatgtttgcaggcaaaccaattatgcctggcagaactgaggtagagcaaatgcataagattttcaaactttgtggttcaccatcagaagatttctggcaaaaaacaaggttaccacatgctactagcttcaagcctcaacaaccttacaagcgtcgtcttcccgaaacattcaaagacttcccttcttatgcaatgcctcttgttgataaactactcgcaatcgaaccaaaagatcgtggaaccgctgcaacttcacttgcaagtgatgtaagttaacaatgtccccaaatttcttaaagacttttctttctccaaacttggttttttctttctattagtcactggtttttcctttcagttctttacaacagagccccttccttgtgatccatctagtttaccaaagtatcccccgagcaaggagattgatgtcaagcttcgcaatgaggaagcaaggaagtaagacctatatatataactccagtcttgccaattgattttgagatagatactcatacatcttatctttatcattttgtttcaggcgtagagcagatacggtaaaaggacgaggtcctgaatctgttagaaggggttcaagagatgccaaccaattgccaacaccagaattcgaagacgaacaagacacttctttgcaggtaggcttgaaaagatgtagtagagtattaataaaattttgttcagtcaaagattataacttttaactgtaatgtaatatattggcagaaacattccaatgccaaaacctcatcaagtcataagtacagcagtaccccagatgatggaggatcaggttttcgaatggaaccaccaagaggagaaagacagaataatggttatgctcattctagttctatggtccatcccagtagtagtagtagtagtaataatgctgagccaggatcatcaaggagcaagacagtagataattctattaggaataaaacagacttaagatctcaaaaacctttgatgtcacaaccagaatcgtctatgatctcttctgctaaaaggagtgaaactatgcatacaaaagaatctgacatggtaaaaaaaaggaagaaacaaaaatccctattaacttctatttcaattattttaaccagagaagttgttgaaatataacatattgataattttcttttgcagggatatgtacagaagaagaacagaatccattactctggacctttggttcctccaggtgggaatttagaagatgtacttaaagaacacgagagacaaattcaacaagcagtacgtaaagctcgtcttgacaaggctagaaccaataaaggctatgacaattacagttgaacaagtgttattgttttttttcttgttaatatattaacaaacaacactccaattccaaataatggtgctgttgccaattaagaagga

SEQ ID NO: 516 - DNA, 2691 bp, Cannabis sativa
cttaccctgtggagttcttctgtgatagacttccagaaaataagatgcaccttgttgatataggtagtactaatcattctatttaagtcatctttaactgtgtaatttcatacctacacagtcttagaattattacacttgacattccccaagtgatgtaggattatgcagcttactggatatttcatcttataatcacgcaactactaactgtcacagttatcaagttaagggggtgactgtgttgaagaagtgatgacttagcttgtattcacacctcaccaagtataactcaatgcttgaatatttttttccttgtacaaattctgttggaatttcacaccagaattgaatttggtatgtgccatgattgactttgcaaatcaaacatcataattgtattaacgttacagctcatcctttttagaatatattctgaatgcgtataaattgtaacccaaagtgtcgaaaaattaatacaatatatacagaggtgtttcagatcagagttttatttctctctttattttcttaccttttttagcttaatattatttaaaaataaataaaatctcatcgtgataataaaatacccctcaaaatcaaataactctatttatctatctcaaataagaaaaaaaaaatcagtggagctaagaagctttacaaagagaaagttggtatcggaaaaaagtcccgaaaacaaaattcggacaatttcatacaaatgaaattttcaatcaaaagtttgcattctaaactgtggccgaaaggtaggtctcatggccggcaaatagtctgaatctcgatcctcagtctaatttttcggtggtgtcgcaagcattccaagtttagaagagaagtttatatagttggtagttaatgcatgtgtatatcaaatgaatgtacacatcattagaagagttgcatttcatcaatgaattttcttaatctgaaattatacaacaaatttgaacacttaaaatgaaataatgataataataataaataatcttatactgatttggaaaggaccccagctccgaataaaagatttctccgagaaaactgcacaaattagaattaattattagactaagaaattgttagatatgtgttagaaagaattctttgattgaaaatttgtaacaaactttacctgcaaactgtagaccggggtagatttcgtaggtagagttttcagcaatcgaagtcttgtattcccgcttttgctaattcaatcaagaaggaaaatttacacaaaatacctaaaatcgcactttttttttatatatatatattgttgtatgttgttttcacgtaaacattttttttttcacaaatgtctgtaaaattgttaactaaatctataaacacgcacaaaagaaatacttttctacttacatttcctcagtctttgaaacttttgtgcttgttgttacatcccatagtttcactgtgcaatcagccgacccagatgcaagaatcgaaccttcaccgctgtaaaatgatgatcaaatcacattctttatttgtttttcagttatgtttggagaggcattataaaaagatcagtagatcacgctcacctaaaagcaagactccacacacaagaagtgtgacccaacaaaggagcaacacatcggccgctggaaagatcccacatcatgatcgcaccatcttcatcaccagaagccatatagcgaccatcggatgacattgccaaagacaacaccatgctcctgtgaccaatgaatattctgacacaatcaccagtctggacatcccatagtcgaactgttttgtcgcttgaaccggtggcaatgtagttgcagttggcatgccattgcacacactaaaaatcataactgaacttcgatcagaattaagaagtagacaaggtctcgtttggctaaaatttctacttttgcttatagctaaactataactattacaaatgcttaaagagtgtatccatgttgcaaaaatatactaagttaatgcaaatctgttttggaccaatctgattatgcatttaacacatatttagagagaaagagatagactgacatcaacatcggataaatgccccgccattattcgcaaaggttgtattctttccatagaccatatccttgctgtccggtcgtgtgatgcgctagcgaaatagtgtcctacaggactatactgctccgagaattcataaccaaagaagttatcagattaaaattgctactaaggaaagatgaccattacttaatgcaggtaaagggaagagacagtgaagaatcaaaacaattgtatagcaggaaatattaataacagaagtaaaacccatacccctaataataattttattggaacttgaattttaagaagcaaaatcttcttgagagagaagaagtaaagcagataaaaatctgaatcctacaatacttcttttaataaattatataaaacaacacacacacacacacacatcattgcatgtcaaatcaacactaataataaccctctcatgcaagagaaactgctcgtatgaaaaatataaaaatggcaagatatacctgtacatcccatacagggtaattatgacccttgtagcaaacaagatttgcatttagcgtagtgctccataaccgaactgcacaaaaacagtataatcccttaataagagagagagagagagag

SEQ ID NO: 517 - DNA, 4486 bp, Cannabis sativa
tttatctgtaaccgagaatcaaacttaagtatttacaccgaaattactcaaaaaaaacacaaagattaaagttaaaaccccattaaaaatatttctttagatacataacaatacactagtttcaaatttccaacaaaaaaaaaagtgtgattttgagatagttttgatcattataaagtaggagaattattactagtattgttgtgtggatgagtagtagtagtagtccttccaaagtcttttaacctcttaagttgaggtacaatatccaaagcaagatcaggcctatccttttttctcaactcagcacatttcaatgccaaattagcaaaagcaagagtttcatcaattggccaatctgttattgcagggtctaacatatcaccaaaatttcctttctcaatagctttactaacatgatgagctaaccccattgggggtttagccgttatgatttgaagaagtaagatcccaaaggaataaatgtcagattttgttgttaatcttccggtttgttggtactctggatcgatgtaacagaatgtcccggctgcagatgtcattcggtattgtgttacttgatcagctacagacggtggtactaaccgagctaggccaacatcgcttattttggtaacgaaatttttgtctaagagtatgttaccgggtttaagatcgcggtgtactagtggctcgggttttgtttggtgtaggaatagaagtgctgttgctacttctgatgctattttgaatctttttcgccatgagattggtggggtgttgcctctttgacatagccggtcttctaagctaccgttgttcatgtattcgtagactaagcaaccgaattctggacaggcgcctaagaggagtaccatgtttggatgtctaatgcagcttagaacctcaacctgtgttcatgttccaaacacaaagcaaaaagaatgacactaattcttaataatactacaataattataaacctttcaaagttattacaaaacagaagagtcgatcggtaacttatacaaagcaaaggattaagctcagggtatcattatgatcatatttgtaaaatacagaggttaaattgccattcagcaaaacagaaaaatggatcggtaatttatgcaaaaaaacaagatcaagctatttaatagaatagaatagtcgatcaataacttatgcaaaacacagaattaagctcaaggtatcattatgttgattttttgtaaaatataaagtctaaattggcatttagtaaaacagaaaaattgatcaataacttatgcaaaacacaaaattcaaaacacatataattggatgtgtatgctttaaattacacctacatgtttaaaatttctcgaaggaattgttctttcttgtcaataaacttcacatggtaaaagaaaaaagaaaatgaaaagataggaaaatgtttgaatgtgaacctcatcctattcaagtttgatacaatgaataatatgaaatttctatttcattggttttttcctattcttattcataacaaagagaatatatgattttgatgagcgagtagaatagaatagaatacctcttgttgaaattgcttccttccttgtgctgcatcaggtcttaacaccttaatagcaactggtgtgtgatcaagttttcctttataaacaggtccataaccaccttcaccaattttcattgactccgagaatttctcagttgcagcttcaatttcctctatgctatattttctataccgaaaatcattcctcgacaaagctgtcagtgctcggttcttctcctcggcctctcgcctcgctatcatctccgcctgttttcttctttgtgcttccttctcagccattttttgtgctatttcagctgcttctagtgcagctttgcactttgctttctccatttccgcagctgcaagagctgcctcttcggcattccttgcttcttcaaatttcttactctcctccaacttccactggctcaactctctagcctgaaaaatattggaaaaacataattcaatacaagaaattacactaaagaaagtgcgaaaaatgcaaaattttacataaattaaagcgatcattcagtatgtttttaagaaattcaaaataatttaaagtaccgaaaacaaagttcaaacagatagtatattacataccatggactttgtttcaaaatttataaactattctgaatttttaaaaaacgtatagtgcttgctcttactatactaatcatcataggaggcttataccttctgcacatgaataatttaggataccgaaaataaaattcacacgaacaataaattacgtttgtggtgaaaaaacaagtttagactttgattccgatattgtaaactattctttattttccaaaaacgcacaaaatgcttgctctaactacaataaacaccgtcgtcgaaaatcaccttattttttgctgagattgcttctttacaagctgagctatacatatccatagtttgctttagttcaagctttaatctcttcatctcagcttcaatttctctctgctgttataccaaaattcatatcatatatagtcaaattaattaaacaacaaatataattaaaatattactcacagcggaaagtctagatgcagatagtcttggtggacttggggcagtactgaattcaaagctttgacctgtgatatccattgatccaaacataccaaaaccgccttgaatgtcgctttcttcggcgtttgaatcgcggccaaaagatgatctgtggcaattgttgacaaggtccatgttatccaacaatagaagtgaaggtgcacttttagtcctctctcttactggtatcattttattcatccctcctttcatgtgttgtgctctgtccaaaaaaaatcgaaaatgatacaaaaaacctaacaacaaaacaatatcttgagtattggtacaaccccagttgtgttttcagtatctgaatagttataatcttgatttttatagttatagctgacatttctcgattttgctttgtccacaagtgtataaaaaacaaaaacacgcgtgtaacagattttttgaaccctatttttttggaaaaatgtaaggtatattctaaagctacaatgtacgttgttatagaaaaagattataactattcagatatcaaaaacacaaggggcgttaggaccgatattctcattttaaccgagtaataccgaagaattttcgaaaataataataaggaatttgttgtgtattcacctagctccatgatcaacttcaccatgttcatttggaacacaaggtggcaatccttgtggagatggttgtcgaggcggggcagcggggttgagcgcaggcctttgagcgtttttcgcagttactatttttcctttcgatatcacaaacacagaacaaaaatctggtgcagatttcacaatactagagggcacatctatgctcttaaactttctgcaataaaccaattatgccatgaaaaaaaaagggtcttttcttttgagaaaatagagatagagaaagagaaaccgaaccttgtaagagcatttctttgagatgcaccagcaacaagattagtgatgcaattcttgttgatataatcaacaattgctttagcaacatcagaatcatcaagaacaacctctttcaatacaacctgaaaagaagaaagattaataattcaatgttctatctttgaggaattatcacaaacatttggtgggcaataataaatctcgaattatttaccgcttttcgagcacaatatgctcggaaaggagcgaaaacactgcgagcatcggagtctcccgattcgctgctgctgctgctgcttgtgctctctgtatatcattcaaatcaatcaaaaatcagagtaaaatgaactgacaagatactatcattatcgcctgaacaactagacatgtcataacccttaaaatgaattattccttttattattttaatcacgaattcacttggatagttcttctgaatttcgaatagttttcaaaatctttgattttcgattatttaataaaatcatttaatgaaagtagaactcgattgaaatgaaaatgatttctattctaatatattttatccttatcgttgtcgctatttatttactcaatctcgctctctaacaaaaagattgtagaaaagaataaaggtacctacgataatttttatgtctaacatggatgagaatgatgaaaggattggtaatcatgagattatcgatagcccatcgaacggcggctttactattcttattgtccttctcaaccgccaccgcggtggcattaaacggaggaatggtatcgtccggataaaattgggaagccattgttgttagtatagcaaaaataccgaaaacaccaccaccgacaacagcagcaacaacctcctccgccgccaacacccggtagagtccgccggcgaaggattatacaaagggagaatata

SEQ ID NO: 518 - DNA, 4731 bp, Cannabis sativa
atatttttgatgtaaatattccatataattaatacctaatttagctactagcctagtgcctactactaccaactaccatttacactaatccattattctctaacacacacttcatttccatagccacattactcactagtttttatagcaaacgacacaaagtcacaagaacaacgataaataattagataagaacagccaagtgaagaaatacataataaataacaccaagatttataatagttcactcccaatgcttaagtaatggtctaattgtaatatctagtaatctaattataaatatttaaggtttactatatattatgagatttattaaagagtaatgagtaagattataaacctgctaatttattttagtataaattataaattttttcatcagtagataaataagcgtaatttattaattataaaaatttattgaaatatgtggatataatataaattatttatgaatttcatgttcggtgactctgaaaattcgatcaaaagccaaaaatatcacaacagttttagtcagcatctttgatggaattgttgagataaattaattatgaaactaccgaaatattttaagatactcgaaggtgacaaaatatcttagggtaaaaaatttctttttaaaatgataaaataatattttattatcctttgtttttatcattatcttattcatatcccacatctttaaccataacctttaaacatttaagtttcacactcacttaatctaaataccctctaactacccccaaacacccccaaaatggaatccaagaacaacaccaatcactcttttattgcttcgataagcacatccaaatccccacaactcgaagacttcttatttagcaaattaattaccaggcaaatggcaatgaagtaatcgaaactattcaaaattcatctccttaaccaacttccatcccaaatagcaagatttggttggcaataataaatcgtaactcgtgttaaaaattaaattttgataaacagcaatgctcaaaaatgtaacaaacagagctttacaagtgctcacgactcgtagagtgacagaaatacagtgtggctaatccattgctttcggtgagatcacaaatggagacttaattcagactataatgggtgataccatagagttaaaagtagtattcagaacaagctctagaagcatattgtttgggttgataatctcacaaaaagtatcacttctagtctataagttaacctttatgttctagttggctaggcttttaaaatctacttttaggcttcctcttgggtaactaataaatttcacctttagtagcttttctctgtcttcctaagaagctttaagctgaagcaaaagaccaatcaaacaggacctagagaatttagcaaaagaacaaagaagatcatgttaaacaaagatatactactaaacaaatcaacgaaaggtactacaagttaaatgtacaagttggttatgttggttgatacagagataacttttacatactaacacgaagttactgaactttcccctacttttcatgttacattaagatctatacaccttctggcaagtcaaccacccatgttaaataaatacatagtacatggacgatgactatctaaaacaacatattgatgtattgatgaatcatctcaggtaatatttctatttttaataaaagaagaaacaaaacaaaacaaaacaaaaatcatttccacaatgttgtacctcttctcatctcctttgccaaaatgatatggtataaggtggtcactgaaagggacttggcccagatgcaaaccagtgttcactgctaagaatttcctacagccatttcctttttatgcgttctaatagtttgcgttccacatccatcggaatatgtggatcaaggttttgaaggttactgacaaacatcttcgcctcatcatgtcgatcaagtttacagtaccaatctacaacggaattgtatgtattctggtttggtttacagccattcttgatcatgtaccgaatgacctcaacagcctcaacaaacatagagtcagaggcataacttgcaacaaaggtattgtaagtaatcacatctggaactatcccagaagctctcatttctgagaatattcgtgacgcctctttcatccgaccatttctacaataagcataaatgacagtattataggaaataggatcaggcttcatacccttctccatgatctcccttaaaagttgttctgatctctcaaaatcttcagaacgagcatacatatacatcaaactattataagttgtcaagctaggagtgaacccgctctcattcatgaagtttataatctcatcaactttggtcaccatctgcctcctaccatatattgagagcatggcatttagagcagttatgtcaagtgaagaccctttttttctcagctcagaaaaagcacgttctgtttcattcagaaggtcacttttactacaaacaagaacaagagtcttcaagagtacagcatggggttctatgataccagagtatattttttcagcaagaacaagcatctgctcaatctctttgccatttgcataagcatgaagcagagaagaataggaaagctcattaggcttacatcggccatcgttcatttcagcaagtatcttatcagattgtttccaaagccctccccgagccaatgcagccaaaacagcattgtatgttgaaagatcaggagtaacaccagcttccagcatcctttcataaactgccatggcttgatcaaaagatccacaccggctgtatgcactaattagggtgttgaaagtgtccctctcaggtacaaaccctgccctcttcatctccctaaacactccagacagctctgaatccatcacattttggccaaacacagccagaagcgtattccaagtaacaatatccggtgtacatttagaggctttgatctcttcaaatattttcatcatgtctgcaaagttaccccggttgccatgcatcttaatcaaagcattaaaagtgcagatattcggtttgcagcctgcaattttcatctcttcaaaaatcttcatagctgcctcatctttccccgccttctcaaaaccggacaaaagggtagtaaatgtaaaaacatcaggcttaatccctctctctaccatctcggttttgagagccaatgcttcctccagcaaaccatctctagagtaagctgatatcaaagaattgtaagtgacaatgctaggtgaaaaccccttaatctccatctctcttagtacctccatagcttctttcggtcgtctagacttgccatatacatctaataaagcattatacgtaactttatcaggtgtaaaaccagctaatttcatctcctcaaagaccttaacagcttcttcaaacaaagccccccgtcgacaacaacttataagggtattgtaagtataagaatcaggagcaaccccagcattcttcatactctccacaagagcaattatcttattccaaggcatccccattttcccatacacattcaatatcacattataagttatcaaagttggctgacacccttctacttccattttgttaaagaccataacagcctctctaaaccttcccttactagcataagcagtaatcaaagaagtaaaagcataaacatcaatcccaaacccatctttatggagattattaagcaaagtagcagcagtggacacccttccttccttaccaagcatactaataatcacagcaacaatagaacccctcaaaacagtctcccaatcttcacgattcctaaaccactcaaacacactcaatgccaaatcacacctcttgtaaaaccctaaacccttgactagacacagtacatcaagagacagagactccgaaccagaacccaacgggtgtctatgggagtcgactagattaataagaaactcgtttagagtagaagtatcaaattctgagtcaattaaagagtcaagaattttctgacctcgtggggatataccgcggtgagaccattgtgtaccgcggttggggtcacgagaccttccgatacgggtgcggttacggaggataggagattggatatggagtttctggggcaaaggggaattgggtgtggaggtttgagagagaagaaagtcttgaagaagaggggttgtggttgtggttgtggggacgggagtgtggaggtggttacggaagaagggtttcgagggaggagggttggggaagagcagagggagaactaccttatctgccattgaagagagaaattgttgttggggtttacagggttttgggaactatgaatccatggccatgttgtggtctgctctgttatgataatttttggtttattttgtttttggggtttagattgaagaagaagaagaaagatagtattggcttattttgacagcaagaataggatgaggacaacaaacaggcaaagatttttttaaaaaaattaattaaataaagaaaaagcctatcatagtaaatcaataatcatttcatttttaacggaattaaccacccaaattatcataatacatcttgtaataagaaggcagactactactaagtctgacttttcaagttttgagtattgtccgaatgttgttaattaagatttttgattttgaattactaaattatacctttaaatttttttactcgttaattttttttttttttt

SEQ ID NO: 519 - DNA, 2066 bp, Cannabis sativa
atatatatttccatataattgtagatatttgaaatgtgtacattgaggggtcaagagcttttcaaggtataaagggctacacatatctctaattgattaaattttgttgttttcatatactcatcatgatatatagatatatatactacatacaaattaatatgatagaaacccatacctattattctgagcaaactcatgtgatatcatttcaaaaataattacgcacactgttatatatatatatagccattctgaataagtatatatatatagattttatatgagttgcgtatcaaaatttcttttgggtataaatattatagttttgaattctagcacatatatgcatcttctaggaagcttcgaccatcaactcataaatttaaatttattgagagagtatagtgttggttcttgtacggataatattagacaatataatataagtacttatcaacaaatatataacacacgtatatatatataatatatgtatattagcctacaaccagaccagtacgtactgtactgtttctataacatgattttttgttctaataagtgatatattatgtgaaacatgtgatgtgtttaaatatattattgctattagttaaaatatatattgggaatttgggaccattattatgtatcagtgtactcatcgagacagagtagtaaaattaaattcatcgatgacgacagtttaattattattatttgcacatataattttacgttcttacaaaaaattatatggttattatttgccaatattctttgttttccgaatttcaacaacaatatataatgaaagtactaataattggcactcatcaacatcagacttaatttataattcttcttattaatatgcacttaattatatatgttaaacgtacgtctcattttgggtttaggttattaaggttaacttgtgaattttaatgtttcttagaatttggaagtataaagagtggaaataataaattgagttccatctcaaatcaattagaatgaagaggattacattttcacacattatattaatgtgagaatctctatcatttcttcaaaaatagtaattattttttttcaccaatcttgaatgcggctccattataagtggaacttttagctcactaaatcacagaagcaaaggctgtatttttgattcacggtagttttttttaactcgtctttttaggctagttattgaatttagatgacttacatctcaaaattaattgataatattgaaaaaaaaaattacatgtagaatttttttaacagtgtgtaaactattttgatccgtacttgtttatgataaagttaaacccactaattctgtaccacttttaaaccgtattatggtgtcataatttatattttcatatttatttttgaatcaataaccttatgcatttgaataatgtagcatttgtgtatatatatatatagtctttttttctttaataactatgtacgtataccgggtttttaaaatatatactagctcgtgatttgacaatttaacccattaatatacatacgcaatctctgatatacatatatagttatatagttacgtacatatatatatatatgcattattgtacttaattactgcaagatacatgatatcactatatcacataacacttcgcaatgtacgtaatatataaaaacttatatatattcacacacatgcatatatatattatacgacctattaatatataaactctagcttatgatataaatttaattattatttaactgcatctaattatatgtaatgtatacaatctcggtagctctttggattttactaaggggagatttttcactagatattactagagcttttatataaatattatatgattgattcggatgactatgattctatttctattccttttgggaattgtattgtctacttcgctcgttcctaaattattatttggatgtatatatatatatgtagccctagtttggatgatatgtatgtatttgtgtatttgtatagtatggtatatatatagggttgcgccgaaata

SEQ ID NO: 520 - DNA, 4738 bp, Cannabis sativa
ttttcttcatccatagcacctctccagccttcatgagccaatgcttcactaagagaacttggctcttcgctgatgttatgccattttgcctgcccaacatacacctttggtttaaaaataccagctctggctcgagttatcatagggtgaacagaaacagggcctgctgcaacattatcacttgctgtcatttcctccacggcattttctgtcacctgttgctgagtattgtcttgagatggaaagccagcatcagtgatttcaatattaacatcatcaaatagattattttcagcatgattattactgctgttaggagagttatggtcaggaagtacctcacgggcagcagcaggatgaactttatcagcatcagttgactgagatttgctatgggaatcggtgatgaagggattaatggtagcagaccagaatgggacctcaacatggattggtgtttcagatttgtaagtgttgaggaaaccattcttgaaagggaattcggactcattgaatatcacatttcttgatatgtaaattcttccagtgctactaagacacttatagcctttgtgactatcactgtatcctaggttgacacatttagtagagtgatattgaaacttgtgtgtttgatatggtctaagacaagggtaacatgctgtgccaaaggtctttagaaacttataatctggcttctttgactgaatcatctcaaagggtgtgacattgttaagaatcggggttggcagcctattaatgagataaacggccgtttggaaagcatcccaccaatatttttggggcatgcttgcttgagcaagaagagttagacccatttcaacaatgtgtctgtgcttcctttcggctctaccattttgagcggaggtgtgaggacaaggatgagtaaaatcaatcccattttgaacaacaagatcagtaaaggctttgtattcacctccccaatcggtatgaagtctctttattttcctttcaaatttgttctccactaaggctttaaattgaataaaggcttgtagggcatcacctttggtttttagagggtatatccatgtgaacctactgtagtcgtctatgaagtggatgtagaatctatagtttgtgtttgacattatgggggctggaccccaaatgtcagtgtggatgaggtcaaggggacattcagatctatcattattggttttaaaaggtaaagagtgggatttaccaaattgacaagcttcacagaaatgttctttttcattcttagaatttcttacatccatttgacttaacacaagacttaagacacgactggacggatggcctaatctcctatgccatttgtccttcaaggaaataaaactactcttgacagactgagttacattcgacttggacaaagacgctaaaccagaaaagaactttgatttaaacttgttgttggggctgatgttggaagaggtttgatcaaactgataaagcccatctctaagcttcccttgaagtactttcctctttgttaccttgtccttcacagtgcaataatcagaagaaaatttaacacaaacattattatcagatgttaattttgaaatactaatcaaattttttgttatttcaggcactataagaacatctttcagcaacagaggtttttcattgttagtttcaagtaatccagaaccaacatgagttatggttaacttgttaccattgccaaccacaagactatccttaccattgtatttcgtcttctggtttatgttgctgccttctgctgctatgtggttattcgcaccactgtctgcataccacgaaccatcatcgaccatttcgggagtgacaataaaggcagctggatcttgagaagtcttttggttgtttccaccattaggagcagaccccatgaaggtttcatcgaacctgttgtagcaataggccgcagcgtgaccatatttaccacagatctggcatgtgggttttggtccattgttggttctgcctcctctgcctctattgtttccgaatctgcctccacctcgattattgcctcctctgctgtttcggttctgtcctcctccactaaaactagggccaccaccatttcctttgttggccaaattagcagtgggattagtagctgtggtagcaacatttccattcagtttgctggttcccgaaaaggtgctgagtctttcaactttgctatcgaagcagagaagaatgtcttgtaattcttgccatgttgtggatgttcttgcttcaacctgaagaactattggcaaatagtccagatctagaccagacagaacgttagagacaagttggttttcgggataagggtcacctgcaagagttaggacgtcggcccattgtctcttctgtctaagatattctgccatgctttgtgaaccctttcgatgagtttgaatcttggttctatactcatccatcttggctttagagtgagcaccaaaaagagcctcaagagcacgccaaagagctgcagaagagtctacacccatgacctcggtggctatctcctctgtcatggatccgaaaagccatcccatcaaaagttggtcatgaacaatccattgttcataatctggattcacctccacaccgaaaccaggctgaccatcaagagaaggagtagagatgaactcaactggttttgcttttgtacctgtcaaaaaaccatcaagcctgtgtcctcgaacaatggatgtaaccattgtcttccacagtgagaagttcttcctatcgagtttgagagcgaaaggttgattgagagtgcttccaaactgtggtacgacgacattagaggaagatccagtattttgggtcgtgaacgtctggttagcaacactgctaccgacgggagcttgaggggtacgatcgccggtggacatagcgccgaaaaacccgctctgataccaagtttaaaataagagaagataatgattgaaactctgctcaatgagcaaaaggcagtagggcttcttttatatatataatgaaaaggttttacagagaaatctagaattcgtacactctataacaaacttgtcagaaatacaaaaaaggggaatattcccaaaggaataaaatgagaaaagctgctgcacggattgctgatgtaggcacagaatatgaggctgatttggcagctgaagtggatgcagactttgaccaaaacggctgacatggatagggtcattttctaacacctcctctcaaacttagcggtgattgagtcaccccaagtttgtctatgagaaaatgaaatcttgcattagataagctctttgtaaggcagtcagctacttggtcacttgatggcacatatcggatttccaaggttttgttcaggactttatcacgaacatagtggacatcaagttcaatgtgcttggttcttgcgtggtagactggattcgaagcgagtgcactggctcccatattgtcacaccaagttataggtatctcaggcaagggaaacttcagttcctgcaaaagtgactgaatccatgacagttcggcagaaacatgggcaagggccctatactcggactcagtgctggatcgagagacaacagcttgcttctttgaggaccatgagaccaatgtgtctccaaagtatacacagtatcctccaattgatcttctatcatcgggacaacacgcccaatctgcatctgaataaccagtcaaggtgagtctctcacaaggtttcacatgaagactataatgaggtgttcctttgaggtatcgaagaactctcttgacagcactccagtgtgtagtggttggcgccttgagaaattggctcagtttgttaatggtgaagctaatatcaggccgtgtgtgtgtcaaatactgtagtgctcccactacacttctgtactcggttggattgtccaaaagctcaccatcttttaatgatagtgtctttccaaccgacattggagttggacaaggcttcaagtgaatcatgttggttcttttgagaagatcgtttacatattttgattgtgacaggtacattctagtttcatcacgatgcacttcaatccccaagaagtagtggagtgagccaagatccttcaacgaaaacaccttgttcagatctgttgtgaattggtttagtcttcttgtgttgttccctgtaataataatatcatcaacgtaaatcaatatgaggataacttcattttcagttttgtagaagaacaatgaagaatcagcttttgaattcttaaagttccagccgagaagtgtagcctttagtttctcaaaccaggcgcggggagcctgttttaagccgtataacgacttttgcagtttgcacacgtagtcgggtttctccttgtcttcaaaaccagcaggctgatacatataaacgtcctcttcgagttgtccattcaagaaagcgttgtttatgtccatttgtcttacatcccaacctcttgctactgctatagtgagcacaattcttactgtagaggctttaacaaccgggctgaacgtctctccatagtctattcccggtctttgattgtacccctttgccaccaacctagccttatacctttgaaaagagttatccgagttccatttgtgtttgtaaacccatttgtttcccacaatgttcatatggggtgttttgggaactaaaatccatgttttatttttcaccaaagctgtcttttcttcatccatagcacctctc

SEQ ID NO: 521 - DNA, 2772 bp, Cannabis sativa
aaaaaaaaaaaaaaaactttgaaacaagattaaaactttattttatgcccacaaataatcaaatacagaaatcatagaatttgaagaatagatttcgtacagtacagtaattctaattttgatagtgatttgctcaagaaaatagaatatcacctagagaaaattatgcttcaaaatactcacacatacatatatatacacaacatgctggttgaatctaatcagttttttattgtatttttctaggcaaaaagaaaaaagtgaaaagcttcaatgtttcaagaactcgtaattatgtggcaacggatggggttttgcatgggtggactgaggttgggtcttggtcgagataagccttcttctcccactgcccgctgctacactggaggtgcttggtgttgatggcgacgtcagtaagaagaagacatgattatttttagtctttcagatttagggttcgacttggacaagttatatagatacgataaaaagagagtgtgagaggtcaagattgagttttttttatatataattatattatatatattattaatatttatgatataaaaataaaaactgaaaagtaatactaaaaactaaaaaaaaaaagaataaaacaactcgggttaattgggtgggttgaatttatttttaacctgcccaattaacagattgggtagtttataatttggtcgagttttttcggtttgttgaagacagattattcaggttgcacggtttataaaattttttgtacaaccctactaataataaataccaaaattatcctttaaaaaataacaaatatttatactaataaggatattatggtaattttaataactagcttactctccatccttccacctttactcctaataccaagcaacacaaaaaaaaaaaaaactgactatcctctcaatcatttatagattctccatccattttactctcattcttacaaaacatagcctaaatgtgacaatataacagaaagagtagtttttttttaagaaaaaatattgctattcaaatttaaatccactccacatctaaaaaaatatctttctattatttttttcaaaaaataataaaagcttcttatataaatgtggctatataagaaaaagtattcttttttttctttaaacattgtgattaactttaaacccactgcacataactaaaaaatatctttcaatttatcgagatttttgaacactaaattaaaagaagattatgttgaagaaaaaaaaattaaaaaaggaaaatgataccatttttttatgtggttgttggggcattaacgatccgtagtccccgagtcaatattattaagttctttggtatggagtatttactgctttttcttgtacgaaattgtcaaccctttgcatgaagggataatgtcatatttataggcattcttaatgggtcgggcaaacccgaacctattaggatttgttcttgatgtccaaagctcactaatagggtaaattgaaatataatatttgttattggatctattaggtgaggcccaagttgtagttagtcatcgtacatgcacgcacgcgctatttacagcgaaaggtgtgtgtgtgtgtcgtcaacatcagagagagaatgtcagagtagtgggtgttggccaaaaaggtcacttcctttttgttatgacccttctctatggtctaatacagggaacaagccgcttgatctctcgagattgtgttaaaatcatgtaacgtgggtccgcttccgtgaccccaagcactttcggacgccccttcacattttgttatcggatgtcctagcacccttcctcaatttgcatgttctctcattgagaatttatggtagatttaagtttggggtcttcagattcgtcaataaaagatagtgttgatggaactggatgttaagtctggctttgcccattcttgatggataggtgtgtaaatgatccttacgggccagtgaatgggcctcgtttctatattgggccttcattgtggtacacttatagctatccagaaatacaaataatatttacccccatccaagtttatgattgtacccgagaccataaacaaggatggcctctttaaattatgctttgggatgacgttgaggtatcccaaattttaatattctattggtgaggtccatttgttcatcacttactagcgcgtatggtctcgggctgaagacttacagctactcatgtcaatgcgctcctcaaggcaaatggtatcattaaggaaggtctcttaagttttaacgagagcatttaatggaaacctttcacattcctagaccatgggatatgtggggtttatgctttctcaaattcaatttgagccctgggatcagagtcatgcgaattgtctcttcacttttaaatacccagtgtgttcaccctttggaatttttagccatttttttaatacctagaaactttcatcggtgaatgtttaatctcaatgttgagctattcaaacatctcttataacttcgatagaaactatttccaaccaccagcctggtcgtcctcgtacaggtgtcatctttgtccaattttcataaagactccaatgagcttatagcgaaggttcgtagattttaggcaaagatcttactggtcgttcataaaccgtcacctctagttttagctatcaaaagtaagtaccccacttctgtgatttttagttttcttttgtttaagcaaattttgggatgctatgatttagatgaacattctcttgattggggggg

SEQ ID NO: 522 - DNA, 4189 bp, Cannabis sativa
taatgttacattatttaaattataagtaggtaatacttatatgtttttggtttgttaaaaaaaaaaatatgttgttgggttgttaatgtcttttcttcttctacttctctcttttatattttcttctctttttttgtgaaaaaagaaaaagtcatttgaatctagtctttttttttttcattgtatatatgtatgtatttatgagttcttttaagaaaggcaaaagggcataaagaagttattccttcatttattattactctttattaaaaacaaaaggggtatttattcttaactaatgcattttactagtttatatcaatatgtgacttcttttttattaattgaaaaaaaaatcaggcaaaatgccaatgattaaaaaaaaatcttgatttaagatggtcaaaaaagggaataaaaaataccataattaaagacagtgatttaggattctattaagaaatggccaaacaaattcttaccaacaaaaaataggatttttttcttgagaaaataaaaataaaatgtcaccaaaaatatcataggaagatctataactaacccaagaaagaagtttatttttttgttttgattaataatttaatgtaagtgatatcttaccttaatatttattttttcaattacaaatccaaaattaatgaagatttgttattttaaagtaatgtcaagcaacataaaatttgaccagatactatgaaattaccaaattacccatgagagagagagaaaaattgatcaccgtcaagcggtggacggtcagatatactacagatatgatcggacggccataaatggaagttattttattttattttattaattattaatttttaccaatcccaaaataatttgcttcagagagagaaaagagctgtctcgttcttctcgtgcttttaaggaaaaaaataaaactttcgcgatattcacagagagactgatacaaaatcgcattttagagagagagaggagagaaagagagagagcggagaaggagaagagaagaaggtgagtgtgattgagatctggatctctctccacctttgaagccatggcgagaggaactctagcttttcagctatggatctgtttgtgtgctatgctcttatgccatgttcattgcttttacctccctggtgtcgctcctcaggattttcagaaggttagctcttcctcatttctacaattacgtattgatgaatgtgtttgcgtatttatgtatacatgattcatgcatggatttaatttgattagtttatgtgaatataagcgtgtgtgtatacgattatggttgaatttagggctagatcttggttattttgtggtgtgttagttagtggcattcagatccgagctaggtttgatgtgtcggtgttgagatttttggtcctttctcgtgtaattttattgagatctatgttatgtttgtgttaatataaggatttgatggagatgttattgctttgatgcggttttttggccggagaatttatggtttggattttgtaaaatgccctaagatttgtaaaagtacctatcgcttataatatctatttagatatatcataatgctaactgcacataaacctgtacatgttgtctctatatgttactagcgtttcaaattctgaaaattgattggatcagaggttttatatgtgttatacaatgagttgatgaggctaatttcctcgcctcagttggggaggaaagcagttggatattagtccttgcttggatcctcagcggttgtctctatggtaagaatatcattgtgttttaatttttatgttattttactactattgcagggggatccgttgagagtgaaagttaacaaattgacatctacaaaaacacagttgccttactcgtactattccctcccttactgtcgtccacagcacatagttgacagtgcagagaatcttggggaagtcctccgtggcgaccgaattgaaaactctccttatgaggtcattttagttttttggttgaacttcctttgctagtttttggtttagtggtttagcagctgacataatttggtgttttgttgcagtttaaaatgagagaaccacagatgtgtaatgttctctgccgtattactcttgatgcgaaaactgccaaggcattcaaggaaaagatagatgatgagtaccgcgtgaacatgtgaggatctaagattatcttctttgtttgcacagtcattttaattggggttggtatgtttttctaatgatcatggctacatacgacaggattctggataatctacctctggttgttcccattcgaagaattgatacagaatcttccatcgtgtatcaacatggctatcatattggtcttaggggacagtatgctggggtacgttccagaccaatgataggttttatgggttatgcaatgatttttaatgtgattatctaacaaattcaaacgtatttgtatacagagcaaagaggaaaaacattttattcacaatcacttagcatttacagtcaaatatcacagagatccaataacagaattagccaggattgtaggatttgaggtcaagccatacaggttaaaatttatgacttttattcccttattcttattcttctttgtggtggtttatgctgttttgacgggaatgtttttttttctttttcaaatttagtgtcaagcatgcctatgatggcaagtggactgatactacacgtctatcaacatgtgatcctcactcaaggaagacagttacaaactctgaaactcctcaggaggttgaggataagaaggaaatcatatttacttatgatatcgattttgtggtaagtaactaagcttataaagatcttgttaacattataaacattaatataaacgtaatgggaggtcattttgtagtaaaatcttatatttttaagagcttcttgactttcttctagaatcatattctgctgtacttatttctgaatgcctgttgttttgttgaatctcttaggagagtgatgtgaagtgggcatctcgttgggatacttatcttctaatggctgatgatcaaattcactggttctcaattgttaactctttgatgattgttcttttcttgtccggcatggtagctatgatcatgttgcgaacactataccgcgatatctccaagtacaaccagcttgagacccaagaagaagcccaagaagagacaggatggaaacttgtccatggagatgttttccggcctcctgtaaactcagatttactgtgtgtatacgttgggacaggggtccagttctttgggatgattctggtcaccatgatctttgctgcccttggatttctctcgccctccaaccgaggtgggctgatgacagccatgctcctcctttgggtctttatgggcatttttgcaggatattcatctgcacggctttataaaatgttcaagggaacagaatggaagaaaattactctaaaaacagctttcctatttcctgcaactctcttcgccattttcttcgttttgaacgctttaatttggggtgagaaatcatcgggagcagttcccttcggaaccatgtttgctttggtatttttatggttcggaatctcagttcctctagtctttgtcggttcctacattggtttcaaaaagccagcaattgaggatcccgtaaaaacaaacaagatcccaagacagattccagaacaggcttggtacatgaactcagccttctctatcctaatcggaggcatactcccatttggcgcagttttcatcgagctcttcttcattcttacctcaatatggctacaccaattctactacatattcgggtttctattcatcgttttcatcatcctcatcatcacctgcgccgagatcaccattgtgctctgctacttccaactatgcagcgaagactatctttggtggtggagatcttacttgacttcaggctcctcagcactctaccttttcctctatgctgcattctatttcttcaccaagcttgacatcacaaagccagtttccggtgccttgtatttcggatacatgctgattggttcgtacgctttctttgtcctgaccggcacaatcggtttctacgcatgtttctggttcacaaggctgatctattcgtcggtgaagatcgactgatcatcgtcaatatcatcgtcg

SEQ ID NO: 523 - DNA, 3464 bp, Cannabis sativa
atgtcatttcaaggtggtcttcttcttcaagcttgaaactttaaatcaatagtttttaattaatgcctagtttaagtaatttccaagtcatttttcttttcttgttgggaagaaagttttaaggcttgcccttatttcatttaataaataagttgaagcctataatctaaattttgtgtagatctaaccattggaaagaactaaggcaaggtgccaaagtataactactactttatatacaatgaataattaatatatttggttaattaagacaactttgaagatgttaaacatatatattttcatttaatatattatatttaaattaaattaatattgttttgagttgaggattattgggtatgtataaaagattgtgcataaaaaataacaaaaataagaaacaaacaaacaaacgtggaccaaatgaaaaagacaaaacgtggctgcagaagcacatacataaacatacttgcttatagatctccacaactactaaacgacaattaggtaaagacaaagaggaaacgacaatcaaaactatggcctccttttacttctatgtatttgcacaaaaagggcctaatatattctatatttgcactaaaatttgaacaaaaaattaatgagccgatcaaacggcaaaatatatattcggcagagaatggaatggaaatgacaattacgattacaatgtttagttaggccttttaatttttataattcttttatattgtaatgagtattacaccacttgcatgaattctcattacatgagtaactcatgaatcaggattacaattatcaatatattacaaaaagatttttttacccttctctctcttacctctttatcaaatgtagttgacaattccgagagatcataatgaatcagtttgtgggtggcggcaaaaaagctacacttctttgaccctctcactggagaagctgcgacctgtcttttagctatggagacggtggtctcattgcatcatccttttattttggtggagagtgattcagagattgttatcaagaatctaaaaatggatgactctatttgggggattgagaactatgtgcgtcattgcaagctcctttctacgtttatgactatttgtaattttttttgtatagctagaaactgtaactacacggcccataatgtggccaaatagacatttgccaacaatgttacggacatggtagagatatctactatatctgttaatatcttttataacgaccatgaggtctaacttcaattttatttataaacgcatttttcaaaaaaaaaatgtaattgacaataaataaaatgaagatattttggtcaatatattaattatttaattttatctttacactgaaccaaataaaaaaattgattactattaatatattgacaaacatggtaatagtaatctcattaatattactattacattccattactattcctattaccattacaattatattccagtaaaccaaacaccacctaaatttagagtactttacatcaatccaatctcaaaagaaaactaatttcacccaaaagaacattccataaaggaaaaacaaaaatacaatccaaataaaataaggacaaaatctacataaaataacagaaaaatcaaatctataaaacataaataaaattaccaaaataaggcaaagagcaatttatggcaatagaggaacccaagtactccattatccactagatatgaatggaaggcactttggcacttcaccttctacctcacacaagttctcacttaaattttgagattagtttaaagtaatgtcgaaagttaggcacaaaaaaatgtaaaagttttacattaagagaatgtgaaattagaatctatatttttttttgacattggttgagaaattcaaactttagacttaaaaaaaatgtgaatttcttaaactataattaagagagacatctaagtttggacagaggacgatcagacaatatgcttgatattaggtaggcattatgtcacatgcttggggatttattttattattcaactcatttaacagcacaattcataattcttaaattagaaattaataaaattaatattgtatttaatacttttaaatatgcatatttacaaatataaagtaaaataactttaacttttgtttgaaataccaagtaaaagtactatggtaagaccaatcatgtgatggtcattatttatttatttattaaaaataaaaaataaaagaaattgtgattaagaaagttgtacaaaatttgggatagtcaattttaaagttaagccaccaaacattattagcagtaatttttatttaagcacagttgactagagtttgaacactacatatttgacaactatttaagattaatttaagtgatcataagagacgtaaaagagtatgtgtgtagaaggtcatgatataagcgctttaataataaaaaaaaaacattaatatttctaaaatacaataaaaaatcaacaaaatcaaattcaaaactaacatgtcagaataataaccttcaataataattcatttgtacattgtggattaatcatggtaaattgtcattataaatttgattttttttttattatttatagaacaaggttatttgtctttataatttatttattagaaataaatacattactattaatgctattgattctaactgtgatcactaataaatcatatttattttttattttgattagtcagtgtgattactaattatatatttcaactatatatatatatcattttgcgcaccataaatgatataaatataatgtttatgaatataaagagagacttaaggttctctaattattaaaaaaaaaaaaacaaaataaaattagtagctttggaaatccccatacattataaaaaaatactttgaaaatatataatacatttttttttcatagaaatttgagattaaatatctattttgaaaagaaagagaaagatcatcgaccgacattgcttcaaaggacctcgttgagataaaaaataaaaataaaaatttgaagaaaattggatacaatggcttctctctctattattctataaaatcattcacacacacaagtggtccatccatggaggacaacaaaaccctaataagatgtatatatacatagcagacaattatgactcaacctccaatatatatatcactctgacttttgccataaatactttctcatctaacaaatatctttcttaaaatcgaagacgaaactgcaataaattccatcaataataataaaataataattatatttttttaagtataataataagatttttctttgaaaagaaaaaagaaaaaaagaaaaaagtatatagatatttttttttttgaaaagtgatatgaattacactatgacaatcttcgacgcagagaaattttcaattaacaaattaattgtccagtc

SEQ ID NO: 524 - DNA, 2616 bp, Cannabis sativa
gtaatggtgattacaatagtatagaaaaagcattacaatattttcaaaatcaaacaaaataatgaaattgtaatagtgattccctttccaattagattaaatactattttagaacctgtgttttacgaaaaattataatcaaactagttacatatttttgcttttatccatgctagaaattagtttcaaattaattatatcagaaaaagaattacctacttctttgcaacattcaaaaagaagctttggaaaacggaggaaagaacctttaaaacgtgcaatctcaaggaatacaactcttttaacacacaactaacttgtctgactctgccatgctttaatgaaacataaaaaccgaccttaagacattaattaaagctcaatcccacagccacaaccaaactttatcgaagaaaagaattaagcatgacccacctctgtaattgaagaaaatattaacacaaaagtgtacttctctagcataaaaagtcatctagagagagagatagaaatgctgtaactttcaattatgaataaggggttagtaatatttacaaaagagtcaagagaagatggcctcaaccttcaatggataaaattttgttgtaggagagtaccatccttcttctataagttgtaattgtttcatttgttactctttgttgaatgagaaaaccaaccaagtaaaattttgttttgtgtaaattttatatattaggggtttgccgcaaaatgattgaatatggtttctagattggactggctgagactgtattctgcgatgccaagttgatttctgaggaacagattacacaagatatcatatttttagctaataagatcaatcaaaaggccatgtatttgtggtggaagaagaaatggatcaatggattcgtacctgtttcgttcgaggtgtccaaagacatcggctagtgacatcccttctccataaggcaactgcagtaatggtccacaccaattacaatattaacaaaaattaaaagaacaaagttggagtaaaccagtaaagggacaaaagttgtaatggactaacaggaacttttcttactttaaaatggaaaacatatcattatatcaagaaagaagaagaaaaaggagagaattaacattatttccatcacttggttttaatgcacatgattctgagaacataaaaattataaatttatctaatttcgacatgttgttgctcatgtattacctgatacttaacactcagcccattgcatccttggaaagttgcacccagaaatgatgagacaacaaatgattcaattgctgaaaacttttctttggataaccaccattcggaaaatatcggcaaagggataccacctgaaaactcagaaggttaaataaaatcgacaaattatatgcacatttacgtgtaacaatatgcagtatcatatcataccatcccgaactaactgctcacacaactgttcgccgaaaaacccatcaggtacaggtgtggacgagatgagcatctgaattctttcttcattgccaagccaccttccaatcatacttataacttcccgtgacaagctaatctctgcacgagacgtattttctgatgtaatggtgtcgattctcccaatgcaagcctcaagatcaccaagtaaacttctagagtgtgcaggaatattaacaagtctttcatgaatgatttcgcaaagattttccatgtcctcacggctaacttcaataggtttaatctaagaaaaggacaaagagatatttgatatttttaagcatgaggacaccacattattggaaaccctaaggtgatgtttggttgagagtaaagaaaacataatacaaatgagaatgaaaataagaataagaataggaaaggaataaattttaatatgaataattaaaaaaactcttgtccattgaaatggctttttttctcttctcattttttagctgtcatttaaccaaccaaaataattgaaaagcttccactggaatcagcattccaatgtcttaaattgtaataaaaatggattctttttcatttcattcctcccaaccaaacaacaatgacctaaaagtgaaaagaaggcggaataaaacctctagctcaagatgattcccgaatcttgttttcagatgctgaggacttccaatgcatctcagtcggcctccaacctttaatcaagaaaaaattcaaagttaagcattagtattgccagtgacacttcgtagagattctgcttcaaaattctaaagagagcagaactttgtagttggtaccattatccccatcctggtacacagagcttgagcttcatccatgctgtgggtagtaagaattacagcggtctttcctcgtcttgttgagatacgggatatcacctcccacatgaaacgtttggcaattggatccatacctgaaaaagaaaaatataagaacatcggagacctgcaatggattgaattctagtactctccaaagacaatgtagtataaatagagtgtgaaaacaatgtgcaatttaattctattgcttttgtatcaatttgtgtcttaagaaaaaataaataaaaacatcttagctctttcacctgtagatggttcatcaagtat

SEQ ID NO: 525 - DNA, 4831 bp, Cannabis sativa
aaaaaaaaatagctacccattaattaatagagttggacacttactctcatacacaagaggttcctcatcttcatcaatttcagcttccatttcctccttgtacttctcaatacggtcgagttcccattcagtttcctcatatccaacttgagtgtccactgttgccttatctataatggggtcccataattctagaaagcgaattgcatatctatctattggacgcaaatgattctcaaaggatgatattgcttgtccagctgctgctgcagcggcagccatttgtttaacatcatccaacatgtcaacatcatcttccttaacaactgtaagagctttttcttcattaatatcactcccattctgcatggatacattttctttgttcgatgtcatccagccactatgatctgcaggttcatcaacctttgcatcatcctcatttactaattcatcatcttccaatctcccaatggcttcttctgtgaactcttcattctcaacttcttcttcctgttcaactttcttcaaagccatgtaatctgcttcatcttctgcatgttttaaagcagcttcaacatcggcattagacagagatatctcatttgcattgtaatttctctccttctgaacattcttgattggaagtgatctatgaccagagaaaagctccataggatcaagctttttgaagaattcagtgttgtagcccccactctgtatcactagatcatccagggcacgcttctgatttgctttcttcaaaatattttcttcaatggtgctctcactaatcaatcggtaaatatgaacttcacgtgtctgtccaatccggtggcatcgatcttgagcttgttggtccatagcaggattccagtcactatcataaaagatgactgtatctgccccaactaggttgatgccgactcctccactacgtgttgataagataaaaaggaatatttttggatttgtattaaaccgttgcatcaaagtttgcctctcctcgggtggtgtggatccatctaaacgcatgtaagtgtagccatacaaatttataaaagcctccaaaacatcaagcatctttgtcatctgagtgaatatcagtgctcggtgacctcctgactttaattttctaagcaaaatcgcaagctcttgtaatttgccacagtcaaattgtatgagccgcctgtcaggaaagtacacctgcctccgaacaatcgcaggtcttaaaggagtcaaaagtggagaaaatatttcggtgcacttctgcttataattaggttggagaaaggcagaactcccagatttactacaccagcaaacaggtggcggagcccgcgcagctgggattgcaaacaagaaactttcaactaggtcaagcactttatgaaagcgttccacaggtgaaaggattatgtcagcaagctttgtggaatacgtataagcgcgaggattagctttgtgacaatgaatatcatcaacaggatgccttactgtgacaagctcccttagggtagttgagtacacaggttttctttcacacctcaaagaattccaccatgcaatggctgctgcgcgatcctttgcttctttaatcctctcctccattattgatctctgtatatcttcaaaaatatttgatccatacaattttcgattttcagatcctgacacaatctttccaaggttaaacaagtcaccacgtgcttttattgaacttgagggggtagcaagagctttaacttcatcactctcccaagaagtcattctattgctatgatgagtaaacaccaaacccatgtccctgagatcaactctagagaacggtccacacgaaagtactgagcaaacaggagagcatagttgaatgtcaatacctgtcatatcaaaagaactgactattggacggccttcaaataggtcaggatgattgcatactttacgtagctgcattatgatgctaatcatcccaaaaaaatttgcatttgcaagagtagcttgtgtttctgaactagcgatgaagtcttcatacaaattacgctgccttttggagagtctacagtatataacatgctcaagtttcatagggagctgcttctccacatcgcgtttcaaacgacgtagtataaatggacgaagaacattatgtagacgatcaattacttctttgtttactttttcttgtccctcgaccatccctgctattggattacaaaaccagtctttgaattcttggtgagactgaaaaatgtgaggcatcaagaagtgcattagtgaccagagttccatgagatcattctgaagtggagtaccagttaaaagaatacgccgttttgagttaaagttcaaaagtgtttgccatctctgtgatttccaatttttaatcagatgagcttcatctaatatcaagtacttccattttttacgcttgaacactttagaatcttgaataaccagcctgtaagttgttatacatacatgaaatgagttgggcttcaaccagccttgcctcttcaattttcgctcttttgcacttccaaaatatgtcaaaatcttaaaagcaggacaccatttaagaaactcagtttcccaattcaacattacacttgttggaaccacaattagatgtggaccccatattcccttctcacatgctaggtgtgccaacaaagcaatagtcataattgtcttcccaagccccatctcatccgcaagaattccattcagccttttttcatacatagcaacaagccaatccaagccaatatgttgatactcccgaagagggaatttaagaagaaaagggaacttggtgcgaacttttgttgtggagaaggtatttccagttggctgtgccgatcttgcggcagcagctgcatcagcaattatatcctcactttcctttcctccttcagataaagtatcatgtttggcttgctgttcttccatgggagaatggactggtgggcgttcatcagatacagcatattcacccacagaaaccagttgcttctgttcagtgttttcatccatagtaaccagttgcttctgttcaacatcttcaactgaaagagaatctgcaaagccctctgacaaagcagaggcatactcagatccatcatccacatcctcattgttgatgggatcctgtcaaacagaggtagatgaaggaacagaattataattgattagagctacccaaacataaacagaagtaaacaaggaacctacctttttataccttgaaagcagttcttcaatgggaatttcactctccttttgcagtaaggcaacctgtaaaacagcaaagcagagactataaaccaccatactgggataaaatctgacagttatcaagtctatgcagattttagtagcttctcacctcatccataggatcatgggaatctgttttagcaaattcctcctcttctgacaaggttgtctcatcatcctgaaaataaacgatccacaccaaaattaatcataaaaatagaagcaaaaagcaatcattaaaattaactctatttggcaattcagtccttgagttttaaaaacagtagcaattaagtactttcagttaatttttcacaaaatgatagtgtaaaagtatttggaaattttcaaaattatccatgaaacagaaagttcagaattttgctaaaaattaactgaaaggacttaattgctactgttttcaaaactaagggattgactcaggagacatttatgctaaaaccccttattaatcgtatacaatcttgagctatcaacagcctatttatgagagtgcatgtaaaagaatttatacctagtaagtataatgattactactaataaactgcagtcaagagattctaatgttaaaaataaaaatcaaatataatagaaatatcacaataaaaggaaacaaaaaaactcttcaaatgctaaaaatctaacaaagtagtgatcgggaaaaacaatctaacaaagtagcattcttcatagtacattgtgtgaggaagctcagatttaacaccataccttttcttctgtaatgccaagaacaaaatcaccatcttcctgcatcatttcagaaaccaagtcaacatatagactacactagaatttatgtataatagaaagcatcagctcacacacttacacaagtaattattgtagcatacctgcagacatacattaataaatagagtaatactgatacacccacacccacacccacatttctaatgtaatgtatcccagtttatgaaaattaaacatcaattactactagcagatttatcaaaatgaaaaatataaattagataaaaatgaaattagcaacccttacagtaaatcaaatgaatcacatgatagaaccttttatctaaaaataagtcaccctcttcaagaatcaatgaccaccaaatacaaatgaagaaaaaaaatcatcacatgactatatgtctataacttggaaaggatgaaaaataacaataaatttatattaaaaacacaggttttcctacccgttcatcattaaaatcatatggcacctcttcttcctctaactcttcagaagcttctgcaagattattggcttcatgtgtctcaacttctggtatatggttttccaaaagtagaagacttccattactttcccctttctgcaatatggaagaactattatgacaagccctcaacattgtcagcaattcaaaaatggcaaataaacacatacaacttacacaacgacgaccagtggatacagcagagttgcttttctcaatctttatggctgcagaaagcccattttcattgcctgcagcatcacacattcatg

SEQ ID NO: 526 - DNA, 2047 bp, Cannabis sativa
tttgaaacacacccgttgtccaaacataatagtactggttgtttctcctcgatggcgtggggaagggccaatggtaattataagtgaagttcttgctgtgcctgttaataccatgagtagaaaaaattgagcaattacctatagcaacaataccatttcaacaaaactgaattcatattgacaacaagaaatgatcttttttaaaaaaaaaaaaattactcttacctccaaaggaatcccgaagtaatctcgtaagctttgaatcccgcactgggacatgtgcactattttctgccagtgcattaatgcacttgcctagtgcacttaatgaaagattgattgatttagcttcctctaatgtatgtccttcacttcctgtgaaaccctccatttaaaagccaaataagtggttgaaaaatatgaaggtaaaatctacatcaaaagctcactcataacaaaacacacccataaataaatcttcaaacaattttactaaacaaataaattggcttgtatgtataaaattctgctaaatgcatgactaatcaagacttgaactcaaggatgagcatgccagctacactgaatcgagtttctcattccatttactatttatgagtatctaagaaaccattcattacttcatgcatggttggtccattgcttaaaactatgttgtattttcttatttctatcaatcacttcgcaaaaatacttttaaggaatgtaaaataaatcctgatggagaatcatagatgcaccttgattagtataaactgtggagaaagaattgcctcatactaaagcatatgctgcattgttaactaatgttgctaaatataagtttttcctacaaataaaggccagtcaacggtgaaaacaattaaaaagactcattttgtaattagagactctaaaactctttacctgacttgtcaatacgctctgaaccagctagatcgactacaactaacttgcccttccgaactaaaggggccttcagatttttacttatgtgggagttgttgccattttcatttgaaagagttgaatctcttcctttcacatgcctcttcacatttacctgtagcagtttgtgtgatagttaatgatcctcctcaaactatttaaaacttgtaacaattgcaagcatcgaagatcaaagaaatacacattaagtattaccatcaaaattgcatgactacgagaagattctgtgttcaattttgtatttgcagcaaaacggtgagcctctccaagtcttaataattccatgaaactcatatggtctcgaatttcaattattgtagccccaggtagagaaacatctccagttttggggtcttccactatggaaatgttatcatttgcaggatcaagaaggtcctgtatggtttccatataaagctgcaagcatagatgaaaaaaactaggatcatttggaaactcttacaaattaatcaaagctcaaaacaagtttgattgattaaaaattaaatatcagaaaagttcagaatatacataaaggattatgactatgggctaaaaaaaacacagaatttgcctcaaaatatgatataacaacctgcaaatatgaaactgatacagaatcagtctctagagaaatatctgctaaaatgtcttccattgcgcgcaccattataccacgagcagctgtgtcttcttctccgagtcttccaagagtatatgttttacctgtaccagtttgcccatatgccatcaccgttccattataaccatctagaacactctgggtaaagagaatagaaaagttccacgttaatgaaatatcaacgaaaaaatatagtttgtaatgaaaagtgctatgcattagcacaatacaaataatgaaaagaatatttcatgtatatgtacctccacaacaggttttgctacaacttcataaacacgtttttgtgatgcaaactcagttagcacctcatcaaattcgaatgtatcagagtcccaattgtttttccttagtttcaaccttttaagctgagaacaaagaaaaaggagcctaatt

SEQ ID NO: 527 - DNA, 2525 bp, Cannabis sativa
ctggccagccattgcaggccctagaggagggggaggcatttgagactgagtggcataaaaagatctaattgtttgggcaaccttggcttgaggatgacccaaagaagaaccactagaaaactctcctggaagatccctcattttggaggccatgtctgcaaaaataaagtaacaaagttagaaatacaagttacaagttttcaatgcaagataaaacaaaaagttggtactatccccagccgtcaacctaggaggaggaatcatctgagtcgctatcactaatggcagccttgcccttatctcttgaagcagacaggggcgagtaggccttgcagaatcttggcctataggtgtaatcaataaagaagcatcactaacaggcctctgcatgctaaatactgctgtagggccttctccctcttctccatgctcttagcaagcctagataggggaatgtcatcatccggatcaagtgtatgcctaccccacaggaaagtctcctctactactggggcatcatctgggcctccaaacgagcctgtagccccctcaacactagacattagaggatatagaccatacctccaaaagtttgcttcacaagccaacctcatgatgttcgtcctctcaacagggagtgataagatgtaattaactctatccctcatctagcgagttgcaatggagcgtgtgtaagtcgaaaccctctgaaagcagtgattgacttgccaaatatcctagatgatgaagtaagtgctagagtaccctccaaccattgacagagttgtgctattagtggtacccaaccactagtagcctagctggctaaagtaaaactatccattttgaatttatcgcaaaacagacttcaacttaaagaaataactgttcttatagggtgagggctggggccagccctactcttcatacaaaaaaaaaacatggccaaaggtactttatatcctttggagtgatctgagttagacacaacctaaagtagtgggctatttctcataagtaggtgtgcaaaggtagcaccgctccctgctcaatatcacgctctgactaggccatctaccttaatgctaagcgatgtgctagttggtctttagtgaacctatcacaccaaacatctcttaccagtccttctgtctttatctcatcgaatctcttggtggaaatagaagaagggggagatatccaccgttcaaatagtccccatggtcgaggagtctagggtcagcagcctcatccatatcatggtttattttgaccatagagagacgacaaagactactcaatggcggcacatcctcatcatatgaatccaagggattgttcgagaatacaacacaagtcttgtacttcctcctggcatgcacaaccttctcagcctcaaatgcagttttagccccagtcgaggcctccttgtcttggccagccacagggtgcccggccacaggtgcctccacctggtcggcccctggctctccaccatattgaggttgtgtagcctcttcaacaatatcaactgtctccctagtaaccaacatagaaatatgagggttgtggggtggtgccctatgacatattttattggtccttgccaacaaaccttgagtgtctggcaacaaaaactatagtctctacagcaaggacatctctcgctgaagaaattacccgaccaatgggcaaggtatcaaacacattgtcctggatgatataagtcaaagaactagggaagaacaccctacaccctaggttcatctcccaaataaactgactgtagagttcagtaccaattcactctaaatagtgatgatgttggacctctggtttcggtgaaccgccgtggacctcacgatcactcgaggaactattagagggatcaattgaacattggtcttcaaacagaagacctagtaaacctttgtcaatatgattcccacctccccaatagtcattcgggatcattttatgctaaagacaaagggaggtgagcaacaagacaaaccaacaagatttagacaaactctagttaattatacctacgaatacttgggaaataattttattatacaaggctgggtatcagagatgtacagtttcaagtgtatgacttagaaaaatcattgagtcttaagttgatcattcttctacaataaactcaccctaaagtaccatacagagttcttaagggaaccgcatataggaaaaattttgtacaagttttcaaggccatgacaagattcttgctaaggttaaaagaggacaaaaaatggccacccccttgggacaaaagccttgggttagccagtgtcccaaggcattaaagagtgccgacgagggtcctttaacccatacaagaaccgaccagggtcttttgacccatgcaagggccgactaggattctaagtgaaaccttagaaccggccaactcccatgagcaacaccatgggtctgccaggtctcaaacaagaccccataggccagctagggtgtccgatggatcaaaaagtgtgttt

SEQ ID NO: 528 - DNA, 1286 bp, Cannabis sativa
aaaatcaaagtaaaaagatggtttgaaaattcaaacttacatttcaatccctaagtcactcccatctttgttttcgctgagaattctacggtcttgacatttccttcgtgtccttctttttcaaacgtgaaatcaagatgtttttccacagacttcaatacagcagtacgtttggatcttaagcggtacggaggagaggcattaaaagccttaccatttgggcagactgaattaataccatgataagttgaactcttgcatgaactcccatctcgagaaccaggcatttccaaattagttttagttacatcatgttcctgagtatcaagaagcatgtctccattagattctcgatctgctttcttattcttatttggaagcaaaggggtttgctctttatactttctctttcgtaagatggaaggagtattgggaaaagtcaaggcagccatttttaagactgattcgggactctgcaaattgaaactctggcccttcacacaaggaggagtgaagcaactaccaggtgatgaatacgtactagaattgaactcattctgcaaggagtgaatactggaaagatctgaatccagtggaatacaagcatctaattgtggtggctcataacacaacgaaccaaaaaacaaacttccagaagacgaaggcgttccaacaactttgtcttctttcacttcctcgtcgaatccacaattgtcgaactttccctcattgttgaggctacaatgttgagactgtttgcttatcaagcagttctcaatatttgcctccctgttgattccaccactttcaaacttcattactgaatcggaattgctgcagctaggatccatatttgaagatactggcttcgattctgtaccttcagaatcggcagactcatttggaggagcacttgatgagccaagcatactacaaagagcaccagaagagtctaactgattattgacatcttcatttatcacatacattgctgcactactcaatacatgagcagtagaatcaagttctttatttgaacagacaggtgtttttttagttgaaggacatttactcatatcttttggaccattctggtagttactcttactgactggtggaaggctgccagtattgataaagaaatctaactttttcttcaaggagctattccagtgattttttatcgcattgtcggtcctgcacgcacaatatattaagattgggacaaaaccagtatattatgggatgagaaattattagtttccctttcatcatattattcactg

SEQ ID NO: 529 - DNA, 2113 bp, Cannabis sativa
gcacatttgttcataaaatgaaagtccataatatctacatcaacaagtttatgtgtagtgaaccacatgttctgtggtgtagtggtaggaatgcttttactgacatccttgcttagttgggtcaagagttcaaatctcaccacagcccctcatgggagggattttgcttggctctttgggagactaactactagtaccatccttaatgggatgagaacccttgaggtgtatacaaatgacccaattaaaggagtatgagatataagatcccctatacctggcatatccttgggattgtctaagttatcaagagatggagaaacaatttgcactacgtgatccctttttttccagcaaaaaaaattgtgtattggttaataaatgaaaaatgaaaagagagaattatatcacttgccttaattgttatgtcttcatacaaggagagtactgcctctacattttgattatgcgtgagcaatctcaacttcacctaaaatacattgtagaaatgaaaactttcagtaaaataacaagcatgcttacttgattttttttctgggaacacttacagccataacttgtaaacagtaaagaaccaccagaaaagatgtctcaaatcaaggtattatacagagccaaaattacatatcttaccttctcttctgtatcatcaaagcgttgagtgagccttgatgcaatttcttcagtctctggaggagaatacttcaaatggtagatcttgcctgtaacagggtccaacctccgtccaacaactctctcaaccagaatctcttcaggaacctgaaatcagaaccccacatgatttcttagtcatagtaaaaatgaatactcatctttaacctgaaatcagaaaccatcaccaaaatctcaaattcattctaagtatgaacatccatatcctatgagtctaaacgaagaagacacatcagctattgagagctgagactcatcttttatttcaacttttctttctttccattggacctaaataaaaaaatatataacaagttggaggggaaaaaatataaaagagaagaaaatgaaaccttacttctaacagaatgaagatatcaggttcaatcccaaagtccttgagagcaagtgcttgcgatgagctcctaggatatccatctaaaagccaaccttgctcttgagaatctggctgcaacaatcgctccttcaccatctacaggattcaaagaaggaagtcaccaacggcgtgaatatatgtcaaatgaacaagttgtcctaccatgacaactatctcatctggaaccaactgccctttctccatacattcccttgctcgcctcccgttttcactcccagctgcaacttccgcccttagtagatctccagcagcaatatgcaccaaattatactgcaagcaagaagaaaagtcaaatcaatatgcttttctcttgcaaaaaaaaaattgtttaaatggaaataaaaatcagtacattcacatagaaaatgacattaaatcaattaatacatacatgaatacaaaatcaaccaaaacctgattcatcaaggtagagagaaaacaaaaaatgcaacaggaattgtccataatcacataaacaatgacacattttttcagatgtttaaaacctttgaacctaaattaacaacaaaattaagctgaattatattaaaagaattatttcaagaaagttaacatacactgatttattcgtgttttatgaagatattatggttggttggttggttggttggttttcaacccttcaaatattgccatttttaactgaaaaagctgattaaataaaaatctgcctgccttggtcttcttcgttgggatctaatcgactttttgatgaattatcaaaccgcacttaaaagtaaaaaccacgagtatgatttcgtaccaattaccacagaaatgaccaacccatcaggttacatattaataacgtgtaactcaatttaaaatcaaccttttgttacgtttttcagacaatcacagtttttgtgtgtgtttttttggagaagacaataacagttcattaatccccaaatatgcactagtagaactagaaaatatagggaaacagaaaagagcaaa

SEQ ID NO: 530 - DNA, 6047 bp, Cannabis sativa
  modified_base (181)..(187): a, c, t, g, unknown or other
  modified_base (5960)..(5965): a, c, t, g, unknown or other
aagactttcttgagctttttacatacaatttttgtttgactttgacttgataagggaaaacaataggctttggtgttctttacttttgaacacaaccacattacacaagagtagaacattgataaagttgaaccagctttggaaaccataacattttctcttagctctctctctctctctnnnnnnntctctctctctctctctagaagcacttcaactttctagtttctaccaacaacagtaacaacaacaaaaatgaattacaaaaacaacattttcaacaaaactttactactacaaatctacccacatcaacaagtccaaatattacccccatccacaaatgttggaaacataaataaacacaacaaaacaaaaatttaagcctccctactattttcaaacttaggtgggcacaaccgcctcgggaggaggcgctaactccaaaacaaactgccaaagaactaaaacgagcaatattaattgtgtacaaacacaccatgtaaccttatatactttcctccgagtaactgaaacctcttcgatctctaaaatatcaccacaatggttttctaattcgtgtgcttgtttctctagctttgcagcttttatttcagcatttccgagcttgtttagcatctgggcttgttcctctgcaatgcttttctgttcttcaaagagtgttgtttgcttttctgcaaccacctttaaattctgtgttgccattgaaatcgtcaaaaactcgatttcagcttcaatcctttgcttaaacatgccctccatctcttcttctatctgtctatgccttttctcctgtaaatctgttgtgctacctgattcatccttcagaaactcggtgctgttaatggtggctttgagttcggctaccttgatttctttcgatacaagtaaattcttggactcatccagtttgctttccagaattttcacattctgctccaggctcaaaaccttcgcctgcaaggaatcaacatccaattgtgtaggtttttcagaagttaactggctagataggtaaggttcttgaattcctgtactagcaaagtcggaaccaccctccatcgaactagcagccaatagaggctccttcctaatttctgctaatttctgaacttctgcaaaatgacaaatggctctccatcaaatgaattttctttaaacttacatccaaattttagtaaagattgagtatcatcaataacctttagattagttaaccaaaagcagaaaatggtaaaaaaacatataaaaagaaaatatctgggattgttagggacctcacaaccaactgaccattctgcggctaaaaaaacttaccttttcttctttttctttgagaaagttcagcctttttccaaaaaataagtaatttaatgagtttctaataaccgattcaaacgatgaggggttgtgctaagaacgagtcaaacattataaggtctcattgcattctcaaaagtgaaagtaaaagttgttaaaattgctataaaaggtcagcataaagtcaggaaaaacaaagcaatgaaaagagaaagtggctaaagaaaataaaaaggagggttacacaaagcacaaggtaaagtgaatgcaattggttctagggatgaattgcttattaaatggtaaagattagaatataagtttattttgctagaagggttacctaaattagaaaaaacaaagaaataaataaagcatttacaccgatcaagttaattcaagctcagctgcaaataaatgaacacataagctctgcatattgggaagttgaaagaaacgttttcttacatttatttaataaactatttcctaaatactataaagaagcataaatgaaagttatctgagaaaacatagactaacctttttcaagtgcttcttgtacagactgcagactaagcatggattgaactagtggatcccggcctgttgagaacatgttgttcccactttttccatccttagccctccaagaattttctgcaaccgaatcatcttgcaaatcttcaacttcccccacattcttcttgctaaaactagtttgaacatcttcaccgaatcgttgttcgtttgcatgagcatcttcgctattttccccgtcataactcactgaccttccaatctgttttccattactactcacatttgaaccctgtgtaaagaaaaagttggagcttctagaatctgattcaatgctggaatgagaattttccttctcaaatctgaccctttctcctctagcctttttactgatctcaatcttagccttaccaacttgaggaatcctttgagatgaattaccggaagtcttaccactcataccccccttcaccttattcttctctcttccctgtcccaataccgcaggctggtcaaacttagccttaggagcactagcagctgtggaagacttgctactacgatcttcactattctccgaatccgtaccagctacaaaacaagacccaaccgcattcctagaatccaaatccaagctacgaaacgcaaatccatcaacagccccagccccagaattctttaacacatttacagatccaacagaaccttcactactcgccttcatctcgtgctgatgtttacttgagttgacattctgctgatgtttacttgagtggtcattctcagtcaataacctcttcaacattttacttgaatcaactgtaggggaagaaggactatccttcaccccatctctcctcctaattctcttccatttcttcaatccaacgcctattcgggttgaaggaggggatttggattccaatcctgatgggtttgtttctccagtcttaaccaaattttgggtctggtcagcacaagacccattcccattattcctaacctcattatcattactattatgatgatgatcatgatctttctcaacagaaaattcagtttctgaatccataacaaaacaaatcccaaaatctctttctctcacaaacacacatacataacagattggaaaagatcaagatcaacggccaacaggtaatcaaatcaaatcaaatcaaatcaagtcatttcatttcagctcgtggctcacaatttctttcaacaactgtattagaaatttaaattcagcataagttaagattattacaatcaaaagctcgattagtattgaattcaatatgcaaaattaacaatacaatcgaattataccaaaaagaaatataattatggagattgatgcttaccgttaccaataatggtttgaagattggattaattgagagaattgggaaatggaagaacacggaaaccctaaacagtagttggatttggagatttatagccaagaaaacgaatccattattactgtttagattaatattaataattactattattataatgaagaaaatagaagaaggaaggagtaaatagcagaaacgaaggggtggaatttgaataatggaaaagtaaagggggtaaattgtaaaaaggaaaagaatagagaaagaacgtgggtgcgtggtggtgattgagattaagatgggccacatgcgggctttcgtggcccactggacaccgctgtactctcctcatcacacaatttattttttattattttttttataataaaatatgttaatttcccatataattatatattttaggtaaatagtactacttaaaagtgatttacttgtatccctatttattttagtttctgtgaaaaatatttaggccaattttttatagtcgtatacgtaattatttttaaaaatatcctacaaaattttgagaaattcgaaaaaaatttaacacattgaaaataagatttaaacatttcgttgcacgtgtgtaaaatatattatttgaatactactttctatattataaattattttaaatttttcaaaattttgcaagatgtcttaaataactaaaacgtatacaactaactacgcaaaaaaaaaactaaaatatatatcttaaatatcaaaaataaagagcggtccatcagtgcaccctcttttgtagggttgcattgtacaaacaccttagattttattattattattattccttattatgaaaaaaattgaaatgtgctaatataaatgtatgttttctatgtattgattttaaatgttgatgtcaaagtcggaggtgaaactatgtgtgctgtggcgattgcgagagaccataacgaatcagtattgtggatggcggttaaaatgctacacttttctgacccactcactggagaagctgttgcctgtcttttagccatagagacagcggtctcattgcatcatccttttgttttggtggagagtgattcagagattgttatcaagaacctaaaaggggatgactctatttgggggattgagaactatgtgagtcattgcaagctcatctctacttttatgactaattgtaatttctcttgtataactagaaagtagaaactgtaactacgcggcccataatgtggacaaatgagtgtttgccaacaatgttacgggcatagtagagatatctactatacctgttaatatattttgtaatgaccatgaggtctaacttcaattttatttataattttcaaaaaaaaaaaaagattttaaatgttgatgttttttttttgaataaaataaaatattaagatgaggtaaaatataaagtaataacgattttcgaaggatgaagaggattgaaggagttgaataagaagaaatgatctagtaaatagataggtatttctttattctatttctttttagtctaagaggcaattcgtctcaaattctcaacaagaaaaaatccacaagggaaacaaatgaaaccaaatatatatcaaaaataaaaactaaactaaacaaagcaacatcataaaaaattttgttgttgggataaatttctcttccccacaagaatgtcgaacttcaagtacataaaatttgcaccattgaaaatgactcgcaatattatgtaaaataaaactcgtagtatcgatagaatcttgcataaatgacttatcgagttgttctatatcgtagtctttttgtctccatggaatcatcaactagtccttgaattcgtgctaataagtctcctctagcatctcaagcaaattaggcatgtcttttttaaaaacgtgcaggcaaattcactgatgtcttgcctaaattaaaagagcaaataatcagaggacaaaacattagtaacaatttcaatccattaaaattcattattactttcatttaatcttctttgaatttatttttattggatgagaaaaataattattcatgttggtttgactttaaatgtattgatctttctctattttttttctttgtacaattaatgtgtactatccttattatatttagagaaaactaatgataatatttagtttattattttttttttattataagtacgattcgattctatatatttatatatagtataatattatataaaaatggttgttagggagacaaatagagttagaatctttgtttgatatattaaaaaaaatggttttatgaagagggtattaattgttgaaaaataataatttaagtatttataaaaatgtaatttattattgttatattattaaagcaataacaataacattaataagccaccctaattttaatgaatacacaagactttatgattaattagtatatttatatatcttccattaaataaaaagtaataatgtatactatattcatagtcctttatttacaataataaatattaataaatagaaaggtgattatattattttaaaattagctttttgaaatgcctttttaactcattcattcattgtttttttccctaactttttaacaacatttataataatgtttattttagctttaaggaggagcattcattgtattattaatctataataattaaaatatatatatatnnnnnnatatatatatataaaaagttatctttatcacatatattaattactattatatattagaagtaggggtgttcattggatgaca

SEQ ID NO: 531 - DNA, 1860 bp, Cannabis sativa
ccaaaaaccaaaccaaaccaaaacccatgttggaattcccacaatcatcatatcataacaacaactcttttttatggtccagtcaaaatatctctttctttctttctttcccccttaaaaccctcttcttctttttttaagccttacaatataaataaacaaaagaaaaaacagattgtgaccacttaagagtccctctcaaatctcaaccccaagacacacactgaagaagacagaaggacacaaagcaaagcaaagcaaagttaccaaacccttttcctttttcatagactcactgccccaaaatcaaaagaagaagaaaaaaagctgaccccacttgagagaaatacaatacaagacaatatttctgagacttgtctctaaaaactcaggttattgagacaaaatgacaaacagttataataaattcattaaggtgaaagtgtaaccaaagttaaaaccacttttcttctacactactccatgtattacattacccaccatttctttttatacattacaactagtacaaaccaaaaacaaaacaaaacaaaaaaaggttcacaacccatgaaattagaacatcataataataatagtaaaaatacattaacatatattatatattactttattttagttgggtttttgtgtttagatggaagaagtggattttctaacaatgtaacgataagcagccactttttttctccgggaagtagtgttgtcaacagagagaactaatttgcctggttctttagatgtgaatgaattgtgtattgcttcttcagatgggttgactttccttgacttttccactgcaatggtgtaactttcttcattacatggcacaaattctgcactgtactccaaatcccatcctcccacaactatgtcccatgtgattgttgcaccagcctattaatatcaatacaaaaaaagaaaaaaaaccccattgttaaaaatcatatctttcttcatatctaacaatcaatctatgattaatggagtcacccatgttaattttaaatgcccaatttagaatacttggtttcaaatgtactagattcataatctttacactttgttaagaatcatgggttaaatctaacaatcaatcatcatgatttaacccatgttaattttacataccaaattcaagaaatcatgttaaaaatcaattgataattagtagagtgagcaaatttggtgtattagtgtaaaatcaaacctcaatgccttcaatctgaatgttgactttttctccacctttgacagtgaactcagaagctggttttggaggaccattttgaaaatcgctgggtcgactcagtccaccgtactgaacaggaacatcttcaggcctaatgaacctgatcaccatacaacaacaaacacaaaaattagattattaaagtgtaaagaaatgtggtccaaaacgacgtcggaatgtgaagaacaaaaataaaaaaagactgacaaaacagctaaagaggttgtatagttgttgattggtactgtacttgcaatatacatatttacacaaaagttttgaacttgataagaactaaacatacacaaacggaaatttcaacataaaatggaaaacccacttggaaatcttcaactttttatacaaaaaatgtccaaacagaaaaaacccacctaagagtctcaatcaatttattaaagcaaagctattttaggcttacttacttgtaaagtgtttcggctacatttccttccttacaaatcacgaacttgctcttagttctttgagttaaaaaaggactgaaaactgagtataacatactgaagtaccatggaacattaatgaaaatctaaaaccaaaaacaaaaa

SEQ ID NO: 532 - DNA, 2031 bp, Cannabis sativa
gttcaaattaacagaaatgatatggtaacttggatgaaatataggaattgaacaattgtcagatttttaatggtactacaataatacaataagaaatgtgtaatagctggttttttattatccttatgttttcttttatttctacccaaaaaaaaacacaaaattgaaaatgacataaatttgatggctgttgtccattgcagcgagaactaataaaacaacacagcacgctcgtcttcatagcactgaagcatttccaccacttgcctcatggttggtcgaacatccttgtcttcttcaacacattgcaaagccagtttaactaaaattattattttgtccttatcaaactcacccaattccaacatagttggatcaattatttcttcaatccttgatgcaaaaataccatcttctccattcatcttttccctcacccaagttaccaatctcccatgttgatctcctattcctcctccgtaatcataaatctgcatgtctgtcgattttctcccagtaactaattccaataccaccattccataactatacacatccactttagaggtaatcggaagattatacacccactcaggcgccatgtaaccccttgtacctcgaatcctagagaagcttggatcgagagactcacctctgtttagcagctttgatagtccaaaatccgcaacctttggattgtaattagagtccaaaagaatgttctcaggcttcacatcacagtgcaaaacccactctaagcattcatcatgcaaatatgcgagtcctttcgacgtccccattgctatggcaaacctcttctcccaatcgagtactatgctgtttgagcttttcaaattatctgctagagatccatgctccatgtactcatacaccaacattttattctgtccttccacacaataaccccacatctcaatcaagttcatgtggttcaacctcccaatcgtgctcacttcagctaggaattcagcttcacctccggtagtgtctgtcagtcgcttgattgccgcgacacgaccgtctgatagtacacccctgtacacagtgcctccgcctccactcccgactgagttgcggaatccagccgtagctttcctcagctctgcatatgtaaatttttgaaaccgtgtagcagcagcaagggtgtaaccatgggagtcatctctgctctcttttcttgtcaaatacaagaagcaaagcactatagaaatcaataccagttccatccctcccaatgcaatggccatccaaacaaaaaccttcaagcgtccattttctttggccttattgtacgttctttgaagcatcaccatcttgggagaagaagaagaacaattatgatctccttcattttttctctgaaaagaggaaatcattgctctagggagtcttatatagacatctcctgggaaagaagaagtgtgagctccattaaccagtagatgcttagtatagcatctagaagcctgaaaattgttgttactcatatgaaattggatacctttgcaatcggacacgttcaaacactgttctttacattgttttaaggaaagattctcatagtagaacttgtcgtagccatagaactcagcgttggcaatgcggtgaaaactggtgtcccgtgtatacctccattcgaattctggttcacacccaaaggcccaatctgaagaatttttcaccttatatccaggcacacaatagcaactccttcctaaaacgtgatcataatagcacatactattgggtccacaaattccatgaatactacatggaatggatatagcttgccaagtaacattccacgtcttattttctatgtcaaaactatatagtcgaagatttccgtccgtatcaagagttaaccgccggttaaccttaacaccgtaatcagaggataaaaacacgagattatccgatgaagcaaagtcaccagtagaggtaaacactgcatttttggtgttgttgtatgtaaatcttccagtctgaaatggcccgagccaaggagct

SEQ ID NO: 533 - DNA, 5408 bp, Cannabis sativa
actacaatagtgtcgaataaagctatttacaacagggccccgtacgtattgtggtggcattttctttgtcggaggcgacgaacctctttggtccggtattaaatgattcgtaattcatttcattccacattagttgatgacactaaaaacggattcacattgttttttatggaccatatcatggttgttttaagtattcaattccatttagtatgtttatgcaatctaaagcgatagatgattattaaactgtggtaaaaacaaactagcccctatacaatttcccaactcttattgtgaaaaaggaaaagaaaaatgataagtttctggataagccaattaagttattatttgacatcatattctccatgtagcatggcccaaggggaaaacatcatcaaaatcactacgcaccaaagtctccattcactggttacataagcctgtaaaaagcacatgcaagcagcacgtggcacgagctacccagcagtagcagtatagtaagtcaaaagaagtggccactcactcactcattcactccaactggccaccaacctcatggactaaataatatcaaattcaaaaaaatgtcacattcacttattttctgttcatgagtattatgctatgctagctctaaaagtcatattctatcttgagattgaagtattctggttagtggcgttttttgggtaatgaaattctccatgctcattgctcagggtaaaagaatggagaaaaagacatttacccaataaattagggtgccattttcatagagatcgtgtatatataatatatgcattgctcaagtaaactaagaaaaaaaaatatgtatataaatatgagtattaattgaggaaacaattttggcgtatttaacttaaaatatgtttatacgcagtgaattgttcaaagatcttggacacgggtttgtattatgcttgtgaaaagttggaccgtgagataattagtctcatgaagatcaggggaagatactaagtactaactactcttattaatttatttatttattgaataataatggtacacaataacctacatcctttacatactctccatgtgccagagaatcagagatcatgtccattgtcctcttaataaataaataaagtagataaaaaaatatatgatgaaggacttaagtttccacctcaaaggattattatatagaaaatgctagatttattgtacgaattaagaaagtattttatcctaaatcatgtgtttgtgttgggatgtatttggttcaagatgagcagtttaaggctcacggcccattagatgccgaaggcctgaggcccataaaggtgacgattaaccaacagagatgatggcccataaaggtttccatgggcttagcctggggtttctggctcataaaagtattatcaattatgacaattttacatgaagtttgttatttattcatttcttctattacgaccaattgtttgttgaagaaattacactcatatgatattttaaaattttgttacaaaaatatggtactttaggttttgccactttttatggtatattttagtttttaaattattttatgctattgtctatgctatacatgtaaaaacttaattttcaaagtctatatttgatgtttagataaattatttcaaaaagataaaaaatctcaaagctattttttctcttccatttaagtagtctacctgcctcacctctcaacagtccacttatgtatcaacctccgtttaccagcgactcatctggcgaccggcaacccacacattcgacgattgacagctcaaacggattctaaatatgtgttctccgccaccaaaaactcaaaagatcgaacggattctactacagttggggatctagaaaccaaattcttacactaaagaactgattttataataaacaaatctgatatgagttttggtagtcgtaactggtttctttattaagatactagttttaattacgtggaaatagctctttttttaattcattgtcttagcaaaactattttttactgttttcttctataaaaaattggttttttcattttattatcaggaaactagttttgattaaatagaagtacaatttatatataagttaatcttatattttaagttcttcattaaaaaataaataaataaaatatagtcaggtattttcttaattactttgagaattacgtcatgattttctgtaaatttaaatagaagttaatatcaaagataatttaaagttttcttttcattgtcgtttaatcggatatatagtcgggtctttaaaaatattgtattggctttgaaagttgaaaacgattgtcgttataggaccaaattgacttgctcagcgcgaaaacatccaaaaatctggagagctatcgctttttcaaatcccaattggtcacctctctcttctttctctctccacccaagaaagaaaacctgttgtgttggaatggaagacgagagagatgaaggtggaagagaagggaaggtcagggccctcattcaaagggcgatcaactcaaccgaaccagaaatcgacccacgcctcctcaaggccatcaaatttgtggtccgctactctgattctgaactccgactcgccgcccataccctattggacctcatgaaacgcgaccatgcacaggttctctctcgtcttcgattttcgtttcattatccaattttattaaatccgttccttttagtatttgagtagttgagggattccaatattttattgaaacataataattgttaggattgtgtcttcgtattttgtttttgattgctatgaaaattgaggggaaatgacagatatttgactttttgattaaattggtgagaattagatgagggggattaatttaatttataatgaaaatttatatggtatttggttcgtctttttttggtttagatgggtgagaatcaactttatatggtatttgcaggttcggtaccttagccttctcataattgaccaacttttcatgcggtccaagctcttccgggggctccttgttgagcgtatggacgttctgttaactctgagcatcggatttcgggggaatcagcctcttcctgatccaccagctgttgcaagccttctgcgttccaaggcgattgagtttttggagaaatggaatgactcgttcgggattcattacagacagattagattggggtttgattacctgaagaatactctcaggtttcagttccctaatctgcaagcaaatgcagctcggtttcagcgggagagaagagagagggagcgaaggtcgaaagagatcgttcttaacaagtatgaggctttgaaagggaatttctcatccatggaggatgaaatacaaactacaattaatgagattggagagtgtttggacattgttcgtagtggggagaaaccccctgtggcgttggagtctattgatgaggatgatttcgtagagatccattcggttgaattgaggcagttacgtatcaccacattggaagaaggagaaaaggttcatgagagcatagataataaagtggtttttgatgcattgagggagctatacaggcttgttgtgacaaagcatttggtttcagttcgagaagggatctctgtacttatacgggttgaattgacagataacaaattaagagattccattttgaaggagctcattaatatccaaaatcgtcttctatcagtgaagaagaagtgtgaagaagcaggttgttctcttttaaatactgaaagtaataatgaagaagaagatttttgggaggaggggaaaactggatgtaccgagagtgaaagctctattgcacaccaaaatggaaataacagtgttaccgttgcatcagtatccactaaggtggaaaatactggtccttcatgcagtgctaaagaccgaggtaagaaaaaaatgcttcgtgaaagtcgtagaaataaatcaaaccctttgaagagtaagctattggctgatgctccagttgttcaatggggctctcagttggacaattggagttcacaaaaggatgttttagccaaccagcggggactggagcttgaaagccactggggtagagtggactatgatgcagtcattcctgcagagaaaattgcagaattaaatattcaggcaacagtatatagtgaagatcaagttgaaattcaaccatgtcgtgctcctttgaaaaaaggtggactttgtcagagaagagatttgaaagtatgcccatttcatggacctatcgttcctcgagataatgaaggaaaaccacttgatcaggattgcttgaaaaatgatgaggcaacttctgattcaggtactgacttagtagaacgcatagcaaaacaagctgttaagaatgtacgtgagagagataaagaggtagcaatcatgagagcagctgataaacaatccttgaagcgtgctaaacttgcaaaagtaagggagcacaatgaggcttgtttaaaggatgctgcaatggcttcaacttcatattctgcatctattggagaagacatggaggcaactacacagaatcagctctctaaaaagaagcagacacttgcttcgatgttgaagaagaaagttactccaaaagatagattagctcaaaggctattgaacgcacggacaaggagtgcaacagtatcacagcttacgtcggctgaggatgcaaagtacagagaagctttcccaaatcagtggtaaatgaagtcatcatatacatttatttgattatttagaaaataatccctagatacagagtaggtggagattgcaaaacaatttttttttagctttttaataagagagattgtaaacattggcattctggtttcacagctatactaaacagatgaaacagaagagcactgatgctttctttctttgttttattgtatttgttttataggttggtttgatcagtcttgtaatatatgtttattattttttcttgaaataaatgagaaaaatttgtatatgaagagatgaataagaagatgggatccatgtgtgaagccacaggttttggaagctttgtatcccatcatttttgtgggggttcttgtacaacctagtcagtagaatttcgttgtcttccataactgtttaagcacaactaatgataacataattgaattatatttaaatgaattaattaaggatatcttaaggcttagccatggctcactggtttgtcagctaagaaatgatgcaacattaatatgataggcagagagagagagaggctgaactttcgcttcaactacttaatggatggctacttcaaagaactacgatatctctctttcccaagtaactctttttttaaggcattggcattgttgtgagatgtcacatcacttaaatgctt

SEQ ID NO: 534 - DNA, 1502 bp, Cannabis sativa
aaagccttttcacaaggaataaaaactatattttcaaaaataaataataaacaaataaagctaatttcaaaaatactacaaacattatttttgtctaatttattaaatatgccaataaaaatatttacataactattattggccggtttaaagggacaaaacttaaaaggccaaataaaaataaagtcgcacaaatcttcacaagaaatgaccaaaacaacggccaaaccaagccaaatacaaaaatggccagaagccaacgccaccgagaacaaaagtgctaaacatcattgttacatcaaaaaaactctaaataaaacaaaatccgatatgcacaaagaaaggaagccacaaatatctatacaaaaacaataattagagagtagacacacaggcaaataagatatccagagacacagataaatagtgtgttggttccaaatctgaacagatcgatacaatagtagtaaatgaaatggataagatgagttatattgtactgagtatcaaggtctagtgtaatgatgtcctttcctatgatctctaaagcttaatagccacttttatgataaagatttggtatgtcacatccttgatatgactactaactctaaaactacagaccccaaataaatgatattagaagatgacctaaaaatagagccagaatagagtagacttaataatggatattgggagattcagaaccaaacaaacaaaatctcatctattactcttctgtgccacaatcattccatttgccaactggatcaacttatgttgggattccctctattttatcaagaagaaaaaaaaacatacatttaatatttctcttacttaatattgcatgaatatacttttaagtaaaaactgtgttatcttttttttttctttaaccaatgaaaatttaattaaaaatataaataatgtcaaataataactagactgactaaaataaacaatgagatatttttcaatcaagtataagttgtatatcaagcgtcctataatagcttattttttttattataagaaatgttttgatttttttttaattattattggagaaaaaaaaggttaactaggagtactaattaaggaaaatattaagctaaataaaaaagaaaaaaatatatattataataattgatgtgtatatagtgagctgttgatagagacaagtaagttatgtttgagcagaggaagcaaaaactgaacaaaatttgtaacattaatttatggcaacttaactcatcattacattttacaacaccaaatttctactcttttaattaattaattaataagcctcggcaatatcccacctcatataccatccaatcgccttctttcacaaaaattaaaaattaaaaattaaaattattgcaatgatattgaaagatattctggtaatttatattcgttttctttccatctctttcaatcatttttcattttctttttcagatatgtactactgctttattatatatatatat

SEQ ID NO: 535 - DNA, 1265 bp, Cannabis sativa
tagtgtaatttcatcctcaaaaatattatatttctttcgaagttgcaaattgttgtaagcatttgtttgtttagttgtcgtttgcttctctctctccattcgagtacctttttcgccactccttttttgggtggcaaaaggttctttcttttcttttcttgatgtgccccccacaaatctcaaaaactctaaattcaattctgatttctttctttcttaaccttttccaagtttaagttttataccgttgaggaggagtaaccttttccagttttctgtgtaagtcaataagtgaatcaatctctttccatgggttttctccgtctattctcatttatttgatacatctataaataaaaaatatacatatactttttaatttttttggctgatgggttggttgacttagttgtctttggacttaaaccatgttcgatggtgatttatgttgagccaccttgatcttaaaaagaagaacttaatgtgggttttttcttcttctttaatttttttttttcttttaaagctaatgtttttgtacataagtatttgatttgatttaatgttataacacaactattttctttcgagttaataaagttttaatttttcttccttggttactttcatagctttctgtttacgttttgagtgttgtactatgattgagttgttgtgtacaagaaggttaccatttaatcaaatgttttttttttttttgatggttttctaagtttggatatctgttgcttattaacattttgcaggtctgaatttgttggagtaagttcggatgttaattgaaccatgcagctatatcaccatccctactctttgaacagccaaagggtgagattagctttggaagagaaaggcattgattacacatcacaccatgtcaatcctattacaggcaagaacatggatgcctctttctttaggatgaatcctagtgctaaaatccctgtctttcagaatggctcccacatcatctttgatactattgagataatccagtatgtacctttgttttgtaatcttctattttttttagtctgaaaaatactaactagattatgtttctcactgaattgaataagcaatgatggaagttaaaatgtgcttgttgatgaatgttacaagtttggaaacattagttacaataggtaaaattggtcaagcttggcttttgtaacaccaattatattcattggattttctcttaggtgtgcaaattactaatatgggatttcttgatttgtgca

SEQ ID NO: 536 - DNA, 3609 bp, Cannabis sativa
aagtgagaccgtcatacttttgctccattaaaatttaagacaatgaatgagcacaattagccaatttttttacaatgcacaacaaaagaaatatcaacatcaacaaagttcttgaatgagaatgctatgtgtttgatgagagagaaattttcgctttaaaaaaaatagatggaaaaaaagaaaaaataactaattcatttatattaattcatcttctttagattttctttctctaccaaatatattttcttttctaccaaagcaacggactagacttacacttttgtaaaattattattaaagtacataaattagaagtatataatttcattaaaactaaggttgatcttagaattcaaaatgtcatgattgtttaataacatcttttcaaatctttcacaatatattttaactgtatttaaaactctaaacaataatttagttcactgtagttgcttaatttgttagggttaggtgttcgtattatacttactttctgaaaatactataacctcagattttaatgtatacgagtgccaagatatagtgaaagatttgctgtagaggagtgcttgtcttaaggattcgagcaatgtttttcaggccattcaacaacatcctttctttgtaaattgttcgaaataaggtgcgcaataaggtagcaaaccctttggcgactacagcagttgcttctttcagtagttgtatttttactgaattcttcccttaccagaagctcttacagtgatgaggcaaagcttctttaggtgtcaaatgtaacgctgcattcggcttatgaatcgatacctaaaccaagaactcacacttattttgttcattccactccccttgctcattccaaggggagatcctttcccatcggcttatccggtcgataggaaacacccgaatatcatcctttctttgacctaccttggctttagtgggtctacaaatctgtaattctgtgttttttttgtaataaaacattctctatctaaaataaataaaaaactacaaaaaaattaatatcattcaataattacccactatgttttattagaattacttttcttttcatttttttaaacaaagaataacacataaaactaaaaaataatcttaaaagaaatgtgatgactaatagtattccatcccatgtttgcccttgcattggagatttggagatgctataattaattactgaaacttgaattaattaaagtccattagttgctttggtaaaacacaactacgaaatccaactgctttatgcatccacaaaataagctgataaaaactacattgaaacttcggccagctcaagtcaatgatagaaatgaaaacacagatatacaagttggagaattataaggaaagaaattcaatcatttaaggtaagagtttgtcttacttaccctgcaaacaaacaatcttttagatctctcttctcttgaatatctatattcattacttgagaaaaagggtgtttccaaactacaacctttcaatagaagaacccaataatctgaaaatgcagtcgtttatagaaaactaatatcataatatacaagatcttataattacagagggtaatgggttccccatgacgtgaatcattttactaatggacttccaaagattcaacaatcattgagcagtagggcgaggcagacgcttggcaatttcctgttaagagaaaaatgaagaagaatatgttgtcactttagagacaaatatctcagctaatcttctcttccactgatgttgccttatgtgatagattaacatccattgcaatacgcaaaaatgaaaatagcacatgtttagaatcatggtatgaattaaatggtatttcaagccagtcatgatgcactatcgaggtcgaaatctattatccaagaattccaatccaagcatataaggatgtactattgacttcaccaattgaatggtcaagactcacaatttatatgtagttaatcaaagataacacaattctccgctagatgatttaaccacaggaaacaatagaaataagcttaacttgaacaatagatagatgaatacctcaaagagctgatttatattatcggctgtcttcgcagaagtctcaataaagaacatcccattcttttcagcatagtcagttgcatccttcaaaattcaacaattgtttatcagctgaataaatacccgcatgtttgaacgagcaatttataactagcattatattaggtagtatggctcttacttcaatagatacttcccgtttctcatgaagatcagctttattgcctaccaaggccataacaatatcagagctcccatgtttttgcagctcctgcagaaaactcaaatttatcaattatttgactataaattccatgaaatcataaatagatatatattaataggagtcaaaataaatatatctgagtgccacttcaagtttcaaatttccacactgaaaaaataaacattccatgtcctagtacaatttacagtttctacagaatcgaatgtgaaagatttttttactctaagatattgcatcaccaattaagtgaaactgtagtaaacctggtatatacatataggttatgaaacaagagatgctatcaaaaggtaagatttgtttcactactggacccagcatcgtacaaacttagtccattccatgtcaaaaactctaccgcttaacattcaccaaaagtgtatagctttaaaaagtgtaatctggtcccaaagttaattaaagaaaaaaacaataagctatgtagccatcacaatatgtgagatcttgaataggagttaaatgacttgtcgaagattgaaaaaaaacaaataagctatgtagccatcacatatgtaagatcttgaatagaagttaattgacttgtagtaattaaatcgttcatttatctactatcatgaaaagttatcaaattatacatttgtcttctacaaaaagtaattcctatgaaagtctaagccaaagaatatgacaaaaaaacaaaggcataaaatgttttaacatgaaattactcactacaaatctatattttcagtcatatcaagaagtgtaatgaatgaaaagaaaggaaccattaagttttttgagtagttgattctaacaagaaactgagtttctctcctcctatctgaaccatttaaacatagctaaaaatgatattactaagaggaaatagattcataaaacatgtaggaaaatacagagagtttttatcctacaaacttcaagataaaatgcaaatagtcaactaatgctaaattaccttcacccaatactgtgctttggagaatgattctggacttgttatatcatatacaacaactgcaactgcagcacctcggtagtaaaggggagccaatgcagcatatctggatcaaacataagcacaattgaagttcacttgaaaaatgtgaaatttcaagaaaagagtattggagggaggaggtggaaaacagatagaaataaaacatctgaatttgaatcataattaggacgttcattttcaatatagagtagtttcttgcaacaagaatacacataaacagcatataagtttaaaaaaaaaaaaaaaa

SEQ ID NO: 537 - DNA, 2439 bp, Cannabis sativa
ccaacgttggagcttgggatggttggaagcctgaaaaggcttcctcttctccttctgttagtgacatcctttggccctccgcaggtaattataatttataatcaattattattatttgaaataaattattggtagatttttcttggaattgaatgtgaaaattgttaggcgtaagagctagctagcacgaagagtagggtgtttcaagtggtgatgatgataatgcaaacaatgcagcttgttgttgtttataagtacattatcttcttcttcttgtgtgagtgtttttttaataggcgggtccaagttccaacatagtacatgtcatgcttaaattttgattggactgattaataatatcttatgatagtaaaagtcgcaataaatatgtataaaaatacaagaataaaagcaaatattgagcatgattttatgctgaattaagggctgaattttcttcattctttatgactgatgagttgaatagatatttatatatataatatatgtgaataatgtaataggggcatttgcggcaatggcgttattaggaaagttggaccagttattggcacctaaaggtgtttctatgacgattgctcctttgggagctgtttgtgctgtcttattcgcctcaccatcttctcctgctgctagggtaacttctcattattaattccttcctttcataatctcaaactaactctaaactcttaatttttttctttttttttttttcgtatttagcctctgtcttttcttctttatcaaaagaaaacagttgtatttagtatattgcttagtgttaggtgtagagtagtatatatatcgaaacgagtgagagagttgatcaagatgactttggtagaaaaattacttatacgatttgcttttataagcattaagcatattaattaccaaacaagatatatatattttttttgataaaacaaatatatttgaatgtagaaaataaattatttccacacacctccattattcttttttcattatattaatttcttttctatgaacaaagttttttgattatgcgagtccttaacttttccaaggtaatacatcttggtcaacaatttgaactgagaaacctttatggaagcttataattacttatctttcgatagtgcatgacaattttcacttccggatagatattatttaaaaaaaataaataaataaaaaagaaaaagaagaagttatcacatctattgaagatattcatgaagctctataagttcaaagttgaaattaactctatacaaagaaccaactttctaaaataacagcttgtggaaataatggttcacagaacaacatgtttagtaacctactaaataaaagtaacatatagtaactgaaagtttgttttgtcgaaggtaataatgaaatcaaatggaaaatactcaattttcatctcaatcttttatttggctgtattttagaaattggaatatcattccaacttgtatgcatattttattttattttattctaattctatttttatttttattcttattgttatttttttttattattcttatttatctattttcattcctccaagatatctaaaaagaaatgatcttgaaaaagatgagacataaccaacattcaaagtatcagtttgcatataacaaactattttacatcggcaataagcacatttctctaatttacactctcttatataacttgtcctttaaacaaggcatttcatgtaatccagaaatgcttgattttcatgcaactgcagaattatctcttcgaacaaacttacgtcttgttttgattgattttgtaattttataaaaattggcaaaaactttactttaataatccaaattaatccacccactacaagataatttagtccaattgacaaacttggacaatttttctctatccaatattccccattaaagtaagaagctttttacaattttgtagccaacttgctttctagtaatttattataagaaaatggtcaagtcactcaatatttttgctctctatcttatgttccccatcatatacataccaaacaagtccccagtaaatttgtttggtggattacttataattctttgacatgatttagctaacaaatttagcaattttgttattttggtttgcagaagtataacatgtttatggcccaaattggctgcgcggccattggtgtcgcggcgttctctgtatttggtccagggtggcttgcaaggagtgctgctctggctgcttccatagctttcatgatttacactaaatcttcccatccaccagcatccaccaggtatccacagaattgctctagtttgctctagttattctagttatttatttatttatttattttatttttctgggtctaaaaggcatttttgagctgtgaatctgattctgtaacaatcaatt

SEQ ID NO: 538 - DNA, 1972 bp, Cannabis sativa
tttatatgaattagagtgaaaatgacacgtaccaaaatcaatctgcggatagaagaggacaaagaaattagaaataatcggtcataattctttcatgtacttcatatgattccacaagagaaagagtttgggaaaaaaacaaaaatctcttacagttagtgtcctttgaaatctggacaaaaaaagcataaggggtctgttgccatttattgttgcatgtgccacaataaattaagaatctcgtttggtcttctttcttccatcataagcattccaaactcttactttttctatttcaaaagcaacaaacaaagctacctagctatatataatatatagctatatgtgtagctagtagtacaagttttatatatattatattattaatatttgtttagtccaagatattcatgcctatttttacctcaagatattcatgattgctcgaagattattccattttctacaaagaaaaatttgtctagtttataatatttgcaaataattagctttcaggtttccaatgtgttcattgtgaaagtcaagaacttctttataattattagtcgatccatattattagtattgctttaattaatatattttctattaattatagtacaagttatatagctgcatgtaacaaacaaaagaaaaaatgattaatttattacattgttataagtatacgtataccatgaaatgtagaatataccaaatcttctcgatcagtatatataaatgtaaaatatatatatttataccatatatatgcatgcagtcatcactactagtatattatatatatatatcataggatccctgatgaatattaatataatctatttatcaactatgattaaacaataattaacatccatttatagtacacgtataatggactgaaaagaatatccaacaatatcagacaaaaaaaacctatcaaatcagtgctctgtagtatgttaacataaggaatcgtttgatcataaaacagaatgtaaaagcctactttatttggctgttgaatactcctttatcaatttatataaaacgtaaaaccaaagcattctagctaaaaaagatgagtttccactttttctccagccatggccatttccattttagcttttttcataaaaattactttttgtctaatattattcctcctctcgtcaaaacacgtttataatgacctttttatcagtagtaaattaatttattcgctagctgtatggctatatatatttttaaaaatatatgatgtactcatgttgttacgtttttaattatgtgtttttattattaccaacttataattattatataaacatgcaagtgaatatttcaattgcatggtttaaaatagcagaaacttctatgaagtacttactgatcagtagtttattattagatatatatatttagagttattgttctagaaacatggattatatatgactatatattacttataagtaagggacattattatttgagtctagaaaattatatcccgggaatcttgctgaaatcatcacagtcacataagtgtcccaaattggtattggctaatatatattgttattcaaattaatctactgatctttttggagacaaaaaggaaattaattcgaaatcatatcaactaaaaagtaaaaaaaaaaataaaaaaaacgtacagatttcaccccccaaataataatatattaatattatacggtaaggcaaaacaaaatcatcattatcaataatattataaactagtgactagagctctttaatttcctcttttgtgtgtgtgtgtgtgtgaatgagagtacttggatgcaatgcattgcagttttgttgtacaattactaaagagaaaaataattgaaaacatatattaatggtgggcatacataagagggttatcttttttgctttgatttaagtaaaggaacaattattaagtaggttagtataaaaa

SEQ ID NO: 539 - DNA, 763 bp, Cannabis sativa
caactcttcaagcctttgtaaaatatcaggatcaatgtagtcatatacgttgtgcccatcaagaatttctggcagtatatcttccttccattcatcgttagccaagatgtagtgcttcttcaaactggcagagtacacacctgcaccaccattttcattttccaaatccctttcagtttttctcttttcagtctctgaagcctgcttagccctggcttcaagaacagcctgaggtatacaagctggcctttccttctggtcacgaggttttggcaatgcaacatgaaacctgttcaagcaatcatttagttttttagatttcatctttatttccaccctctgatccaataatctcttacaagctgcatacttcacagcaatcaccccttcctcagtcaaagtactcatggtcaaaagcaccccttcatcatttgcagcctctcctccttgaccaagcacagtcttcaatgcctcagctttcatctccatgaccaacttcttatcttcctcagatataccgtccaatggctgtaaatcagtcttattgcacacaatcaccaatggtttgttcataaacaaagacttgatactgtgaaaaagagcagcctgctgagcaatagtatagccacaagaccccgagacatccaagaagaacagcactgccgcccttaaatgtgccaaagctgtgatactgcacatctcaataatgttgcggtcttcaaatggacgatccaaaatccctggtgtatcaataacttggtac

SEQ ID NO: 540 - DNA, 4494 bp, Cannabis sativa
ggtatcagagccatttccgccattgttggcgaacatggcctctgttgatcctgacaactcaaatcatcaaccaacaccacaaggaaatcaacctgcagctgctgtatactcaagaaatcgatccagaactcaagaagactctactcctttctatttcaaccatactgtatcaattaagctcaacgaccacaacttcctattatggaagcagcagatcttagctgctatccgtggaaatcgactgcaaagattcattgaggatgttccccctccacctcagtatctcagtgatacagatcgcacagctcatcggctcaacccagaatttgtcgattgggacgttcaagaccaattgctcgtttcttggctgctgttgtccatgactgagagtcttctaactcgtatggtgggttgtaacactgcgcgtcagatctggaaagcccttgagcaacattacacattgaaagtctcatctaagattcttgagttcaagacaaagcttcagaaattaaagaaaggctcatcaagtctcaatgactatcttcttaaagtgaaacagcatgttgatttgctggcttcagtaggagaaatcctctcagatcgtgatcacatcgcagctatattcaaaggcctccctagtgagtacgacaccttcatcatctccaccaacacacggattgagggatacactgttggtgaaatcgaggcattacttcttgcatctgaatctcgcatagagaaggaggattaagaagctgatcctagcatcaatgtggctatgactgagcaagatctagcacttgaagcgttttatgcgcaagcaaatcgaaattacagaccgcacacttatcctcgaggtcagtactctcctactggttttcattactctaaccctcctccttttccaagtttcagaggaaattttagaggaaactcacctcgtggagccagtcataatccccaaaccagtaacctgggaagaggcagaggcagtcgttttccagcaactcaaaaccgtgtgcaatgtcaactatgtgggaaacttggtcacactgtcatagactgcttctaccgatttgataaaagcttcccaggtgtctttcaagccactgatcaaacccaggcacaagccaacttggctaacacaactcagtctcaggatgacaactggtatcccgactcgggtgccacaaatcattgcacaccgcatgggcaaaatgtcatgacagcagctgactatgagggacctgagcaactatatgtgggaaatggggctgccttacctatctctcaaataggtaatacttatcttattcccaaaacttgtcaaagacctttgattctcaataaacttcttcatgtgcctgaaatcactaaaaatttgcttagtgtatcaaagtttgctgctgacaacaatgtgtactttgtgttttatcctgatttttgttatgtcaaggaccaagtgagcaaagctatccttctgactgggaaacaccacaatggcctatatacttttgattccaaccaattacagctgtctccctcatcccagccctgtagtgcctttcaatctctgcatcagcccaataccaatgttgtcaccacctctcacagtcccagttctaattccaatatgtgtatcaattgtaatagctccattcatgaatacgatttatggcataatcgtcttggtcatccttcagaaaggattgtaaagactgttctctctacttgtaacatttccaatttgaataaaatgccacattctgtttgccgagcttgttgtttaggaaagatccataaattcccattccctaagacctctgaaacctgctacaataaacctctacagcttattgtatcagatttgtggggtccttcctttacaacttctcataatggctatcgatactatattcacttcatggatgcatactctcgatttacatggctatacctacttaagtctaagactgatgcacttaaaactttccaaacattcaaaaccgaggttgaattacagttaggcaccaaaattcaaacttttcagtctgactggggaggagagtataggtctttcactgaatatctaagagaagcaggtatagttcataggaaaccttgtcctactactcatgagcagaatggtctagctgagagaaagcatagacatattgttgaaaatggtctcactttgcttgctcaagcaaacctacctttaacactttgggatgaagcttttagaacagcagtctacattcacaatcgtcttcccactcctgttctttctctcaaatctcctattgaagtgttgtttaatatcactcctgattatactaaactcaaggtgtttggttgtgtttgttatcccaatgttcgaccttacaacaagcacaagcttgattttaggtcgtctccctgcactttcataggatacagtctcaaccacaaaggctataagtgtcttgatagtaccggtcgcttatacatctcccgagatgtcatatttgatgagtctacttttcctaaacacacttccacacctgcttctgaacctgaatgctctatctcttccacacctagaactattcccacagtttctaacccatacaggcctgaatatttgttccctcatgacattggtgatgctcacattggctccttttgcactaatcaaattgtttctgagttccctgacagatcacaccagaattgtaccgttccagcaagcattcttgatactactgatgctcttgctcccactgctcctgaagtcactgctggtactcacaatgacagtagtatctctccacttcctcatactgattctgctcctgcaccaattctcactgctgcaccagattcacaaccggtttctgcagcatcctctcttcctggtaatactcacagtatgcaaacccgtgggaaaagtggcattaagaaaccaaaagcctatatggctactcaagttcctacttatctgaaacaagctcttcaacacatcaaatggaacaatgccatggctgaagaaattcttgctcttaaacgaaataagacttatacacttgtgaaattaccacctggtagaactcccattgggtgcaaatgggtatatagaatcaaggaggattctgaaggtaatgtggttaagctcaaagccagattagttgctaaaggttttcatcaacaacctggctttgacttcactgagacatttagccccgttgtcaagccagtcacaatacgagttgttctctccctagccttgtccaaaggatgggaactaaagcaactcgatgttaataacgcattcttaaatggtgaattacaggaagaagtttatatgctgcagcctccaggtttcgaagaccctgctgcaccagatatggtatgcaagcttcataaagctttgtatggcttaaagcaggcacctcgtgcctggtttgacaagcttcatcagtgtttgctctctctcgggtttgtttcctcaaagtcagatcacagcctcttcatcaggcacactcctctctccatgacagtaattttggtgtacgttgatgatatcattatcactggtagtgatccgaagctcatatctcattataccacagctctgaatgccaagttctctcttaaagacctcggtcctcttaattttttccttggcatcgaagtcacaacaacatcaacaggtcttcatttatcacaagcaaaatatgttcgtgatctcttacacaaggccaatatgactgaggctaaaccagcaaacactcccatggtcagtgggctgaagctctcagcttttggcagccctccagtcgatgatcctcaccaatacaggtccattgttggtgctttgcagtatttagtcatcacacgacctgaaatctctttcagcgtcaacaaagtttgtcaatttatggccaatcccttacaatctcactggctggctgtcaaacgcatattgcgttatctaagtggcaccatcagctatggtttacacctacgcaaaccagcagactttgagctcactgcattttgtgatgcagattgggcaactgaccctgacgacaggcgatccacctctggctttgctatattttttggccctaatctcattgcctggcaatgtaaaaagcagcatacagtctctcgtagcagtacagaagcagagtttcgtagcttggccaccacagtcactgaactctcttggctacattctctcttcactgagttacatattgatctgcctcgtccaccagttgtgtggtgtgacaacctgagcaccgttctcctcacggcaaatccagtccttcacgctcgtacgaagcatattgaactggatctttattttgtgcgcgagaaaatccttcagcaactggtccatgtcaaacatgttcctgcctttgatcagattgctgatggactcactaaaccaatctctagccaactgttctctctttttcgaagcaaacttaccattggtgatcctac

SEQ ID NO: 541 - DNA, 3397 bp, Cannabis sativa
actcttaacacattcgttaaacaaccggaatctccattttaacggctcccgggaaagttgcgtctagtcattttcccgagaaagtgacaaagctcaacaacattttaacgcccccccttcaaaaaagaaaaagaccaaatgtggcaaagatcagcttcatttattcttgaccaacagtatcaacgtcaaaacgatctcgcttcgtcttctaatcaggaagtcctttctctctctccgcctcccccttcatccatggctgacaacttccaaaaccctaactctaaccccaagatttcagcctactaccagaccagggctgcccatcacgcagttgtcactagcgattggctggcccaagcacaagcagctgttggccgcttatccgatgaccaagcccctaaggagcccgaactcccgattgcctccaatcccggaaagaccttcagtgttatcgacgagtttaacaattggcggaagcagccggatttggctgaggctgttgcggcgattcgagccttggcggctgtcatcagggctagcgaggctaccaccatgatggaacttgaaattgagctgaagaaggcctccgactctcttaaagtcagtacatttctaatctcctcgctctaactttcttaaatttgtttttctgaaggttaatttttttttagggttagttttattggaattgggtattaggatcaacttcaactgtgattgtgttgagctgagtattgaacttactgatgtttatatacatacactattatttggtaaccatattaaaaatgtcggctacgaagtacaattgcctcttgggttttcctctacaagaagccctttgcaaaattttggtcacactcggatgtgttgcgaaaaggtgtaggacatttgagcattagaagaatttttctcgatgaatattgagaaaagatgatttggttgaaagcttgttagtgatcttgaataaattgattgctttggcagtatgccgatatcaaaatagattgagggaagcctttgggttagataagttaaacgccaaactatgtatttcagaagttaaagatggaaaagaaaaggactctgtatccaatcctgcacttgaaatttaagtttaaaggaaaagttttacaccatggaacgtggctatagatgcttgatgatctatcagaagccagaaaacgaatgcagggatcaacccatgtagtatatcatgttaatgatctacatatacacaatacatttgtatatctatagatatagtatacatattttgtgatgtagtagttagtattgggtagcatcctcccacttagattaagtgtaaaaatgttaagccatacataagaagatggactacttcactcatcaccaattaatttttagatggaactctatgattcttgtcagttagtagtatttttgtcctaagtaatcttttgttgcatatgtgtttacagtcatcagacacgacctctatctccctgacagcaggctgtgatcttttcatgagatatgtaactcgaacttcagctctggaatatgaggaattcaattcagctaagtctcgtttaattgagcgtgctgagaagtttggggagatatcctgtaaggtatgtttgtcagtttcagctctttgaagtcgaggctaattttttttgtttttttgagcaaaatattcaatgtgtatgcaatttttccaatgttcaggcacgtagaatcattgcgatgcttagtcaagactttatctttgatggttgtactattttggttcatggtttctcaagagttgttctggaagttcttaaaactgcagcacagaacaagaaactctttagagttttctgcaccggtatttttcttctcctagttatttttaaaccaagcttggtgcaaattgcttgattttttattcaatataaattcggaaaattaatttagattttaattaaagtgtattggaccttttattcacttaaccatcatagcttcctgattattatgtaaattgcagagggcagacccgacagaactggtttacgattttcaaatgagttgaccaagcttgatgttcctgtgaagctcctgatagactctgcggtggcttataccatggacgaggttgacatggttctcgtaggggcagatgcagtggtggaaagtggaggaataattaacatgatggggacataccaaattgcacttgtggcacagagcatgaacaaaccagtttatgcggccgcagaaagctacaaggttggctgaaatttgctctttaaacacatttgttgtccgtgatatattcttcaatttataaaatcagaagacagtcgttgaattcaaattccatgatatcatcctattgttttgcagtttgctcgtctttacccattagaccagaaagacatggctccagcattacgccccattgattttggggtacccatcccctcaaaggttgaggtcgaaaggtcagctagggattatacacctcctcagtatcttaccctacttttcacagacttgggtgttctcactccatcagtggtcagtgatgaactcattcagttatacttatagttgtagcgcttgaaaaagtcaattttgctttatttcctccctcttccatccttagaaagttagattattgggtgtatgcttcatatgaaatgttttaatcttgacctggaacacattaattttcgaccatgaagttgaggtatacttgttctcatgttttgcttaaaacataaggtggtcctgtcatatagttcagttcagcgatccttggattgacggtgaataatcgttacgcttaatgtcccaaaatgcttgtactcgatcttggcctttgttaatggaatgatttggaggagagcatctccattttaagtttggcaaattaagtatttggtttgaaactaaatttacaagtggagtgttaagccttttggatcgttaattctgcacaagttaaggattagggggccgcatagggagtactgtcgacttttagctgtaatcattttggtaagttacgattttgaagttgtgtgagaagacaaggttactttttttttttttgcttttcttctgaagggatgctttctagcaatgtcgttgtagtttaatgacttctcctttttttgatacaaagatattgtcgcagtaaaaattaaaatggtgcgaatgtgataaattatctatattgaaatatacaataaataagtattttgtgcttgaattgaactatggactatggtcggaaaaaatagtattaccaatgctaaatagtcttcctcaacatcagtaatttatggattttttgttacgttatctttaatttttcactgtaaatataatcaatgtaaatatcccaaattataatgaacat

SEQ ID NO: 542 - DNA, 4704 bp, Cannabis sativa
atcatctacagcaatcagatagcattgtgaagaaatctcccttttccttttctgggtattggatctgtaacatggaaatctattttttttctttctgacttttctcatcttcataataataacattcttcttcatcataatattcttcatctgtctcatcatcatcatagtagtattcatcgctgttctcaacatcatcatttccattttccagcagatttgttgcgtctttttgaccccgtaaactctcttgaatgcgttctctgatggctgtgccctgaaatgaaaaggaaaacaataatgaaaaaaataaaagacagacatgataaatatcaatcttgtaagtaaaatggtttaccattttatggcacccctcttcaaacatctccaaaaacccagcaacccatcgatcagcattttccacccactcgttgcgatgcataccagcagtttttgcaacagtttgaatctaaaacaaacaatcagcaaacataaaacagaactacagtcatcaaagatgttatgcgtggtttcatggctgactcaacagtatgaacaaaatgtaattacaagaagacagctcttttctttagcaaaacttaaaactgagatctgacatgaacagagaaaagagaatcactaaaaagatactaaaattgacagaatgcaatgacatacaattttgtatatatatttgcctgactttaaggtgacccaaccctatattcacttttgaaaaaactcggatcctaaaattacaaaatgttacttcataagtactagacaaatagcatcagtcataaccacttgggagatcttataaaattctgtaaagtaacattgtcctaataaaaataagtaaatcaacatgttcacttagagaatttgtatgtatacgtccacatgctgggacacaagtatttaaaaatggtaaaacattaatgttttttagagagatagttttgtctgtgactgtgactttaacttctatataaataccaaataagctacagaaatagtattattctcaaaagaaacaaatacaagtaaatagatgaatagaatattaccaattggaattgaaaacattttatatgacacaggtagatcaatcttatcatgcatttatctggtattaagaatctatattagcaaagtatttttagaaaaaagaataagcaaaaagaaacattcttcacttctagacttattttcagtgtagctgagttgctggctaatgtctaaatcaactaagcaaaaggaaatgtgtccacctaaagcaccagacttgtaacataacaacataactgtgccccaggtgatccctcctactggaaataaaaacaaattgtgtacctatcttcttgcactgagtatgggctgaggttatttaatagggatgatgtacagtgcaattattaactgaattccacatttcttcttgcattaagtatgggctgatgttaataaatagggatgatgtacagtgcaatgattaactgaattccacatttcaaggtcattaattacagaacggtatgaaaatagttgaatacaacatacatttacttgtagaaaggtcatatggccctagggtatatctagcattatacaatttagtagtgcatctacccatgtattacaccacagaacccccaaagtccctccttcctcctgcaatcccaatttctcaaaaaacataagatgatcttaaatgcaaaatccataaaagaagcccctgattatttttgcaaagtgttttgaaatactttaagccaagttgtaacagcacatagataaaagaatggctaggccaaaatcacatgtttttggaacacgaaatatgttagttatattatccttcctacttgtacaaattcaaccatcagtgttgactgtattttggttggtcttagtacactagaaaacttttgaggcaacacagatttactgaatatgatcacaggtaaaacagaaacacaagtccacataaaattacataataatgaacaaattaaccaactcaatattcaaaccatacttataaagtataagataaaacagtttccaagttagacgtgatatggtgctaatttgactttcacatcatagctaaccctattggtatatcttgactttaaaactcttcatgcattattttccaaaaaataaaaaattaaactcaagaatcaaattcaatgcggaacaaatgtacccaatttgatttgacttagcatggtatggaatacaagcatattctgcctagaaatctacaggtacagatacattctggaaaatttaacaaagattaggtttatcaaatgaccatatcaaaatcaagctccagcatttcactttcgtgagccatcataagtagaggcactctagtcttgccataaatattactaataaacaagctcactaaataacaaataccagagatatagtttggccaacaattggatggataaacttcaacaatgtccacagaagtttaaagtacatctcacaggcatttacaaaagagaaatgtcaagattcaccacaatggaatacttcatgaatttaattatattatcaacaatatgtctctgtaaaaaagcttgtaacttttacgatccaaacaaacaaaaaactaatataatctaacactgggattcaacaataaagtaaacgggtcctttctcactctgttattgcataaactacttagagcatcataatcacgtagcctaaaaacctgacataccttttctcctactttctcttgttgttccttcactttctcttgtaatttcttcaatctcatgttcactcttagtcgcttttcctgtttgtgttgaagaaaaataaaaacaagttctttcacatgggaaagtaagcccattttacaaacaaccaaagaaaacaacattcagctgtcagaaaatgaatgtaaaagacacaatgagagcttaccttcacatagctaacaccaagctctttccttgtatatccacgatctaagttacgcatcacatactggttataatctttcactatcctcataataatatctgatgtagagatcccatctgttcgttgtgtttccttaaacctcccaacagatttaacctacaataatttcttttgtaagtaattatggttaaataataaaataaaaacaaataataagaacaagaactgtccaaaacctacgaattcataaacatcatttgcagctccactagcatcagcataactgtagaagattcatcaaaaaggaaaaaaaatattacatagcattccagaacgcttaactcacttgatagcagcaaataatgaaaaatatggaatgacagtacatctgcagtgcttttgtatgtataggattctgagaaacaccaagacaaaaaataaagagcattctttcatcatctccgaattattttcacaaaaaacatatcacggattgtgggactcaagtgtgagagtttgagttgattatccttacggaagtgagtcatgagccacatagtcaatcttgttcttgtcaagaaattcttgattaatcacccaaggtgcatcgggaatgacttcatctacccacctgcataacattatcaacaagagtcacctgtcatttacatccatatgaaaagacacattccctgatacacaattcgcatcttctgaacaacaagacactaaaccaacactcctccagtacaaaatggtttagtgtattagccataacataattagttgaacagataggacattttttatacaaaacttaaataaaagtaacaaaatcactaacaataacaagtaattataacaaatcatcttacttgcaatgacgaagagattcataacgttcagcttcagtcataacagtttttcccttatacttatgtgttgtttcatcgttgcagcatccaacaagcaggtaggtgtttggaaacctgaatttacaattgaatcataaaggaagggtgcaagtgagtaggatttccaggaaacatcacacacacaccatatatgtaaatacatatagctaaatatgccaaattagctctatatgaatattttattacaacttaatcgtagaatcaaataaaaaccactacaggattaagattaaacattatagaactataagaagaagaaaaaaaaacagctttatacataaaggaaagtaacaatgatgataataataataataaaaaataaaaattaatcctcaccaacactgattattacgaaaatttaaaggcacaacagaaaaaatatcgagagaaactatgaacaggaaagaggattagattattaacgacgtagagatacaatccaacacgatttcatatactaaaattacatataaaaaaattgtgtaaaagaagaagagagaggggtacgatttcttggcttgttcgagggagcgagcgtggccaaaatgaaagagatcgtagatcccatcggcgtagactcgaacaggacggtcttggggaggaggcatcagatcgggtttgggcttggagtgagtgttgattggggcgttactagtatcgttgggcttgacctccgccattggagctctcaatcaaaaccaccgcgatctctctcttttttttctcttctattcttttgctttgtttcatatcaatactatttactttttgttttctcctttttttttacccctttctttttttttttttt

SEQ ID NO: 543 - DNA, 2365 bp, Cannabis sativa
taaccttagtcaaacaaaagtctacgtcttacagacttagacaagttgggatttcgcattcttcttcttccctttgaattaccgtcactatgactatcataatccttcgctgaaccttcttcgtcccctgcttgtaattggactttggttgaacggtaaaactcagtaatatttagctggacatccctaggctttggtgtctccaatatcaattcatcagctcccgcactcttctttctttttgattctttcagttcctgtgagtttttcaagcactattatgagtttggattaaatttaacaatgccaatagcagttcacagaaattctcttcttagtctaatattataatgcaagtgactttaatatcatacctttcctctcaaaaacctgtttacttcctctgggaaagcagcatgaacaagttccacattttcgtccgtcaacaaatactgacaccccccatcattatgaatcattggtgcatctaactcatctagtaaactaatagattcatcaacacccataatatcacgattagattcatcggaactcggtgtagcactacacataagggatacatcttttctccacttgacaacataaaatttatgcccttgtcttatcttcacacgatctacagagtcaaagtcaaactgcccatacaataaacttttgattgaatggttggctgtttctctcaagaatatggtggacagcatgggaaataacatttgacgaacatacgatggaatccagtgttgatgaaatactaagaaatcaatcagcaattcaaatttaggactttcccacgttaaacattggtcattctttcctgtaaacaataatataaaatttcaaaaagaaatcattgatcatgataacaaaaacattcgcacacaagtttactcaactaagggtagttatacaatcttggccttgctcaatcattgacctaatcatgagcgattcaagggctttacaaaaatcaattacagatcttgtgcaagtagtgctaagtgctaacccacctcgaaaggatactaagtatgtttatgcactttaaacaaataaagcaactttatcccaagaaatcaacacacctgtgaaagaaccatggctatcacacgtataaatacgaatgagttcgtcattagggaagttaggttccatagcaatcttggagcaaacttttgataaccaatattcttgcttcttccgctccttttcctcccgatcctgccattcagaacactgttactaaatatagggaaaggaaatattgccgagaatttaaatgaaaaactataacatctatctatgaaaaagtccaagacgataatgtacctcatgacatgaaagacaatcacatttaaacccttcaggttttttcttgcagcccccatcaggaggagagcaatattcacatgacttctcaacatgagattgtttgctacccggatgcccacagaaagaacaatgagtagactttgccttctgtgagcttgcttccggattggatgtaaaatcatcgacaggtttaatattatactgaaacggaggtgtaaccttgttgccaatttcatgtaatctgcagaacataatcttcagttcacattgtatctagtgttgagcctaatattacaatatagaaaggtttccaaattcatcatagaattaacatacaaacgcacctattcaatatatcatcttcactaaaatttcgaacaaagcgaagagccgtctcaagcccaatgccttgcactccatttatatcatggtcattcccaactagtagagagattgctatcaaatggttcctctttaaaccaagaccagcttcaatatctgacatatagtaacattcaaatggttcctgcatacaatgaaattttcagacttgcagcaaaggtgatgctttggcaaataaaactatataaaatgagaaagcttaatgttgcaagaaaatgaaatctcaaaaaggaaatggaaaaaaaaaaaccaatgatacaatcaaatatttgattcaaaagagtaaagatgcacttctgataaaatgcagaaatcttcagatgattgaattttgtagcttttctccttaaatgcaacaactttcattatccaatcaatgtgcttttcaaataatatgctattggtttttggttcaatgtgtgtacgttagtgaaagagagcagtgatggagtcgggatagcagtttatgtttattaaattcatgacaaatattaactcaaggaagacatcaatattatatgtaaggaaaaagatatcactgtgcttgttacatacatgcaattagaaatgcaaatactagaagaaaaaaaatgtcttgatcataatattttta

SEQ ID NO: 544 - DNA, 2306 bp, Cannabis sativa
tcctcttactcatggaggtgttcgtgtatcctctaacagcggagtaatgggtcacatattctcaacttcttcaggattgtcatccgatcttcactattcatcagtgtcactttcacctcgaaagattcagtctagaaataccccctttatgtctcaatcctcaactaatggggtatctttcccggtgtcgcaatcctctcattcagccctgcctcagtctactatgtcaagtccttatggcaaagaaaccagtgcttcatggtgtacagattctgtttcggattttcttgatttctctgtaaatacccctgtcgagaatactcaagtagaaagcagtagctgtagtggtatcattgtatcagaagaatttggcaagcgcaatgattggcaggactgggctgatcagcttattactgatgatgctgctgctttaacttcgaattgggatgaactccttgctgataccaatgtaaccgatattgacccaaaggttggatcttttatatgtgggtgcttaacatgctttcttaaagttcttaaaaaatcaagaaaaatatgcatttgcaaagtaaagtgggaatttgtggtattattatcaacaaatattttggtttctacttttgttgcttcagatggcatatcaagtatcgacaccatcttcgaatattcaggctcagcagtcccaagttcttcagcagcttcccgctccatctggagaaattcaggcagtggctactccatctggagagattcagacagtttctactccatttagttcggctaataatgctgcagccaagcctcgtatgcgatggacaccagaacttcatgaggctttcgtggaggctgtcaaccaactcggtggcagtgaacgtatgcaacccttctgacttgtttattttattttttttttgaaaaaatcatgaagcttttgcttttatattaatttacttccttttaaatttcaggagcaacacctaagggtgtcttaaagctcatgaaagttgaaggtttgactatctatcatgtcaaaagccacttgcaggtatatattcttcattgttgggttgtgttgtattaatgcagattttgtgtaataattttaatttggtctcatgggaattcttgtttttcgaaatacagaagtataggacagctcgatatagacctgaatcatcagaaggtatattactattatctctctctctctggaatataaaagtatgtcaagtaattttagtctatgctttatatgtataatttgccagcaatttctggtatgggctttttatgttttggctgcttagaattaataccctaatttgtttcagtttcttgtgctttgatgcagtagttggtccaagaactgtttttatatattttctttttcagatatatttatcgttttttttacattatatgtaaagctgaattcatgctaatgttttccatttgttcatttcttgtgcattatccaattgcatgtacaccattttcccttcatatgttttagctctagttttgtttatttattttaatctccattaccaagttgcgtttacatgatgtactttgttgtgatttctgttttcagggacatcagagaagaaattgactcccattgaagatatttcatctcttgatttgaaaacgtgagtcggtgcttgataatttttggaattactttgtttcattctttatatgtttttgcgggttatacagtttgcgttattaatgctgcactcatctcttgtatgtctagtggtacaacttatgtatttccgaattagcagtttcatacattagtccctgtagttagaacttaccatgttgggtgtgacccgttggctttatactttatacgtggaaagcattggtaggaactttatcatctgcatgaatgaccatgacacactctccagccattgcttcattaacaaatcttatgctgttaatttctaggaagcaattagtgtttgttggggttttcaatttgggtccctgtaagctaatgatcctcatggctcgggtttgctattgaatttcccttcactgcattccttatcgacaatcttgagaaggttgtcccttaaaatagcaaagtagcttcatccaagttggtggggtcttagagatgtgttgtaaacttgatatagaagtgtaggctgcattattttgttactgatggatgatgtgtgcgaggctctgtgaggatcccacatttatcaaatacggatttggttagtaatttgagagttctaccctagtggttgtatcaagtggtggattaggcctagcctagagta

SEQ ID NO: 545 - DNA, 2348 bp, Cannabis sativa
aatcacactgccctatctttccacaaagttcaaccttgaatggtcttacttgtatgaggcttaccatgagcatgaatgatttggaacaggatatttacaggatgttgtgtacaagctgagcaaagtaggccaagccattgacaacaatgatttatctgcagcaagttcggttcttggtggcagcactaattcagattgggttaagaatgccaatgtagctttcactaaggtcacattagccagtcactagcataaaattcattttcttgtggattaaatggtattagcttttctgaatgtcttgtgtatctattcaacagctgagctctggtcctgaggagaagaatgaagtggatactttcaactcatcattatcatcattgatttcatcgggtgagttaaacaactttgaatgtactactaaattccaaagttgtctcatgcttattgaagatgtttatagtgcttgtaagggttaactttgttttcctgttttgattatgcagtgactcaaaatgatgttaaatcctctaaaattgcatttgtggattctgccagtgcatttgagaaatggacaaatttaactggccttgtttcacagctcaaggggctgtaaactttcgaaagcaaaggataccagtttttcattctgttattttacttgttttgagagtataactgttaattttttaaataattctggcttcttttatactgactagccatggtagcttgaggtcaaaatgtctcattcggctgatatatacatatatttatattctttatgtgctgtatagaccatctgtaaatttataattgcttttggtttttgtgtatgctcagcaatcagagtacatatatggaataatgggaatctgtcaccataagaggtgaaatgatatcttaactgatactttaccagttggataagaacaaaaatagcaggggaaagttgataatgtttagagcaacttttctgctttattcgggctcaaattatacctacgttataagtctctgtgtaactaatattctacttcacatatatatctctgaagtatatatacaaaagcattttataagaagttccaaacattatctgaatacgtgcctatcggttcgtttataaaaatatgaattttgtttgtgctaataactttgtagggtaagtttgtcacggttcgaatttgtgttttatatttgtattacaatgaatgaattaactactaaattttatatgtataaaagttcaaataagaagatatttatagttattaaaatttaaatatttaatattatttatatttatatataattgataaataaatattttactaatacaattatcatcaaggttaatttatttatttgtagttacgtgcgagatggtgctcatatgccaaatcaaaaagtccaacacatttttaaagcactagtcatattataatccaaatgcaccaagttgtagttcttgccaaatattatggcactttgatttctttgtattgctttaccaggagcccgtgctaagactagtcgacgatctacagacagcttcatattcgtcttttattgatatgaaaaaagcaaggactattatatcaataaataattcaattgaaatggtcaaatacctgaatgagggggataattgttggtggtgtcaaagtaaaataaattattattactaccttgctttaatatagaccgtgtcatgatagtacatgactttatttgataccacaatgttacaaacttgcaagctacttgtctcaccatcaaaacaaaagatggttatattataagcctaactacatatgattgtatatttatgtcccagtgaacaatcagagagctaacattacagagtacagacgggaattaaaaagggtcaggaatagcatataatctacagtgtactcagagcataatctctttcgcattgccattgctatcggtgccatttacggtcacatcatcaggctttttgctaacttcttcagtacctgaaccagtattatcctcgttccctcttgccactccttcccattctttttctctttcagactccattacgcttccgttatgtttctctttctccatttcctctatttcaaacattttctcatcggcacttgttttagctgcattagcctgcaccactggctcaacctttttctcctcgagcggtggttgctcgtgcaaagtatcactatgagatatgacataacctgaaacatcctttgcagtagatgtttcttttgaaatatcctggtctgtttcagtaattttctcaggatcattaggtatatgagattctttttcagacttaggttctccatcagcag

SEQ ID NO: 546 - DNA, 8470 bp, Cannabis sativa
atatttaattttataatgattttattgcataaataacaatgaaattaaataaataagaagagaaatgaaaacataaaacacaagacaagagtacagttatatatacagattcgctggagtttttcactccaattcaatctgatgactcgattgaaaaatgcctgtattatctgtctataaagggaacacaactaagacttttattacttattctttgcaaaattgcaagtgcaaatgaaaaaaaacaaacaaacagctttatgggtgggcctatcaatcttaatctataattctatacagcgtagtttttcttcttatttcttcattttgattttgctttataatttgtagctgtggagtaaaaagaaaatttacgtgcatgcatgtaaagaagaaagtaaaaaagtttactcactcactcacatcggtatttttatcaagaaaagttagcaagaaaccactcacaatgcgccgtgccacaggattaggaatactacgacataggcgaccatcgatataggctacgatacctgacaacacaaacttgccaactccccatttccatacgaactttaccttctgctgtacttcagggttgttctcaagagtaattgctttaatattttcgttgtcagtatctatcttcagtttcacgcccgatataaacttgttagcttccttcctaagcttgcgaattgagaaactcacaaataggtgctcacataatgtcagcaatgttggtccaatcttccactcctgtttataatgaaatttgtaattatgagatagaaacaccgatgctgaatcaatttaagaaagttgggattatgatgagggtggtgtattaacaccactctagctttgaaaataacacactccactagatgatgatgaaaataacaggacatacactttctcctcgaagatggcgcaaggagcgagaggttctggaaggatcgccctttaacaatgccttgctcacaaggaaactcttcacatgatccacaatctcctctataagtgtattgtttggaggtaagttttttaggaaaacctgaacaaaggtagtattagtgtcattcaatacataattttccagctgaagtagcaagaaaagagaaaaagtattgccggacccatacaaaatatagattttatatgatagattccagggctgagatgtaaggtaaaatattaaatcagtactacatctccatgtgaagctttctcaaatatgtaattttattctgaaaggaaacaacattgctaccagtagattatacacacacaaatttattacctgattatcaatgactctgactctaagatattcttgtctgtacagtgtatccaacatagcttgaaggtatccttcaatgtataactgcaataattcaagcaaattcttcataagaggtttagtggtctatttgcaatgaaagggaaattagctcaattataacaggctacagtaaacttttcaatagggattgacaggctgtactcttgagtacattttaaggagatttttcttcccccctctcatgggaacagactttcaggcaaacgagattgactgaatatcagtgaataaggtgccagaatgaaaagcattgtattacgtagaattcttatcagaaaatagacacagaaccgatgttacctcatctaccccagcacttcggtctagtttaatttttctatctgggccaccttccattaaagcactccccagtaatgatggctccatagccaatttcaatatgccttgatgaaacccagtcacctagaaaaaaagacgcacaaccaaatgtgaatttatagattaaatcttgtcaactcaattttctaataaacataattgtatttattacttttgttcgaaagggttaatcataccatgccattaaaaccgcttgcttcagctcccttcagaatagagtctgatatttcagtgacagcagcaaaaagcacattagaccctgctgttcgcaactgcaagcaatcgtaatagttcgtgagtgaggtagcactgtggtaatcctactcattctttaaaaaatatacaacttacagatttttcaagatctccaaagtatcgttttgttcctgaggaccctttacccccaatacatttgctgaggagtttgaacgtgcctggtccacagtaggggaaaaaacattagcttcaatggaaaaaaagagggaatgataagaaatttcacatgtaatcattataattgacatggctgttaaacaaaagcagttgaacctaaagaatgaaagagcagaaagtatacctaaagtgaaacgtggaaggttcatcaacccacgggagggatcaaagaaaacatcaagggaggaagaagccaagtcatcaaacatggatacaaaatctggtggcagcaacgggcttccttttgcaatatagatagccctcatggaatacctgaacaatcttatcaagtttaagagatgccttatcttttgcacaaaataacaaattaacacaaaccatagttggatttaccatgaataatgttgtgcacatctgataaacagttcacgtattgttattaatgcatgtgtaaccaagacaccattcagctcaacaaccttatttttaattggaggcacctaaagtacgataaagaagaaacaataattgtacaatggatctcatcaaataaaagtaaagtaaattatctcgtacactcgagtcagaaaacttttacgcagccatacctttatgacactgtgcagcaatgacctcagtgtctcctggcctgagctataacttgaatatgagtccccaggaaggaagtttgcaataatctataaaaagaaaaaagaaaaaaaaaagttagtatattgtttgaataaaacattatactgaaagaataatacattaaacaaatgcagcgtgtattatatcatacctttattggatggatctcaaaatgatcaaagtagaactgtcgactcttagtatttgagtcacttagagatgttctccaaaatggcacaattttcatcaatgtctcctcatctagattcaaatcaattggctgtgaaatcatgtgtgtattagtcaatgcacgtgtatagtacattcaattacaaatgaggagaaatgaagcgcatttgcagtatcttcattgtttgcaagtgaacaatacatagaatagaaaaacaaaagccaaaaagtgaatggacatttcagtcaagtaagagtagcatattctaataaattagtaacaaatcaaatctttaactcctaaaacaatattgtctgaaagtaatttctttggttagtgtaagctgattttaaattgctctagggataaaaactagagcatactggctaattttacctgcagagcaatagatgagtatcgaacttgtataacatcagaattggttgacagcagaacaaagacaattctgagtatgcagtcatttgactctgtatagtctacttgatgttttcgaagcattgctgcaaaaggcgctccaacccacttctgctctaaaatcaatgactacattcaaataaaggaggcactattgttagtgtgatgagtggcaaagtttcaaatgacatttttctttaaggctcgcctccaaaatcaatggaaggcatagataggccaattaattgttttatggccgaggtacagggacaacaaagtgaagattttttttcttagaattttagaaatctttccaagcagtagtaaattgaaaacagagatatgaaggctatttactctgggtcaagcaagaagcactagtggaagtacctgtagattgatctggttatatttgtgtttattggtaaagacagagtccagacaaaaatttccgaatcttgcagaaataattgtaggagatgactcctccattccatccttcaataaatgaaataaaaagtcattttgtcaaggaaaattatacgtgcatattgaactattccacttgtctgaaataatgcattttgtatcaatattatggcaatatcagagagaaaagcagcagaataaaatgcaagaactggaaatggagaatcaaatacagcccatttagttaacttgcaaatcacataatgggcacattcacatacttgtttttcttgttcaagcaggtgaatgttaaattgaggaacccttagttgaatcttttcacatgcttgaaatcctttctctactttctggcttttagaaaactcacaaaaccgcagaactcgggtaggaccatctgtatatacttcataccctacttttgccatgtcgatgctgtcaaggtcaccagaacttggcatgctattttctgatatttcttcggtaagaaaatgatgagccagccccctatgcctgaccttgtggaaaggcttccatgcccgcaccttatccaagttaatatcccgaggtaaagaactatctatgaggaaaattaacatagccagttaagtaatgcttgcggtaaacaataaaattgacactagtatctatcaatcttaaaaagaaaaacaagataattttgtaacattgtgcatgcctgtatgcatttcatttctatgtgcatgcctgtatgcatttcctaatttttaacgcaaaacaataatttgcatatagacaactcagttatagagctaatgaacttgacaatgaaaaattatgtatatagagaatgaacagttaataacatgtcgttccaccccctcaaaaaaaaaaattatagagaaaataagtggaaaatgatgatgtgatgtatcatgtatgcttttccaaataaataacaaaaatcacatgcaatgatgtctacttatatgatacatgcaaaatattaaatatttaagctgtgactctctaaactacaaaaagattaccattaattttgacaactaatttatgtggaagtgtcaaatcatcccatacataatcgacagtacttcccgatacaagaacctctggctccaataaatcctgtcaaatgcacaagagaaatttgaaaaaataacaaccacataacatggtaactgttcacatcacttgcattagtatttagtacataactaaaatacaaaacagtaaccttttgatggtacgttatagatacatggggcaagtaattctcaattcgatatggaagattgacatttggaggactatggtagtgcataacaagtttagaaccttcttctacaacatgaacatcagcaaatgttgttttactttctcctggtgatttcttttggcctgatcgttgctccctgaatttgaggaaaaagcgtcctaaagaagcaatgcataccggtccggaccaaactgaatcaggctgcttcaatttaaattggacataaagtaatgcgtcatcattttctttactatgttttcttaataaactctcaaagaaactgagttcttttttattgaccatcacattcgacagctgtaatgttgctctctgtctactgttaacgataatatcgtcacccctgtcatacttttttaaacaaaagcagaaagaattacacaacatatttataaatatgtatataaaaagaacctctagaactataaatgcaaaagctacctgtaaatagcattgacgaacacagatactttcttcagattcatttactaccacatatcttgggactatagttactaattgagatggtacaactgctttactatgaagtgggcccacagaaaccccaagctttgtaataaattttacaccatcgctttcctccatttctaagcttatctctgtaaggcctgacaaggcatccaaatctagatgtgcctcagatgcattatcttttaagagtttgaggcaaaccttgttaggtctgcaaacataaggcacatgaagatgcctattcagttataacatgaaaataaggaagatctaagtgaaggaaatgtaaagaaaatatttaagagctgtaagaactaatacaagtaccacaacctctagttattataaaaaagatatggacctcaaacaaggatatgactattgaaaattacacatcttacttcaagaaccaagatctggttgactttggatgtagaagtaatccgaactctgaaaaggagtcagaaccgaaattctccacttcatccctggttaatttaatgagtattaagtttaaagagcatgagcagatatcaatgcttaaagagtttgattttaatgttttttcctttagtaatcttgaaaaagaaaatgtattgttatggaacaacaaaatacctagccaggggcttcctatttggtggaaagatataaaggggaacatctgtatcattcctcagagcatatgatgtgaaaacagtggcctacaaaagatatatgcagtttagaatcatcgcaacaaactagcgtaattattgaaattttaaagtgaacatacatcttgggaaataaaaggagcatgaaaatgtaaatagaaattcacaatactactcatgttcttgcaataagttttttttttaagaaaatcaaatgtatgttaggcctccaaaacgtttgaagtattcgaggagaagacctacttaagtacttgagtaaaatgtctactttattattggcttttcctgttgtttgttagttttggggttttctttgaaattagtttcaagtcagccaggagcctttgtctataaatactaggaaaggaacttctggattttgtgaattgtacagagtgagtctctcagagtatagagcaagttggactatcaaatagctcaactccttgtaatctttctgatatcaataaaactcatttcctatttactttcctattctagtttgtaacaatgtagtacagcatagtacctccaatatgcctttgtgcccacgagacaatctcaaagaagcaaaatattttccaccagcaaaatccagatcaatgtctagatagcgtgcctcgtttttctgcttctgtaacttcttaacccaatcaccactgttcactggtttgcagctagaatttagcgcagttaatgtaacagtaaagtatatcatggagggattaacataaaaatccaacgatgaatcaggtgatagttttgcctgattctcagtgttgtcacactcaatgcaagaacatggatctgcaacagtgtaaaaacttatggaatgaatactgaaggagtaatttattctatcaaagaacatttttcccccttacccatttcagttagaagtacatgtatctctgactctaataaatttgatacattcacagtcggcaaaagaaaaatttccttctgttcttgtattgcttctggggaagtactacttttatacccttctttggagttactaggttgtcgaacaggcacgcctcttccaaagctttgtatcagaaaatgaatatcagcaatatgagaaccttcagatttgaggctacattgagcactgctgaaggaacactttgctgattcggtaaacacttgtcgaactttgtagcttagtttatcaaaaattccagacagacgaactgcctttccacctttaagttcatgtgaccattctactgagagtgaatccttggaactcataaactcttcatttatgttgggtctaaaggaaaataagaagttacctgtgtatcaccacaaaccatgaatccatggtgacgataaaacatgagataacaagcaagagaaaaataaaggtaagaattgcatcattagtttttccacaacaaagtcggagatgaatgtgtaattaattcaatgtgtccctcagacatgggtggcacccaaattcaccctgagatctgcacctgcattaactcttaacattcttctaaagtaaatgagaaaaataatatcctaggatgaagatgtgtgaaactataacttctgtgactactggatattgacagtgacactccttgaaatgtatataaatccacaagaggtttcaagtctacccgcagaacaacaattaaaaatgcttaccaagacttaaagaattcaatgccttctttaatccaccagacaaatgtacagaatcaaacattgccattgaatcatccattgtatctcctggttttagaacgagtgaagcagactcatctacattttgttgaggtcgttgaaatcttagttcaagggagaatctagttccattgtgtattcttattagaggagaaacagtaatagacaagccatcctacaaggatatagaaaatgtttataaagctagaaataattatagaatagcattaagtctctaatataatatgaaatttaggagtagatttcttgtcacatacctcggattcctttgaaacatctactacaataattggcccaggatatgtttttgaatctgttcaagggtgtaaaatgaaatatccatataaaaagtacacatgccatttaattatgaaatcatgttatctaaaaagctagccatataattatccaacttatttgatttt

SEQ ID NO: 547 - DNA, 8185 bp, Cannabis sativa
atgcacgatttgttgggctcggggccccataaaaagcaataaaattaaaattaggaaaattgacacctgagacattgcaatgaacatgattaatagagcaattagtaattaataaattcaaattcaaagtctagaaaagcaaaagtccccctcctaagctgattctggggacatcaaaacccaaccaaatcctaagtctatccttacatagtctagattccacaacaaaaagaagagacaacttatacattttgactagaagggagagatttaggaatgctcgatcactcccaagaccttgagcattctagctgatgagattcatgtgttctggcaggcttgttaatccacaggacctgcctcttcactagaggtcctgacatggttgaggcccgaatctcttcagggcttctctttgtttcttaccaatggttgccaactatctcttgaaacccaccgagttagcagaagggttccttttcatcatggtccttctgattggggtctcaaaactacccactacaaaggtaagggggctggagactcctatttaagtaagagcagcgagggacctattattggattggggggagactagcagtggggcattcatatggctagtggttgaggaggtagagcttctcgagccaggggttgaaggttgtctaggagaagcagaacatgttattgaacctactcaggctaccgacatgagagcagtgaaggatggactagggggtacttagagttgttgattcagtgagggagttggtaaagcatcaataaggaaggatttagaccctacatcatagttgggagtgctctatgggataagaattggctatatgtatcagtgtactctcgtccatttgactaaaatgaggaatcatgttggttaatcagcccacgagggttaggagtgttgatgaggttaacaaggtttcggtttggcattggcataagatggggtgggagtgtcatgatactgggatgcgctattgattagggagagggagggggccaaaagagccgtgattaggacgagcgattcctttcagaacattctcgtaaggaagtggtggtaggagtagggactcatcagaaattcttatatagtcagtacatttagtgtaagtgtggccaatgcgttcgcagaagtaacaatggacaaggaagtcttcgtatttcaactccaaccaagtggctgaggccattctagggaagaggatagagcacaccttttgggaggggcttattgatatcaaacatgattcaaactcttagaaaggagccacatgttttcaaaagggagggttggtagattttgagaagggtctcaacaatttagccaactattttagctaaggagatagacctacaggagaatgatatgctgtgtatttgatcccaaaaggggattttttacatgaattcatgatcaagaacattgccagggttaattttgagaatgaatgggcttttgtcaaaaatccatatggttggtggaatttcgagaaggactacttataatttgatttgagtacaaataaaactcacccaattctatttaccttcgttttgtgatctctctttcaaatgcgagtgtactattataaatatttatataataatttcatgtgcaaatgaaggtgtcggtatataattttaatttttttgaaaaaaataaaacttccatttatgtgtttcaattatataatgttatgttggaggtaataaatagtatggtaatgtaggaccgggtgaaattgaaaaccgacccgaatatgagttagtaggtcaacgaaaaagagtgaggccaatctctcctttcaaaaaagtatccgaagatccagtcgcataaaagagagaaaatagtgtaaaatttatcgtcaaataacaaacatcacacgcttttcgatcgctctatttacaaacgaccgcacccaataaactcccttccctcccattatctttactatatataattatagaggaattctataattattattgtcttgtgtgtatatagctacagaaactgtctgcattgtgcaacctggcagcaatgcaagctctatagagtgactttacttatcttcttcttcctcaaacactaccctaattcatgggtattctccatttcattcatttctttgatttcttgttctaaaagtttgatcttgattcttttgaagctttaatccattcagaaatttttgggttcggccattttttcccttatttatttctaacaatctcccgattttcgcttgtcattgttaaacaagagaaaaaaaaaatcctggaaaatgaaggttacccataaagattcggagaaagttgtttgggatcagatgaggagttcctcaggtaactccattgtaatgggtcaaagccgacctttacccaaaataattttctgccttatgctcttcgtctgtgtcacttatgtcgtttacactcttaagctcatcacaaactcaagcgttgtcgcgtgcgacgatgaatccctctacaccgttggccacagccgtgtagtttccactactttgctactctctaacaacaataagaacagctccaccactacttcagctgctgctgattctgttcagattgcgcggcgcaaatctcgagaaacggcggagaaaactgaaatacgacatgtcgtttttggggttgctgcttcggcgagtctgtggagtcagagaaagaactacatcaagctctggtacagacccaagacaatgagaggtgtcgtttggcttgataaaatcgtggaaaaggatggaaacggtgaaggagaagaagatgaccgaaaactcctcccgccgttgaagatatcgagcgatacttctgtgtttccgtacacgaacaagcagggtcaccgttcggcgattcggatctcgcggatcgtgtcggagacactccgtttggggctcaaggacgtgaggtggttcgttatgggtgacgacgacaccgtttttgtcaccgacaatctggtgaggatcttaaggaagtacgatcataaccagatgtactacatcggaagcctttcggagagtcatttacagaacattttcttctcgtacggcatggcctacggcggaggaggcttcgccattagctaccctttagccaaagctctctcgaaaatgcaggaccgctgtattcatcggtacccgggattgtacggctccgatgaccgaatgcaagcatgcatggccgaactcggtgttccactcactaaagaagtgggttttcaccaggttcgtaactcgttcacttaattcagttattgccgttatcttactttgattagtgtcagctcagcttagaactttactaattcactcgatacttcttttgttttctttttttactattcttgaaatgtcggcaagaatactaattgactggttttttgcatatagtcttagtatcatagactgagataagaactagtcaaaattatagttatacactacttctaattcaaagtgagacttgttcttgttctagacacactgaaattttatttttctttgttattacaacattgatcacggataaaaatttctttgattgaagcttttggtgacttagttgttctcaattacaaataggtaaaccttattttcaatgacttagctaacacacctacctaagctgctgtttaaagtctccccacttataatttttcaactagagaagaaatcataacatgaatgtctttgacaatatggtacattttacttttgttgattacaatcaatgagtacggaatagtggtcgaatcatctagtagttaatttgatttttgaaccactttagttagttcctatggaaatccattgccatattttaacatttttgttttttcaattcagtatgatgtatatgggaacttgtttgggctcctagcggcgcatccagtgacgccattggtgtccctgcatcaccttgatattgtggagccaattttccctaatgttactcgtgtggaagcacttcaaagactcagtgctccaatcaagttggactcagctgcaatcatgcaacaatccatttgttatgacaattcgaagagctggaccatttctgtttcgtggggttttgcagttcagatcttccgaggtgtcttttcacctcgtgagattgagatgccgtctagaacttttttgaattggtacagaagagcagattacatagcatacgcgttcaatactcgacctgttagcagaaatccatgtcaaaaaccttttgttttttacttgtccaagacaaaatttgatcattctaagaatcaaacagttaccgaatatgttcgtcatcgagttccacaccctctctgccgatggaagatggccgatccttctttgtttaacatagtgaaagtttataaaaagccagacccagatctttggaacagggtaagtttctccattcttaatatgatttttgtgccaaacttgaatacgcttcatgatatttggtcttttgaacttgaaaaaagcatactttactattatttgtttttgacacaaaaaagcttattttgagattcttctttgaatgcctttctacagtctcccagaagaaattgttgcagggttttggagttttcagagaagaataaaactatgacaatcgatgttggtgtgtgtaaagatggtgaggtcagcgaaattaaagagtcaactaaaaaaaatagaagagatgtctaattttgttgtttcattttttcatttcatttcttaattggttatattatcttttctaattttgcttcttgcaaaattgatggaggcaataatatttattggtgcctaaaagattaaaaaaaaaaaaaaagcagaaaaaaattgttattgtacaaaatgcttagtaagcttattatagatgtccaattgttcatttattcaataatatttgtattctcctaagtgggattttttttctttcttggcttggattgatgaactagccaacacttctactatattttatttatattattttagtggtctgaaaaaaaaaacactctaaacacatgtttttaatgggagttaagtaccacatgtaccatattaacataagcaatgcataaggtaaactgttaatatcggcttcgaataaatttttagcttaaaacgacagtttctgaaaatcccttttcaaataaattgctctgaaatgggattggaatgtgctagacttggtgtgtggggccaaaaatgattctatatttgtgaatatgataatctatagaaatagaggctattagtatttagtaaaagacaatggtcttggggtttagtaggtgactttggcagaagggtggcaaccaccattattaaattatttatacattatatacatttaatgtcacactgtacactggtattaaattaacattatggtttgttatgacactagagtatcatattgataattataattttaaaactaaaattggacttttgtatcctttatttattaaaagattatttatgtagggtgccaaagctggactttgcagttgcttggattgtgtttggtaatttcccaaattaaataaaaaaaaaatcactcgtgaaagaatattcaccatcccattgttactattttcattcattaaataatatatataccttcttgcaaataataataataataataataaataccagaggtcaatttcatttaaacatggggaataattctaccaaattgtaaatttaagctagatttgtggggtctcactattatatttgtgggtttaagaattcataaaaggcatgtgttatagatttttaaaaattattttataatgtttacaagataatcaaactataatattatattgtcatatttctttttgcctttatttttagaaaaaaaaaaaaatcttttgggtaaatggaagtgtacgaaattgtgcaatacctgaaatgcccctacaccaacaaaccccaaagtcataaaaccaatgtcaaaatagacaatcccctctcttgtgcggatcaagagagtcctcctcaaaactctgccatttaaggcagtatagaaccaaatattagtagctgcaaaccctagcaacacaatatcatatcctcttcaaaccctagcaacacaatatcatatcctcttcaaaccctagcagccgagctcctcttctccttctcttcttcttcttgaaaccctagctggacttctccttgttcttcagtttgaatccatggcagcctaacctcttctctccttccttttatctctcgttggcttcctcctcaagctctgtaagagctctcaaaatcgaacctgcacacaaaatgaaaaaccccaaaatagtcacaataaagatctaaaatgatctttggttgttatggaagaagagtgacccgaaaaataacaaaaaaacaaaaggaagaacacaacaattaattttagagttccccctaaatcatgggtactcttccacttttcatagcatttattgctctaggggttattattactctttttcccatctcattaatcttaatcagagcattaattgctcaaaacctttcttctcttcatctttccatcttcttcatcatacacttttgtcttctcctcatactcctgatcccccaaatcttaccttagaaaaatgcccttggagattgtaatttggaggcggacgactggattcccgaagctcttcaactcttcttcatcattgtggcctccatggatgcgactagggatgtgactagggcggttttgagacgagttattcgtggattttggttcttcctatatatatctaaactcaagtattgcccttttcatctccccactttgcttttcactttctttactgttgttttaaaagcttttctttcagcgaccatgtatgagtttttaaatactgtctctaatgctttaactcttctccctgatgaatctactatttttacttatgatgttagttcctctagttcttcccctgccaccataagtcttattcttaagcgtcacaccattcgaccctacaatcgtccttctctcatgaaaactctctctgcatctggtcatcgcaatgccggtttcttgtttttgtgtctgagcatgttgatgacatgttcatggttactttcggttgtgagggggataagggtagagttttagaaggtcaaccttggcattttgcccaaagtgtcactatctttgctgctcctgacagttcttttcccctaactcctaataatcttcactatgttccattttgggttcaagtgtatggaatcccatttatgtgtaaatcctatgatcttgctagattcatagccatggaagtaggtgatcttattgaagtagataaggacaccattaaggagggtactggtccctatatgcgtcttcgaatcctcttggatgttaaccttcccattagaaggggaatgaatattaaattcattaggatggggtgggagtttatcaaatggttagactttaagtatgagagactcccagatttctgctttttctgtgggaaattagatcataccaaaaaaatattgtgttgctttcctgcaaaagtgtgatgagcttttaactgaacctttattcccatataacatccttctcagaggcaaagaaaagatttcggataaatctcaaccttttcaatatcctcatcctctagtaatcaccatgatgaattatcagccagtgaacctcaacttaccacctcaacacatctcgggtcactctatcactttccctttgtttctgaaccttaatgccaacttcacaggtccatttgctcctccacagtccactattgttatcatgatgcctacacccctgaatcccaacacttcaaacattgcattcccttccaatagacccaactttgatatttccttgcggccatctgcttttacctcatattctaatgattctctcattgtggctgatagccctgctagccaaatggacagtctatctcctacacctacttttccagtggctggttttgaaagttccacccctgttggtgaccctgctatgggaactaatcttttctagggccaacctgactctactgtccgtgggaaaggtttggcttctgcctctggtgttaagcaaccttcgttccgacctcaaaatgttgtggttggaagttctgtaa

SEQ ID NO: 548 - DNA, 1722 bp, Cannabis sativa
ctgagacaaacaaggtgtgcactcttgccccaaaattatgaacaaaataataaattattagtatacacaaaatattaaatattaaaatactttatcaaaatagcgattgaactatttgtgtagggactccaaaatttaattttacgccaacataacataacatcgtcacgaacctgatgagctcgacagatcaagtcaagatcctgttttcgcaaaaactcggtgactctatcagcaccaaaagtgaaagaaacacccctttcattaggaccccaaccttgaatatctttactaggatcagaccataaaagatcacataacaaaccatgttcagctacatcagttggcctttgaatcattcttatttgtttcaaatttttcaaatcaggggaaagaccaccatgcatacatagtattttttcatctatgagggctgcaacaggaagacaattgaaacaatctgtgaatattctccatagccttacattgaaccttcttttgcattcatcataaaacccgtaaattcggtttattgaggcgcattcgtggtttcctctaaggaggaaaaagttctcagggtacttgattttgtatgctagaagtagacatattgtttccaagctttgttttcctctgtctacataatcccccaagaataagtagttcgaacgaggcggtaatccgccgtactcgaatagccgaagaagatcggaatattgtccatgaatatcacctagatgatcacaatgaatgaacataacaaaaattatgtatcaacaatttttgtgttgaaaagaaaaaaaaattattgggctaaaaggaaaatatttttttgggcccttaaattaggtaggtcttagatacgggcttagtccgtcttagttcaggtgcggcccttagaaatcaaatcacaaagataagtgtttgatgtttgaattagttgaaaaatcatctcaagttagtttttctcaaaaaaaaagtaacattgtaacactaaacttttatgattaattaagttaatctactttcatgcatgcttaattatctatacgtaaaacatgtttacagatgaatgggaattgccatgaattatagtttgaataaaaagcctaactttatcaaaattattattctaattacacaaaaattccataatttgtaaagattttaacataatacataaaccaaaacagagcaaatatacatatgaacatgaaaaattaaaggatacccaaaacagaatatcacatgtataatcaaaagaagtaagttaaattaaggtataccacaaattttaacaggtgcttcaagctccaacaacatgggttgtctcaaaaaaacatctcttgaaacaaagcaaagctgcttaatttcagtctctgaaagctgaacttgtttccctggatttgttctaacttcaagaagcctattaattataccatcaagaacagaaccattcattttcttctctgtttttttttttttctgatgatgatgaaccttaaaaatcaaatctttttggctgaaccaaatgggaatttgttcttctcaagattgggaaaaagataagaactttaaatcaaatgggaattttgagttcaatggtgtggatttggaggggaaaactttggcatcttctttggagctttagagatttaaaaaaatcaaacccacctactaaaatctgtaaagcaaagaatatattctttttgagagagagag

SEQ ID NO: 549 - DNA, 2363 bp, Cannabis sativa
  modified_base (795)..(802): a, c, t, g, unknown or other
  modified_base (1709)..(1716): a, c, t, g, unknown or other
ctgccattggtgtatcatcatcaggcttgtgtctaccttcaccaatcgtacactttattgcgaagttggtttggaatttaaggatcatgtcttggtacgagttgattgttcctggtgatatattgtgaaaccacggcaaagcgggacccctcagaccctgggtgaatgttttgtattttagggcttctaagtcttctatagcgactgaaataattaacatattttgttcaatttaacacacatattctgatgggtctcttgtgccatcatattggggagctttggcacgacataatgatgtggagcctccacttgaggatatgatttccaaaaggagacagagttgatctttccattctttcccattcactccttattcacagctggctctttgcttccaatgccaagagtttgttccatatcatttcaagttgatcgacttccttggtctaaagtggagagtcttcaggcatcatctatactattgtgcatctttttatgtcgtatagagtgcttcttcctctatgctcgcctcaacatcttcacttttcctttataattaattaagtgtgtgttgcgcttctatactagtgttttttcacaccttattgacttgtcctaggcctgattgttctagttttaatttttgtctgttactccttgtgctatctcgacttgctgctgaccattgctttccttgagtagtgcggggcaatgatatttgttgaccacacttttagccaacctcactgagtctttaaagtgatgagactataaataataataataataatnnnnnnnntaataataataataataagcaataaaacacacaaatttatagaagtttggcaccgagatggtagtaataccctactcccctttttgttgtattactttagaagaattgacaagatcacaaggagttggccaagtgagtttcttaacaatttttacaaaaaaaaaaagtgtaccaatgttttaagagcataagtgctctctcaaaatatgagttttggatcccaaaactataaaatgatttcattatttataggatagctacaatgaatattgttacttaaaacaaacgagaaagaaatgggaaattaaatattaattccctagaatctctcagatgacataaatcaatcccacaaatataaggatttaattatgctacaaatttaaagatatttaaggtaaatatcttagagaatttgtatcaattgcatccttttgtgtggacaattatacttcattggatacatgtgttatgcttagaacataccgaaaaatttgggacctatttagatatttcttgctaaagcactggacttagccatttttgatcttgaacacttctggacgaagtatcagataagtatcacataaataaagcttcttcttctcttgattccgtaccctatagtgagagagtacttgtccatacattttaagtcaatactcaaatatagtgcggaagattgtgaagaattttatcacctgaaggagaaatcaggttcagatcttgatcatactctacgataggaaggatcaaggattacagatctaaacgaaatgagacattatattctgctgccaccaatatcagaatatctataactttatatatgtttatttcattgttttagaaaattcatatttaggatgttgaattatagtcttataatcaaacatacatgttagtnnnnnnnnatcctaataaaatatttccaacaactgaatttagagccatggtaatgatttattttcatgaaatatgaatttaaaatgatgcttgaataatttggatgtgttcatgttggtttatgtcattatttgatgattgatcgtgtattacgaatttttttatgaaaagtaatatgatttttgatctagaattattttatttgatagttggtgaaaaattaagaaaattacttttttacagaacttaattccggttaaaattaaaaagttatgatattttgaaaattttgaaaactcgggctagggtttctacccatgagctcacggatggagcccttcactcggtccagacacagtttccaacatcacttgtcagagaaaccttagacgttcttgtctaaacatctcctagcgcaccaatatgaggctgcatgcagcctaatttctcggtcaggccccatttgtccgcgcgcagacagtatgcaatgcttattgtccgtgttgcatgcaatttttcaaaattttcaatttttgtcattttttcatggattttaatttcgattttcttttgtagattttttgtgtcaattttaattttcaaatttcaaaattaattaatattaatgtaattaattttagatattagaagattt

SEQ ID NO: 550 - DNA, 8265 bp, Cannabis sativa
agtaacaattttttgtagtgagtgaaacaataattaagtgaatttagctgtgagaaacaagctaattttataatttatatctacccttcttgtatattattattcatgtgcttgtcatttaactaactatgtttttgtctcttccactaccgttgccggtccagtgatgtaatttagtagattgtcgatttggaaatatcgcaagaaacgaattgtctcgtacaagttgctgctctttgagcatttatattattgtcgttttcttatattctaggtcctttcttaaagtagttcattctctaaacttgttgagtatcggcttatcctttttccattggcctagaaatggaaaaaaaaaccattcccttctttatgtaaatcctctttgcttaaagtaaatatataaaggcctccaattacttaggaagatccgcgcctactagttcattagtaacatgaactagtaggaactttaatttaaaagaataggttttatgacttaatctatgaatctcagtaagcttcacaagctcaggagtcaggacgtactcatcagtttcataatcaaaattggaactttaatttaaaaaatctataagaaactaataatgcagtcgttcaattaagtaagcaagccaaagtaatttgcttttaaattttattataatacgcataaccagaagaaagaaaagcaaaaaaaatgaatgaatttccctaatctatcctacatattgcgtgtacaaatattctactactcaatatcctcaaaccaaagtggagcaagaagaggttgaaggatcatacaaagccggaaccaagtactttcttccattggagccatgcgcattgtagctagctccagtagtggggtcaactagcaagtccccagcataaccagggtaggctcctttggcgtacacaccagggcaagccgttgcagcctcaagtggcgcctccgccgagccctggaagtagccgttaccgaaggggttggtcactgttccagccaaaagactagccaagttgatgatcatcccgtccacccccacatcgttgtttggggcaaccaaggccggagcttggggaccgtaaataggctggtggaatggccaggcgcattgacctgggcactgggtctccgagtttcctacccatatgtaagcgaacttggagttctttctcttgagatgaccactctttggacctataacagaggacgagccatgagtcccacatttactcatacagaacccttcaacggagacatcagaagatgtcaacaccacgttaatggcgttgctgtggtcacccttggacgccaactcaactatctgtttggtggtgagagactttcctaaagagtaactctcgtcgatgatttgttttcccaaaggcaaggaaagggaggaagaacggtgtcgtttctgggaggtgagatggtagtacttctcagtgagtttccaccacgtggcaacagatggttggctctcgtgagaaacaggggaagaggaagaagttgatgacatagagatagaggttatgaaatcagagacaatggttctttgggaaggcttgaattttccataccaaattagattaatagagattttccctgaaagaagagccccattatggtatttcaacagctgaggttggtcttgaactaattcactcagtttcctagtacccaaagagatttggcacaatgagataagaaaaactagctttagcaagatttgtgtagaaagaaaggaagccatttttcttttttcctaatggaaagaaagtagagtgagatactaagtgagtgttttggattggaatgaataatgaggatgtaagagatggtatttatacaaagaaaaaagtaataaggagggaaaagagtatgaaggaagctggcgtgaaaggagagtgtggttttgccatttacgagttttcgtctttgccagcaagaaaagccatccaatccaacggtactcttcagtcactcacaccaattcccaagcgcgtctctttatttcacaaaaccccatattgtgatccaccttattctaacgcgtttgttgaccacgcgcaagccaaaatttaaattgatgagtggagcgtgagaaccatgctcagactggagctgtgtgtgtcttcccccctttttttttaaccttctgcgtccactaagaaacaaaaaaagcaatacagcttaactacagatagcaggagatgaattgactaaaataccctcaatgaagattaacggtgcaagggtatttcaggtaaacgaagggagaacaggctgtaaggtaataaaagtgtgtttattttatagggaagcgcggactcaatgacccaactggcacttctcttatctcacaccgtgggtatccgatgttacttaccacgtgacataattaacctcactcaatacttaaaattttatttatttgttttctcattttagaaatatttttttatgctaatgtttttaattagtcaatagtgacgcaagtaatgaaccattaactaaataaatatatatcagaaatgctaaaaagtgttgtgatgtatattgagttctatataatttaatataataaattttggataatattactaactaattacaaagtaatatatctaaaggtgttagattctaatcatactcaataacaatattcaatatacattttaataaaaaagtttatttaaaattatatatgtaaggaaaaacaaaattatcatctattttagattttaagcaatttccaatctgttatcaaaatttgagcttgaaattcatataatttatcgtccataattaaattagagcatgataaatgagaaattgaaagaattttttgttaaaaaaaaagagagagagagagaaattgaaagaattttaattcttacatgtaattgaaaaaatatctaaaattctaaaaaatacatttcaattccattagttatcagaataaaaaaaacatttcaattcctattataagtaatgtttttaattttaagtgtgtttgaaagttacatataattattaagataataattatatagtctagtaattatattatattttaaaatacaatatctatttcaatttctaatattttatttagcaaaagaaaaaaaaatatttttaaatagtaataaaaagttgacattaattataaagtataaatacattcaatttttattgaatgtcataaaaattagagagtataattaaaatccttcaattatttttaattacagtttaaatataattatataaccatacaaaacaaaatcatgtaattactattaattatacttccaaaacaccacccatactaacaatgttaatacaatcatttttttcttgaaaaagaaagtaattggcaaagtttattaattaagttaaacatactataaaattgattaagtgggtgataaatgaaaactatagtgttgtttagtaagaaagtaatgggaaaggtgagacatagaaaactcgtgagatagtgaagaagtaggaaagagagttgatgtttaagtaaaatgccaactcataatagtaatgaataataataataataagagtcattgcccagctggatcaagctaattgtaagtaacaaaacaagttcacacagctagctactaccatgtacgtatgtctcgcggtcccataacattctctcatattaattgctacgccaatataaatactgaatttccacgtggacaatttttatttgacctttccatgcttttaaatcattttcaccctataattatagagacgacaatttgtttcatagtgtcttgttgaggttaaataatagtctcttatattttgtttagaggtaacaatttatattggttagcgatatttttaaaaattattttcttaattatatgagacttgatatttaattatattaataataatataataccgagaagggtgctagataacaatagtattttttagcaattttaagcagcattaattaaaagtctgcttatttattaatcgcgttgagaatcaaaaatcaaacccgattcatttatgtataaattgacctcatacgacctgtttaatccatttatattagggttgtacacaggtcggatttttgggttttcggatttaagttttcaaatgtttggtgtttaaaatgtataaccgaacctggtttttaggtggtttggtctggcaggtttcgggtcgggtacatcgggttctgtgtgggcaagttcagattgtaataggacaagtccgaatgaaagatttttgagcccaaatgaaattttgttttttaaaataccattttttttttatttttaacaattaacagtattagtgtcttcacttgacttttttttttgtcaatgagtcgatgatgaataaaaataggtaagggtcttgattttctaatgacgaatagaaaaaaaaaaaaaaaaagacaactagcatattatttcattgagaaacaaatgtataatatattgaatcattgatattacaaatacagaaaaatatatagaaaaataattaatgaactcaaaatacttaaattcctgaagaagagagaaagaagatacatgagtactaagtagcagtggacagcttgcttggaagaatcgaattaatctggttgcagcctgcagggatgagataacttgccgttggaggaggagatgagatgatgactgatcaattcgattcaaggatgagtcggtcggtcttcttatttttcgtatcctttagggacgaatcaatttattaatatattttacttatttaggattatttactatttaaggatgaaaaatattttttctaaaaaaaaatgtttattgattcgggtttcgtgtgtccacctgagttccaaaatatgcattttaaaatccaaacatgatacccatatataccattttcgggtgagacccaacttgatcatgcgggttttgtttttttttcggcttttttggcagcgagtcggggcgggttggcgggtttccgggttcaaatgttcagtactaatttacatgaagaattatacataattttggttaacttatcaatgaattgacatgttcacaattttttatgatatttttatgagtaatttaacatgttatgtcttatttaactaatttaatacaatttacttgtaataaatataagagtgcatacttttaaatagatcattgtcgtgttattttaggattagacgtgtttgttagagatattcttgcaatggaagaaaataaagatattacaactctattacaatataatacaaggactaaatgattaattaaatagatgtcacgttacatacacttatatgttattcgcgtttccagaaaggaaacatgtggcattcccaattcaagactaatcaattaaggcatggtcaaaaggccatacccagaagataggcccaatgtgtatggacggatgggcccaaacccatcattggcgaagaatagatactcccgagactagacctctccgaacccaaacaagtattctgcccttacaatacaaagtaactaagaccctatagatgagcatttgagatacatccagaagggcattctgagaggtggcccgatgatctggtataagatgatgtggcagccctctgacaccaaatctcaccgaatcaggggattgtcccctgtgccaaaccctacgagtatgcacacttcgaaaaggaaacttccattgtatccgacgataccttctctgacaactatagtacataaaggcggcacacgcatgccatctgtcaatttcgcatagtctccaagtgtacgaattgcctctgctccatcgattgggcctcggccaatgggcccaaagtcaacgtatcttatgtgtttaccccattagtgggctaaacttccatgcaaactctagcgggtcacggatatacccaaaccttgctcctagtctataaatactacgttattccctcatgcaaagagttgaaaatttattatgtaaacactatagcatgaagctagggttcttaagcttacaagaactgcattgtagcacatcaaggctacttacccaaatacgattgactcatggactaaggttcaataatacctgaaccacgtaaaaattttcttctcaactctctattaatataacttaatttctcaactcttattttaatcggttctaaaagtcttggtaaacactttggtgctttcattgagagttggcgagatccaaatacctttgcaggagtctccccatgccaacctgggtgcatggctagggacccatcttgaggtagactgctatgactagggatatgggactctgcggatgtttttcttcttgccacgtgtcataaataatgtccacgtcatcagggctagtttctgggtaaatatttgccccctaagtcgactttacacttgttcaatgctcacttaatgatgcaaactaagcatatttcatgtgaaactaccaattgggcattaatttctaacttctagcaattattactggccttcttaagtgatttctttgatttgagaaactttgaaaattttgaaaaaaattaaaaaaaaaaatgcgagatttatttaacttttttgaatttagacgaactcctaaaaagcttaggagtaggagacattctgttataaaaagagagctctctcctcacttattccacacgcatggagtaataattgggggtatgacaattctactttttgctgcttcagaaatttcatatcgtcaggtaattttttttcttctccccttcgtagcgcatgattcgaggattctagggatggttgggaatctttgaaatccagatagagttttcttgtaagctctatttctatttttgcaactgcattccaactggcttgtcttaaaatttctttaagtgaactgaatggagctgttttgagctgaacataagtcgaattcagctgatctaagtcgttcagaaccaagttgagctaaaatatgaactgtgtgaggagaactagaagaaagcctgaagagtacgaccctcacaccactcaatttatgagagcaaatctcagaatgcctaagtctaagaacttagacaaagtgtgtggtggaagagtgatgaccaccaaattgctaactatacaacaatcgaaagtaaaaatcccaaggacaagaacttcacccttaagtttcttgttatttgttcacaatactctgactgtgaactaagtaaaactcatcaaagaagagtatttcttgctgatgttgtagtgagaaaactaagaactgaatgtcccagtgcagtgcttctcagaacccttgttgtagtaatttatcgagatttcgtatgaacgcgggtgcttttttgcctattcacccatggttcatttagactgcaaactacttcagaatatgctcctaaatgaatctaaatagttaccaaattttgcagcatttttcatcttttatcgtctgcggggtttgcccattcctactccccacgaaatcaacatcctctgtgatctcaagagaagtgccactcggaaggccaaaggcttcaatcatcttcatcactatagcttatacttggataaatttacgaagagcaactgtagtctcatgaggattactttgttactcccaccataacttcaagacgcatcacttttcagaaggccaaactgtttaagggaccgactctgctaattgacatgaagcggagagtgaatgccatgttgaataaaatttttgaaaaggagggaaataggcagatgcaattcactgatgacaatctttgtcgagttggactgatggcgtcttgtcagcgaatgtatgttgatgctctctttgaaaatgattcatggaccatgtcccttgataaagagaaaaatgggcaaagtggtaccattcttgcttctgaagaagtatcagaagataacaattcctcttttgatgagttggattattcaggggaaatatccatgtctcttaaccaaagtagtgaagacactaattctgaaagccaggccaagatagagtcttcaagtcacacaaaggcttgtgtgcctgaggaagctggtggattagcaagtcattgatgcaccacttactggagtaaacactagtactgttgaattatgtgttttctgtacgttttcttacaactacttgtttttcttattttttgtagtgacaatgagttttcttgatgagatggctacatgcaccaaaagaaagaaactttcttctaatataag

SEQ ID NO: 551 - DNA, 2288 bp, Cannabis sativa
cgccattgtaaatctctatacttctaacctccttgcccagtgttatagaactggtgaccctgttactggccgcagaaattacacatacatggactctgttaagtccaacttaggtaatataacatatcatctctataactatataatagtctcaatatttttatatataactaatatactaatgagggtattccatctggggttgcaggaggaagaagggtagtgatatgcggtttaattcagtatgttaatatgattggggttgcagttgggtacactattgctgcgtctgtcagtatgatgtgagtaattaacctagaaccaaattgagttagtttaataacagcaactattttaactgtcaagacagatattgaattcagattcaattatataaacatatttatacaaggactgagaaaacaacttttctttttttgttaagtagtctttcaaacatagttgagaacctgttctgtccaactctgtctaaaagaccactttataaactataatgatcaaaatgagaccattttgtaaaataatactataaatagttttacttaccaagtacctatcttcactttgtacatttattacatgttttgtcgtgtgttcagggctataaagagatcaaactgtttccacaaaagtggagggagagatccatgccacatgtcaagcaatgggtacatgataacatttggaatctttgagataatattttcacagatccaagattttagtcaagtatggtggctctctatagttgcagcacttatgtcctttacttactcagccataggtcttggtcttggcataggaaaagttgcaggtacaagcatacatatactagtaaagataataagctcaaataagcatatgatcatcaacaagaatgtctcaattcttcttacatcttttgcagtaaatggaaccattaaaggaagcttatttggaattagcatagggacagtgacaaaggctggaacagtgaccgaaacacagaagatgtggaggagtctacaagctcttggagccattgcttttgcttacactttttccttagtcctagttgaaattcaggatacaattaaatcaccacctgcagagcacaaaaccatgaaaaaggcaactcttcttagtgtatcagtcaccacagtgttctatatgctgtgtggatgttttggctatgctgcttttggcgatttgtcaccaggaaaccttctcactggttttggattctacaacccttattggcttctagacattgcgaatgctgctattgttatccaccttgttggtgcttatcaggtaataataacttcatccacactaatatacatgtaggggcagccaaaaggattagacacaatagcacgagtcgaaacccacatgaaataaaccgatatgggattttcttaaatgggatcgtatcattctctggttgatccatctaatctattaatagaacatatcattaaattccaggtgaacacaattcaaatgacataacaacaacctatgtaaaacatatactatttttaaaatatattgaattagttaaataagggataaacacgaattaacactccttaacaacacgagtcaagagaacttagatgaacaatgtctcagatcggctaactctacttttctctaattgattctgagttgaaactgaactgtactcttattttctgttttgacgttaattttttgataaggtgttaccatactggcatatgcaggtattttgccagccattatttgcgtttgtggagaaatggagcagcaagaaatggccaaagagtgagtttgtaacaggtgagtatgagataccaatccccttggttggtgctgtataccaactcaaccttttcagaatggtttggagaactatatttgtgatgatcaccactctaatagccatgctgatgccattcttcaatgatgtggttgggatacttggagcctttggattctggcctttgacagtttattttcctattgagatgtacatagctcagaagaagataagccgttggagcaccaaatgggtgggacttcagatacttagtgctacttgtcttctcgtatccatagctgctgctgtggggtcttttgccgggattgttcttgatctcaagacttataagcccttcaaaactagctattgagagcatttacataatttatatctgtgtccatgtataatgtattaactggttatatgttgtgctaaaaaggattattggaagcataattttagtaattattgtggacct

SEQ ID NO: 552 - DNA, 1909 bp, Cannabis sativa
aagaagataaagcaacggtgatctctcagaacatcatttagtgccaatattggcttgccaagacaaactcaaatactagaatctactgcaatagtgtcattgtcccaataactatatgatacatcgaaatcggagtatgctttgcttacagctaacatcactaaaggcccaatcatagccaaaacacacttaaaataatctactgtcctagtcacttgttcgagggaacaatgcaaggcccaatgagcagacttccacttacctaatcatgtttctaaatgtatgtcttatgtttttctgcatgcataatggtaacactccaaccaaccatgttttatgaaagtaatgcaaatacgttaacagatttgtgtgcataagagttgtaacatacttttgttttaaacaagacgtaagcaaaaccctttccaagattattatttggatctctgattattcgaaccccttcaacactggatcccatatcactgataccacaaaacacttggtaaacttcttcatcctgcagaaagagaacacatacattacaaaaaaaaaacgtaggaaaatatgggacaaaaatttgaaaactacaaacataaaagataagttacaaatgagcaaatcacctttacatcaaatggtagattgcccacaaaaacagttctcttatgatcaaaatgagaaatctcttctcccttcatcttcttgcgaggagggcatgccctgtcaactcggatgtgatgtcctgcaacctaaaaccacatacataatttgagcatagcatacataatacctttacattttcattttaatatttaaatagagaaaatcataatgaggccaaacacttaattcaacattagcacataccagagccatattatgagacaaagaagcttgtgcagattcttctgtcttgaaaacaacatatgcatgaacgctgcacaaaaaaataaatccaacaattccactgtcagagaaaataacaccaaaaagagtaataaagagaaaaacaaacattaataaatcaaagcaaacttgtacttaaacattaagatgaagaaaaaaaaactcctatcttctagtaatgactgtgatgtgcttaaactcgctctccaggatctatgtttacccaacagttagaaattatagagtcacacactgtccatagaacccgtattttcgtcatattcgttacgccccaacggtggggacaagccaaccatgtaattagacattgatacataaaagataatcaattacaccacccaatgaagagcacatttttatttaaatacgcacacccacaggtctagttcaattaaaaagattcctttactataaatgttaaattttctttcactaacaaattgttatgagcatagatattctagcaaaataaaaaaacctcatatctattgaacaaccaacacaaatttcagtcaaataagatttcaatgtgtctcattacattaacatccaacccaacaattgatcagagaatcattacctgtcagcagcttcatgaaattgtttcgtaatcactgctccctttcttggcttcttggtctagtcaagcatcaaaagtatgaacatgataaatagctataatcaatcaaatgaataaagaggaaaacctataacaaatcaacaaaattgaaagcaaaaacactcacatccgtgattggcacagaacgaatcctcacagaatcaacctccccaaatttagtgaactccttaatcaaagctttcttctttacagacaatggcaaattcccaacaaacacagtcctcaaaagtttactctcatcatcaaaaccttctttcgataccaacatgtccgctgggttatccacattctttctcttctccccaacttttccaccaggtcgtttagcttcatccactt

SEQ ID NO: 553 - DNA, 2775 bp, Cannabis sativa
  modified_base (372)..(378): a, c, t, g, unknown or other
  modified_base (456)..(457): a, c, t, g, unknown or other
tttttttaattagtattttgaactttgactctatcctagacttgggacctaaactccaaccctgtctctattctcggactcgaaccatggtcttagccccaaactcggatctggatctgacttaaataaaattaaaaaataaaaataaaaattatgcaacatactaatgttttctgtttttaaaattaaaaaacaagagtggttatacaacatatttttattttctaaaaacaaaattttgaaaatataaattttatttttatttttgtaattaaaaaataaaaaaacaaaagtatttctaaatgttcttataaaaataatataaaatataaagggaaatttacagaaatactgaaatttgggttaattttnnnnnnnatactgtcacacggaaaagttttcaaatatattgtgtttttataaaacactagtaaaatacaaaacagaacaactcannacaacagtagaacaactaaaaatatcagtgaaaacttaacacagtatactgcagtatgaaacatataaaaaaatacagtaaaaaagtaaaaaataccgcttaacagtatttttgtaaaaaaataacaaaaattagtataccatgtaaatttcccaatataaaagcatcaacattgtttatgtctattttagttaaaatataagaaaattctcataatttagtaatctctgggctcaatatgggcctaaaagttaaacaggcccaagttagtaattcaaatggtaagaatgagaccgtaccgtatcgaattacgtcaatggaaaatcgaaacgcgtacgaaacccacctggtctgctcgactgactcacccgagttcactcacttgactcgggccctgactcgttcatccctcgtcgcactcgacgcggaatggaagccaactcggactcggcaatccaccttccccactgtgtcccttctccaactcgcgtgtcgactcagtcccagactcgttgggagctcgaatgagctgctactgcccgaagaagaatcggtggttttcttggtggaccttattttgattcctccaccttcaatctgggaattgttgagagacctctttgtatctccggatattctgaaattgggttttagattcaagcaggatttggtgtacttgtcatcaactttcagctcccatggatgtaatcttggatttgataaggtaagatctctgcttttagaataatgggattgtttggttactgagaaaatgcatgaaattgagggaattgataaaattgagacctgggtttttcttttctcttcttcataaatggaaatgagaaagctttttatgctagttactttggttagaatagagagacacgtgctcaagattttcttggctaaaaatcaattgtgttagacctaatatataaaatagattctatgtatttgttttgatgcaatgcatttataacaaatgaatatctttattccatggctaatgtactacaattaaggccatgattttcttgttattttaggtggaaccatttttggacattacaagtatatacaatcatctacaagacaaacaacctgaaaggagaatatcaaaggatatcaaaagtttagctactatctgcaaagaagtcttaggcatctctctttcaaaggtttgatttatgttaaacaagtcaagagattgttggttatgttacataatatatgaacaaatattccttatgcatattttaaattagattaaccttaatgaatttattaagttgaacttgctttgacattatcatctctctcactctcaggttatgctttaatatttgtgcttattacaatgtagagtagtctaggacaatgcattagttatagctattagtaattgagatccctgtaattacattaggttgtttttgattactatgatagtgtattgaaacaatttatatctcctttgtaggaacttcaatgtagtgactggtcagttcgtcctcttacagaagaacaaagaacgtatgctgctctggatgcacactgcttgcttgatatatttgaagtatttcaggccaaggtcatcaaagaaggtatgtatgccttacttggtatgccaatttagcgaatccttactgatttagctttaccccgaaagtattatttacagggacactttcttgatgtagaagagagcagaaagagaataaacaataggaaaagggaaattaactaataattttaaaacataccaaattctgtttaataaaatgaagcctaatgataattcaaatgattttgggatctcctatctcactgctgagtacttatctcatatccctgttgtgtgcaaatgaattggtcatttcaggtaatataattcagaatgttcctgatcaactttcctcgatttcaattcttgggttgaaagagattcttgaggaagatgacttgtgtaataaaataatgaagacgggatttgttgaagccgtggatgtagttcgagctactgcttgttctgatgtttctcgagaaatagcctcagaagaaggaatggttatgagatctcaacataggagtagtttgcctatgggtgaatccctgttgaatgtagtgaaaaaatatggtgaaaaacttttattggaagaatctgataaaaacccaaaaaaatcaagaaagaaaggcagaagacgaccttcagctagcttgattcgaaaagaaaggctgttagaaatttcagatgaatggcaaggccccccaccatgggatttgtccgtgggaggaaatggatgcccaaagtttct

SEQ ID NO: 554 - DNA, 1281 bp, Cannabis sativa
gggacattccttagacccatcttgcctagaacaagcttgggaatggcgggaggattgtctagccccatgctccggctgaattcattagcgagctccacaagcttatgcttgtcacgggcaatagccttgttcgaattgtagtatccaagccaggcctggtacgctgcttctttactcttcatctccacatttgagagtgcacgttccacctgctcaatataacatcattcagtactcatgtgatactttttctcctacatttcatttagaaatatataatgaatattactttgctacgtaaaactcacctttttccgtgtgtcgggatcaacggcgggcaaagttgcttttgtaattggcaaagccttgatagaggataaaaaaaattcctcccaaggagctagcaacagtacaccctgcccttctttacctttacgcccagttctaccaagtctatgtatatactgctctctatcagcaggcacacccacctgtaatcgtgaaaaagagcatgagattaaacactggcagcttgaggtatatgtttaaatattttttcatttgaagaaccagttactaaaagggaatcattaaaatccatttaatgggtgattgtccttttacctgtatgacaagcgagacatcaggataatcaaccccacgtgcggacacatcagaagtgacaagaataaggccctttgatttccggaactcatcagagactttagttctatagctctgactctttctagaatgaatctctctcacattcaacttcaattctccaaggaggtcagcaaccagccgggtgaccatagcagttgtacagaacatgatcacctgtgcaaatttgataataagacatggtagacaaagattggaaaataatctaacaaaaagctttcattgaacaactcgtcaataaaatattttcgtcttcaaatatttgttgattacagatacaaatgggagtacttaaatgttcaaccataagttttacggggctaattgttaagccccagttaagtctaatggatcttcatgaagatgaaattgagagcctctgattgtgcagacttaaacataccttatagtcaacatcatctgcaatatgttccttcaggagaacatatagaagggaaaattgcttgtccaagggagcaaccaaacacgtttgcctcacctgaaataagaatttttataagggctcataatatacaaaatatataccaattgttattagagttcagcaagagaaacactggacaacagaattacttg

SEQ ID NO: 555 - DNA, 7696 bp, Cannabis sativa
aaaaaaaaaagaagaatcttgcaccttttcattcaaagccaaatttctagcaactgccttctccataatgcttttgtagtattgcgagaaaggattgctgccactctgctttgcaagctgcatataaatctactgttaagcattcatactatgagtaacaattatcaaacactgtattcagaatgcatacctgaagaaataattctacagattgctgatcttttggtgagaaagccacctcatctctttttttctgcacaaactcaatattttgctccacctgtagggaagaccaattgctaaaaagttatctttctatacacgataagcagtgcatcatgatattaaatcatcaaacccttgtgcccatttatttctgtcatcaccctgacagaccccaattaggatcctaaaatcaatggcaaccagagggcagcaaagaaagagagaacatgaaagtaaataccatggaaacaattagacagaaatggaatttgtaatcgaatgaacaaagtaataagatgttaagaagctcagacaatatagccatctacataacccttccaaattctctcttctcatctatatactcacctgtaactacaattaactttatacccttctgctaagtatattcctattttaccattccttgggttcctatctatgaaggtaaagcaaacaataactaatctgatagaccaccagaaggttcacttatgtgaagcacaacaacctaagctaacttagctaagtagtaaattgttttacttagctgagttatgttagctggctttagtgttattggttgtttgttatgttctgttagacagttagtgggtataaatgattgctacagagttttaattatcagtttagacccttggagatttgctatcttgaattagctactgttctatccttaggtaacgtgttgacctgtctccattggagactagggtttttgagaaataaaagacagaatatctggttgtggtgagagatcttgtctgagttctatcataatcatgtttgtacaactacatagcaatatggctatagttagttactccccaaataaagtagggcttagtgaggagcccagttttgaaattaggcaagctatgcaaattggaagtcttgggtatatatttatgtaattatatttatatacatattactcaaagcatgtcattatttgggaccaatacaatatttttcaacaattctaacacgattttatgataaactccaataaatagaggctgtttagtatgggtaattattaatattatcaccataatcaatgggtggtctatgataaaagtcagacagattaggaaagtggagagaatcaggtctcttgagtcagcatacttctatttctgttattatattcagtaaaagcatgctaacaattctctaaattctgcctattactgttgttggtaccctgaggtctatcactttagtagtaaaatgtgctagatggtttactagtctttaagcttcagcctgaacatatctttcaaatttgggtttgtggtgtggaaattatctttccactaaagtgtaggaagaattcataaaaaaaataaaataataatagcaatttagagcaatgatggagggacaattttttttttaattattgaagccctctttgttaaatatttactttagggggcatcgtgtaacacgtatcctgtttgttttttaaataatctaaattgcgcaattattttgaaaaaaaaatacaaaatttacaagaaattcggaatctttgtcgttaatcattttatatagatataatttttgaaaaaagaaaaaaaaaatcacaaagtctccatcactgcttcaagaagaagcaagtagatacatctctagcatacctacactaaaagaaaattgttgcaagagagggcgagagagatgaaaaatcaatacctgatctataaaacgcttaactacacgtttgaaactttcaacagtagatgtctcgtgaaacttccgtagtcggataagcggcattgttgcaagatcaggaaatgatacatgatagctccactgagaaaagtgcgctgaaagcagttccacagcagataaaatacactgctcttggaagtttcgagatttcaaaatttgctttggtagctgtacaaaaaaattaatatcaattatcttaattcaaactagacagaaatattaaaagctataaatctcagtgtgtaaagactaagaaccacattaagtttggattagcaaggccctaatccctaacctttattccatttgataagctgatggcctttccatgttttccaccctctccaattttatactccaaaacatccaaaaccaatgacgccacaggaatgaaaaccccacttgaactagagaggtgatttaaccattgaatgcacttgactcttaaaggtaaatatcttggtccactaaacaggacagtcaccccatttataatctgaacaatcatataaagcaatggctgaagatcatagtcacgtacattagctgatataaacgtaacccatacatcaatacagctaatgtactgccaactgcacaagttcttgactgcttcctgcacatacaaaatatatatttatcagcacattatagagccaaaaatattgagaattataatagaaatcaaatacttcagcatctaaaagtatagcaaatgaatatattcacacgaattcaatggaacatgtttgcccacctttttctttgtttgtatagcttgttgcagcattttcgcaagttgctggatggagaccattgcttttctggttgatttttgtacatctacagaacaaagctcaacaaaggagttcctcagaaattgtatgtgtttcaattgatcaggttccacaaactgacaattgccaataaaggatttataagttttgacaaagcaggtgtcaaaccaattagaagcatacacagatgctagatcttgtataataagaaaggcatgtgaagacacaacccctccatctgtagcccaaaaatgaacagcaatctgcagtggaaattaggtgttagtttgatttaaaattgcatgggtataatttgtgaaaagaaaaccattagcgaggggacactgcacgataatctattaacaggatagatctgtacacatgcattcacatcagctgtaatatgtatacatcaatacttgatttaatgtaggacacttatgacattttttaaaaggttgattgcgtaaaatacctttacgagtctgcgaagtaatgaaggaaatgcaacaaaaaaggccatggaagctcttagtcgggctaaggagaaggtcaatatctcggtttcagtaacttgattcaaaagataaaggctactcctcaaatatgatttaatgaatggcttgaatgcattccactttgagctactttttaattccgaaagtttctccttcttgatattggactttgataatccaagcaacttcctaaaaatattatcagcctcattaagtgtaaaaatcaatatcttgcaaaaggtttcactactttgaaatctatggcgtgagccggcaataatgacaccacttgactgagctctataatggcatgctgtccgatatccatttaacagactagttagggcagccagattttgctgttctgtgactagttgacaccaagagtcaacatcagagctactcaaaaataggctcttattcttatccacactttctccatccactgactctgtttcatcgatactcatctcatcctcatctgcatactgttacaagacatgtataaatgacaaatcaaacagaaaatatccatgtagaagtaaaaattaggtttttcttccatgtgaaatatacaagcttgcacaaaagaaaaaaatcatacatgatataacactgtttggctctgtgcaattgaaacttcataaaaatttgtaagtgtatcatatgttacataatataatgtcatttaatttgagaataaacctgggtacggattgataacattaggatcatcaacttcattcttttctggataccaaatgaagtatgaaaaaaggaatgtgcaacagcaaataaatagttatgtagtttgaccatacaaatctttaaacacatagatagttcatattacaggaaaaaagacctatatcttggtttaaaaaataagtttttcaaagtaaacaacttacagcatctttatttctgaaggattcaagcttcttatcatagctttgaagaaacttagaaaatgcaggatcctgaaaatgtttcatatattacatttcataaaaaatatggataaagaaaaataaaataatgaataggattttttaaactacgatcattgtagagtaagcctcctaaacctttttttaaatgaaaataatcatcatgttttttaaacaatttgctcatttgacccaagaatttgcttacgtggcccatggcggtacgcgggtctacttaactaacttaagttagccgaaatccaatttatggcactagtcatacaaatattagctctaacactacacatacaaattctcacatattagactgttatttatgcatgtattttttgtccagtctcttgaattgtgctagatcagtgtcacattagtactacatcagcaaatagtttaaaaaaatgttcagaatgaaattgggttgcaagggtagatttgtaaatagtttcagaggctccaaaaaaaagttaagggacaaaactctacaagagtcattccatgatcatttctagttttctacccctgttatttaaagacaccaatttgtgaatataaactttgtctttaactaacttcatcagacaaagttacaagaatacaaggatatcacaacctttttaagtactgcatataatacccttcttgctatcaaataaactgataggcctaggacttgtcaggtttatcacagaaggaataaataacctgttaaattagttaggcaaacacctagtctctttcggattttggtttcattttggttgtaatcctaggtggtttaagtcttttatagaccaatgcctttaaatagattgacagcaatctcatttagggcagctagaaaatattgagagattgctcatgtaaagagaccaaacctcttgaaagtttggaataggagagaacaagcctctcgaatgcttgatttgtgtactgtttcagcaattcaataaagaatttctctgagaaatttcattatttgtgtcttgactgctgatagaatatttcaactctaagattattctatcttaaacctaccctaaacaatgcagataaagtctgtcgactgcagttcctacattatccctataacataaatgtgtcgataaaatatcacaccagttctgtgatgatacaaggacttaccttcttcttcaatttttccaactgttttttttccttcacaagttctaaagatatttctttgttctgtgatgagaaagcgctaccaccagagttgtctgtacacaaattcattcagttataaaactaaggaaaagatttactggaatatataaaatcaataaaataaatgctccaccttcaagatgattagctacatcactttgtgcaacatataaacttgagtcctgcaagatatattacgagttaatgccaataagaaaaatcatagagtgagcaaccaaaatgtactcacttactactttcaaaatcagaacaagtaacaaacctctgaaagatatccatcactgtcagactcatttccaattgcattgctatcatcatcactatacaccgcatcaagagaaaaggtttctatatctttgcatttgcttcttctaaagacatcaaaagtaaagtaaaaagcttttaagacaattgttttggatatagcaatagtaaaaaaagacagtccctgaaattaatgctgataaactccaaatgcaggagtaagaataaagtgattttcccttttctaccttacattgggcatcacttttgtgtcttcttcttcttcttcaatatcattcttatcacgtcctaaagtaatgaagtaacataacaaacacaagaaaattcagaaaagcaaaaaaaaaaagtatccttaaaatgtgaggaaataacaaatcaattactttcaacaccaaacaatttatttcatcaaataatatagtagttagtcttttaagctttgaacacaacaatccaacgccctaaataaacatttttgagcaaaactaatcgaacaacaacgaataaaaaagaaaaaaaaaaaaacagaagctttccatcaaactaatgaacaaaaatatttagtaaagcttttaacaagaaaaacagttcagagaaacgaaacaaaacaaaagagagagaatgttactcttagaagatctcttcttgaacatagagttggttttgcgtttccgtttgagcacagactgaagattcttctttgcgaatttcctcgccttcttccccagcttccccatttttaactattttgcaggaaagccacaaggatgggtgagcgtggaccagcgggaggaacgaatatggaaggtgtccgtgatgtgtgagccctagaagagaccaccgtcaaccggaatcggaggcgtaacggagagagagagaggaagggtgggtggctctgttgtagttatagagtaagaacgttattaaacctatacctatttcttgtattggtgtgtgatatttttatcggttaattctattatcatttaatttaataatatattttttttttttgacaaagttatagattctgaaataaatcaaagttatatattcgggataaaagtcattccaaatgtactcgttgtctaattctaaatcagccctagcacatgtatgtatgagcaagtttattaagatctctgaatacaaatgtgactgagagagtaagactaaacgacaacaagttcctaatacatgaaaccatatcactaattaccaaatgattacaaaactgactataaattttatctaccaagcttttacaatctaactctatgatagcaacaggtaggttgatcgtttgaatccactgtcaagccaaaagtaaagctttagcctcagctatttctggaggcacattccgtaggagcaatgacacctgccatgacattaccttgatcatctcgagctaccactccaaaattatgcttctttgctttattgtctaaggcagcatcaatattgattttaaattttttaggcacaaattgttgaggttgtctactcagggactgttgcagctgcctaccttcacttaccttatgatttgctttttcaaattcctgcaaataagtaattgcatgatcatatgagcattggaggcaaacatttattatgatgaaagcagttatttcgttgattccataggatccaaaagaaacacagaaaagtatttaacacacacttatcaaaagtatcaaaggccttagcaataaaagtcgtaatattcaaagacttgttttcaacaaaaaaaaaaactagtgaaaggggaatgtttccaagcagtttttgctctagaacactcaagaaaagcatgtgttacagtttcaggttttgtgtggcaaagaggataagcagaggaagggattatgtgtctatggtagagatcagatgcaacaggaattgaattgtagagtacatgccagacaca

SEQ ID NO: 556 - DNA, 1141 bp, Cannabis sativa
atatacttccaaacaaaacttcgttaataattaaaattacccaaaattgtaagagtcaaaatataattagagaagtcacgtcaataaataatactagtggccaccttaatatatttttctagagaataatctacaacattaatcgtcctaaaagaatgaaagaattcaagtatctacatgaaatgaaacacttcataagtattgctttgtgagcacaaatcctaagagtgagtccatagaaacaaaattaaacttgacaaagtgaactttgtaaaaccaaaatatttaattattttttaataaattgatattatcattagtaaattagctaacttaatcaaggcattttcttcaatcgaggtatatgaattttcataataaattaaatgttgcaactacttcgtttgtgaactattaacaagtaactagcctatataattcactttgtatgttgaattaaaaaaaaaaacacttgtatatgtgaccgacttagttccattaaccaagtcaacgtggcagaatgaaatgccacgtgttaggttttaagtggtggaagacatttttgtttttatgtattatttatattaagcatggattacctcaaaacaagctttacgattagtcatgttatcatagaaattagaaaaaagcaaattgaatccaataaataagtgacctttgtgtgcaaactacattagtggttataggaagatataaataatttttttcagaaaccaatgagtctaaaaataaaaataagccactggttttatttctttaattgcattgatttttggtcctattataaattatgaactgatgaaactcataatttaacatcaagtaattaaactcataattgccatgaattaaagtcaggaacattaatttatttggttttaatagctagtaaaacattgttactacaataaaaatgtaaactcagaatcagaatccatcagtttaagccaatctctatttatgaacccactttaaattaattacatatagaacaaaattgtaatttttttctttcaataattttagcctaacacactaacacttacatggttttaatgtgagcaaagttcgtaattcattttggttagaaaataggaaaataaccacatacactaattta

SEQ ID NO: 557 - DNA, 3924 bp, Cannabis sativa
tatctgtttgtattgaattactgagatggagctttctagtaagcctgtctcttagtttatgtttgagttaatttgctttatgtttgattaaattctcattgtttacttcatttccactgtaatccttacgtagttaacaattggtaattattgttgtccattcattgttaattacagaggtacttctttttgtttaattcataaaagtagtgtttctgtatatttgaattagtgtttattctatttgctcttgttcctcttctgcatatctattatgtttcggttatatctgactttagttaatttttggtttggtgtttagtcgtttacacatgctttgttcttaagtcaggtgtgtaattttttgttttttgttatgcaggtttatggatgcacataacatcacagcttcttaagtaggtataatggctttttgatcttcggagtgtcatttttgggagacgtattggtcagttattcattcatgctcttgaagatttcttgtggtcaaaatacatttatatattaatataaggattgagttgatttatgtgagcttttaatcacacaaatttcgtaataacagtaatgccctttgttgtgattagtctgttttgatatattttaaacattattgtagtactacgaccatatatactggttaccgtttagccttttcattatttcaatgtctgatacttttactgcaaatatagaagaacctacagcacaaatgagttgtgaaaccacagaaggtgtgcattctaaagaaattattctagaacaggtgaatgatattgaacccttagagcaattagatcacattgaacctaatattatagaaaatgctcatcaagaacttggcacaccgctgcccagcattcttagtgaacaattgcaaccactttccgaaaatgtgtccaatgattctattcctcacctattggaacatcagcataaacatatgggatcgaacctctcacaaaatgaaacaggagaaaataacagcaatgtgccaaacataatttctgaaaacaggaccttgatttgtgattctgaaggtgtcatcagaaattgtcagacagataaaatttcatgccctcaacaaagtatgtcggggcagaacaaggaatgtgtacttggagatctaagtgcaagtactattagtaggagccctattagtaaacaaccagaacaaccttctgacgatgtggtcgaaagctctcatcttgagcagtttgaaacctcctctaaaagtctaaggaactccagcaaattagggcggaaagttaaaagaacttcaaaatcaagaccgaaaaaatatatgttaagatctttggctagtagtgaccgacttctacgttcaaggactcaagagaaacctaaatgtcttgaaccaagtaatgatctggttaatgctaatgttggtaatggggtggagaagaaaaggaaggagaaaaaaaagaaaggagtgaagagagttatagctgatgaattttcgggaatcaagaaacgtctcagatattttctcaatcgaatacagtacgagcaaagtctgatcgatgcttattctagtgaaggatggaaaggaaacaggtgctttattttttcctgtctagttgctttaatgaagttgggaatttgttgtgcatttggtattttgtatcttgcacagtttgatatttgatttgtgctgtattcttataaaagattatatttgtctttattttcttgcatgccatatgataattattacaaaggaaggtaaaacatgtttgacttattgataccgaataaatatagaccccaaagataattagatattatgtttaatttttatttcaataaggttacagtttggtaggttatcttatttagagcaatcaaagttttagtatatttaaacaattccattaattagttttctagttgatttagaacttgttatttgcctatctattaataggcctacttatttttcagacttgatatgatattataaagtattaaattttcctcactaagattgttcttgttttcttctcttgattttatagtttctgacacattatttcctgatcttattttttcttggttgtacatcacttcttgttttacaagttgttaaagatgaaatttatttttaaattcttcagaagctggtgaaaggtggggtctcaccattttcgctgtctatctcttgcctgtcttgcattaatgtcttttttaaaggagttctaagaatgtttatgtaatgtctccttaatgtatataaatagaatgttatatgtattttatgattcttagtttcttcacttattcttctctttggttttattgtatttagtttcctccttttcactagaatgtttatttgattttgtttaagtcctgtgatttgtttgtgactttgcagcctagaaaaactaaaaccagagaaagagcttcagcgagctacatctgaaatatctcgtcgtaaattgaaaataagagatctatttcaacagctcgatgaactatgcgctgaaggagggtttccagaagctttatttgattctgaagggcagattgacagtgaggatgtaggagatctcttgctatacgccattaaaattctaactcctctttactgagtcatttttctttcttttccttttatttggctagagttgagaagacatacttctttgttctgtttctaatgaagaatatttaaagtcttttgcaatatgttgggcagattttctgtgcaaaatgtgggtccaaagacttgtccgctggtaatgatataatactatgtgatggtgcttgtgatcgcgggtttcaccaattctgtttggaacctccattgttgaatgaagacagtaatatccagaccatatctttgagctatctattaattaaaaatttttgttctttgtttgatttctgctgtcttttgcagttccccctgatgacgagggttggctatgccctggatgtgactgcaaagttgattgtgtcgatttgctcaatgactctcttgaaactaatctttcagttgatgacagctgggaggtcgatccaaaaagctccattctccagtcttttcattctattaatttagtgctttttcaaattttaaatgttctcttgacatttttctacttcattctgcagaaagtttttccagaggctgctgcagcagctagaggaggaaacaatctggaccacaatcctgaattgccttctgatgattctgaggatgatgattatgaccctgatggtctggatatcgacgagaagattgacagagatgaatcgagttctgatgaatcaagttctgatgaatcaagttctgatgaatctgagtatgcatctgcttgtgatgaacttgaggctccacccaataatgagctgtctttgaagctctcttccgatgatgattcagaggacaatgactatgaccccaatgctgtggatactgatgaaaatgttaagcaggaaagctcaagttctcatactacttctgactctgaggatcttactcccacagatgatgataataaggctaaaaggctttcaggaaagtctggtaagcaaagttgtagttctggtggaaaaaagtcatctttaaagggtgagctgttagatattttaaagtcaggtcctggcgaagatggttccccgcctattttagagaaaagacatgtagagaggttggactacaaaaagcttcatgatgtgagtattgtttcactctgcatgctgactccttatattgcattaacatgactctgatgtatgtagatattttctgttatttagatgtcttacatatgatatttgcttaattgctataataaatgttattttaggtttggcttgctatccttaaatctgagcactctttccttgtacatgcatgtgctttctgacgaaact

SEQ ID NO: 558 - DNA, 3261 bp, Cannabis sativa
ctctctctctctctctattcaaaataagaatttgagattttttagttcttaacttagaattcaggagttggagtttgatatatatttggccaaacagtctactgtgcatcttttcatgtacatattttgtggtgaacagttgtgtaattacttcttattaaactaaattgttatttgctttatttatgaaacagagttacccaactttatatgccgaagatttgagggagattgatagtgttgtgaagaaggtggtatctgtatgggaaactgttaataaaaatgaagtggaagagaccaagaatctttgggagacaacattggaccaaccatatgagaaagctggtggagaaattgactttaatttggatggagttattccagtccagcctccagtttactgggaagtttcagatacagatgttaataccaaatataagcccatgcaacctagattcttacttgaggttagtttcgctctttctctctcatgtaaaattccaaatataagtcaatgctacatatgatttttttttagttgcacacttctctgttaatgaccatttctcaatggagaaaacactcccaattatcaagaaatgcacattgagattattatatttaaaatgtgtacaggtaatagtaacaggtctatgtgaaattgtaacaacattattattaacgagtttaaagagagctacactcaatcccatcaccatttaagagagttaaactgagattttctggttttgcaatgtaggtctgtgtgtttgtgaggctgaaggttgacatgaagacaatgcatgaggacagaaaacgtgacacccttcgtcttcgaatgttaaggtgtcacagagagctgaagcttgataaaacaatttccaacttctctaatgaatcatggataaaagcgtggcatctgtattgtgaatttggaacaaagggagtcatagttgagcattgcaggcaaggaggctattgctgcaaagcaagtaccgttgaagaagctgtgacattccattggaatgacttgttaagagcaccctctctgactttgcaaagacaaattgataaagaattgaaaatcatttcttcaataactcccccagttcaagcaccatacttgttaaaatgtgtcccagaccgtgtgacagatgattctggtgccatgatttcagatgtgattctgaagatgaatcattatcatccacaagaaggccggtggctctctcgcacagttcttgatcatgctgggagagagtgctttgttataagaatgaggttatcttcccatcttgtatgttattactcctttttctaaagctcaagattttttctactggcctaatcaattctgaatcaaatgcagggtaggaggaggattttggagaagagggggtgaagttccttcagcagtgaaatgggaggataggattacagagatccgagaaggttcttggtcttatgttgctggttccgtcggtagagcaccaggtctgttgtatatttcatgctagaattttttcaacgaattttaaatgaattatatagtaatcggtttttccaaatacttgtaaagggctctatcatttcaagatcagggaaacatctaaatttggtcaaatagttgacagtattatattgttcataacaatgatcttcactaccttgtttttgaaacaaattttaaagtttgccgcttgttctagtacagagagggtggtaggaacagcaacaccaaaagaagcttctggacaatggaaggctgcatggcagttttcaacaggagatgaattgatgcttcggtgggattcgtcaacatcgatatcaaggctgagtttttgtttgacaaacaagtcggaatcaatggtaggattttgataatcacaatgtgtagacataatagtagtttatttagtaaccaatcttaaacttcaggtgaagctgttgaaagggagaaaaatgcaatatcaaaagaagaaagtcaagtcgcgtggcaatgacagcagagcatctcgaaatgaactagaagaggaagaggtagatgaggaagaagagggttttctaaccctagttaggttcacagaagacaacccaaatggaagagcaacagctcttttgaattggaagctattagtaatagaatttcttccagaagaagatgccatttttattcttcttctatgcatttcgatactaagaagtgtaaccgatatgagaaaggaagacttggggtctttgttaactagaagaagagtgaaggaagcaaaactaggtagtagggactggggttctgtggtactacaccctttcactagttcctcaactcctccttcgccttaccttcaaccttggtacgagaatgctaaagcagttatggtatcagatagttcagatcacaacaaggggccgccggctttcactcacatgccagaggaagggagcgatcagctgtacaaaagtggaataattacatgagttttatgagatacgttgtacatattctctatgtactggttatttgattaaaataaaaatgccttcattagttgcattaatccagtttccagcatccacttttgtaatgtaaattagtggtttaattattcccttgtgtttattcttctttcagactggatatacttgacaatttgtgcttaaagaaattgagttaaatgcttgtgggacattgatagcggagatccttttgcacaaaagtttaaaggaatctacgtacatgtagtggaagctatctaaatatctattgacaacaccaattgacgtagtatatatgcatacatacatcagccgaaataattaaacagtaatataagttaaggaaacctgtttcttaatttacaggtgtgactaattccagagaactatactcattatggttctcatttttcaaagggtctgtgcaattagattctgattctagaaagggtgagcagcagagatcctttgtgtcatcacacttgaaaaaaccatcatatagcaaagaatattttaaaccctctcctcaaaagaaagcatcaaattttaactttgttcttagaaaaagcacaacacaaggtaaattctgaactcaaaagacaaaagacatttctttgtgaacaaacaattccaccacctttcccattaccttttcccatacacatgatataagtaaacaattctcttttctcatcccctcatccagtccaattccatacatggcgttaaccaattttcttgtcattctcatcattctactaccaa

SEQ ID NO: 559 - DNA, 2965 bp, Cannabis sativa
gactccatggtcttccacagtcaataatttctaaccgagattgaattttccttagcaacttctggaaacaattattcaaactccaaggcactcaactcaaacgcagcaccacatgccatccccaaacagatggttaaactgaggtactaaacaaaactttggaaacttacttgcggtgtttcacttatgagaaccccaaggagtggttcaaatggctcgcatggtcagaattctggtacaacacctcctaccacacctcccttaagtgcactctttttcaaagcactttatgggcgtgaacccccaccactgctaccctataaaagagggactgccatagtttcagccatggataacttgttggagtcttgtgatgccatacttgatgacctccaaatgcatctgctaagggcacaacaataaatgcagaaacatgctaatcatgaacgccatgacatggaattccaaaccggcgataaagtgtacctcacgatcaggccgtaccgacaaaagtccctagcacgacgtaccaacgaaaaactatcagctcaattctatggtccctatacggttatccaagaagtgggaaaagtcacttaccagctccagttgcccaatgatgccaccattcaccccgtgtttcatgtgtcgcagctccgccatgctgttggtgataaccattcctccccaacccttccccctccaactcaagtcggatttagagctcggtgtcctgccaaaggctattttgcaacaacgcgtcaagacctcagaacccaccaacactgaagttctcatcaaatggcaatcgctaccgaagtttgctgctacttgggaagacttccaaactatctttgaacagcttcttaattttcacctcgaggacaaggtgaagatcttagggaggtaatgataagcctaagggcctcctcgtgtatcaaagaagaattaaaaggaataattaattcttctctcttctgttattggacttttaattagttcttttatttgttttattttttgggcccagttgtaatcctaggtggctaatgtctaaaaagaccaatgcatataaatagaagggtagctagttcatttggggggagctgagaaattaagtcaataagacttgagtggagagatttcaccctctcgaaaggtggaagtaggagagtggagcctctcgaaaagctccaaacctttgtaattctgctaccaaattcaataaagttaaacttactagattcaaactctagagtaatatcatagatagaaaattctaactaaggaaaatctatcagcttagtttggcctgcagatttttaataaattaaataggcaagataaatgaaaacctaaaaatactacttctccaattcaagtcaggtcctaggctagtgatgcttgttttagagcggtagatcattttatttcttttcctttcattttgtgttcttatgttgctgatttttcttcttttatttgtttttagttgattaatttaagttgtgatgagtagaagcgaaaaatgatgacttctaggtttaataaatttagtttatgtttgataagacttatgagtaggaattttatgacttccatatgaactttataactaggaattagtttagtttatgtttgatagatttatgactagaaattttatgactttgatatgaattttataactaggaattagtttagtatatatgttgtttgttattgtccttttcccattggaataagataaaaataatcttacacacaaaaggcttcagctaaacaatgatatgggaggaactttgaatgtttagattgatagaaacctaataacttaaaaataaaattattatacagctactaacactaacagagttgaaactcttgaaagcaaatcacaaaaaggagcagaaaattacttgctcgatagtttatccagcctcacgtatacatatccacgaggagtggtcttgaaagcaaagagtttcatgccatcaccgaattgtgacaagacctcattggcaatggagtaaaccctgtcaccccaaggcacatcatggaatacaacccctccaccatctcctccatctccaacctacatattagcatcataaaacattatcagcagcatagcttctaggctgattcatcatataagaatcataattcattaccttaggctcagtcacatcctcatcttcccattcttcatctgtagcagaaccctcttcccatgagtccaatccatctttggggtcgctctctttattagcttcacctgcaagtaaataaaaggtgcataaggtgcttcccccccattctgcatttgcctattatatacatatgggattcataccaaattcccagaatcaaatttcaatggcagtgtcattgttaagggcacaaagaacatcatatatgtaggaaaggatacgcacataaaaaaaaatataaaaaataaagcaaaaaatgatgtaccttgaaaagggtcatgattggtatccttaatactctgggaagaagtggttctcagaaaacgaagagtggcacaagaagaaactacggaagtgggtttgcaagaaaaacaaatcaacggtatcaaagaagaagaagggttgagaagggaagagagctgaagtgggggaacggtattaaaataagagatggttgtggaagaaaatggagaagaattattgatagtggaagtgaatagtcgtaatagatttttaaacatggttatcgtttctgtctcagtctgggcaatggccaatggccttggtttcgactttcgtttcgagctgtggcggtggcggcggcggcttacagcagtgggcgtcgcatctcccctaactcctccagaatccaatccagtcgaaccaggtttctttctaaagtgtttgttttgtaacagaagacacctttccgaagcagttcaattcattaggaaagaaactacttttcttta

SEQ ID NO: 560 - DNA, 3427 bp, Cannabis sativa
ggccactcaatgctaattacatagcttgaatgtcattgcccatctcattgtaaagtttctgtagagctacatagcttgcaaactctacttcttttttacctatccaatgtggatttgttgctactagttcagaagaagttattccatatagttcatgtagtgtgtaataaaatgacaaagaagaatttgttctctgactttgatattatgaaattatgtgtttattctatgatgggttcatattgattcacttacttcatgtccgagtaggaattattttcagcaattgtcaaatagttgttctaggtttctggaccagatctgtctagaaccaaagcctgtcctaatgaacatgttagggtgtgtgtgatacttttttagtattttttttcttcaacagtcatttgttgaggatgtcttctgtggaatattgttacaacgtttaatactttaataataagattagcaaacaatcatgaaggataattatttcatcttttaacctttcctctgtgttttctcctttggctctggagtatgactgaaacagattttattcttctctggcagatctttattccattgagcttaagtaattgccaatatgggtgtctcagggaaatggataagagcattggttggtttgaagaaatcagaaaaatcccagtcttcagaaaaggatgaaaatgtatgtatcattttgtctctagctctaattgcttcatacagtgtataatgaataaatcttatgtatgtataacatttacttgttttcaacacattctgctttaactagttcttctgagcttttattatgctaagaaatttagttgaaaccacaattgttataatgcttacattaggctactcatgcttgagagagttgtgtttcccaaatatatctgacaaaagctctattagaatttttacaaaaacagcatgaaggttcattagctaagttctctgaagagacattgacaatacaataggatgctacaaattcacaatgcacaaaaatgtgattcactgtcccataatctttttcaatcaacacataaatctagaaaatgagcttgatttgttcaaatttatcaagcttaagaatcctattcaaatctactagtcatcctgctacctatcccaaaaccttgatctattggactaaaaaaaagtggcattccatataaatatatatggttccaaatccctactgggttaccattcctcggtctgactttaataatttacacatatacgatctttcgtaatatcagttatgaagaaacttaggaaaaaaattaattcgggtagctgtttggatttttagcaccgtgattttcaattgttcccccttctctaatgcaatggcagggaacaatttagttttagaatgattgtttcttttcaataactgtattatccagtggactaatgttcagggtttgttgcagaacaacttattggtaaagtactttgctaaacaagacatgagaagtgtgatgatatctactgagaattttgtttaatttggctaaacacgtctttgcttataaaacatgtggtgttactgtagttctactttatttttgtgattccatttaattatcttgttcatcctttattatagagggctgctagcaagtctcgtcatcgtagaaagaattctgttgaatttgactgtgacaaacttcaatgtgatacaaatccaaatgctgctccggcagttaaagacagtagtactcaaatgaaacccgatacagctgcttccccttctagttcgcttccagtacatgaaacagcacagagtcagatgaacgtaagggaagaatgggctgcagtacgaattcaaacagcttttcgcggttttctggtatgaggttcttactctatatcatctggttctttctatctttccttcttgttgatgcatctttattataatatttgaaaataaaaaagttgatattctataatgtgattatgacattatgtgagggatgaataagcatactgtataaaaaataaaatatatttaaaattaaagtggggcctggctctacactcacatgtataggtacataaatcagaagatgttgaaagtgaaatctgtgcttgagactgtataaagttaagtttgtcttacaggttgaaatatcaaatgtgttaagcattattttccttctgttgtgaatttcatatttgcaaattatagtattcctgttactgaaagaattaacctcagttacattacgttaaatgtgcctgttatttcttccaacatttggtttcctagttcaacttcaaaagtttgttattatcacacagaatatttggagtttatttatgactaacctttgttttgaaatcattcttttaaatgttttcctactacgttcatcatgatccttgtaacgcatgtttcctttaaacttccaagaaactgtcttccatgattgttgttttgcttctctttggcaataaacttgggcaagaatgcttttatagtggaacacgaatcattgaaacgctataagaaaaactgtgctacagttgttatcctctcgtgaacttttggttaaataattcaggctcgaagagctttacgagctttaaaagggttggtgagacttcaagctcttgttagaggtcacgcagtgagaaaacaggcggccataactcttcgctgtatgcaagctttagtgagagtacaagctcgtgtgcgagcaaggcgtgttcgtatggcattggaaagccaaacagaacaacaaaaacttcagcaacaacttgaaaatgaagcacatgtgcgagaaatagaagtaagtaaccttttattcttgtgttattagttacatttatgatataatctattgaaagaaagggaggtctcatggtctgttcttgactaaagataattttctattatgactaaatctagtaagaggatactttaatttcaaactattggtttgttcctcgaatgtgtgtgcatatgtgcataaatatatacaaattttgttacatagtcaggcatgcttacttttgaaattgccatcattaagaatatattctttgaatgaagtaagcaagtagatacttaaatttaaaaaccaataatatttaaaagtatataattagatttataacatgatattggctttttaaaattttataaatcttttatatactttcatgttcttttacctattaaaatttttatacatgctcattgttatgatatcttatcaatatttcttgataatttcttaagtaaaatatttttgatatttatacttaataatatattagttgttttcattgttttagtgaaaaccattatgttatttttattagtttttccttcattcatttgctcgcaaatgcatcttagaaaagtcattaaaataaaagagaaaaaagtatgcagtgt

SEQ ID NO: 561 - DNA, 4573 bp, Cannabis sativa
ataaaaacatcatcatatatatatctatattaactatgttctagtgttgtgaattaatctcatacaaatttgttgaaattccatctctaacatcttccatctaagtcatataattaatctctctagtatttgcataatgaataaataaatctctagtatgacattgataatgtacgagtgaataggaaagggaaaaggggagaatgaaattgtaatagagctagtagagctcatggcttgggagagcattgtgtctctccaatacccaatactataccttgttcacttcaatttccactatcaatatgttatctaatttcctctattttgctattgtttatgcttaaatgataagaaatttcctatcaaaacatctcattaatttttgcttcaactccttcctcctctttggttttgtatagtaaattggttttgggtcacttcaatatgttctaatggtgtaaagtcaatgaattgttgctcaaacatcctatcactaatagagtgtattctaatctatagccaaaatagataacacaacatgctcaattggtatttaacattgctttccaaagcaaatgctcatatccattcatttattattattgttattattggcaaagagtctcaaaaagggaacactataattcaagcaacctgagtttaacaccattgaaacaaaactacagagcccaaaaagttaatttgatattcttcaaaggaagtaatatagacaaagtacaagtcatgctttgagattagcataataagatattattaacaactactagctagttcttttgttttgcaagtttattatattggaattagagtgcatctaagtttctcttattttgatcagaaaatccaagcctttctctccaaatctcatatgacatcctgttatcaaagtaaaagaatttcacattacattgtgaaacaaagaagaatgtaaaatggaaacaaagaataaaaattcatagattgaaaaaataatgtgaattagagagtccaaattagatattaacatacatgtgatttcactatgtaaaatccaagtcaatcaacacaatcatagttttaagtgaagaatatttaaaagttgaaatcctctaacaaaagaagcaattatcaagtgcaaagtaaatttcatgttgttggtggagacacttagtttaacaaatcagaattttaatgaaaaaaaataactataataaatttcttggcaagatgatgtcttatgacccctgaagatcctaagatactataatcaaaaaacaactatcaaatatcataatcagaaataaatgactgatgaaccacgatctcggaaaccaatttctgaactgcaaagaaggctcacccaaaacagaaaaaccaatcgaaagaaggctatagaatgaaacttgagaagatataaacgttcctttaataatcaaaacagaaacagagcatagaaaacattatcaaggaaaaaaaatattgtcaacgcaacaaagacaaggaactcaaaaccccaatcacaagatcgtggatttctcgtaagaagacataaacccagaacagcagagtccaaaaccagcagatccaatcaaacaaaatatattacccaaataagcatacaaaatatattgctcattaagatcttggataaaattccaaatcaaacaccgtaaaccctaaaacttattacatagaaaacttattaaaaaatttcctaatcaagcaaaccgaattaaatgctctaccgaataaaatattaacacataaacaaacttctaatgttagatgagattttacagaggaataaatctaaataccttgtgtaaatggtcgatgagtaaatatggagcgagtgggagatgtaagatgagatgaacattgagtgaagagtcttgatttcgtggaagcttcaccgagaagatggaagatgggggaaacaatatcccaaaacagaaaaaacgtgattttctcgttttcaacttttttcataagatttgaaaactgattagatttttgtttttgaaaaacaatttaccaatcaaaaatagaagttgcattcaaatcaaataccaatcaagtttttaccaagagtctctaaccatcctaaggatgtgcttcttcatatgaaggaagtaataataccttgggtttgttattaatattaatgtaattcttcatgagtttattatactaaaaattttccatgaattattaaccttacaaccactcactcttttataattgggcaccaaaagttttgatactatattatgacatttcaatttgattagctcacttcttttatccatagttacaacataccactcatgacaaatagcaccaaatgaccatctttcaatgtttacaatttttttttcaaaaatcaagtgaagaaggtccttgggaagataaccctaatctgaaatttagaaaaacaaaaaaaaagaattattcatatatgtctatattactgactatcaacacttttaatcatgtagtagtaatggatatacattaaggcatgaacatatataactagtatataattaattatctgaatccatcttaattaatggtctttgaaaattaaaacaaacacggaattcattccgttgtgttcgattggaagtaattttgcatccaaccgttaaattaactcaatcttgatccaataattatgaagataacgtaatgcatacgttgatgcataaacatacataaatagtatattattcattacccgaatccatattgattcatgatctcaagagtatatacatatggaatggattttgttccttttataaaagagaaacggaatgcttcccgttatgtactataagatttgttttatgtactttggttaaggtaaggtagtaaatactctagactcggtttgatgtactttcacttccaaccgttacatcaactcaatctcgatccaataattatgaagaatgcaaaccctaattagacaaaatccagtccctatatacatacttctactcaaatcatttctattcctagtcaaatcaaatttaacttttaaaagtaaaaatagatcaagacaaaaaaagaacagcatacccttttctcttttctctcttttccttcaaactctattcaggatctgatggtacatttgacgatgcagcagatgcagcagcattagcagtatcagcagcacgagcagactcctcctcaagtctcaatttttccaatccgggtttcaattcttgattacaaaaatgctcatactcagctctatcaccacttttcttcttaacttccaccacaaccaaagaaggtgtcaactcaaatatttcagcagcaatagtcaacggccccctaacaccctctctagtaccctctaaactcaccctacaatccttcttcctcacactaaagctaacaactttaccaatctcttcaagtttagaaataatcttagaaaccgaagcactcgaaacaaacctcgattcctcctcagaaccctcctcaaacaacccagataaatcaaatcccctagagaaagatattatatcaaaagcattcaaactagctggtctaggcaaagaagctgttcttcttctcatctcaatttccgaatcagattcagacaaagactgatcagaaaaacaactcccatcatcaccaccctcaacctgagccttttccttatcaataatcccatcatcatcctcaactttacacagtttatcatcctcaatgtaaaatttaatatgtttgaaaccctttttaaaccacctattctccataatatgaggtatagtaaccctagtttcagggtttgtatcaagaacacgactaagaagccgagataactcgggggaaaaccatctagggcaacgaaattcacccttgtaaatcttcttatacatagccataatattctgatcatgaaaaggtaaataaccagccattaaaacaaataagataacaccacaagaccaaatatcaaccttagcagcatcataacccttcctagccaaaacctccggcgctacataagccggcgtaccacaaaaagtatgaaaaagaccatcttgacgaatttgatcagaaacagcactcaaaccaaaatcagaaactttaagattaccattctcatcaagaagaagattctcaggcttaagatcccgatgaaaaactcctcgagcgtgacagaaactaacggctgagatcaattgctgaaagtaattcctggcaagttcctccttgagtcttcccttagcgactttgttgaacaattctccaccgcgaacgtactccataacgaagtagatcttagccttggtagccataacctcaaagagttgaacaatgttagggtgacgaactcgtcgaagaattgaaatctctctcttgatatgagcaattaaaccgccttttaggatcttctctttatcgattactttaatggcgacgctttcgccggacttgatgtttttggctaggtaaacttttgcgaaggttccgtgacctaatagtttgccgatttcgaagcgacctaggagtaagccttggatttccttcttggtggtggtgg

SEQ ID NO: 562 - DNA, 3779 bp, Cannabis sativa
ttattcggaagatggaaaagtaatacatgtccagcagacaagagtatttagttgactataaaccacgtggcactcccacaacttggcacaaatttaggaccaaactactcagtaaagaagcgtttccgaaaaccaaaagcaaagcattttaacaaaacaaaacaaaacaaaatcgagaaatggagaaaaaaaaccaaacgatggaacaaagcgcctccatcaatctctcaacaccaatcagatgcatcgtcaagctcggtctgtcatcttatatatttagtattagattttgttttcctttttcaataaattaatagtcgtttatatttattgtgatatgatcccatagaaagtgttaaatttattgatattttaagagaaccattgcactaattaacacaaataaggttcttacatgctcacttagcttattagattaatgggtgtgttgtgaaatacagtagttggttttgggaggatcttgctggattcactgtacagtaattaaattagtacccattccgctggttaccaaagataaggtactcataagttcacttggctatttagattagattaatgagtgtattgtgaatttacaatagttggttgtgggatgaggatcttactgggttcagtgtacagtaattaaatttgtacccattacactggttaccacaaatcagatactcacaagttcactaggctatttagacaaatgggtgattgtgaatacagggtccgtatattttgtttgctttggggtaattggggtcagtttgattaatgtacaattatagaatgcattggcaaatagttttgttaatgctttttacaacatcccactttcgtaatttaatggagcagggggggcagcaattacttgcaagaatgaactagagacaatacatgatgaaaacctcaaggaggtttcattgcagctgagggaatccatgaatgtgcagtcgccttctggcaagattcttgggatggattggagcaaaggagctggagaatcagaaatttcatgcagcataaatgattttagtgctgtgccagcaatggattccagctcatttattgttgttcacggtgcaggttagttttgtggaaagcttcattcacgagttgaaatatatgagattgaataatgggtattcatattacatataattttacctgttgatccttagtaaaaggttctcaaaatcagacctcaaacttgatcctttaggctttagaaaccaaagctttgatatttgtgttttatatggtttatgatcatatgaaaacaacaatataggaacatctttatttgtaggattcaccacataagaaaacttaaattgaagatatgcaataagaagttttgtcttccacaactatggcctcaggttcttttgggcactttcaagctagtaaatctggggttcataaaggaggactgaacaaacctcttgttaaggctggttttgttgctacgcgcatttctgtaagacttgaatccttttatttcttgtgattcttttgaagttttaaattcatccactactaaacactggaaacttgcaaagttattaaagataatgatggataaagtagacatttatgacctaataaaagtcagcttcttgagttgctgtgtttctgtctttcaaaactttagtcatcttaaaatttgatctgcctttctctcattcctttcttttttttttttttttttttgttgaaacctttctctctcatattattcagaaataacaagatctctatacttattttgataatttcttgatggtcttacaggttacaaagctcaatcatgaaattgttagagctctagccagaggtgacaaaccatttaatacaatttagtgataaccatttctctttcaaattcactattttgataaatatatcagataaagtcaatttagtttgtttgcacttttgtttcagagggtattccttctgttggagtgtctccattttcatgtggatggtcaaccaatatgagaaatgtgagtaactttattactcttggcatagtattctaaaattactcatttttaccttttctgaagggaaagggtcattaaatgttttaaaagtttaaacacttgttattttgacagatagcttcagctgatttatctgcaatgactaatgctattgattctggttttgtacctgtaagtttttggcctataattattctgacacttctttcatcataattagcttacctagcttcttactgtttaaatcttttttatgctttgagtggcatgaaatacaaactaatagaaatccaccatcagaattctctttgaaattgaccactgtaatatatcaacagagctagagtccttcaataaagtttataaatgtgtggaggcatttcttgatgggaggtttgttatgagacccaatgcttcttaagaaaaacacacattaggggattggtttagtgtacttgggtttgatggcaaatcacattatttaattattgaaattggccatgctcatgtcatagtgtatacaattcttgaagattgcaacagaatacatatccaccttgtacatccttgtgtgctgactaatgcgcgaatatcttcttaataggttacccatggagatgctgtacttgatgatgaactggtgtggtccctctgtttaaattaatcaactctaagttctgtagttcaatcgtaaggatgtctagctcattgactttcttaatcagggatgcaccatactgagtggagatgttatcatacgacatctggcagcacacttcaagcccgaattcgtagtttttatggtatttactcatgagtaataacttgcactcgcatatttgacattttaggaagggaccataactttttattcttggaacaacatgaatggaccataattttgttctgtcattttatgtggattaaagacagatgttcttggggtatacgaccgaccaccattggatagcactgcagtgctgttgagagaaattggtaatgcatctttcaaaaccttgctttcttagaccaaaatgcgttttgtaatagtgaattgaatttgtggaattatttctcttacttaaaagaaaacaatgtaatcaacagaagtgcatgaagatgggagctggtcagttgtgaagccaacacttgagaacataagtaaaggttagtaaaagtcaactgtttttgtgttttatatcacaatactagatgacagtttcagcatacaaaacaacaatttcaaaatacccagttcgttggttatcattgcagtgaaaacagatgtagcagctcacgacacaacagggggcatggagaccaagattttggaagctgccatgattgcaagacttgggatagatgtctacatagtcaaggtaacttatgtttttcaaagaaacttgtctttgttttcctcagttcatatatcatattcggggtgttgaaatatttatcttcattacaggcgggaacaaaccattctttgagggcattgcgtggtgaattgagaggcaatgttcctgaagactggcttgggacagtaattcgattttcaaaatgatctaacttaaattgaataaaataacttttgttattcttttgtccacatgagccattaacttgatgaagcgcacaaaactcacggttgaaacttccatgagactctaaatctcttattttgtggggaaaatgagatgaagacacgtcaaattctgacattcatactgcaagcacgtacttgagttcactcaatct

SEQ ID NO: 563 - DNA, 4736 bp, Cannabis sativa
gtttaggtaaataaataattaatttaccgttgaggaagctcattatgtaactgtaaacttcaggaaggtcgttcttatttttcaatcttgccaacatctgaacagcaatctcatagagtcgtttccctctcaagtccttgcttgcagcaaatattctcttgacatattcaagttccttggatagagtttcagctgaccagtccttggcaaaattttgaaacacttctttcacaaagccaaacatctcagatgggtgatcacaggcaacacaatggaattgcatctcagatgttccttgtgcccccattgcactgcgcccatttctaatataagagtcacgtaacgcacaatctgcatgacaccaatgaagacaaacatcacacccaagccaactacacgtattggatgccatgtcaaatttcgagcagacaagacacatgcatgaactgcaaaaacccttcttctgagaacaaaccttgcaatcacattcatccacaggcagtggactacgacaagcaagatttctgcatctcaaattcataaaaatctcagccaaatctgaagatgatacactcatttcttgctgaagaaaatctggtagaccagtcttcagagcaaccaatatttccaactgtgtcctatgagacttgagtagcaactccaaggttatgtcaggccttttcagcagttctttctgtaaggcacctaaatgcctacgcttctctccatttcgcaacatctcacaaatgctatccttgaggcatgataagtgttgtccggtcatttcatgaaattttctagcaattacatgtattggttctgacactatccgggaaatgattgtctcaacaaattcagccccaccaataagaaattgttcctgctccattttagaactactagtcctatacaagctagcactacttttttctctcattagtcgcttcctatcaaaactgtaactagatccaagttcataagaaccaacgctatgagaaggtgacctgacattatcagggtgcctacagtgtcctgacaactgcttatggaagctaagctgcctttccaatccattacttaatgtagagctgccttcaagagccctaaggtgttgagcttgggcagaatgattgtttggaatggattgaggctgttgatgagaaccatttccgttcccatttgttaagattctttgacaaaaaggagcttcattatttttaggctcactctgagacagtgcctgccaatcaaccccctgaaaaaggggacgactgccaaccgactgttcaaagttatccatagaattctgggtcaaagaacagcttgggttgtgataaaatgattgagaacctgaaaaggacactgatgctgtcatcccatctgaattagtaggaaatgtattagtcaaggactgaacgctccttgcttgactagcagtaccccgagctgcaccaataggtaataacacatttggtaagctaagagaaagatcaagcgactcaagtgtttcatccttattcatattagcaccagattgatcagctttctcttgtcttctaataggacagctaccaaataactcaaagcctctggtgctcggtccttctataccattttctctgcaagttaaaagatctctaggttctctttcattccagagagcaacattcacagaatcggcaatattaggagtcaccaatacacttttccctttgtccttgaagctttgtgccacatattcagttacctttgacatatgttcctcgggcactccattctcctctatcacttccttgttcaattccctttcttcgacatcttcagccttagcttcaagatcaatacccttgtcattcttgtgttcttctacagattccaatggcttttccggagcgatttcttgcgctgcatgatccttacattcatcatcacccctgaaactttctttctctttctgatcaccttctttacatatctccccactgctaaaattttcactagccatattatcctcatgatttgccaaactatcagcttcatcagccacatctttttcttcagaaataactttcttatccacttccttcacctctccttcacatactgacttatttctattttccacaacagtagcacttgtatctttaccactatcaatctctctataatcaacatccattctagcacaaccctttacatcttccttttcagcttcaacttcaggagctgatacaggtttggcctctgcttcaagttcaggctctggttcaagctcaccttcctccatttcactgctactcctactcccactctcaacttgaacgtcctcatttttcttcacttcaacaaacttcgattgttcacttccaactgaatccttggaccaggtcggagactttgactttgacaatgatttcctatccctgaatcctcttggaggagacctaacccttgattgctcgcttcccgaatcctttgaattcgaccatgtcggggaccttacatccctaagtctctttcctctctcctctaatctactcctgctgccaccttcatcaaattcctttgccccactgccaaatcttcgccaggatgaaacactcccctctctccgtgagcggtcacgctctgaccgaaaccctttagggaactccctccttgatccacagaagctctccgacctatgcattgcgttcctgtcataccctctactattctcgctgccaccaccatctctgtacctatcaaaccctttcctcctatcaaaaccatcaaaatcatgctctgatcgctttcttaccatcctggagctctcccggtcatatttttcatacctgaatgattcagcaacaattaaaattataaccaatgatccgcaaagataatcaactatcataaattttacagctattaaagacatgtaaaccttaatcaaattaaactctacaatgcacaaaatagttttattttatctttttttaaaatttatatacatatgtggaaagtacaattaattctaaaccacatgaaattcaagttatagaatctacatgtagagtgaaaaaaggtaattacgtaagagtgaaatagaatatatgtacttttcagcgttggagagagcttggttcttgtcattctttccggcgagacccgatgatggatcaaatcctccacttttcgacatttcgtaaatcccaaagcgaactcactgagatctaaacatacccaaaattagaattacataaagaaagaaagaaagaaagcttagtttacatctaaataaaatatatatatctggagaaccctaaaaaaacattaatggcggaaacgaggagaaacggagagaaatggtaagagcagaaaattgttgaaaaaaggtttcgtttatattcataaacctaggcatgtaaagggttgttggctacatgtcatgttcagtgattgtggaacgaattcgcaggcccaaactaggttgcctcagctctttcttctccggcggctatgctagattttgaattaggtgaaagattcgaaattgaaaaaatcccatttttactttagaaatatgaaatccaatcaatcgcagtaaccaaaaatctgaaaatggtgattgaaaatcacagtaataaaattgatataaacaaaaccaatcaaaaccgtgattataagaaatacccagaatcaataactgaaaacccaaatcaaatcaagcaagtagtagaagaagaagattcaaaactcacctaatgacaagttgaaatagatcatttgaaagaacttcatcaaccgaccattgtcccccaaaaattaaaaagaaatacccttgaaatgagaaaaagggctatttcagtcaacgaagttttaactactgagaaagaggagagagaaagagagagacttggatacgcaaagtgcgtggaaggcagcagaagaggaaaacgatgactttgttgggaggggtgtaaagtaaaatgcggagaacactgtttcggggtgcgtacgacccccccacaagtgcacgttagcatatttacgtacacgtgtcgattttctatttgttttttgttttcggtggaacccctgaaacttcttgtccttttttgtgaaactttgaaaacgacgtgggtgcattaaataatttaaattactaagagttacttgtactcccgatcacagccgttacttctcacacgtggcgagatctaattatgagttcatgagaatatatggtttgactcttgcttaagactttcaacgtcacaatatgagtttgatttgactaataataattatagttatataacattattaatttattatgcccctagctgtgaatggagggttcagatttatttgtggggtcaaaaatgtagggttggagatttatatttttgggtgggctcacaatgggccatgactaataaataagatgaaatacattttatacctattttattttatttgttttaaattttacttttattttcatatttttttaaatatactatttttataaatgatgtccctattagatcccttaggttatgtaaattatatgatatacttaagtagagagtgagggtatattggcaatccactcaaaaaatgagtatattttaataaaaaaataatatgagggtatttttgattgatggatacaaaaaagaagtatttttcaacttatcccaagggataattacataaaatgatattttttaatagaaaaaaattaattt

SEQ ID NO: 564 - DNA, 4004 bp, Cannabis sativa
tataaagagcaaaacagaatgtgaatttggtagattttaccatcaaaaaatcagtttatgtgattaagtattaatataaagttgagttagtttgaaaattatgaatctctagcaaaaaggaataaaaaaaatattaatgtcgttgaaagcaagaaacgacactccgttctttaaactaacatcatagccgaaatgacgagaaacaccctatgtgcagaagccgcctatatgttggtgaaaatgaaaatagttttggatccacagagcaaagctgaagctgcaaactactgcaaggttttaggttaaaagggtttattagggtttttttagcagacaaaggaaggaaagcagtgaagtagaagccatgagcaggagtttgggaataccagtgaagcttctccacgaagccgcagggcacgttgtaacggtggagctcaagagtggtgagctctacagaggaagcatgatcgagtgcgaggataactggaactgtcagctcgagaacatcaccttcactgctaaggtaataagttttgttattggcttttccttgctcattttcaatttttaatgtctttttgagccttactcctgccttttttcgcgagaattcacaatgtttttctggatttggtggtattaatttttgaaattggtgaaagtttatgaaaaacctagaacaggactttaataaaccctagtttctgtactttccatgaaataagcaagatatggggattataagctaaaattgttgaatattggactttgagctgtccatagatgaaattcaattggttgggtttaggttgtttccttgatccggggacagtagtgtgtacttttatagctcttaagcagcatcattatagtattgaatcattgcttattttgtttatttctcagaactttacaagtgtgttacaggttgttttagacaggaaatgaaattttgcctacaattgtcgtataaaggcaatttcttttaaatttgtgtaaagaaaattgccctggcagttgctcaaactgtaatatatttactcaagtaattggaagttgagaggactagtagagaactcatttaagcgtataggtggttggattatttgaagcattccttccatttggattaagtattttaatcattaagaaagatagagcacttctaaccctgtactttttccctaacattgcttggttttgtttactcattctcaggatgggaaagtctctcagcttgaacatgtattcatacgaggcagcaaagttaggtatatataagttactatttgtccaacatcaatatctattaatgcatttgcaccctatttgtgccaatgtcatcaaaaaaaatgtgcagctttttacctttatcaatttgatacgaatcttttgcaggtttatggtgataccagatatgctaaagaatgctccaatgttcaaacgtctagatgccagaatcaaggtatcaatttcatggattttctttaaatgattatgttgttaatttctgcctgttctgactaatgttctccgatccatttgaagggtaagggcgcatcacttggagttggaaggggtagagctgttgcaatgcgggctaaagtaagttttcccaattccaatatcttaagagtgccccaatttctatacccaaacagcagaaaaatatgaaatttaaaagtatttgagtgtaagattgacacctaccatggattgctgattttagtttataatctgtcttgttaaacttacatatgtaacctgaatatggtgtatattttccattattgttcaggctcaagctgcagggcgtggagcacctggtagaggcgctgtacctcctgtacggaggtaataatcctcgccagagtatgcatgccttaacgatatgtaagtccattggtacccgttgcatgttaccatcagaatttggtgtaaaagtttagtgttagtttgcttgggaagaaggaaggaaagtagtagtactataaatctaatcaattggaatcgtgacaggctgctctctgtttgtatgcatgttttggatggtaaatctttttgactgttaaaaatgtatctggcttttcagaattcttatatagcctttatttaattcactatgcctatatattacgtactggttcgttcgtgcctaatattttgtcgcaagctcgttaatattagagaaatgctaaaaatattaacttcttatgtgtcaatattgctattgatccaattaagtatcgagtttcatataatttagtgtaataacttttagtgagtatcgttagccaatcgcaagtcgacatatctagaggtattagacactactagagtttaataacaatgcccttaatattactcaaaagcataaataatattgtactaatgattgtgacacaattaaattaggcatttaatgatgtgtaattattctcacatactattaaaagtttaagtgatcctgatttaaaattgtatatggttttataaattttgttaaggtatatattgtcaacaataattagtattttttgttcctaaactttttacactatcaatttgtgtcctctatagtatacgactcgttaataatatttttgaaatataacctttatagtaacgtggtcttttcatcatattttattcaattttatctaaaaatgagtaatgtggtgtatgttagttaataagtgaatgtaaattaaatatcttttattttttttttactttaatcgttaaaaaactaaaactaaaactataaattattataaaagagaaagtcttattttgttattcattaatgtaaaaagagtgaagggtatttaatttgtatttatttatcaactactatttattattttactataaaattgaacaaaatgtgatgggaggactacactactgtataaagttatattttgaagagtattattaaagagtcgtatactataagggatagaacattgatagtgtaaaaagttcaatggcataaatgctaattattcaattgttaaaattaaatgttgtgtataaaaactgtgcaatttgcataaaagttgtgtaatttgaatacattaggaataattgcggcataagttcccagaaagtccagtttgatgtagatatgttctaacttcaaaatttgacggtagtagtccccaaggtcataatttttattagtctgttactacctaagttaactgtttcgtttgtgtattttaaaaatgtcacgtgttgaaatattattgggctaaatcataattttaattacaaataatttaaaaaataaaaatattttttatttttcattttcttttattgttttttatttttcgttttttctccgacattaggcctacattgggttacatcttcaacatttatcctttttcaataacaaaaattcgttgggcctttatcgggcttgcatcggaccaggccaaaaattaattgattccaactctaaatctaacccaaatttaaaaatcacagacctttaaccctaaatttaaataaacatatcaattatttcatatattttaactctaaatcatgcaaaaaaaaaaaaaaaaaacttacctttgacgacattgccaatgaaaaagtcgttggatatgttggtcgttataaaaattagtaaaaaagtagaagaaattcaattttaggtaccttatataaaatttctttttctaaatatctaaattttaaattgtcatacaaaaatattagaataataattactgcgacgttgaaaatataaaataaatgcatcaatacactcatttttttttaggagaatttaatttaaatttttttatattttataagtgtagtacattataaacatatttttatatataaatatatataaaaattacattctgtaaatattttaattttaaaaataacttctttttaaaaaattataacctcttaatgaaaaaacatcttttatccatgaaagagtttttcctataagccaaaaataatatataaaa

SEQ ID NO: 565 - DNA, 4665 bp, Cannabis sativa
ttaagtgacataaataaatggtaaacatcttgcttttctgctatgtgtacagatttctgattttggttaatatttgtatgattttagtgtatatctccaaagactcttcttttcaccaattgcaagatttggggtttaatatttattcatttttaacattttagcaaattatttcatgtatcttgacttaacattttgactacaggcagaacagatatggattcattgcagaaaattgattgataaagattgggatttcaccaccccacatgaaattacaagaagaagtactattcacaaaccaaaaatttcacttcctccaaacacaaaagaagaaatttttgattgcttaagaaagaaattttttctatttaatgcttcagatagagaagccatcccaagttggttcttgaagtgtgttgagttgttctttggttggtcaaatcctcctagaagatatttgacagctacagctgttcaaacaatagtaagatctcattcaccaaagagaacaataatatcacaaagccaatcaatacaacatgatgtgccatcaccttcaccttcaccaccccaagttgaagcaccagaccctttttttagacaagatgttattgatttaacaccatcaaattctccccttgagccctctccacctaaggctcctgcagacttgccttcactagattttattgattcacctcctcctcttccaccatcaccacctcataaacattatgcttctatttctcaatcagagaaaaataatgagaattcattgaagagaatcatatattttggaactgcagctgggataatacttttagtcttttctatgcttctatgttgttgtttcaagaagagtgttagagatggacataaaagggatgagaaacctcttctcacattgacctcaagtgatttttctgctggtattaataaatttagaataatattatttttgccccctgaattatgaccgttatagagttttaccccttgaacttttctctgttgcaaaaaatttcttgcaaattgttgcaaatattctctccagttacattctgctcatttttttaaaaaacaatttgattatgtatctatgagttacaggtataattgcattccaatggtctattttaataattttaagttacatgaaatctaatttattggcattaaacatacgaattgtagctctaagaatccacatgcatattctcataattcatcatttatctgctatttatgtatttattttttgtttgatgaactgtactagagatatttgcaataattattatagttcaagaaaaagttatgcaactgaaaaaagttcaggggacaaaactctacaatggtcatagtttgggggaaacaaatcctactcattcattgatttatcttttcttttgtttgtgactcaagttatttcaaaggttaagggacatgatgatgatcattttactattttgcagattcatcacagaaatcaattagtataggaaatgccagcaacaaagacttaaagactagtagtggaaagttttctatcagtttgtcaatgaaatctgaaaattttgattccccacttggtgaagcaacatcaactgaagcttcattatcttcactaaaaaattcttcagagaacccaactcctccaccttctgggccaccgccgcccccaccagctgccacgcgccctcctccacctcccaaggctcgccctccacctgctccaccgaaagccattcctagtaaaggtcaccctcatcgcaaaacacacagtgatgatagtgatgctgaagctagagctcaaaaggccaagttaaagcctttcttttgggataagactgttctcacaaatcctgatcaatcaatggtttggaatgagatcagtgcaggatcattccagtaagaatacaatgtccattttgataaagattaattaacccgaaatggcatattaagaactgttctgctcacttttatctaaaactttacaggtttaatgaggagatgatagagactctatttggttataacaatgagaaaaacaaaaatgaagggaaaaaagactcaacaaattcagaaactcctgttcagtatattcagatcattgaaactaagaaagcacaaaatctagccattctattacgagcactgaatgtaacaacagaagaagttttagatgctcttcaagaaggtaatgagcttcctgtagatcttctccaaactctcttgaaggtccaaccaacatcagaagaggagttgaagcttaggttgtatagtggtgatgttttattactcggcccggctgagcggttcctcaagatcttggttgacattccatttgcttttaaaagattagagtcattgctcttcatgtgctccttccaagaagaggtctctagtgtcaaagaatccttaacaaatttagaggtgagacaatgtaactgtatgttaattaatttgttagaatttggtaagctgtacggggttccatctcaaaaccaattaacaatgacatgtatatgttttattgatttggttttggtctacacttgaaatggcaggttgcttgcaacaaactcaggagtagcaggctattcttaaagcttctagaagcagttctcaaaaccgggaatcgaatgaatgatggtacctatcgcggtggagcacaagcatttaggcttgacacactcttgaaattggctgatgttaaaggaactgatggaaagacaacacttttgcattttgttgtgaaggagatcatccgttccgagggtgtaagagctgcaagaacagccaacacaagcagaagcatgtctagtgtgagaacagaggattttgcagaggatatcaacgagggagcatccgctgagcactatcgaagccttggtctagaggtggtttcgggtttaagcaatgagcttgaagatgttagaaaagcagcagtggtagatgttgattctcttacgtcttctatattaaaaatggggcaatcattgcaaaagacaagaacatttgtaaattctgagctgaataatatgaatgatgattgcgaattctatcgaactctagctagtttcattgaacaagcggaagctgattcaacaaaactgctagaggaagagaagaggataatggctcttgtgaagagcacaacagattacttccatgggaatgcaggtaaagatgaaggcctacatttgtttgtgattgttagagacttcttgatcatgttggataaagtatgtagagaggttaaaacttcttcagctaagcctacaaggaattctaactcaaggaaagacataacaacaaagcctacatctccagaaactagccattcactctcagatgttcgtcgacgactatttccagccattgctggacggcgaatggaagattctagctcagatgaagatacttaatcttttcaactcatgaaggtgtgtgagcattttcttccatatatctgaataaagaaaactaaacttttaagtactgttgagcatattatagagcatgttaagaacaaacataatgaaatgagcattgctacttagcccctgtagacatatcgcatcacgattgactagccatactctttaaaagttattatattaaactatataggactcaatacttaattagaccaataacgttattgacacattagagagtgttaggcaccactagtgtcttttagtattgctctaatgaaataaaattaatgttaaaatgtactactagtgtctagcatcttcttaagtgttatactgctactggtgcaattatgtatcagattccatataagtggtattaggcaggcaccactaatacttaatagcaatgctgatgaaataatcaacgtgaaacattgatgttatctagtataatagaaaagtcaacagagatcagccttaaaaattctactcaatatgaattttagggcaactataaataataattaatgttgtatttggttgctgcatatatttcaggaggggcttgaaatttggcattatggtgacaacatgaagactttgttaagcaactagtccccatgtgtgttatttctatgatttaggcaacaaaatatgaagcttcaattccatttttggcattttttcttcttaatataaccaagtcccaattcatggaaacaaaggatttaatgtggaaaagccataagtcccctatatcctaattacaaccctttgtcattttttgccttaccttccacctctttcattttatactctttgtaagaacaaagtgcaattagtttatagtttatttttggagtatataacatttttctatgaaaggataggcttttcttttttatttattttaaaaagggtcccatttcttttctagtccttattagaaataaactcaaaattacgaaaaatacaataaggattgcaatttttctatctttaaaaactcaattaaactaaaaaaagatttatacgttagaatttttttaaaaaaaaatttcatacgatatttgttatagttataatattatttttataaaaaattttgaatagtttatgatactgaaaatagaatttttaatattttagtttataacgcgtgtttaaaaaacttcaatcttattttcaacaaagtaaactaaaaatttacaat

SEQ ID NO: 566 - DNA, 2005 bp, Cannabis sativa
tcaagcatggccccataagcaagatcagttcctgaagtaccagaactccaaatctgattacctttggggtctttgagaacaagcccaagttgtgtcaactcgattttcgatccttcttccacaagattatccctgttggctgaccagacaatagttctctcgggtattttattgaaccaaatggctagtaggaaaccaccttttccaattttctggaaaccaaaagcgaaatcaccagatgatgattcccaaaacaagtccttattagttgcagtaagaaatgagcttaaagatatgtttttttgagtttgggcagtggaggaacatagcaacatcatgagaagaagaaagatgtagataatatatggttgtgttggtgatatagccatggttttctcaaacttaagtttctgaagaaattagttagttctatgtatgtatgatcaaatggacttgttatgaacatgttttaatgtttccaaagtcagagttagaattcacctaacatgtttagatttttgttttggttgacttgtgttttgtcactactcactactaattccttaaaacacattaaccaatgctttgtaatcttctttttgttgtagtggaaacattggatctcttgttgaaaatgtcctaaaaaaaattcatttgtcgtttgttgtttgttgttttctctaatgatcaaaagctagacatattccaatgaagactaatcctttggattaaaaaagtctatttcttcattatcttatgctagtttgatttgagtaatacctgctctttcaacaattaataccttatatacatagaatgaatcatcatgttttttataagagaatctacttatatattttcatgtttcaataattcaatggctgaaataaaaaataaaaaacaaaagaaaaagctttgttgttaacatctaataacattatgtttaggtcggccaaagctaattacatcatacaagttagttatataatactttatattaattttcaaccttagagaatagaatgtcttctactctttgtactctactattttcatttcttaaactttgtttatgtgttgtggtcaaagtgggcgacacagcatgttggctttgtcctaccaaagatttcgcctttggatttcaaacaaatgcaaaatgatcacttcttgctagctatcatcatacaagttagccaccattgtttagtatatgctgttaactaatcgattacaataaattggatcggattttgcagttttttcttctgcagtacctcaacgtgacataagtgtgaaaggggcttaataatcagttttctttttagaagggctaaaataatttattttggctttttgaccccatattgtagggtggatctcgaaatggtgataatcctgctccaaaaggattcaaagttgtgttggctcaacactttggctttgttctcacaacttctcaaggtaatcaaattctatggaaatcattaaataaaattaaagggcttgtcaaattttgtaaggaaattctatggaaatcattatttatggctccaaagttcagtagctcatgtcaattaaaggcctgcatgttcagtagctccaaatttatatatgcatcatcatcatcaacattttttaattcatgacaaacgacaatgttcatgagacaacaatccaacatatatactacataataacatatgaaacattgaaattgaaactgtattacagagattattccaaatagtaattattcaacaaacacacactggcagagtgacaaatgctcctctaaaggttgagttgattgtatatagcattgacactatcctctgattctgcattcattcacaataatatgccaatacagaaaatgcatgagtaaataagcaatgaaataacacaagatagatggatgattagaaatgtaccttgatcacagttgataaatacacgtgatggcacgagcttgacttgatcaaaatcgtctcctccttcctccatc

SEQ ID NO: 567 - DNA, 2743 bp, Cannabis sativa
aaacacccctaagaggattgagttacttaacatgcatctcttttaacttcaccattccagagacaagttcaaacttctgtacaatcttactctattatttttaagattgttctgtatgtgaaagcttcagaggttcttctactcttattttacatgttctatgtgtcaaaactatgcagaggaagtcactgcctgaattttggcgggatcgcccccttgtaagcactctttatgtttggtaaccttatttcattaccttctgaagtgtcacaaaaatttggttaggcacttttaaactattttcaatatcatattagctacgtaagaagcacttgtattttcaaattattattattttttttaagaaatgtgataaaagttttgtaagtttaattataagaagatttatgtcatttgcagccagctgatggatccaaggaacataattgtatacccgatgaacattatgttcagacattactagctgtaagttattattctacctcaacttgtgagccttatcataatataatcctttcagagagtcagtttaatgctccatctctcatctattttttttttctgtttaatataataaatgtctactgtcgttatatccttaaagatttaagaagcctctggtttcaaattgcagcaagaaggccatgaagctgaattaacgcgaagatcactgactcattcgtcatgggatctatcatcctctaaagaccgtgaacgtcggggatggcaccctgttacttacaaatattcagatgctactccggagcttatacaatcaataaaggtatgccaatgcactgctaaatagtggaacagtcaattttttgaacttgagtatttatgttgtaatagtagttacttctttcggtactattaggcaacagagcaggaagaaacagtacaagccacctctagcttagactgctgcatacatacattttttagatttgattgattatggcagtgcaattttcatcacagaagagtataaaagcatacaaaaataacacttgtttgttttcaggagatagataacatctactacgagactgaataccgaagagaatggtgtactagcagaggaaaaccagctccttgctttcttttcgcccgaaaatttacaaggcccgccgctctgaggctcgtcaatacagtaagtttgacatcttataacccttgaaatgcagaaatattgttcttgtataatgacttaacattgttatttgtttcttacccacatttgaacaagttcagtaaagttaattctcatgttttacgttgctctcttacagtcagctctggagctctaaatgaagcgacaattatcgcctaaccatggaaaatcgatatgttagcgtaaaatctccattctttgaaataaagtcatgttaaataagaaaagccctatgtctttactttagaattaaggggttgtttggcagatgttattcatcgtgtatagttttcttttttccctcgtgaaatatagaataaaagtatttcttttagatatatttttgttgtgctagctagaggttattgtaacatacagaatgagaggtaaaaagaagacttgtgacgttttcttcctatattcatatagtaatgatatgtgcacaattaaattacgtacaaacttattttagacgaatacaattggttgagtttttttttgccatatatcaatgatactctcagctcatcagtctggtcaacatgaaattttactttaatgggatgattgaaacaaatatcctttcaaagctctaagtttatctctagattctcttaattctctactttatatcaaacatagttgcatgcaccattgagaataccttatgtgaaagtccttatcaatcaggttataaaccattttaaataaactaattataaaactaatgtatgctcaaaggttaactcccttaaaatgaataataaacaaattcaagatttaatcaggtttgaagattttttttctccccccatttcattactactgtaccataaaatttctcatttttttctaataaatatgaattttatttgatttattggtttcgcatttgttacttttttttagtaaaattatgaatcactttattagcagattgagaataaacatcaaaaacacagttcatgtaatcgtttttacattcctcaattattaagccaaaagaaaaaagtattgtaaaactacttaaaattgcttgaactgccacacaagacaatcaaattcaagaaccacctgtggccatgactgcatcttcgcatctttatccaacttgagtgccttacaaatgccaattgcttcagccaatcctggagcaacaacatcctctctgctacaagttcgagcttctaaaagatgcacttcatggtcctaaataactctccaaaacccatacaatctttcaactttaaaaattacagcatccacatttatcttgacttcttgcatttgatgcttcacccataaatatgcaccattagtcaccaactcagtcgataatacattaccctccaccttaggactaatattactccaaaccaatgcattcctagctttccaaatagactatatctatctcacaaagcttaatcttagttaccctcccactcaactaaaatagccaattaaaaaaatcaatggctgtaatgacctcatacttagaatacaggatatgtaagctaattaacattaattaattaaattatatta

SEQ ID NO: 568 - DNA, 1832 bp, Cannabis sativa
ccaagctggtttgtcccgggggcggccgagaagaggggcttcttataagcactaagaatcttaataaggtgctcaacatcgaccagggagcgatgactatgacggttgagagtggtgtgacgcttagagacctcataagtgaggctgcaaaggccaaacttgctttgccttacgcgccctattggtggggcctaaccattggaggcatgatgggcacgggcgcacatggaagcacattgtggggcaagggaagctcggtgcatgactatgtcacggggcttaccatcgtcagtccaggcagtgctgtcgatggatttgtcaaagtcaggaggctcgaggagggtgatgaagaattgaacgcagccaaggtttcacttggtgttcttggggtcatctctcaggtatgtcttaagacatttagcataagcatattggtgtagattttaattttttttaatatatatttccttaaatttaaatatgtgaaacacaatattaatttaactatagggtgtattgagttaggggcttaaaatcacttctaaattatacaaatcaaaataagtattagaaatatcacggtaccgatggggtatggcaaatgctcttatttttattatatattttattttttgggggcagggttggtgcagtttgggactaaattagatagtcacgtacaaacagagatatatatacatatagatatatactgttatatatatatataaatgattgaattgaatgcaagttatatatgggtattttattgtcaaagcaagctgtgtaagcaataattgggttttttctcctacttggattgttttttatttaagttatttatgttcattttcgttttgggtaaatttctaaaattatacacacggtttctattaaatgaaaattgttgaaccaaaaaaaaaatgattatcagaaaaagttactgattagtgttgttcattaactaattattctaagctactttatttgattttattcccagttaatttttagttagcaataaaacttcccttataataaaagaactctactgtattaatttgttgtgatctgaccttaaatacttgcctgaacttgtacgcatcattgaaaaatcgttggctctaaatcgaattaagccagatttgagagacttggatcctaatataacgcaaggtgaacatgtgagtaaaatctagaaaatgcatacaaaattaatatcatatatataatattattttttttgtaaggacaaaacgatataattatttatttgaaataaattacaaatagacaaaactcccgaaactttttcgggctcaaataatgtttatactctgttgactgaattgaattattagaccatgaaaacagtcgtaaagggggtaaaaatccaaatttactcgtgatattttagacagttgacatttattcgtaggacacagacacagtttggaaaaacttatgtaattttgtatctcctctgaagttgtgatcttatcttaaagttatcaattaaacaaataccgttaattatgattacttggggtattgatttgactacaggtgacatttaaacttgagcctctatttaaaagatcaattacgtatataaaaaagaacgactctgatttaggagacgaagtgattagttttgggagaaaacacgagtttggtgatataatatggtacccaagtcaggaaaaggcagtgtatcgagtggatgacagagtttcttccaatacttctggcgatggtttatacgacttcatcccattccgccccacctcttctctagcacttgcacttatcagaaccacaggttaattaat

SEQ ID NO: 569 - DNA, 7999 bp, Cannabis sativa
agaactcaggagagattagaaattcatgtcgcaatacaagtgaatgaagaaaaagaaaaaagggcgacttgtcaatacattgaatttgcactatataatgattcttctcaccattgaggataacttaacctcatctgccatgtatgttttctatcatgtatactagttttcttaggtggttgaactatctaattccagaaaccctgaagacatccacattccactgattccagaaacttatacatcagaacttgcttagacagaataagtattgatagtccaatctcaccttcttaaagcactggcgcagaaaatcggttatgtctggagacaagctatcaggtattggaggatgctcatcctgaaagaaaagtaaacggaaaaatgaaagataaaaagtcttgaatacactatgtaacgagcaagaaatatcacattaaaggtattttaataaaactaaaaaaaatacaaaacaggaacatgttcatgcatatcatatcagcattcaacatgggaaataaaacgcgataaagagcattatacacagctgcctttagcaaaaacaaatatggcaatagttaagtaaaagactgattctcacacctgaacaatgcgaaataaagctggcatgggctgtagatcatagtaaggaggcacacaagtaagaagttcgatcacagtgcagcctacactccaaatgtcagaagcagcacagacccctgacatttcaatgacctgaaacagtgaagatcatgtatataaaaactagttgtgaggcacatgcaaggcaataaagcatgtgccaccaatcatatatccaaatattttttaaaaaatactcattttcaaaataaatatttgaagaaaaaaaaatatagatgattgttagaatttataaattactttacaaattatagaaaaattttgatgttgtgtttttccattgttagtgacaaacaactatttcttccttttaaaaaaattatttacaatataataaaaatacataaaaggaaaaaattatatgactaaatatttgatataatcaaattatattaataatattcttttcaaaaattatacatctcctaaaatatattagaatagataaaaccaatgaaatggttgagttatgagattttttgttttgttagccaagtctaaaaaaatagtagtaatactaaggcaacaaataaaaatacatggaagtcatttttaaagataattttcactaaaagtcaatatatataaagggataagtttgtaaatatatagaaaggacaaatgattttttatatgcttaagggcatattgcctcatagtctatgtaatgatctgatgattttcaaagatacaaaaaaataaaaaatataaaagtaaagaacaatatttgcattccattcatttaaaaatatcaaaaaaaaaaaattattcttaacatttttttaagtttccttttttactttttgtagtaattttaaacattgcactttatgttattttgataattttgaataaaataatgaataatttaattatttctactttaagagatgcaaacttttatacatctttttttttttttttttttgggtcaaatattcaaaatatatttattcatatgtattttttagaacaacttaaagaaaaaataagtatatggtgattatacaatgtacccctataaaaggggtgcatcgatgcactcctgtctgttttggtatctatgagaattttttagtccaatttttttcagaatcgggtacgttatgttatttaagacatcttgcaaaattttgaaaaaatttaaaataatttacaacatagaaagttatattcaaataatctacttcacacgcgtataaaataaaagagtcaaacgtgtaacaaactgtttgaaccaggcgtgttaaattttttccgaatttctcaaaaaatttgcaagatattttaaataactacaatgttgtgcacaaccatgaaaaaaaaaattagactataaaattcttctgaatgccgaaactgataggcgtgcatcggtgcaccccttttataggatgcatcgtataattttccaaaagtataagcctttaaaaaatattccatcaatttttaataattatggggtgccttaatcaaattccgaggtgcaaatataataccacaaatccaaacaaaaacttatacataatgttccaaagaaaatattcttcatgacattttgtcaaagctttttcaaaaaaaaaaaagagactgaagtcaaatgtctttgactgacctccacccaaatttattagaaaacatattgcaaagaaacaccatggttacataaaacttgggactcccaagaagacacgaaaaaaagaaaaagaataaacaagaatttcctaaggaagtgatttgagaaactcaatacctgactgaccactagaacaaaacatccagtacaataggttatccactttctacactacacaaatctaaaaaagaaagctattcaaatatcttgatttaaaagtccaagttgctacccaaaattttatctttctcgcagccctctactgcatacctcacctcaaatattctagtgtttctctcactgcatgccgcccacataatagctagcactactgccagccacaatttcagcgtacacctacccactaccagtttgctctcgatcatatgcaagccagagggcaacaaaacccaaagaatcccgaattccaaaagtattcttgaccatagttctaagataaagtacactccacaaataaatgattgatggtctcccacaccaacatggggatgacacgtggtgtggtcttctttgttgcaatttgtcgtggacattcaattctcctactagcgatccaaacactttcacctttgcaggaacacacaactcttccataaagccttggcctagcctacttcagccttccactccactgggctctgaactccgaacacaactgtcctccaccacattaatcagagtaaagtgctctaattgttgcacctttgcagacttagcacctctcttgtctattaggaaccttttaaaattaaagttcatatttgtgtcgaaactaactcccccacccactttaaccaccatatccttaatgcatacattttgagccatagaaattactgttaagttagggaatgaatttcaatgttgagtccccaatcaaagcacattcccaaaaccaaattcaatccccctcccaaccttaaaataaaccaacatcaaaaaaccatcatataatgttgctattcctctccaggggcctttagatgacaatctctcaccttttttggagtaccgcaaattatcagctattccatatcgacttttaatgactgtcaaagaaagtttccttcaagaaaatctacacaaccatttcatcaacaataatttgtttctcatttcgagccttccaatgcacattcctccttcaactcatattgcattccaagttacaaaatgatcaccccccaaaagatctccccttcccatataaaatctcgcatcatcttttccatctaagtgataattgtcttcagagcacaaaaaagtgagagtataggttggtagagatgaaagaacggactctatgagtgttaatcatcccttctagacaagaataaacatttccatccatcaagtcatttagtttacttcgccaagattggctcccagaactccactttaaacaccaagtgactagtgtctttacttatgtactcttctacaacctaatttgacatcaaccttctttcttgtaaaaccaaaaattatctagtcaaagtttgcaatccctccttttagagaataaagcacttcttatcttccatgaaactatcttcatgagggattcacatgcttcccaaggatgagaaatgattgaatggtaataatgattgaataagggttaatctttctcctttaaaaaaatatgttgcttcatcttggaagtctttcaaaaaccatacttatccccgactcccaaaactcactttcaaaggactatctcctacggcagccctaaatactttaaaggtcgatttctcatatcacaccctcatctctctcttccccttatctctctcttcccactctaatgccacataacatatttgcttcctttactatatccaccaaccattccataatatcgacaaaggaaagttgacaaaggatctcctctagaccccttgaacctccccctagccccccgttggtgaagataaagaaaaaaaaaatctcgaacaccatgcaatccacttcctctatttgttcccaatattcttcttttccatagcaaatccaaaaacttccattcaaatgcaattatgattatgaggtgtggaacttcttggagtttgtattggaaaaaaaaaaaggaaaagaaaggcattgcttctttacaaggtgtttatatagtttgtaaattcaaggttggcaacgatgaaaacattagattttgggaagacgtttggtcatgggaaacaccacttctagagactaaatccaatctagcaaggctaactgaaaagataaatgattatatttctaaaaattgtgtagaagatcatgcctgtagctagaatttttcacattttagatacatgaatgaccgtgaagtcatgaaccttgttgatctaatccatacacatgagatccacaaggtttgataggtgttagaaaatagaaagctttagttacgaaattcctcaaaagtttctcctataattctacattaaatgtgttagtaggagttagttatagtcattatcctcactaaacaattttgttttgcaacttgggagtcaaaaggatttgagggtctaacttttcaacatcaacaaatggatccacaggtcaaacctaatcattaattgtgaaatgatggggacgacaaaacccgtgagtgcataagattctattgaaaacgaatcctaatgattcattgggtaggatggcagaacgaaccaagaactatttcactcataaccagagaatggggcttctatatatatatatatatatatatcataagttggtcttaaaaaaaaaaacttgcaactgctataccaaaccattaaaatcatgttcctttacttaagtactgcatacctggactaggatttcactaaaacatctagttggttataaattttgcagtaatattagctaaagtgacctaattttcataatataggtcatattgatccagttttgatctgataaacaacaacggtattcatataggaacaaacacgaaacaaatacaaaaataaagttgaaatatatatatattacaaatatatatatcttgtcacttaagtatatagaaaagtacctctggggccatccaatatggtgtaccaacaacagaatgtgtgttaacatcagcctcagttaattttgttgctacaccaaaatcggcaagtttcacaagaccctgggaggatagaatacatcattggaaattgtacaagaatgcacaaaacaagaatgtaatttctaagactacatcttatatataattgtggacccagcattgaaaacatatacaaacacagtaaaaatttacctctttagttgttaatatattagcacccttgatgtcccgatgaattacaccctgttcatgtagatataccaagccttccaaaacctataatcattatggtagaattatataaaagaagcggggtaatataaaataaactgcaaggactttgacaaacctgtgaaatgtaaactgcaaccagtgattctggaaagggcccaaatttatttggcttgataatgttagctagtgagccattttccacatatctacaaatttaaaatgagtaaataataggacttgccaatatacaagttgcacaattaaatatcattaacaagtttaaaattcacttactcaagaattatgtggaggtgactcttagtctttaaggatccaagatatttcacaatatttttgtggttcaagttctgcaaaagacaataaggttcaaggtagactaactattagtctcttaccatataccttccaagaatgctagttgcggaattcaactcgattaaagtgaaagaatataagaataaagttatagttatccatggtgtttaactaatatggaagtcctcagttcagaactcaaaattttcattgctatgttacagcctacagattttggcatgcatcagccgaactttctaaattgtgagttcaaaactgcataaagaatacatattccttgagcaatcaggatgaacataccttcaataaatctatctcttgctgtaaaggtacgtggtaggaaccgtgggaaagccatcaaagaaaaaagacactcagttagtcatgcatagattctcaaaataaacagcttataaaatacaaaaaaaaatattaaattattaatcatagatgtattcgtaaggacaaagataaggagctatgaaagcagttttttaaattgacaccaaactagttcttcaattaagacttgtttggtagttaaatattggaataataacaacttttatattgtattttagattaataaattaacattaagggaatcgcagtatatattggcactatcaagatcacaaaagagagcaaataaaaaaattgtagagacctacagttgtttactaatgaatatcttaaccctcttcatgtcaatacttctgaatcaagtgctcatgctaactttagttcttaataatatttccagctttctaatttagttactttaaactaattttgataagaatttatggctgttcaccacctacctagccaagatacagagcactataatataatttaactctagaaaacaaacatgaggaaaacttgacttacaaaaacacttaaccagttaactccagaactttaaagcaactgcatagccttgatcaatttttagagattggtcataacgaaacataatagacttctaagtttgaatatctctcttcgaattagcgcaatagataagatacaagtaagaaaaaaaattcagtaacacacagggtgctctgatctaaccattataatattgagatcctcctgggcaatattctccaaggaaacttgtttaattgcaacaaagtctccgttctccaaatccaaacccttataaactcgaccatatgctcctttgccaatctcatctccaagcatctaacaaaaattacatgatccagtaaggaaattcagttaaataaaacaaaaagcttttcgagcataaaacagtaagcaaactttttggttgtttcgcaaaaagtaattcaaaaaaacaaagtaagcaatatagtgatatgattgaatgatctgaattatcattatttcaccaattcaagtccactactacccacattctcattttcacttcttcaaacacatttcagacaagaaagttcagtgaattttcaaaacttaacatcagtattggaagaattaagtaattcaacaacaataaaagaaccctgaaacgctacagtagtgagaaacattctcaattcttacgtatttgttgtcaagggtcttgttcttgggaaaatgagcagacggcatttgccgagacatctcggctgatttggactctgtcctgctacgttgtcaaaaaacgaataattggctcatctgcaatgattgcagaagacgtaaatgagtaaattagggtttcgatcggagaaatcccgacgggagaagctacggctccggctccggcaccgagcacagagaaaaaggagaacggagaagagagagagagaaatgtgatgagaaggtataattggagtgagggaaaaggggaaatgggttaggctgttctgagtaatactgacaaagacttaacaaaaaaaattaaaaattaaaaataatctatcaagaaaaatataaaagaatagaatatataaataaacacgcatggagcatgtgggtttatgtttttttaatgg

SEQ ID NO: 570 - DNA, 2460 bp, Cannabis sativa
agaaaatctatgagtgtacaaagcatatagatgtgagactttactttattagagatcatgtcttctcataagaaaaagtgagctcatcactaaaattccaactgatgataacatgctcaccaaagttctaccaacaaccaagttttgtcactgtctgaagctattatatcaatcatgtaagtcttttagttgattatgagttttatgtttctttcacatctcgtggcttattgtctacataagctcaggtcttaattttttgtaacatatagctttgtacagattcattttcataagaatacaagagcaaagttcattaagtagtgttctctatagtgttgagtgtaaattcaattgttcttgactgagtaatccctaatgtgtgagagatcacattgatgattatatacaactttagatattagttgtgatggtgtatatgttgtacttttcgttgttgtgacaaggttccacacttttatttctttaaaattataccgaaaatgtgtcattcgtaattttctgttatggattgatcgtgtatatattctgtactaccaaagttaatgtatattatttacccaacaaaaaaattaatgtatatcattatataaatatgtaataaattcaaaaagaagattataaaaaaaaaaaagtgatggtggtgatgactgcatgctgagcacgtttataaagaatcagaatcagtcactataccacttaccatgtacacacactctccaaaaccaagggatggtaatctattaagaagatgcataaataaataaagcataaatatatcctcttctgtgtatggatatgtcttctacagtcatgactttcatatttaatattaataataaacaattattatatatattaatagaaaagaagaacaagtgtactatattgattgaagtatatgctctaataagtactgaatcatcaatctgtacaagtagataatgaaataaaataaggatatatatatagcaaattaagattgggaatattttcgtctttaaattatgagaggatattctcttctctagctagctccttatacgtacttgcaataaatacatactataatgtatatatatatatattatttttttaaaaggaataatcaaaggtatagtttgagaaccatccatataataatccatgcattttctctaaaaaaaaaattcacttatacataaaataatttctttatttttacattaattataaattataaatatacaattttatacaataaatattctaataacaactcatagagcaactcaaatggcaacccaattcaatcaatccacgttgggatcccaatgcatgtaacaactcaaatcgcaatccaactcaatttttaatttatattacatttcgctcaataacccaaatcgcaaccttaatcaattataacttaccaaagggtaattcccaaaaagaaaatacatctatataatccatccatatttatatgtatatataatacaatatatattatttattttatttttttgagaacaaccatatatattattaaatactacataaaagaatcatatgctcggaataatcaatttcttacactcgtaccatggaagtttgaaattttctcttattttctcgatcactaacatagtatatatatatatatatatatttatatatttatatgcacaataattgtttcacataataattaatgattatttatttgaacgaaaacaattatatagtatagttcaaattcaatattgatcagatgagagtggcatcttatgctcaccgaaactcaattcaatataaaagcatatttcttttttatcttggagacgcgtgacataaatgcaattgggatgtggtttattgattagtcctctttcctgttgtaccttcaattaatattataccattttttatatctatgcctcaaatatataaatgcattatcatttttatcaaatactatatatattaactacttattcttgataaattattataataattctcatatatgcatgcatgctcttgaagctgtatacactaaaaaaaaaaattgacctgggatggctggatgtgttcagcttctctattcatcactaacaaaaaagtttactttagagtttagactaaatcttatcttacataaaatttatgtatttactataatgtattgtgactaaaattactaataaataatatattttttattgggcaaaagtcagaatagatcaataattataaattcttgagttatttgtggttacaaaataatatattttatgaataaaagaattgtgatgattctttgtggtggatggtgtgtttattacttgaataattaccaagctgggaatggagtggaaactgctaggactccctttgttaaccatcttcagcagtagagccgcccccttgatgaattgatcaagttgcactcgatct

SEQ ID NO: 571 - DNA, 10028 bp, Cannabis sativa
aaatagtacggttcagtttcgactcggcccaacaaatgaaaatgtctctaaatctcaaaaccaacaattcttttctttgatttatcaaaaaaacaattcttttctttgtcgaagaacaggtttttcctaaatgccattttaactcgtactgtaaaactgaagagtgaaaaccgttataacaaggctctgaaatgtgaagcttctcaaataaaattttataaatatattaaataatgacaaaaccgatagcgttttaaaaaaacaacaaataacaatatagcaagctaagaaagaataattatcatcatcttcaatagagtttcttcaagaataagcatagagtttacttggtgaccttggcagagcttccctcagcctgaggagggttaagctcatcccaagcttcaatccaagtcaccatagcatctgcaagcttgtcgaagtaaggatcaaccttggcaagcttttccttgacttgcttggagagttcaatgtagcacttctgtacagtggtacagtcctttggaagtgcaacgttttggaaaaatgggattgtttcttcttgccagaagataccaaggtactccttcttaaggttaacaaaaggattgctggctttgctgtgccatatgtagggtagaccagtcttgactccatatcctaaatggtcacaaatgacctacaaaattcaccaatttgatttgtgtaagactcttgggaataaatcgaaatgatagtaatgtctttctttctcatgcatagtcacgggagtagagattatgtcacaaaagatttgacaactcagcagcctccttaaagcaaaaaatggggtcaaatatgagggcaagcaagcatattcctgaggctaacaaacaaagctacagaaatattctgtaagatgggacacggcggctacattaccacgaagaattctagataaagactggtaaagaaccactaaactaggctgagcagctaagaaaattaccataactgtatccgagattttaacggcacaaaattcttaatggtaggagttcaaaatggttttatcttaacagctcataataaaaagttaccttcatgcaccagccagcccacatgtcatcgtatcgtccgattggctgaccatcacccatgagtccaaagtacatagctggtccaatgagctccctgtcgaatgccaggttcatgccgcacatggggaaaagggttgattttggtattgtgagaactgcatctacatacctgaaaaagggaaaaacttaaacgggtcaaccaatttggcgaaacttataatcagtttgaagcaagaataacaagtctatactcatgcgtacctagtgtttctctccctaggcttgaccagttgagtaggagcatcatagtcaggaatgttaagccagagaccgtgagacactgcagttataacaccctcccgtaggctgaaaggatatccacggacgaaatctgcaccctctctgtatggatcataaagggtattgaaaaatgtcggagttgatgggctcagcagattctttatatgctgttcaagtgcattgatctctttaccagatgggtctttggcaacctacacaaataaattataggagaaagaaaaactaggtcagtaacaaaacaaataaccaaacaaaaaatatattttcacaataagattgggaagagctctgtagatctagtcttattcgcagtagtaacaataagattgggaattacacgaagaaaacaaactgctacttcactttcaacagattatacaccactttcgaacttcaaataaatcaatatgcatatatatatatatatatataaagtatacatatataaattcatcttttaagactgaaatcaaaaactgaaacagaacatatttggaaactcgccagaaatccaaagcagcaagagttaaaaccatgaatggcggcaaaaacaaagaacaaaaaatcaacttttttctacccaaagaagcgccaggctctcatatagagggaataaaagaaacaacagaaactaaagcgctctatttccttccttgaaaaacagaggttctaaacttatgtcaatgacataaaagattcctaaattataaagccattaaaactcagttctgaaaagaagaacccaaagaaaagatttagcaaaagagagagcttacgaagcagtcgtcgtcgattgtgaagatgtacttcttcttggaaaccatataaccaaaacagcgacaagcagaatccttgaaagaaatgcaagaggctttgggaccaagaatcctgttaatatcgtttcggttgtagagctcgtagtcgaaaccctcggggacattaatgatcttcgatggatcaccgtcttggacgatgatcaagtggtagggctggaaaaatggtcgccacatctccaagaaatcgaggttccggatcgtggggatgacgatgtccaactcatctttcaagatcggagtaggcttggccgaagaaactgccgccattgctgaaggcagagaaaagagatacagagacaatagtgaaagagagaaagtgaatgactgaaatttgtaattgaaagttggaatttgtcttttttttataataatttacatgagtacacccccaaattttaaatacatttttattctctagtaaaattataaatggagagttatttttttttttcacctctgcatcttattattattaaaaaaaataaatttaaaataattttaaaaattacttttaatatttttaatttttttttctcagatgttaattttaataattatttttattatattttcattttttttaagtcatgtatttttttatttctttttttcaaaatttcatataattttttattttatttttttattataatatttaaaatataatttatttttatttgataagtatattttttaagagtagaagaaaaaagtttttaaaaaaattaatacaattaaatatttaaatattatataaaataaaaattattgaaatgaagtgtctttataaattttttaaggtataaataaaatttcctattacaaaattaaacaattttgaaagcaatttcttttataaaaatatattttttaataagtataacccgacttaattgacagaagttaattaaaattgaatatcatcaaaccctaacaaagataaattctatcaatgaaacaaccatttaatgtaattaaatctattgtataaatatattattatataggatttttcagtgtgagaactcttatacttctctctctcttgttttattttattatttttttccttgatttgttttcagtattttttttcctttgcttagtggtgggtttagaatatttctgtagtatttaatgtataggtaatttccttcattatatacttaatttttgtaggaaagagtgactcgctaaatttatagcgagcatgagaaagggttacttttgttctaaaactaagtattatctaacccaataaatatttgcgctaggttgtgtgctgttgtattctttagcatgttagtgtgggacaaaaaaacagttggggagaaagagaatagttcttaagagattccacaagattctcgtactctgtgcaatcctttttcatggttggccaaaaataactttgacgaatgattttcttagaaagattgggtccggatgtatgatcttcgcaaaatccttcatgtatctcatgcatgacagagcttatctcagttccagctatgcatcttgaatgcggcatcactaatcctcttatgtataactttccactcatgatcacatatatgggggcttgatattggatctttcacgaagcggctttgtcttctggaagagcgccaaattccagatacttcagtattgggaccatccaggaggttgaatgattaataaatgataccccagtgtctttgtgcttggagtgagtaaatgggcgatggggactagttcatatttctctacttctagatctattgctaatttagccaacatatatgcaaaagaatttttatcccttgggatttgcttcaaagaatagtgcttaaaatgtttcaataacaccttagactttactacgtaactagccatattttctcctttcgtctggtactctccaaacacttggttgactaccaaacgtgaatcactgcacatctcgatgttcttggtaccaacctctttagccaattgcaagccagcaatcattgtctcatgctcaacttcgttgttggaagcttcgaattcaaatcgaagtgcactttaaagttgaatttattgaagagaaattaaaatgattccagctccaaaacctttcttatttgatgcttagtctacatatatcttctagacttttagttctaggatgggcatttcaagatcgtcttttatccccgtacattccacaataaaatctactaacgcttgacctttaattgagattcttggttgatattgaatatcaaattggctttgctccattgcccactttaggagtctttctaaagatttcggcttttgcaatacttgacaaagagggtggttggttagtatcctgatggcatgagcttgaaagtatggtcttaactcccgtgaagcaattagcatgcaaacagaaagattttcaatcataggatatctggactccgtaaccaacaatcttttgctcacgtaatatacatgaagttgtacatttccttcttctcgcacgaaagcagcacttatagcatgatctgacacttccaggtacaggaacaacaactctccctcaattaatttgcacaatattggagcctttgttagatgttctttgagtttctggaaggcctcttcacactcagttgtccattcaagcttgctatttccttgaagtacattgaaaaaaggtatgcacttatttgttcatttggaaacgaacctgctaagtgttacagtcattttagttagcttctaaacatctttatgttttctaggtgaatgcatatcttgaatacctttgatcttcttcgggttcacctcaataccgcaagaactaactacgaaacccaagaatttccctgagaaaactctgaaagtgcatttctttaggtttagtttcattccatactctttaataatggagaaagcttcttctaaatcttcattatggctcatggaagtttttgacttcaccaacatgtcatcgacatatacttccatgttctttcctagtacatttttgaacattttattagccattcgctggtaggtagcttcggcgttcttcaatccaaagggcatgaccttgtagttatagatgcctttgtcagtttgaaaacttgtatgctcttgttcagtcacatgcattttgatttgattgtaaccggagtatgcatccatgaagcttaagagtttgtacccggaggttgcctcagccatctgatcaatttgcggaagtggaaaacaatcctttggacaagctttgtttagatttgtgaaatctatacacctccatgtccgtttaggcattaggaccaaaactggattgtctagacatatatatagagcttccctgagaaaatcgatgttggtcaacttacctacttccattttttcacggctttcgctcttactggatctaggggtctttgcttttattgaactagatctgcctttagatctatgttcagtgcatgaaaaatcactagggaactaattccagtcatgtcagaatgactccaggccaatacatcactatttgctttgactgtggagacgatcttttctttaacaactagaggtaaattctttcccactttgacgactctagtgggatcttcatcatcaatgcctacttcttctacatcttccattattctttccacgcctacccattgatctagttcatcctctttgtggatcagaagatgttccagcttctgttatgtttccttctcggaccatgagaacagtctcggttgaaacattgtagtagcttcttgcactcttctggttgcctctaatcattccaataattccagtatcacttgggaattttatgcatagatgatggatgaatgttactgctctaaaatcaactggaaatggtcgtcctagaatgatgttgtaagttgttgggcaattaactactacaaaggtgctgtacttgaaagaggatattgcattgcttctagagacttctccatttatcatcattggaagttgtatttttcccattggaattagcgtgtgtctattaaagacttgtagttgaattagacaaggtaataaattttcttccacaagatcaatggctttgaaggcatctttgaaaatgatgttaacagaactttcattatttatgagaattctagaaactcttttattcacaatctgagcttctatcaccaaaggattgttgtgagaaaaatgtacatgcttggcatcatcttctgggaaagtcattggcaaattcatcacctgaggactttgagcaagtgattgtaccaagttacaagtttcatcttgatctaattcattcaagtactttttttgtgcattttaggtgcttccgaaaaatgtgtggtcctcgagaaatggttgctacttaaccatctagtgctagctgggctgctctaggaggatatgtatttcttggacagggagccacaataggtcttgttgctggagcattttgcacccgctcaagggcttgtgcattgggagcttgaattccaagaccttgtgggtggcctactccctgaggaggattaatggctccatgttgtccaggaatgaaaagctgaccatgtgcaatcccctgtctaggataaataattggtattcttacccaattgaatagatgaccattccggacctatccttcaatttcatcccttagatagtcacacgtgtgccctatatcactgtgatattcagacctcttgtttggatctcttttttgtcttctacctttgtacattggtggaggcttcttgtaatggaccatgttacaagttgctttatagacattctctcaagtatcgacaaggcttgtgtacttggagtatcttaactcttgagccttccctttcttcctagaatcatttcgacttggacctttggaacttgttttgctctgtgatttgcttacattagactctagagcttttgctttttggtttgtttgtttgaaagcggcactgtattcggtttgtattgctttgaacctggaaaaactagcctgtgcagttggttgcgcagaagcacttggtccataaactataggagtcgtaaaggcagtttttagagggaaaattgatggagcagtcatctgtgaagtttggatagttattatgttggtggaaggtgctggaagtactctataagcttaggcgtaagcatcttctaagttgatgaatcattgggctcttgtcaaaaaatcagtcaaagtctctggttttttgctttggagatcttcccatagcaaagatccagtagttattggtccttattattatcctgattattatttggctaggcattaactagtcacgattattatttggcagggcgacctggtcagttttaatgtactttcataagtgcaggttatttttcctaatgaggaattcgatttcttattttagattattaaactcattggtatcatgatcgtagtgagcatgaaagcgacattatttggtagtatccctcttgctcatatctttcttcatcggaggaggtcttttttatggcaccatggactgggttgtcgtgaaaatagttttaatcttttcagtaagcatagtaaaggctatgaactttagggatttctctcgagggtgctattgttcagagtcattactaagcttacctttctttccatttccttgttggttgctattatttgaccttttaccaccttgacctggactgctattattgtgatgatagttttgactctgcaaggatgtattggcaacagtggtgtgactttggttggtctttttctgaccaactatgtctacttggtgaactgcttcttcaagctttataatttttttttgcttggtctaaaaactctcgcattgatcctacagtaagtcttttgatgtctttccataattatcctaagggttcaattcctcctaggatagcgaccaattttctctctccaattaaccctttcacttttgtggtttctatcataaatctatcgatctaatctcttaatttcttaaaggctcctttgttatttgttttacttggaccaggtcttctaaatgagttggaagttaccttgaagaggagaactgtgcgtgaaactctagcataaaagagttccatgaactgaattttcctggtgctaacttgaagtaccactgctaggcggcctctaccaaggtagctggaaagattttgtaccgtacgtcacccttcactgcctaaaagtccatttacatttcaaagtacttgatgtgaggtagccaaatatatttttcatgtaggaattttgaacttgggcagtaggtcaagggcattgatttctggttaagatggtgaacctcatgtcagttcaagctctaggtcggtgatttttgggccagccatgctttgtacaaggctcttgagttgatctatttgggcttgcaccactggatcaacttggcctgtctattgactgacctgtgttacctgtggactccctaaaatttcactaggcacatagttgtccacattaattggttgagtattaagagggatggactgtccatcctatcgccttatacaatttagataatctcttaaatcgtgtatgagtcccaatatgttgaagactgattcacttggaggcctccttgttcagctgttatcagcaatttattgatttggtatatccgtctaaggatggatgttatactgaccattccccttagataatgggctggaaaagcttgcttctctattgcgtggcccacagtttgattatgtggcctcgaattagaccgtcctgtaacttgggtctactgagtgttgctggttagatgttattctgggccatattgtggtctgttagagatatagatgtttgtccttctatacggatctcgtatgagtggagtatcttccaccggttactctccagtaatttgataagctcgttgaatcagcacacttgcttgcctagagtaattatcaatcgctgctttttgggctctcatgatttccatctgttgattcattcaattctgcaatagacatttttgttgttttaattccatattcacaacttcttgggtatcctcctaatcatggtgaagagtgttagtatgttcttgcatccaccctaaagtagctcgcaagtttgcaactaagtatcatcaccaattatcactcaaggttctccaacaagttgatttccaatacccaggccagtctgactagtataagtactagtagttccagtttcttgtatgcccgatgtgaacccattcagaggggttgtcactccttatcctgctgattggggacttcttggaggttgaggaatggttggatcgagatccgtcctcattggatctctctgattcgctgaagtttaaacattaggatctgtaaccattgaattagttgtttaagtgggattacctccccctgtggtcacaaccatcttcgtgtattttgaatagaattaaaagattgtgctcttttgctctcaacgaaagaaccacaatgttgacctcacttttagccaaagatactgagtctttaaagcaattagaaataatagaatttcaataatgattaagcaaaataagaacacaaatttgttatagaggtttggccccgtgatggtggtaatagcctactcctcttttacttatattacttgtgagaagagaagcaagaagttcttgatctctcttaaatgcttacaaatgtttctgagtatttctttcttgaagaattgaatttcgatatcagaatagtgaaatggcggcactatttatagggaataattaca

SEQ ID NO: 572 - DNA, 1227 bp, Cannabis sativa
gtactcaattttgattattatcaataaattggtcattacaaaaaataataatgataatgaatttggttaaaaaaaaaaataagaattatatagggtttaaactttaaagaatgaatacgtggtttggagaaaaatggccgtacgtgagggagcgattatgtgatgatggatttgaaaatgcgtgtggcgcgcgtgtggtggcgcgatgagtgtacgtgtgggcttgagggaacaacgtggggattaaccacattgatgaggagctgctcaagtggttggcgtcttcgtccaatagttgagaactcatcataccacggcttatctatcttcaaaatctgaatctcttcaaaattctaattgcttttaattacctcatctcatttctcaccaaccttctttgactcgctctactctaatctaatggcttcttctattaataatcacaaagaaaattatatgtaaattattatttgcagagacggaacggaggagagtttctgacacagaaggaagccatggacaggctcctctcctcctcttcgtctgcaacctctccttttaaattctatttcaaaccctctccttccctccctcgttttgactctacaaaactcacccttctcccgtcttcacctccccagttaaggcgcctcacctcgttgttctgcaaatctcaagcttcttctccttcctcctcgtcattctctactccgtcaaatagtttacaggctttctgtttttcgtcgtctgcttctccttcttcttcccctcatggctcttcaaatgagtcggtgcctgaatctcagaatctcaaacagatctcaaatggggcttttgaaagaagcaaggtaaaatattttcctcaattatttaatttttaatgattttgctttagccacacaaaacggtgatgaactttgtcgtaattgtggattagtttcttaatttttgaataaatttgctaatgcattttatgtcgatcttttgggattagccttttgtggtttttatcattgttttgatgcaactgcaatggcgaatgagaatttgggctaatttagttcgagggttttgtgtatgtctatgtttgctgagaaattgtactagaaagaaccaataattctgacttttgttggttctctcgtttgagtttgtaaatgttgactaataattttaaagaactatttaatttacaaattggaaattcagaattggcaattgggtggt

SEQ ID NO: 573 - DNA, 4073 bp, Cannabis sativa
ctcatgagcataatggtataagcatgtctgactgtgagactgactggtcgaacagagacgtcaaaagtcagccatagtgatccaggaatcctgtgtgaaagggctctcgctcaacagattaaaggtgctgggataataggctgatgactcccaatatcgttaattaatctcattatgaatcagaaactacaataaaactttctaacaaatcaaaaagcttttgattgaaaaacagaagaattcgttcttactttcaatttttaaaggaattcgagagcgatatgacacctttaggtgatgtcagtcaccacttagcaattttcgtataataaaatggttaatattttagagtgtttctacaatacatccctaaaagaggtctatagatgcatcctctatttatttcggtatttgagaaaattctttattcatttacataacatgacgaaattagggttcaaagagtttgttgcatgtgagatttttttttattttatacgtgtgtaaaatatattgtttgaacatatttttagcgtgtttaatttttttaaaattcttaaaatgtagcaagatgtcttaaataattacaatatggatgaccataaaaaaattagacttttttttttttttttcgatgttgaaacagataagaaatgcatcagtgatcctttctaagatcatctccaactatgttttctaaacacactttttagctaaaataaagaatgagacttaaaaaatgagttctaatcatacaaaaaaataactctataatagagaatgtataaagtagggatgttcacggtgcaggttatagtattttttcaaaccaaactgcatatgtgatttttgtaatttctcaaactgcaagtgcaccgcgaaattttaaaaatcaaactaataaaaatttaaccatacaaataaaaaatcttattaaaattttaacatcataacataacatgtattgataagtattaccattgaaataacaacaataaaaataactctttatgtttcttttatttttgcttaaaaaaaaagaaaaataaagagttttacaatatattagctttttttagtacttttacaatatattactaatgtaagaaatggtcatattatgttgaagaaacggtcaacattcaaatatttgataaaggtcaaatggtgctccaatggcgatagaagaagaaaagtacacaccttcaacaaagaaaaccaaaagaaaaattgttgcaatatctcattcttctcactattactggttatcatctgatgccgtgacctactcgccacacatgctttgaattcttctgtaattgtacatatatatatatatatatatataagtattcattcaccatttttgtagtcaaactcttcttcttcttcttctcccgcaatctgcggagttacagaccaccatagatgtagcttcaacaaaacctctaaagacaactcctttactcactttcacaaccaaacaaaccaaacccagatctcaaaaatggcggattctcaaccccacttcctaatttcatttcttcttcttcttcttcttctctttaccgttacagccgccataaaccctggctcatctctctacgcaagcaacccaaatcaaacttgggcttccccaaacagcacatactctctcggctttcttcccgccgatccacccacttcgccgccgacttacatcgccgccgtggcctacgccggtggggtttccatctggtcagctggtggaatatccaacaccgccgtaaactccggtggcgcgcttcacttcgagtcgaatggaaatctcagactagtcaacggctccggtgccgctgtttggagctccgacaccggtgggcgtggtgtgtcttcgctcgatgttggggacgatggaaacttggttttgaaaaatgggtcttcttccaccgtttggtcctcgttcgatcatccaacggattcaatggttccttctcagaacttcagtcaagataaggttttgcgatctgggctttactcatttggggttactaagattggaaaccttactcttaggtggaataatagcatagtttattggactcaagggttgaattcttcgattagtactaatttgagttcacctagtttgggtttacaacccattgggattctttccatttctgatagaaatttagctactgctgccattgttgcttacagtagtgattatgctgaaggtagtgatattttgaggtttttgaaattagataatgatgggaatttaaggatttatagctctgctaggggtagtggtactaaaactgagagatgggctgctgttattgatcagtgtcaagtttttggttactgtggtgatatgggaatttgtagttataatcagtcttttcctgtttgtagttgcccttctcagaattttgaactagttgatgctaaagatagtagaaaagggtgtaagagaaaagttgagattgctgattgtcctggtaatgctactatgttggatttggatcatactaggttcttgacttatcctcctgagtatgaatcccaggttttctttgttgggatatcagcttgtagattgaattgtcttgtgagtggttcttgtgatgcttcaacttcattgtctgatggtacagggctttgtttgtataaaacacctggttttcttagtggatattcaagcccatctatgtctagtagctcttatatcaaagtttgtggtccggtgagtccgaaccctttgctttcttcagagagtggtggtaagaatgaggtgtggaagattcgtccttggattgttgctgttgtggttttggctacccttttcggtttgatggcattagagggtggtttgtggttttggttctgtcgaaataggcgtaatttcggtggattgtctgctcattacgcccttcttgagtatgcttctggtgcaccggttcagttctcgtataaggagttgcagcgtgctacgaagggattcaaggagaagcttggagctggtggatttggggcagtttatcgagctgttctttcgaataaaacagtggctgctgttaaacaacttgaggggatcgagcaaggtgagaaacagttcaggatggaggttgctactataagcagcacacaccatttgaatcttgtgagactaatcgggttttgctctgaagggcgtcacaggctgttagtttacgagttcatgaaaaatggatcgcttgattcattccttttcaatacagacgaaaacaattcgggaagattgttgaactgggaatatcgtttcaacattgctctcggtactgcaagaggaatcacttacctccatgaagagtgtagagactgcattgtgcattgtgatattaaaccagagaacattctcttaaatgaaaactattgtgctaaagtttcagactttggccttgcaaagcttgttaacccgaaggatcatcggtatagaactctcaagagtgtaagaggtactagaggttatctggcaccagaatggcttgcaaatctcccagtaacctcaaaatctgatgtttattcatatggaatggttctattggaaattgttagtggtaaaagaaactttgaagtgtctgctgaaacaaaccacaagaaattctctgtttgggcttatgaggagtttcttaatggcaacattaggaatattgttgacaaaaggcttgttgttgatgaagatatcgatatggatcaagttatgagggcggttcaggtgagcttctggtgcatacaagagcaaccgtctcatagacctatgatgggaaaagtggttcaaatgctcgaaggtatcatggaaattgagagacccccagcaccaaaagcagccccggaagtgtctatttcgggaaatgcaagcagcaatgccagtgctctatcaactactgcaacatcagcagctccagcacagtcttcattttcgtcgttccaaactgcagggccatcgcctttagcttctgaaaaggcatcgtcgattctcttacattcagatcaaaagtgaggcgctcacccttttgtgtttttggctagactacaagcagatgcag

SEQ ID NO: 574 - DNA, 1260 bp, Cannabis sativa
ctcctacaaatatacatataaatacagaagttcaacacgtaaaactcacaactattaacattattatgtacatgttctcaagtgcaagtatgtgtacacaaataattcggaagaaagctattcaaacaacatctaaaaattaagcaaggtctaataacccattggactgcatacctctcatttatcttgctcctcctccgctgctctgtcactgaatgttttgatcgtacagcactagccttatcattattcttagcatctgcttttcatgatcaaaaaccagaatcacgaaaaagaaaatggaaaaagaatccggcaaaactatgcatcagataaataccccattacttaggtctaaaatttccccattctataacacaagaaaagtcgtgtttttttcttattaaatacgaaagaaaagtcttgttatcccaagagaattctaaatttcaatataatgtacacgcgtagcgtatacatgcaaagtgtttgttttgtgcccaaaattcgagcaaactcaaacttacaacatatacaattgaattcgacccaaaaaaaattgggacaaaggatacataaaaaaactgcattatcttgtatactccgagaagaaatatatatatatatatagatatttatatgaaaactcggatctatatgtagctctaccatgggaatcgaaaattggtaaaaacaaaagggatacctttgctattggagttattatttgaagaagggccttctttcttggagccatactcatcgtcctcatactcttcctcttcgtggtgaccctttgctggtgttctcatctttgtctgtgaagggcctaaatcttttggttttcaaagcttcccgagttaaatctgagatgcccagatgaggaaaaacaaaacctttgacaccaaaaatttgaatttggagatttgacaggtaatgaacccttagatgggttttgaagaatgagaaaagtgaaggagatatgaattgatttggtgatgggttgagtgtggagtctccggcaggcggagcagcagtggtgttggcaggttttccggctctgtcaatggagttgtgagtcagaataacccggttgccagtgatagcatgcgcgttacctcatgtgcttcccgtgaggatgtcaatcatcaaacaacccgttcgtccgtgaagtggcttctttctttctttcctttttgattttggaaataattctttctttcttaaacaccaaaaactaatagatatttaaaaaaataa

SEQ ID NO: 575 - DNA, 1988 bp, Cannabis sativa
tattcaccttgaggctacgcttttccttttggtttgctcatttgtcttcatatacatagattgatgaataggttaataagacattgctttcttcttaatataatttcatcatgagttaaaatgggccacatggttcatacaaattatgacatttggagctactattaaataaatttaactctcagtatgctatatagatttttcctggaaatatgtgaataaaaatacagtggttaatgggagttttgtttctagcttacagagttgcctagttatactttgtttaaatttgaccattagaagtatcctagggagtttcattagcatatctaggtatcaaaaagagtacaataattttttcggcctctcctagaattttgttgctgcattataagattgtgtactggatgccttctgcattgagaatgttttatcaatttatcaggtttagaacaggattcaaaccaacaaattgattgtgtttggcttcaaataaaaacatgtttgctacattttgtacattaatctctttccccctttcctacttaccattgctggtttcgtcttttatgtacttgctctgatatctaatagtttgtaaatggtattggctctgtaggcaagatatttgagattggttcaacaggtattagtagcttgggaggtcacagtgaaaaaagaaccgaatgcgttaatagatttgttgcggagtttggaggaatgccattggtatctacatcagttaaggcggttgacagccgcaaaatctggttttggtgatgttagagagcgagtagcagctaccctttcaattgctaattgtagacttggtttggttttgcggttcttctggggttcgacgatgtataatatggaaaatatctacgtaattgatgtatttttgagatagatagcttacacagcgtccttattggatttatttcttgtattcttaccatgtaacatggcagttgccacttaagatggttactttactactcacagcaatcactctcattttttttttgttgtagttaacaatgtctcctactttttgatcttatatgattctctgttaatattttctgaaatatcaaattgaatccttcaagtgatctttttctttttcctttttcgggtcaattatatcgcacaattttgattattacctacaacatgtttcctactcaatcagctacagatattgaaacatataactctaatcaaattagattaataatctcgatttaaataaataaatttgaattaagcccagtaacattttaaggcaatgcaggtgtatcgggaaggatagtgtttttctttcttccagaaaacgaatggtggtgtgtaaagtttaaagtaaaaaagttaatttgacatttttcctttagaaagaaaaaacaatttggaaatttttagtctcgagcaagtcgtgtcattgtagggaagtgtaatttgtatttgtgagagaaaggtctttgtaatactgctatctatttttctttgaagcttccaactaagatgaaagaaattaatgtcccgtagactttaagagattattcaatcagttattaaaaaagagattattcaatatctactcttcaggaaaaaagacacgagcttttaccttttacgtttctgttttgttttattaaaactaatttttttttattggtgattgaccttattcctatgagttttttatctgataaacacccctgtttcaaagcttatcttcctactctctaatcccatttagcaaatctgtttgttgaaaggttccatatttgacttgaactaatacccttcagtattttcttgttagttaatccaactttttagcctaactcattattctagagtctaggctctagtttacacattaaattttagcatgaccactttttctgattagtgggagcagaccccatctccagtgttgaactttacaattcaaatatctaatatcgtttcaaatccccacc

SEQ ID NO: 576 - DNA, 2872 bp, Cannabis sativa
ttagtttctatagttgtcaattgacactgataatattctgatcatggtttctgacctgtaattgttgggattgcagattggctttgtgacctttttccttagttccgtccttgataatttgacatctactattgtcatggtttctttactgcggaagctagtgcctccatctgaataccggaagtacgagcaaactttgtagtaatgtgtcttatatgcttgaagaactttggtgatgtttttatttgccaactagattctgaagtttcaagtttttctatgaaggaaaaaaaattatatcaaaagcatgtgaaactttaaaacaaattatctaaaatgcagtttggttacaaaactagttttcacatttattcaaattttgtttgaagtattttttttatttatttattgaaaaaaaaaactcaacaccttttacaaggtgcggtatggaagtattaagggaaaaataagatcttgcatttaaactgctataaaattgcaaatgagtgattggagttaggaaaatgtggtcattaatgtcattttttatgtgtctctttaatagttaatttttgcaatttgaatttgttcatcaggtttttaggagctgttgttgttatagctgcaaatgctggtggtgcatggactccaattggtgatgtcaccactaccatgttgtggatacatggtcagatatccacagtagagacaatgaaggtctaaataaaacatcatataacacttctgcatctattagcattttgtccattttcctaatgccaatgcaaaaagaactgggtttgatttacataaaaggagaaaaattacattgctcaagaaactacagtgccttacaattttcatgttaaagccaagaactgaaaccaactggaatgttgcatggatgtcagaaaccttttctacacagattgatatgtttcaaaatgtttaccactcttgattttgaatgactattctttatttgactgcagagcttggttataccttcagctatttctctcgctgtaccgctggctcttatgtctctgaccaggtactcttcaggctttaccagagcaaagcaatgagcatttggtagttacaaatttacacttaatggattatgtgcgttaataatgttttgcaagctcgtctatgcagtgaagtaagtgggagtggccaggacactcccaatgttttggcatctgaacagatggctcctcgaggacagcttgttttctctgtagggattggagctttaatttttgttccagtattcaaggctctaacggggttgcctccatacttgggtatgctgtttggactgggagttctttggattctaactgatgctatccattatggcgagtctgaaaggcaaaggttaaaagtaccccaggctttgtcaaggattgacactcaaggagtgcttttcttccttggaattcttctgtcagttagcaggtgactatccaattgttaaatgattgtagcatagattttagagagatatgacaattcagaaccatgtctcacaggttcgaaattttactcaagcacacaacttgtacaatctgcattatttatatttaatttgttcttatttagcctggaagcagctggggttctacgcgaattagcaaattacctagattctcacattgcaaacgtcgaactgatcgccagcgcaataggagttgtatctgcaattatagacaatgttcctttggttgctgcaaccatggggatgtatgatgtaacttccttccctcaagattctgaattttggcagttaattgcattttgtgctggtactggtggatcaatgcttattattgggtcagcagccggagttgcttttatggggatggaaagagtggacttcttctggtactttcggaaggtaattaataaatcactcagctgataatttaactacttgaaatttcatcatttttcttgttgggtgactgagttcactcctttccattgcaggtgagtggttttgcttttgcaggttatgctgctggcattgctgcctatttagcagttcataatttccacttatctctaccaactactatagcagaggttcctttcctttatgggttcacacactaagaaccaagctctggatgcctcgctagcttcggacaaggcggtatatacttcaccaaaagagtcaaacaattctaggcttctttaaagtttcttcaaaaaaagtaatagaattagtaaattgaagtttattttgtaacttatgatggaatattgccctagtagtccaatagccaaccatgttactgagcattcattaaaataaaggtcaagggttactctttacaccgttacacgttttcatatgcttcataaaattgtaagaaagtaagaactgaggtggtgtttggtttagtaaaatgtaattgtatggttatacgaatagtaaagaaatgtaatggtagtagtaataagaatactattacgatgtttaatttattttgtaatgagcattgtaattagaattcttttgtttaatttagcacggaaagcgaatgaaatatgtggtatagttcctccaaatttaatgatctctaaacgttatttcggttatagaaagatagatgtcttttggaaggacattcttagaagtctaacttgaccatttggaagtagtctcgtggaatgataggtgccattcggaagggctttctcaaatgcctattatggctacctagaatgagtttttaggaaaggtagccttcctttggaaaggagtttcggatggccagttgtttcctcctggaatggagtctcggatagtcgactatagctgttgtctttcctatctgggaagtagggatggcaattatac

SEQ ID NO: 577 - DNA, 3967 bp, Cannabis sativa
tcagtaagataaaatcactttctttctattaatcggtgtttgtcaatgcgtattaatttccactacaacacgttatatatcatgaactatagtaaagttgtattcgactttccacaaatacttacaaatccaacaatgagcacatgcatgtaaaattagttttagtattcataaaacgacaaacaacattacagtcgagtcgactacggaaagtgtgaaatccatagttttctctcaaagtaaattttatcatacgtaagtaaaccattgggatcaatttggcatgcatatattaattattaattatacatacaataataataataataataaatgtctcattaatttaattaaaatctacttgcaacttcccatgcttactcgatccactgtttatttatacataccattggcactttcggaaaccactaccgatcgatccaattgcttaattttctaattacattggatatgataatcctttgatctccatgtggtcaaatgtaaaacgtacgtacgttgcagttatatatgataattaatattatattgatttgtattgtatttttgtgacttcatgccaaacatttcattcatctatatctacgaacacttactaagtaggatatagcggtttgtctatatatcctagcttttaccatttatttatcattaaaaagctcttggagctttctagtccactagccttctaaatagacataaaaataatttcattactttaaaaaattaaattatagaatagcatttaattaataattaaaattatgccggcaatgtaatttcataacagattgacacaaactgtatgttagaaaatattatatgcaaccagttttattttcttattatatcatgaattcctcaaggcagtattaattattaattaatatccatgcaatatatactatataaaacaattttaggttataattaattatacataaaggcgaagagagtggcgaaagaggagatctggccggtgatcagtttaaaatgctgttctttaattcatacgtactttaagtaattaattatacatgcatgcatggcatcgcaggaaaaaaaaagtggaatcctataaataaatggatttcctccaaatgtttcttaactctacaaaccaaatactaccaaaacaattctatagaaattgcaataatggcaacctacaataattcaagtctaataatccttggcttattgctgatagccacagcctcaccagtggcaaattctttggacattatctcagtcgttcaagtgaatgttgaaggcacccttcactgctctctccctccagtcccatctggctcccctaccctctccggagtctccgtctttctctcctgcgacaacggcctcaccaccatggccaaagcaaccaccgaagttgatggaagcttcaagattgtgtacactccactaactgtctttctctttgaccagttgaaatgtgccatctttgtcaaaacccctattgctagttgtaatgttttcgccggagctttgataaaagcaacccttgtctccgtcaacttgcttgacagcattgctaactacaacagtggagattttcaaaacattctttaataaactatgtaccacttatacgtacgtacgttctacgtatttcgtacgtccgtatggcgtatttttatagtatgttttactttaattaaataatgtggctctgcttggacagactatatatgttttcatttgtttaggtattgtaatgtgtgagctctatttacatatgtgctactttgtattctaccggtaacattatattattaattatagaaatgggatttattttcgtttgttgaatcattcatctaactattgttaattataggaagacaaaagaatcaaaattcaaattaagtagtgtacataaaataaaagtatcaaagggacaatatatgcttattcaagttttttttttttttttttgataaatgagatatgtgtattgctcataaaaacaacctaacatactacaacaagcaatttttataaaaataaaatttaattttctttggcataatatgatcaattctatatttaacttcttttttcatacagttgattttttcattgccacttttgattacaaaaaatttcattatgattcctccaaaagagtataaaccaatcccaccattgttgcagcacacacttgtctttaaaactttcactactacaaaattaggctttatctttgatttttaaaatactagctaccgaagacaatagaggcaaagacgtaggtttcaaaaataccgaagatgtaaaagtgacctaagtcttcggtcattacaaaataaccaaagacataggtggagcctatttccaaaatcacgaggggacatgcctacgactttggttattacataataacaaaagacatggggcatttatgtcttcaattattatgtaataaccaaagatgtaagagtttcccatttgttttcttaaaattatttttttatcgagattttcaaaaattcaatataataagattaaacagatgaaatgaagatggagatttttacgtggttcaggtattaatgaaccctagtacacgagtcaattttattggactaaatagccttgcagtttcacccccaatattcttgataagcttaagaaccttaactttttgttgtagtgtttgaataataaatttccaaccttttgctgtcagggataatgtagtgtttatagactaagtacggtatggatatacctgggacctgctatggtttgtgtgtaacatgacccgctaatggagtaaatacatataatatactgacttaggacccacggattgaggcccacccgtgggactgtgatcttccgtacagctggggaccatatgatgttgacaggtggcatgtgtatgttggctctgtgtagtgtagatgtcagagaagtggtcgtcggacaaagggtatgtttctcttggtgtgtgcgcacttttatggtctcacacaggggacaaaaccctgatattgcaggatttagtgtcgaaggatcaccaggtttgcataactttccgtgacgtctcttggagtgaccttctagaagtatctcaataattcatctagaggatctttgttattccttctttcctgctcttgatgtcttcttggatccggagtagtctggattaggatgaaagtgacctataatgtggacgggctagtggcccatctctccatgtggatctggcccattaccttggttggacccgtcttcaggcttcgattgactattcttgtcttgaatatgccatgtgtcctctttccaaaaatatggatgacatttacccctccaagctttctaaacttgagagttacgaaagctacagtgttctttcctagattattatggtcatgtggaaaatttgaaaaagggggtaaccttttcattttttatacctttaattgtggacagctatgaaccctcaagttctaacgagtggattacatgtgttctcagcttcttcgtccatgtacttcatgtgcattagtaaagtgtgtgatatgcttaggctagcgcactactacaaaaagtagaattcgcgacggttctaaaaacgctttttttttagaaccgtcgcaaaaaaaattgtctgagtgttgaaaaccgtcgcctataatatactataggcgacggtttttaacactcgtataaattaggcgacggtttataagtgtagaattttttttcttttaaaaaaattaatgcactatcccgacggtttaaaaccgtcggacaaaatattggccacagttttaaaccgtggcccatactttacccacggttgaaaactgtcgggaaaaaggttaataaaataacaccctcgctcctcactctcataaaacactcaatctcactctcatccaaaccctcgatctcactctcactctcactctca

SEQ ID NO: 578 - DNA, 2643 bp, Cannabis sativa
taatcttataaccatgcaggtttttctgaagcagcatcttgtcagtgttattattgattccaatttcagtgaagaaggtacaatttcctcctttgtgttattcttcccttaaacactcaggcctgcaatgatgacaaggaaaggattatttatgaatgttatgttattatgaaattgtatgagggcagtacttagcagggaggaagagttgtttggagagagattgagggtatatttttggctaggcaatatttgtctaatgagcatgagactactctaatccacttcccgccttaacatttcatttcacgaaatgtgggatgttcttcacccgcacattatctaaatgttaaagggtttatttaccgactttgtagcttaaagtgtgaacgaacaagtccattttagtctgttcaccaattatgcttataaacaaagctatatgttcccagtttccatttctgcaccataacacctaatatcttatcttagcagatgttgcctactctagaagagatcctgcagttgaagaagcaccaactgccaatgataataaagatggagatgagcaaagtgaacaagatgtggaaaggaagaaaccttcaaaagagaagaaagcaaagaagggaagtaaacaaaaaaatagaagcaatgaaacatctacagaggatgaagaaagcaaaaaggtaagtaaaaagaagaaaaatagaagcattgaaatgtcaacagaagatgaaggaagcaaaaagctttgtaaaaagaagaagagaagcaatgaaacatctacagaagatgagggaatcaagaagctaagtaaaaagaaaaatagaagtaatcagatatctacagaagatgaaggaagcaagaagctaaagtccaagaaaaggttaaagaatgaggtacttgatgattaatttgggactcaacggattgaaatattcttgttatcaaatgcaagcctgccgtacatcaaagtggtgtgaaaacatgaaattttgagagtgcaaggacaatgaaattttgttaggagagcgttgtaatttattctgaaagacttaaaaaccattttttttttcatcatatgtaggtgacacaactggctcgattcatttttggaaattaatatatcatataattaagcttcatgtaatgtcaagagtacaaaatgctagtcaaaattttgttgtcattttgcctcttctattgctcgagttgattcctttttactaaatgagcttaatttgattttgggcagttcggttttatttgtttttcctaaaaattctgaacgtttattgttatatttgtcttcaatatttaggtaacatagttaaaaatttgaaaacaaagctgtaaagattgttaacaaactcatttcaatattaaacgtgcaattcaaggaactgttggaagtagaaatgattttgagccaattagattttatttattgggaatttgggaggctattcctgtatcctaaacacccattgcttattttgtattccatggcgttgagctgattgcatttgcttgtgcgcaattagtgccaaaattgaagccataagtatcatacgatttatttacttttctcctctttcaatcactccccttttaacagatcgatcagtaattgaacaccattccaacttttcaaagataagctgcacctaatcaatatggactaactcaaaagataacaacctagtactcgtataatctagcacgtaatccacatagactaactcagcaagggctggttgaattgtactatctggggccttcaaatgaggtaacagaatttcgatgaatttggtagaagggaagagattaagctatagggtttcaaatctgcaattaaatctatgtttgatcttacattgcaaaggctcaagtggctgagtaggtgagtgcctatgtgtgtgagcattcagggtttcgattcccctcaatgtatttgcacaaataatggaaaatcttatgagaatgtagtagagtatcattctccaacaaaatctcgcaatttcttccacttctcctcctaagtcccaactatcaaataataatataagatttgatcttcttttcctttcatactaacaagggaagggtactcggtttcctctctttcacctggatgatatgtttcaccttacttctaaatgccattaatatacaattgatagaaatagaattctaaaatattaaagacataggtttggagtgttgtatggtctcccctccaccatgatgatccatggctagccatctatcaatacgatttttgaactccttatttgcatgtcaacttccccttatgttcttctagtcctatcctctataaccagaaaaatgcaagtactttttgttcactaattttatttcttcctttgagacactatgggacaaatgcatcaaggatgtaaatcaaggttcagcaaaaaatgggatgctcttttgcttatgcaggcagttaaaatgaaagcaatcatttcaaaacataagagaccagtttcgatttcagagaaaatcaccacccaaaacatagaaaataaaactggaagaagcatcaagttactgagactcagatttttctttttcttctttctctactttcttctccgacaagtacctgtgtgatttgaa

SEQ ID NO: 579 - DNA, 5619 bp, Cannabis sativa
aagactaattaaaagataagaagggaacaacaaaaaaaaatcacccatcattttaaggtcatacaacaaactaacagcaaaagatgaaataccacttaggagaaatatcaattattcaaatcgtgaatgtagagaaaaatgaaaacaaagatcgagcagataaatcttagttcccctgaagataaagatccccgccaaacacattccaaatgcaaagcttgattaaagcaagatacattattaggcttctagctgtgatgacatgggcacacacctgttgattaattcgtgaattgccccaagagttcaatgacgtttgaacactatccataacctttgttttagtgtcatatagcatgcctgacccaatattttttactgcaccagatacctgggaacttgtctgtactggcctgttaacgaaacatgatttaggagtttgtctagtatgtattactttaattgcaatataactcttgttcagaagaacaaataaatacctgatggcctggggatcagttttcaaagcaggagtgccaataggagccaatggctgtgacactaaggtggtgttaaaaccagatgataattccctgtttcccaattcacgtccctcagtagcaaaatcagggcgaatgttgtttggtgcttctctaccagatgatacagaaactttacttgagtttgttgatgttgatgtcgtctttgaagtaggacgagatctccgtggcacctgacatgaattataatataaagcatttataaaaaaattatataattaaacaactattttaaggcatggtcaagcagaaatgagattttaaattgaatatgaaaataacaacctttgcaacccgagacttagccttgaattccttttctctctgttcacgtcgatcatttagcatttgtcttttagaccttacttcaataaaatcatcttcatcacttggggcctctataccaggttgctcaaaaacacgcacaatgccactctgcaaaggagcatctacagcttcttcagagcatatattccttttcagcttaccctctccggactgaggaatgttctgacctttcattgaagattctttcccagatcctctttcagctcgactagcagaatctacttgtgtaccaggtggaacagagctggaagaatccgactctaatgtttgctttgatgcatgcgaggaaataaccctctttggtccagttctaacagaaggcactataccccttccaattgaatttgacttctcatccgaccctaaatcatcagatgaaacaaagcctataggttgtctctgatcaaacttttcacgtatccgaaactcagttcgctgaatatgacgaggcctcctctgatatccactagctccagagtgagtagattcgggggcaggatatgatcttgagccagaatttttcaccgcaaatatgtatcttttccctctgcgactggataccaagccatggaccttaggcccatttggacctttttcttttgagattgtctgaggctgcccctctgattcatgggtaaaaggcatagcattgtagtttttcacaaccaaattttggtgcccttcaccaccaatgtgagacagctctgatcggccacgttgcaccatactagagatttcagcatcttccctggcaggtaccaaaccatcctttctcatacttccttgagaaacatccatatgccctgaattaataccagattggttatcagctggaagggatgaactatcattttttgtgaggctctgagaggagtcttgaccagactgaataggcagtgaacctcctggagtctgattgaaagagaaaccagatggaacattcggctgaacaaaagacattgagtgagcagccaacggcaaaaccccttgagaaataggagatgaatacctcaactgcccaaactggaagagaggaggctgtgatggatgcatatgactgagagaagagccaacttgaggatgcagatgaagaggcatctgtatagaaccgatctgtattgctgggactggagaaggtatcaaggatggaccagaaaaaagcccaaattgaagcttaagtggtacctcagcctgattttgaacagcaggcatgctagatgtaacagcctgattggaagaatgtgaggcaacgctagctgaagacatgactggatggggagaatatacaccagaactgccaggagcatccacgtgtttggattcttgtgttgtatgaggagcattactgtgttgaacaaccaaatcttgcacctcactttcactagatactcgaggacaaccatcctcaacagagctagatgaaggcagaggatcaacaaaagtagtttcatcatttttagcatttcttccaagatcatcatttggcatcccaacttcaacaccctcattaaatcctaaaaccaagttgttcatatcaggtgaccctttctcctccaaatgcatattttcaaactcagggtgcacgtcaatattttcctcatctccctcatgcacctcatcttcttcctggtatctgtcctcatcctcgtcatattcttcttgctcttgcagctgttcattgttgtcaacagcccattcttcatcatcacccacagatgcacagctagcagcagtcatattctcctccccaacatttgaaggtaaacaaactggttcattctcctgccctgacaaagaaacatctttgcgatctccttcagcagataataatgaagattctccagagtcatccaagtcatcatttgtgagatgagttggagaactaggggggcttgagactgaaagtgaggattgtgaatcgcaccttggtgtggttttaccatccagtttctgctcattttcttgctggacatcaattatatcacgctgtccaagactctgccgatgactactgtcatatgatgttggcatggtaggttcatttcttactacatgattatactgcctctcactatctaaaaaagctgaagggccaggacgttgttcaatctcgctccggtaggaggttttgtgcatagaagctattgatggaggggggagaacacgtggctgcctcatagagtagcgtgacctcccaaaagaataaggcatgtctgcatcagagtttgggtatagtcgatccggatattgagaataagagttaccacggggacggccctgtccccagcccacatcaaatttctcaacaagatgatcattgatttcagagtcaatctctgtgtttctgctgtactgatctccatccccagaaagattccacctctgcccttttagattattaaaaatgaaatcatccataggaggttctgaaattcctcctttttgataagatcttgaaggcaaaacccctgcacctccgtagaactccttcctaggaaatgatctcccactaatagatgcatcgcgtctaggactatgatgaccaatgtcctgatcctgtacatgtaaggtcgagctgtttccattatcgtatgcatcccttctccatgaattaactggctttcctctgtcaataaaagcagcagagctatctctagtaaactgagatctagagcccatctctgagtgcctgttcaaactagacgaatcagaggatgctgaagttgtgatcctctccaccattctttccccatcttcccagtcactgacctccgctgccctggaggcatctttttctttctctaacatagccaatttctcatctgcaagggctgaagagctacttcctggctgtgttgtttcagcttgcctcttcgcaatcttttcctccaattctaaaagcttttgcttagcagcatgttttcttctttcttcttccataaacatccttcgtttctcctcctccctagctattctcagctcttcagctttttgcatggcttccatccgctcctgttctgctctccatgctgcttctctagcttcttcttccaatttcctctgtctatcttcttgttccctagccatccttgttctttcctcttcttctcttcgagctagttccaaagctctttcatgttcttcaatgatccgacgccgctcttgttcttgcattttttgaactctttcaagttcagcctcaaaagattctctaacaggatcatgaaagtcagtctgcttgactgcatctttttttctcttgaccactcctagaagacccccagaaaagggatcacgaccatcaaaacctgttccaaaatctttcatgaaaggatcctctgcataaggtttttcagtctttgcaagaaaacgcttctctttgccaaagttgagtattggatcattgacatgcatccctctgccaccacccgaagaatatgacgatttggtcattgaattattctgtaaagaactatctctgtatctgctgtgttgctcacttccatagcgtgtatttcggtcagctcctcgggttccatgtgagtctacagtattgtgccatgactgttttcctccctgtccatatcctacttccctcctcccaaaatcaccgtgagcattttctcgaaaatgtgatggagcatatttattttctttatgcatttctccattcagattagactgccttgcaccaacttctgcagcactagaaccatcttttggaattactggacttctccatgagttcccttcccgcccttctctactaggcgctcttacatctctgacatatgggtctcctttagggacttcactggaagtaacttttccagtttcatcgtcacgctgagcccacctctcagaagtattatggactggtttgtgaggtaaaacacttattctgggcatatcaaaatctctgtcccagtaagcttcactcttcgaaaacccatggtctctgcccctgtcagtaagaccgtgactggtatcacgctcatcatcagcccaatccgatctagggctcactcggactagcggaaatggacctgggaaatactcttcctgcttccgaacgggttcacttgactgagaaccacctaaaccattggtccccacattaccattcattccattgccactactaagacgagatgaatgcaactgaggacgcatgtcaacaggagtactcaaacgagaaccattcctctgctcatcatgagactcatcaccatgtacctgtttctgcttttgattcaaaccatccttttgcctctgcccattcccagatgcagaaggcaatgcagccttcaaagaagggaaatcctcacccctcaacaccgaggctttctccaacggtggaaatgctgaagaagaagttggagcggatgaaccgactgttcccgatcgagctgagggaggcatataaacgctactacccttcactgccacatcagaaccattgaaaaccttgccagtaccatcagcaccttgatcaccaagaacctctttctcctgcaaagcaattgcaccaggctttgtccatcccataccagacgaagatggccttgccccacctccggaaacccctccaccagctggcccaccaccagagcccaaagaatcaaatttctcatgttccttgcgcaatgaaggaaggttcaaggggggtggaacagaaagcttcggcccagccttctgcgaactccgaggc

SEQ ID NO: 580 - DNA, 3694 bp, Cannabis sativa
  modified_base (3089)..(3090): a, c, t, g, unknown or other
atttgaacgcgcttgctggaacataggaatttggaatttcggtgattgtgattctgcacgttgagctgaaacgggcattatggatgaaatatgtttagtatctgcaatgaaaatgtttagtcaagaaaccgaacagcgatgaagtgctcattatgattaagctatttgtttctacattcttaccaccacagaaaggagttgattttgcattgaagtagtaaatttgttcatagtttcgtagcagtgaattgtagtactttcgcagcacgaatgaagcgtttgtagctgtggagggaaagttgaaaaccgcagttacttctttccatcttctgtcattactaatctgtaaacatttttttatagaaaataagtagcaatgtattgaatttgaattggtaatataatgaagcaatttccaaagttaaaaacagaaatcttccattttaaacagctgcaattcattaacaaacatagtttttttcccttaaaaaaagtactaataaattagtgaaaagaaaaagggaaagttaggagatggggattttagaaagaacaatgacatgtgacaaattacattttcggggtctcgtcttaatcagatgtgattgactgaaaaacactgtcactgaacaaactcaagtaatttcgtcgaggaaaataaggtacaatcaagtttggtctaaattgggaggaatctatattttgtttttaagtgcaaaattttttaatgtggctagaaatacttttatattattaaaaatgagcttaggacatagatcttgagagcaaaaattttgaaaatagtaatatagttgaaaagattaagaaaaaaaaaaggattatgatgatagagttatgagatatgaccattcttcaatctattctaggatagtaaggtttaaccttctagtagtagaaattaaatacttacatgagagaaagtttatgccatgtttgaatgtctaaatacattttgcttgaacattttaatcttagttactagcattttgtttcatgttatgagttattagcagggtcgatcctaagctaaggcgggttaggccccgctcatcctaagggtccaaataaaaaaaatatctaataatttttttaaaaaaaaaatttaaagtaccatttatttttataacaagagggcccaaaaaatatatgtttcctaacgctcaaatcaactcaaggccgactctggttattagttcgaattatcaattgttttatgtaattcaaaagttgtgtttaacaaaatccttgatactaaggattagaaaactatagcaaatgccatgtagttacctagaaagaatttgaaccttttaactctaaaaagtctacacaactcctaataaagaacacaaaataaagaatttccttaccttgtcaataccgcctcgcgaagttacctcgagaaaaagtttatgcagatcaagatctttcccacctatgactggaatcctagagaaataacatgcacataaaacaatagaaaatgtcaaaataagggagagaatgagaaactcaacaagctaagcataaaagtctttagaaaaagaataagaacatggtacttaaacactaatagaagtgaaaataattcttaaatgtgttatgaaaacaaactttcaaagggatttttggattttgaaatcccctaagcatgttaggcttgaaaactcaaatttctctccacaaaactattttaacatgttttgtggaaaattctcatactatgttaaattatgtggttcatgttttgataagcatgtatgagtttgagagtgaattcaataaataataataataataataatagaaaaaggaaaagactattcaaacataagtaactttgtaaaaacatagtcaatcatactaaatgttttagaaaagtcaacatatacatacttaaccaacaaatccaaagtcaacttcatccacatctcaaagtagcaaaaataaaagaaagtgaaatgagatttacatgaacttagttccattagaggaatgaagtttctccaaagtatccataaagagtttttgatcaactgcaacatcttcatacctaacaacatcttctctaacaatcaaaggcaaagaagtatttattttgttaccactagaagttgatgccatggcaaggccaaacctccttcaaaaatctctcctttatacttttcctcaaccattaaccaaatgtactaaaaaacactgaaaaaacaaaacaaaacaaaccaacattaatacaaataaaagggtaagaagaaaagaaaaggaaaagtcccaataaacaagggaagaagagaatcaaaacccaagaaaagtagcaaagagtacagaagtaataaagctgtcataatagccatgaattctcttcagagtactgaggttattacaacaacaacagaatgatgaggatgatgaacaatacatcaatatcattatcagagaccttttgtcaaacactaacaaggcttttacttaatgaaaaaagaaaaaagattcaaactttagcaattaagacccagatacaaaaagtccttctgattaatacaggcctataatctttctctgacattcctaatatgggttcacaaaacaaaactgtacatgcaaatacatatgtctatgtctataacaaagtccaatgcttttattattattattattatttcttcttcttcttccctgacaggttttgcagaacaataaaaaagcaaactttatgtataaaacaatggttttatagtttggtggggtagtaataatgtaaatgtccatcaatcaatacatggggtttctcaaaaatctcacctttgcccaaaaaaagaaccaataatcctttgaattttcaaatctgaactgtccttcaatggaggcctaagaagaataaaatatatgaattacccactttagaaaaattgtacctttttcattattattattattaatgtatttattaatggcattatgtatatatatgtatgtataatataacatataatagaaatgaaatgcagggaacccagatgaagaaatgtcagccataacaaagctttcattaataataataataatannaataataataataataataagatagaaataaattaaaaaaaaaaaactcacccaacaatgtgtgatagagaaaagagtgacattaacaaagaaaaaaagcttaaacaaaaacaaataacaccatgcatattaataaggaacaaacataggggaagaaggttatatttattatttatttatttcatttgtatttttgttaaaaaaattatcttttttgaatggtggaaatgtatttttgaataattaatgcttaaaatacaacaatttaattttgtcccataaataaatactatatgtggagatattaaattttaaataaatattcattaaataaattactatatgtggagataatgaagggttgtttggtatttaattgagcttaaaaatttaatgggtgaccatacaaaattggccaaatataggaaaataataaaattgaattttattgatctatattcatagtaactattttattgaggttcatgcatatgcatggtaaataaatattactatttaatgagtaaatagccatataaaaaaactaataaatgggtaaatagtaatagaaggtgaaaagtatgcattttattttttatttttt

SEQ ID NO: 581 - DNA, 620 bp, Cannabis sativa
cttttttaaactttcaactaattatttaacagaattttatttttcgtttagtttataaaaggccttactgcgatgagttcatagagttttgctttgacaagttcaatgttggtgtatggtcatcaagaatgaagtaatcctccatttactatccattattgtcttcttttttctgttaatttttcaaattattttatggaattctatttcttaaattaagtgttttacaatcttattgcagatggaatatggacaaggtgatagaatttctttttcgaaagtccagacacaagttactcttttgctgggtatgtattaatttaatcatttctaagcttgttgattttgagattaaatttgtaaattcttgtcatcgcttcccttcacaagatatacaaccattactgatggatattatcatcttcatatattgaattatttaaaaggggacaagaaaaataaaattaaatgtatggttgatgaaatcaagtttcgtggacttgaatttttaatatgctttgactggttttttccattaatatctttatctactttggagaagtctcttttgtgtagaaatttattgtgctgaaaacttaataatctctctctctctctct

SEQ ID NO: 582 - DNA, 3348 bp, Cannabis sativa
tttatacatttaatagtgtggggagtaattttaatatttataaaatttaagaattattagaattaaattaaaataaaataaaaggaagcaagagagaaacttagttttataaaagtggcgggtaaagtggggatagtattggaattatgggcccaacatcctctacactacacggaaccccgtcatccaaagtggatgcccgcacgtgcgttctttgaccaatttaaccatacattttaaaattattacttacaaacagcctctctcattaaatattttaattctatttcttaattaattctgtcattaattattataattctatttcttaattcccctagtacgagtactctgaccaaactaccctccatttattatgaaagtgaggctgttttggtaagaacacagaaaaaagatgaagatctttggaaagtttctttagggtattcgatatgatcacctagaaagaaagccaagtcattgccgtgtttgacctttaaaccctttcgcaccaaaaatatatttatgtatagaaaataataatattataaaactgattaagagatcgagattttgattttgatttttatatttatgaatccaagtcgttttggttctttttcttcttcttctctccaagtcttttattcagtgtttttgagtttttcttttcttctttctcgagaaaattcttgtgatactttctcgagaaagttttcggtggtgaagaagaggaagaagagaaagaaaacaagggtcggaggatatgagaggtgccggtagtattactattgatggagactccagagctttgaataacgctttagaaactattaacgctgctgccactgcgatcgcctttgctgagaatcgtgctcctcaagcctctgttcccgtaattttcctttactctcttttgtttttatgtttctttataaatgaagataatgacttggttagatgtttacgtattatgttgtttgttaataagttcatgattgaaatgcttgatttggtattggcaatcaatatactgtagtggattttagatcaatttcattggttatagttattcgattctcttatgaccttccgtgtttgatttattgatttggttatttcaactgagttaaaagtaatcactggttttattgcgtgtatgatttattgattaggttatttgaattgagttttaagtaatcactggtttggttgtgtttttagtcttgtttgtacttctgttccttgttgtgctgtgatttcaagctgagtcttttggttcagtactattccaagtactgtagacatgaaattcttggacattgctttacagggggagaacctatcaagttaataaccgcaatttgaatcgttaagtatacatctttaagtgcattctgaatgtataaatctttaagtacatataagggttagcaaaggtttatttttgctgtgtatgaacttggaatagacacactattcaacattgattagagggcaagtaagaaaagacttggcaagaggtgcagattttccgagtctacggcttcaaaaatgctgatgttgttgcagcttgcaccttgtattccacatgtagaattagtgtttttgctttgccctgtaatagaccagagaattctagcaattcctgtgatggggtttgggaattttttttatagaataaagtcttattaaaagagaaagtatatgctgattacatatggttctgagtgaaataagcttttgctttgaacatgaattgttttcctatatagttattatagaggtcacctttttttttttgtctttctacgcataatgagactttatcttgattatagatattcatgaggttacttgattaattagtgtatttttgttccacaatagctaaggagaaaattggttatgtgtgcgctaaaactaatgtcatgattttttgtttcacacagaagagaagatgggggagttgctggagcctatattggtgttttggattccccagaaacaacagaaagagaattgggcatgctgttcttgttccagaaacatcacaaccaggaaccactgctccaagagctgaaaatatatcccaaccacccaccgttgtagcacctttcaatgctcctccctcctcgcctgcatctttttttctatcagaacctccatctgttacacaatctccagctgcttttccatcactctcttctgtatctgccagtatgtactctccagggcccccttcaatgttcgcaattggtccttatgcacacgaaactcagttagtttcaccacctgttttctctactttcacaaccgaaccatcaactgctccctttactccacctcccgaatctgtgcatttaacaacgccttcctctcccgaggttccatttgctcagttgcttgacccaaaatttcagaatggcgaagctggtcagagattccccatattccacaacgaattccaatcctatcagctccaacctggaagcccagttggtcaccttatatctccaagctcaggcatatcaggttctggcacatcttctcctttccctgatagagattgtgctgcaaatggtccctacttccttgaattccgaacaggtgaacctccaaagctactgaacctcgataagctctccaaattcgattggggctcaagacaaggctctggctcattgacaccagataccttgaagccctctcctccacctactgatggttatctccttaaaactcatacatttgaggctacaccaaacttgccttcacacttcagataccgcaatggcgaaactgtagctgaccatagagtctcatttgagctaactagtgaagatgttgtaaggtgtgtggagaggaaatctttggccttggctggagcagtatccacatctctaagagacacatcaataatggaaagagaagaacacaaaacagccaatggttgttacaatgatgatgaccgagttggtgaaacattaaacaaggacgccccagagaaggctccatcttgtgtggaggaaaatggggatgaggtagcgagtgatcagagtcataggtccataactcttggttctggttctgccagggaattcaaatttgacaatgcagcagatgcagtagagtctcagaagtcagaaataaactcagattggtgggctaataagaaagttgcagggaaggaaggtgcgccaccctgtcaagattgggcctttttccctatgatgcaaccaagtttaagttaactttgcctgcctcctttgtgaattgtgggggaccagattggtgcatcgttaaggccataataggctcctgactatagagttttttttttttttt

SEQ ID NO: 583 - DNA, 2534 bp, Cannabis sativa
tttttttttttttggttgttgaagataaatcgtgctttgttaattaactatttaagatattttataaaaagaagcaaacacgtgaatggatatacatgtgcagtcgaaaatgaaatataaaaaagaatgaataagagttgccaaattgaaccttttaattagttcaatgaagaaagtgatccatgcatttatgcatattttcctccacaacataggatccttcctttctgatcctaatacatgtacttaaaagggatgataacccaattaattacttgaccataatacattattaattaagcgatcgatatcttatgaagaccatgattattatattatacatataattaaaaattagtttatatacctgtacttgcacaaatacatcaaataaaaaaaaaatgtaagcacttactttaattaattacttgctagtatatatgaattcaatcccttttaaacccgataatttgttttcttaccctgaaaacaattgaaattttttattaaataaaaaaaagaaagagttaattgtgtcacgtagattgtagagaaaacctagcaacaagtgtatgaaaattattgaaaggaaaaatcaaggattgtgacattgatgaatcgaaaaattaatacgaaaagtgataaaataaaattatgcatgtatagatattgaaagtaagagatatttggattaagaattttgcctccgaaaagatcagcacagcaggcttataatgcataattgcttatggcaaccaaatgaaaattgtgtgacggaagtaagtttggcggtttagattcttatatttgatagaaacatgtgtctttccatgcattaattaaattttgtcttggctctagaggaaaaaaagtgataatttgtattcttttgtagtactaattaaagagatggattataaacagaaaagaattgccaatggttttggaatgtagaaagtgattgtttttatttgagtggtagaaacttaaacaacaatgactaatcatacatatcatgtaatacattagatggcttggacggttttgtgtgaccaaaaatcctataatgttaatttatatatatacaaatagtactacacaaaggctatactttcaccaattatacttggtcggtgaggagtggcacccttattcctggcctcctgatccagccccacatatttatatatatagttatgtaatatatatttatactgtttgaatatggggatcactatttttttttttattattattataaaaaaaatcatccagaataaatttatatatatatatatatatatatatatggatgagtccgcgtgcatttgtatgtatctatagctaggttaaccagactgtttggtcaaacgaaagtcttttcagaaaatattaagcctccgcgtgagtccattttggcaaaaataataaccatcgtatattattactatcgacacacatgaatgaatatgaagatataaagatatgactacttgtatttaaagcataaaaaaaaatattctctcaaagaaaaaaaaaagcatcaaaaaaatgtaaatgctcaaaaattgtatcaaatggacaaaattctgaaattaaaaatatttttagtcaatttggtaaatatgtttacctgataaatatttttgaacatttgttacattttgttagtattagaattagttaggttgttattctaactgttttggtagttgattattttagttatttttcccctagttgttgagtcatttttttggtcattgtaaggcctctttttcagcttcacaacataataagagaaatacttcttctccttcttctctctttttcttgctctgaacttgtcatagttagtgatgaggtcctaaattcaaatcaccttgtaattgtatgtgtatcaaaagtaggttacccttctctaccacatctaattgtaataattagacttaattgttagattgtagccctacaagggaccaaccgtggcatgtatgcgcccactcagatttttgaatttaaatttaggtataggcgtaaagtagatagagtgaaatcgagcgtaagtaaacatctcatttttgttttcatatggatattgaattaacaaaatgttcatcaaaggaaatatatatatgcgtagtattgtgcacgagttttggttgattgtaagttgttcgtgaaaaatgtttaggtgtggcgtgtgggggatttgtgtctttttggcttgctatatagctagctagctagtgctactaccacacttgttcacatgcattatatatatatatacatatactacatatatatttacaaatttatgtgtatcaatgtaatttaggtacatccatggccaaattgaagaccgccaaattggttcaggccacgagatacttgttctaatgtgtcaaacacattattatactctccaactaacccctcatatgcttccaatatctaccctatagaccatgaccccctttcttatagacccatccctaaacttttttatatatgtatgtatacactgtaac

SEQ ID NO: 584 - DNA, 679 bp, Cannabis sativa
catttctttctcgggtttctaaagatcagctatgatgttttgaaaaatttaaaaatcagaaatcttccttgtgagtaaacggcctataagacaccgtcaaactccacttcatttacttcgtctttttcaaaaataacttcatagttctccccactttcaggcaagtatcaaaccattttttcattatctcgttggtagccatgctggtggaagccatgaaagagcaacacaaaaagtatagttaaagacagagcaaagcaacaaagacaacaaaaactaacaaccttaaacaaatactctctaagaatgagagacacaaacccatatcacaagtcaggactaactggttgttcttataaaaagtattaccattcttataaaaaatattaccccataagtatttagttgttctctgtttatattttaaaataattttctgaatatggaccacaatgaaaaatctaatttattgatgcaaaatatataaatattacctctaataatataaatatatctactctataaaattgataatacaatttatattcatgaagacattttaagataagagttggtcttattcgacccacacatttacaactttacatgtcaatagtatgttagtcacatgattgaaacttaactaaagttctactagtaactagttcatgataccatt

SEQ ID NO: 585 - DNA, 2089 bp, Cannabis sativa
ttttttttttttttaaatcaatatggtattgatcctttttcttatatgattttttcgtaatggtagtaatttttctctattgattttttttttcataaacacccagtttttgaactctcacactagttcaaacaaattttccattgcaaatatacataggaaacactagaaacatgtataataatttattaaccagtttagattttagtgttgtgtcattatttacagaagtctagtttgaggatatccaaggatggatcgtaaagttattgagctggatgaaggatggacttacatgcaaaaggggattacaaagctgaagagaattttggaagaattacctgaacctcctttcactggagaggaatacatgatgctgtatacgtatctgtatacgtatcctttttttttttatttatttatttattatatttgatgttatttttagcaaatctatgaatgtaaaaatgctctctctcattgtccacctactgttttttctttttctgcttacattgtatatgctttccttaataatatgtaaagtaccatctacaacatgtgtacacaaaagcccccgcatgattattctcaacagctttatgacaaataccgagaggcgtttgaagaatatattacgacaatggtgaggattaatttttttgggtaataattttgtccatcacaaggtctattggttaacctttattagcattgaaacatgtatgcttgttgttgctgagattgcttttggtttgtcattttttttttcttttgattttgaaattggactattttaagtaacaattactgtgtagttattcaggagggactcaaaccttaggcccgactgtttgagctatcccttatggtaaacttctttataatttttcaaaatgtcaattaatgcatgtttcatttatttatttattctaggtattgccctctcttagggaaaagcatgatgagtttatgctgagagaacttgtgaaacgctgggcaaatcataaagttatggttaggtggctttcacgcttcttcttttacctggatcgatatttcattgctcgtcgatcgcttcctccactcaatgaagttggacttgcctgcttccgagacttagttagtggcctcctatccttcctgggataacatgtatatacatgaataggattgtaaacttatattacttcatatttatttatgtgctatcaggtttatagagaggtaaattctaaggccagagatgctgtggttgctttggtaagctcatgtttttgtagcatgttggactcttttaatgttaatgtgagcattagtaattagtgattgaaaaccagattgacaaggagcgtgagggagagcagattgacagagcattgctgaagaatgttatagatatatttgttgaaattggaatgggacatatggaatcttatgaactggattttgagggaccaatgctactggacagtggtgcatattattctcgtaaagcctcctattggattttggaggattcttgtcctgattacatgttgaaggtagtttgtcacattgctcatcttgtcacgtatacaatctgtatattcttttttgctgattatgattataacaattataatgaaaatttcaggccgaggaatgcttgaaaagagagagagatagagtctctaattacttgcattcgagcagtgagccaaagttggtggaggttggttaatacacacacatttatatatttataggaaagaaatagttatgtttatacagatgatggggcaaatatttaattaatataggtgatggggtatcatctatatcttgatcatgtacactaaaaggtttcaatatggttttggtctaaaagcttgttgaccaagtctttatccataatagtcatgaagatgtgatcagtaaagtggtgcatattatgtctttaatgcttatccaaagccaaatattatgtagaaaaataaattacattatccaaagccaaacatgatgtaggaaaataacttaaattgaccctaagattgtgatagacatttatgtatcaattcatacatacaaattaataagctttctc

SEQ ID NO: 586 - DNA, 1500 bp, Cannabis sativa
gtacgtttctgtatcatctctactactccttacttatttctccttttttttttagttaaatatattcccatcatcatacactcgatctttcttttttcttctgataattaagtcaacggattgacgaaaattaaatgctttttatttttgtttttgtgaaacagggatctttcatacaataatttttctgaaattgatataccagtaccagatctagatctgtgagagcttatgttaattaattcctgaaagtacaatttttttgtttggtacgtatatattttgcagcacacttagatataataattattattaactacacaatgatttaggaatttgtttgcctgttgctgctgccagagctccgaaaccactgaaccatatatgtacgtatatgccaatattttatccatattataatatcttttctattattctcatttcacaaaaatttaatttggttatgtaataattgtaggcttcaaccacctgagatgatgaaagccaattttcctggaaaaaaacccaagtgtaaatctcgtttaacttactatatattcttcgattattggggattattttaattttaattttttaatcatgattaacttgcagtttataacttgttcataaattgtggtggtgaagaaaccaatttcaatgggactcattacgatgcagacaatgaaacaacacgttttcactcaataagttcaaagcgaaattgggcttttagcttctctggagatttcttcacacctactgtaaatactagtgattattacacgaagagagtgccttgtaaaatctccaactcacagtcatccatatatgaatcagctcgtctctcccctgtttcccttaactattatgcctataaactttacaaaggcaaatacaatgtcacgtttcactttgctgaaattgtttttagtaaagactatgatagactcagaaaacgcgtgtttgacgtatacattcaggtatgtaagtacaattaattaattttataatcatcatcatcatcatctttgaattaataatattaatcatcacttttcagggaaagagggaattgagggattttaacattagagatcaggcaggggcaagtgatagagcatttaatgtaacaattccaactgaagttaataacagcataatgcatatacacatgtattgggcaggaaaggggtcctgggtcaatgcacccaatttcaatggacctctaatatcagccatttccatcattccaggtaacaaaatttggactattactagtaatgatctagtatcatctgttcattattaattaattaattaattcatgcttaattagacttccccgttggcggtgagaagctatctccctggcttgtggcactgataactgtagcttcattcgtaattgtgctgctgctgttattgactatagtctggttaatgggatggcttgacgacgacgagttaaaaggtacgtaacacattaaaattaaatcg

SEQ ID NO: 587 - DNA, 5149 bp, Cannabis sativa
aacaatatattagtcattatacaagaaagaattttttccaactaggaaacctcgttttcattatataaggaagaattttttccaactaggaaacttcgttttccatctgtagtacatatcttgctaacccatgtactgcagtattactatttcacatcacatattgaagacatacaccttaaaaaacaaataacaaacacttaatagatctaatattacaaccttactgggagagactctcataaagagaattgattgaatttacaacgatttcagcatcactttccactaaggaaacaaataagtcaaattgcaaacaccattttaaagcataggaaattgccaatgctttagcttcttcaagagagaaaaaatcaggcaaaaatttagcaaaacatcccaatggaaagccatcagaatcacaaactaaagccccaaaaccaataatactgttttcacaacgaatagtaacatccacatttaactttaacaatccagcaagagattttaatcaataaataactcgtgagaggagagaaatcttaaccgtttgcttatatgatttttaagcctgaagccaactatcataatattgaaatcttcaattatcatattattgtcattttgtatttgttttgctttactgtttcgtcaggaggacatagttaaagaaatagatcattttttttttttgctgaacaaaatcatgataatgaactcgttggaaatagtgcatttatgtaacgaccaatatgcaaacttgaaccaaagtaatgatcttttttcctcattctaagagtcaataaaatcatgtctcagatcgaatatgtttctcaaaagtagcaggttattttagttgatgaggttgatgaatctactgatgtcattcttgatgcttttcttttttgctaactcattctcgatgcttttcactctagactttttgtagctatgaagcatctcggactgaatttaaaacaattatactataaacaaaaatatacataaatagtcaaaatcacaatttatacgcaaaaacataaacaatttaatgtatgaaatcacagagcagtgattgcaatttacaaataatatttaatagactaataactaaaacattaccaagttccaggtgtcaacagtcaaatgattcataaactctaacaaaatgataaaaatttcattttgccacacataattgaccaagactttcataaaacaataatctcatcaaatacctaacacacacactgacacataaatatatatacacaatactttgtcagcaacgaaaacgttatcctaataagaatcagacataatattcaaatacttacgtaagaactcactatcagtttctagaaatattataataaagagctacacaacaaagagaaactacacattaacttctgagaatatgaaaggtcttgagggacctggtgatgttgatgaatctgagacataattgcttgaagaatactgaaattgatcttgagtggaccttgtggtggtagatgatgtataagaggtagaattaatattgaatgaaggagcaaaatacattggcctaggcaacttggatggcagggtaggcaatggagcttcaaaatttaaaacgctcaccacttgtttgatattaggcctgaatatgggatcaggatgacaacaccataatccagttaccatcaagctctccatctgcctctcatcaaattcctcacttaatttcatgtcagctgcttcaaatatttgccctttaccgtacaagtcccacacccactccacaaggcttacttggcttggtattgcgtttcttattactggttttcttccacagcagatttcaagggccaccatcccaaagctatatacatcagattctttactagccctcccagtagtgacacattctggggccatgtaacccatagtgcctgctaacattgttgtttgtaaacctgattcatggtctgcaagccgggctaggccgaaatctcctagcttggcattgaagtttgaatctaacattacattgcttgacttgatatctctatgcacaacacattgttcccattcttcatgaaggtacaacaaggatgaagctaagccaagagctatcctatatcttactgcccatgttagagttggtctccctccaaagagatgattatcaaggctaccattgggcaaaaattcatacacaagaaggaactcaccttttgtatggcaccaaccaataagttgaaccaaatttctgtgtctcagacgactaatgattttcacctcagaaacatactccttttttccctgtgttgatcctttagatatcctcttaactgccacttctgttttagattctgttaacagacctctgtaaacacctccaaatcctccctgtccaagcttcccttcctctgaaaaattgtttgttgcatagtttagttctcggtaagtgaacctctttggtccagtttctccaaattccccatcaatggaatcatcatactcttcctcttccattctctttgcagctcttctctttaagataaaccaaatcgctagtagtccacatatcaaaataccgaaaccaacacataaaccaatccacaaacctgtgttgcctttttctttaatctccaaccttgaggtaaaggaccaagaaagaatgttatgtgtttcaaatgagacaccagtggctgcagagaaaccaactcggaccttttctggcaagacgttcttcatatccaccggatattgaagctggttttgagtagattgccctgtgtagggagttccattataagttagaaagacacctaacatagtagtaatggagttaaaacttacccaagcatttgctactcttccatctttaatgctactattccatgtaacattacttattgatataatggagtttacattgatccctatgtgattagagcttggatcccatggattgtcataactatcaaactcaactgcaacaataggattggtttggctggagtcatttgcattttcaggactgaaaagagctagatatccacctgttgaattagcagggatgtcggactcaaaaggcgcaatgaagaaggagattccatccccaaacttcctcttggtgtcatttgctttgatcacgaaagagaagcctgcagtaaaatctgtgacttcgcctgagtccttattccaaagctgcactggttttgaatatgaggcccgaccaacactattaggaagggaaaagccttgaccatcaactttagtgagactcagagaatcattaaaaggagtagcatcaccttggaagtgaatatctttcagttccttagtttgaaacttagtaaagttaaaatgaagtgactctgcattgtttgccagactcaaaagaagcaacaagaaagtggtcttaaggatcaagtgtgaacatgggtgagggtgaatcttggaaactatcattattgtaatgaagattagtggattacaatggaggcagttattgtgtatagacataagagaggttacatggaagcatggaagagatttaagttattatgtagaaaatcttaaccctgttgttagctcacctaattcatgacttggtctttgttttgtcacatatatatattttatagctccattcaatttaaagagacattgctgaactgttcttggtcaattgtgtgtaatttctttttgtaataagaaagttaatacgtagaagatgataattggatatcctaattgtttatagaaaatttatgaccgactagccatatcacttaccacctctgtttttttaatagtgtagtcagtttaggaaatgtatagttgtgaatttcattttaataataatgttgagtattggttaaataagtcataaataagtaagggattttttattcgaagtctgcgatccacttccccaacagaagtattttgctggaattattgaatccatacaaattaaatctacattgcaggaaggtcaattctagtcattttgaaaaggaattgtctgaataactttacaacaataagacctgcaatttatcagagcttccttgtagctgagcctccattggatggctaatctccacctaccaacggcctgtataatgttcctagatgatgatagcatctcaacactactactttcccctctctctaaacaattggcctccaagaatgagcgaatctgacctgttgatgatgccaaaacattcttcagctgcaaagaacttaaagaatcttgtagtttctcaatgtctcttagaagcaaattgtcctcttcatatgatgtttgcaaattcttcaagacaaaattgcaattcttcaaaatccggttcattacaagtgcctcattttcaaccgaaagttgggatcctgaataaacaagatgagcaacagatcttcgttggtctggccgggttgcccataaccgcaaagccgaaagtagagcaaaagaaggttctccattttgctgtatatacattgactccataggccatgtgtttgaggtgcacaattcagattccaaaggaatgaagatcttttctcctggattttcattcaagataaagccatagtgttcaagaagctctatatttgtatacgaaccatagcacaataagacctgctctccttttttataatgtctcctggcatagaagcaatatgcagcaacatcttcctcaaaaccaccatcggtcaatctttctgaatgaaaatcaagttgttctgagtctaacacatcaattgggtcatccccatttacacaagggtaattcccaaatgaagaagattgcatcttgaaatttaagtcttctcccggtgcagcataattaaataagtctcccacagggcataaacacccagctacatcccatggtacatgcaaagtccgcgaagatacagtagcagacgcccaaagccatgccttaaaggtaagaagtctaggcttaaggttgagttctttcatcaccacattagcttctttccattccaactcagccttcaacacggccttttgtgtagcccaaattgcatcctccacttgcaaagcttgcttctcaaattcaccaaaagttgctaaaacgtcataactaattggaagattcatcaagtaaggataccaccacga

SEQ ID NO: 588 - DNA, 1344 bp, Cannabis sativa
aaaaaaaaagttaaaaaaatagtggtaattcgtctaaagttattagttttaatctttttaataaaaacattaattagatattaaattttacattaaaattttataattgtgcattgaagcacaatattaaaatttgatgtaaatctaccataattttttttttcgcgccaaatatatcacaatgtttacatctgagatggtacatggtctaaagtcacaacctcacacacatagagctagatactgatactgggactgtgccactgccactgccaccatcatttttctgggttcaatttttgctgcccaattaaggtttttggttcaacaattcacaccatgaaatctataacctcttcacccatatcacttcatttccaacctttcccgccaaaccctcctataacgtcgtcgtttcggaaagccacagggcaacagcagcaacaaccgccgctgccgccgcaaaagcgccgaaggaaacccaaaacgccgccgattttcacagagaaggacgcttttccagagtccttaccacttcacaacaaaaacccagttttcgtttacaaggacattcagaatttcgctaggcaaaacaagctgacccaggctatcaccatcttggactacctcaaccacgaaggcattcccgtcaaccccaccacattcgctgcccttatcaccgcttgcgtccgtacgaagtctctggaccacggtaaacaaatccatacgtttattcggatcaatgggctcgataaaaacgagttcttgcgtacgaaataatatgtatacggcttgtggttcggccgaagatgcccataaactgttcgacgaaagtcctagccggagcgtttacccttggaatgcgttactcagaggcgctgtggtctcgggtgggaggagatatagagatgctctgcatacatattttgaaatgcgggaattgggggttgagttgaatgtttatactttctctaatgccatcaagagctttgcgggttcaaaggcgctattgcaaggtttgaaaactcacagccttttgattaagaacggttttattggtagtgaaatgctgcggacgagtttgattgatatgtactttaaatgtggcaagattaagcttgcaaccaaagtgtttgaagaaattattgaaagagatattgttgtttggggaaccatgatttctggttttacacacaataggctgcaatggcaagcgttggattatttgagatggatggtggaggaaggtttaaggccaaattcagtcatattgaccatcattcttcctgcaataggtgatatttcagccttgaaactcggcagggaagctcatgcttatgttct

SEQ ID NO: 589 - DNA, 1161 bp, Cannabis sativa
  modified_base (608)..(610): a, c, t, g, unknown or other
  modified_base (659)..(660): a, c, t, g, unknown or other
ccatgttttttcaagtaagaacgggctcagcccagcacagcccatttcgtgtttcatacacatgcaattttgtgactttttatccggtgacaaagaaaggacattaagacaaaaaaagttttgttttaattttacatatgtattaactcacacacttataattattgtctttgaagttttattgtttattaaacataatttgttttaaatttgtaaagaaaaataaaatttaagaattgtcacaaaaaaaaaattataaggagatttcgcctgcaaatgtaatagtacaagtaacaagtaaattgtaacatttttcttttattattctactatttatcattaaaaagagagataattacataagacattattttttgtaaaaaaattatatttttatatttaaatatatatatatttttttacatttttacggttttttatagaaataacacgaaaataataaaaaaaatatataaaagtaacatgaaaataacatctaaataacagcaaaacaacaataaaaaataacatacagataacaaaaaatcaataataaattaacaagagtacaacataaaaagacaatatttttttaaataaaataaaannnaaaattataaaaatatttaaatttctgtaaaatcgtatttttgtaattnntttttttttttgttatttttacgtatttgtgaaataatcctctaaaagtgtatatttttttaaatagtacaagtaataagtaaattgtaaaattttattggcccatggaagggcaataatttagtctagttaatatgttgtttactggtgatgcaaaatgtgcataaacattaaacatcaatcccttgcttgctactaatgactagtgatgagtacaatttaatgaaataaattcaattttgaatttggacaatcatggaggttcataattttttgttttttgaattttattttgttatatactttaacaaaatacatataaaatacacctaagagccgttgaccccaattattatatggcttcttcatcaatcccctatctttaacttctctattattagccatctatctatccatacaaatcataaaacaaatataaatatataataattatgcattgaaagtgatacatatatataaataaagggatatgattttgtc

SEQ ID NO: 590 - DNA, 2761 bp, Cannabis sativa
ttctctattctaatcaactctcttccgtaggggctctgtaattctttctgttataactttatgagatctgctcctcttccctcattttctagttttattttccttttctttttcaaagcttattttctcgtcaacgcttttttttatttattatttatttagttattaccagcttaaaaaagatttttcaaaacaggtcatttccccatatatatttaagttccgagatataataatctaatacccacagatcctttcattatactatatttatatacacatgttagtttatctttctatacttattcatataaagtactgaccaccgttaagctgatccaaccagaaaaacaaaaccatgttgagaaaattggaaacttagtacatctcagaatattccagttcggtttcaaacaaaccggacacattttctgtcagagaaagaaaaaaaagtaccaaaaaagcgaaaaaaagatttagcaaaatcacaatgagagagcaggggcttgttggtcattttacagagatgatctggcggccatttatcaaatcttctgccaagtcctctactcttcttctcgtcgtgatctttctttttgccggtgcatttgtttccatgcgttcagttaccactgtaagttctaattttgtttttaatcaaagttaccactgttagttattagttattgttattgaaattttaattttgtattaaagttctttaagcaagaaatgttttctttcgaaaatgaatatgtgattagtgtgagtaacagaatgattatgtttacaaagcttaaacaacttcgtttagattgattaaaacaaaatatacagtgggcagagaactaaattcaaacggtgaaaaacgacgtcgttagttagtattcttcggcgtgatcgtcggtcaagtctattctttattttcctccgtattactattgaataattagagtccacgtgttttgcggtgtaagaaaattaagagcgcttgttttctcgtgtcttgaagacaattttttagtacttttttcttacttttcacgttcattgttaatttctttgctaagtctctggaaaccacataacactccataccgtccaatatattttaattttataaaaataacttaattagcattttctaatatccacgaattcatttaaagaaaatatttttaacatatacatttacctttgtcttgacttttctttatgtattattttgtcagaatgtcgcttctatgactatatcaccaattttaagcagaacatcacacaagtacccccaaaagcaacctgaaatttccaaaacaccccgaccaaaaatcgaaatcccactgaactgtactgattacaaccccactcatacctgccctacgaattatcccactacattcaacccagaagaagatgatcaggaccgtccctctccttccacgtgtcctgaatacttccgctggatccacgaagacctgagaccatgggcacaaacaggtataacaagagaaatggtggatagggccaaacgtacagctaactttagacttgtgatagtgaagggaaaggcttacgtagagaagtatcagaagtcattccagacaagagatgtttttacgctgtggggaattctacagttgttacggaggtaccctggaagagtaccagatttggatttgatgttcgactgtgtggactggccaagttattctttctaaggcatatagtggactcaatgccacgtcaccacctccattgtttcgttactgtggtgatgatagttcacttgatatagtctttcctgattggtcgttttggggttggtaagttttaaacttttatttaagttataaacaataatggtactaataataagtatatgagattggtatgtattaataaagatgagggttcatgttgtatataggcctgaaataaacataaagccttgggtgcctttattgaaggagttagaggaaggaaacaatagagcaagatgggtggacagagaaccttatgcttactggaaaggaaatccagttgttgcagccactaggcaagaccttcttaaatgtaatgtctccgaccaacaagaatggaatgctcgtgtttatgcccaggtttgtaatttcctatacatatatatagtccctttgtatccttcttttaagaattttaaaagagcttagacttaatcctttagaagttttcaatagagcattatgtgtgacaccccatattaaattacaccatgacaatttacaatctctcgtgttacttggcaactaagcattcctcttcctcttcgaataaatagtaattagttattttgcatgctaacatagtgtattgttagaaatttttatgattaaaataaatcatatatgattgtgtataaaatgtgaaatgaatcaaatgtatacactacacaaataaggatcgaaagatgtgtacatccagccattaataaatgtaaattaatgacattaatatattaatcagatctttatatctgcaaaaataagagtaaaataaatcagtgtggtatgattctttcaagctctctctaactttttttatgttgatatgatagaaaatgagtagtaagtttggagactaattctctatatttataaatggagactttcaattaaaatctgttcactacaattaattttcgaaatattttgagaaaattaaattaaaactattaaatgtcgtcaatcagtattagaatatttgatgtgatcaatgcatgatc

SEQ ID NO: 591 - DNA, 5271 bp, Cannabis sativa
atgttgttgcagggagctagtcaatcttggaatttggcactgagatatcctttcattagaaagcttgtggctctccttgaaaggtacaattgtagaccaaagatggagaagaatggaggtgctttggctgtggatttagaagggagacttatttcacattactatgatcctggcttgtcactcatttcaactggactcaagattggaaatcacctctacttaggctcaattggttatccttatattatcaaactcaatctactaaatcaccctgcacaaccataaacatgtttatgttgtattaaaaagcatatttggtatgtttattatcaataaaaatagcattaaacatagtgacacaaacatatatttgtgtgtgtgagttagttcaagaaaggcttcccatggcctttgctcttaacctcagaatgaacttctgtactttcccatttgaatttgtaggcaagtactcatggaaaatgacagtctttatagccatataatgaggcaaacgatccttacaaaatgtgataagttggtcttcattcacaccttcaaatccctctttgagtgtcacgaaagcacaaggcgtctctccccaatggctatcggggcgtccaacgacagcagcctcaaacacggcctcgtgactatacaaaacagtctctaactcaacactgcttatgttcaaaccccctgatatgattatatccttcattctatccttgatttctatataaccatcttcatatttcaccccaagatctccactatgaaaccaacctcccttaaatgcttcttctgttgctttcaagtctttaaagtaaccactcatcacagtgtttcccctgaacataatctcgccaattgtttccccgtcggccttcacactctccatggtcactgaatccttaacatccacttcctccatggcgagatggcgaagcccttgtctagcttttaacatagaccgctcatcaagaggcaaagcatcccattctggcttccatacacagttagtggcagcaccataagtttcggtaaggccataaatctgatttattcgaaaccccatctcttccatccgcgcaagaatctggggcggtgctggtgcaccgcctgttaagacctccaccgtgtgctgcagcagcctacgctcacagacagaggagttaacaatcatgttcatgacggttggcacagctcccatgtgtgtcacattgtgcatagctatattatcataaatggcttgtggagtgactttatttatgactatgttagcagcaccttgagccgctgaagcccacaagacgtcccagccgttgcagttgaacataggcatgctccacaggcagacagacatgtctctcaaccccaaaagcagagcagtggctaaggagtttaagtaagccccacggtgactgtagacaacagctttggggcgggcagttgttcccgaggtgtagtttatggcaattggatccaactcggtatgcggccttagaatctcaaactgatctgttccggtagccagaagagtttcatagtcagaatctgtaagtggcactaaaatgggaggctttgtgtctgattgagcgagcaactgtagtgctccttgagcaatatcgagtaattggttgtcaacaaagatgactttggcttctgagtgtcttagcaatgctgacaccatgaacgaatcaagtcgagcattgagtgtacagagaatcccaccagccattggaacaccgaaatgaagctcgtagatttgtggaaggttgtatgaaaaggtagcaacctatacaaaaaaaccgaaacaaatgaatcaacaaacaaagttcatcattagaattcaaaaaaagaaaatgaaatcaacatttaacataccacatctccacgtgaaattcccatgttggccaaggcagaagctagtttaagacaacgttggtgagtttcaccccatgtgtgacttgtagagccataaacaagtgaagtattgtctgtgtaagcctttgatgatctctctaagaagcctatgggagacaaaggaacataatttgcagagcaacgaagtaaaccatccattgatttccacgattctggttcttcaaacttggaatatgaacgattgaatttggagtagtgagaaggatttagagcacgagcgaaacgagtcaatgagtgtttgatcatcattgttagacttagcagaggaagcagagtgaaatgaattggccagagattacaagactgtaatattaataaactaagtcatattgaaaactcagaaaaggtctttgactaattctattaacaaaacagatatttgtcttgtttgattaagttttctggttgatttatttgattgtgtttgtattactgtctttgttgatgccattaatattggtttttgactttttaacttcaacaatggcatatcttagtcaagctaatacaacaaacttaaatacaaaatcaattaagaataattaattgtgttgtaaatgaagaactaagcattactcttccatgtctctctaattccttttcttgcttattattgtaaattattttcttgttatactgtttctaaaacaaagtcatctctctaaaccagaaaacaatcccattcaaaaaagaaaaaaaaataaatcttaagcatactatctctactattcttctggcatctcaattctccatgtttggttcacaatttcattaattaaagataattattattattattaattaccagtcatcatttggctgtttaatctctataattttcactgaaagttaacagtgctcatgtacattgagcagatttattttataaccattaatccaactgtactaaatagtattaatgagcattacaatttaaaaaggttcaagaaaggctgcccatggcctttgctttttccttcaaaataaacttttgtatcttaccagttgaagtctttggcaaatcttgaaacactacagtcttgggagccatataatgaggcaaatgatctctacaaaatttgataatctcatcaccattaacaacaccatcaaatccttccttaagtgtcacgaaagcacaaggcgtctcgccccaaatcttatcagggcgcgccaccacagcagcctcgagcactgcttcatggctatacaacacattctcaacctcaattgtactcacattctcccctcctgatatcaccacatctttctttctatccttaatttctacataaccatcctcatgtttcaccccaagatccccactatgaaaccaccctcccctgaaagcctcctctgtcgccttcaagtccttaaagtatccactcatcacagtgtttcccctaaacataacctcaccaattgttgcaccatccgccctaacactttccattgtcaccggatttttcacatccatctcttccatcccaagatggtttaacccttgtcgagctttcaatgcataccgttcctctggctgcagagcatcccactctggtttgcatacacaatgagtagctggaccataagtttcagtgaggccatagatatgagttactacaaaccccatttcttccatctttgcaatgacttgtggcgggggcggtgagcctcccgtcatgatctccaccttatgggggagacgcgggtggtgaagacagtcttttgatgagttcacaagcatgttcaacacagttggtgctgctccaagatgtgtcacattatgcaaataaatgttatcaaaaatagcttttggggtaacttttcgaatgcatatgtttgttgcaccttgagctgcagccccccatggaagacaccaaccgttgctatgaaacataggcactgaccatagatacactggccttgatcccatgttatgaaccaaaactatggctatggagttcaaaaacgccccgcgatgagtgtaaacaacagctttcgggtttgaagttgtgcctgaggtgtagtttatgctgatgggatcatattcacttttaggcctaattattttgaagtcatcattcccaatggctaacaaatcatcatagtgcatgtatgagtggttgttcttagattcgaatttggttagtaaaactaaagttggagggttgatatgtttttgtgataaaagatcaaatgctccttgaactgtttgtagtaagtgatgttctacaaagatgagtttggcttctgagtgtgctagtagggttgacaccatagtcgagtcttgtcgagcattgagtgtgcagagaatcccaccagccattgggactgcaaagtgaagctcatagatttctggtagattgtaagaaaaggtagccacctatttggtcaacaattaaaaatttgtaagtaattgaaaaatgaaaattactaatactaatcatttaacaatttgagatgatatttaactcaagcttttgatctttagagttgttttaatagttttgtgtacgtatcaaaatgagttaaaagtgtttttttttatgtgatatgtaaagaaaaccttcttgtttagttttttaggatcatctttttttcgtgttattttttgatgttatttttaaaattgtatcttgtggcttcaataagaatacttttttaataaacgataaatttccttctttaatcttataaaaacgattttttttaattattttagtgtatagttatcaaattaaatagattttttaagtgggaattctcataagcttcaagcccgaccttggtataaacgatttaagtttgtgcagtgtccacttaatttaaggaccaaaaacaaattatccccttctaaaaatattttttttattgattttggaaaaatactatatattttttctaaataaaaagttcaaaaacaacttttttttttatagcccactaaattttaagattggccctagtttcaatgaatgtttatctgttcatctctgcctgtgatacccaataccactacgaggtgacatcttacaaatcgttaataatttttcatataattgtggtgttgctcgatattactggtgcctaatttttacaattcaaaaacaaaagtagtttaatgtaagtagataccacatctccatgtgaaattcccaagtgggtgagagcagaagctagcttgagacaacgttgataagtttggttccaagtgtattggatagagccatagataagagatgtgttatctctataagccttagaagaacgctccaaaaagccaatgggagacaaaggaacatcatttgcactacactcaactattaa

SEQ ID NO: 592 - DNA, 5317 bp, Cannabis sativa
aaaaaaaaaaaaaaaactttagacactagtattcaataataatattctataaatgaaagtgcaatcttttaaactcattcatatatttcatgaatatttaatgtgattcatatcactttgtaaaaagcaaaaaagaatcatcactaacagttaacacaattaattttattgacatttttttaactatatcatatattttctcattcatcatcgatcattttcacaaatatttagattattttactatgtatgattctctttaactatttataacgttcagattcaatgaattcagttgtctacacttgaaatgcttttactatgtcatatctaaagcaatgaattttgttagtttcgtacaaaatctggtctttaatttcatcaaaacatattaaaataataataataataatataaaatatactacttccaatcctacctagccactgtctcataatattatttggaaaataataatttttagattttaaaactttttattaaaatttattttcaaagattgttatgataaaaaaataaatttagatctttaagacattttatgaagatttatttccaaaaattgtaatggtaaaagataataagttttagattttaagactatttatgaagatctatttccgaaaattcttatggtgaataagtgttggatttttttaacaaataagttttagattttaaggcttttaatgaagatctaaattgttatggtgagtgaattagttttagatttttttttaacaaataagttttagattttattaagattttttcattcaaaaaaaaaaaaaaagcagaaggtaaataaaatgaaagaggttgggaatgacacccataaagccgtgcttaaacatttgtcaacgagtttaggacctaatactgtactagagttctccgactcatttttctatgcccattttacccctactttgccgttgaggctacgccttgtcctgagaagaccacagtagaaaaagtagcttgacttagctaacatacgctttatgccgtacatatcaccaccgactatactacccttctccttccttgaattctcaaattccctccaatggcggatcaactgcggacctatgcctatcttctcctctatatcggcctctccagtggtcaaatctttttcaacaaggtactcaccactttttctttctctcttagttagatctacactcttgccatttcgttttttcttaaaccgttgggatttgattttgtctgtttgttcacgaaatggcctcgaatttctgttctattcactaatttttgtgtctttgagtttcttgtctttgcacttttggaaagttgagaggagaagaatcttaatgtgagagtcgtttttgaagtgttgttttgactttttattcttccatatgcttagcaagagccaattaatagggatgaaagggtttttgctgttgaaggcatactgcattgggtgatgaccacaagcccacttgtggctcatatgagtacagtgttgctgattaatttgattttcaatgaaaacaattattggctttacttgggagctttcaataagtgttcaaaactgaatggaaaaattaagcacaaaaagttgaatcttcataatgcaattcctgctgttagatagagtaccttaaaatttagatatatgttttgtaccaaaatatgaaaattctacacgtatgttgtcttgcatcaagaaccattttgcaaatctccccctccccttgtgttgtgatagtagaaagaatagaaatatttttgtttttcctactgtttgttttattttcacctttcattgctagaggaaaccttcaccctatgaaattttctattgttggaatttctacactgaaattggagtagtatgagaatttgaagtgtagtatgcatcttaaattcttaatcttgggatatattaagtgtattctaggggtaagactgcaataaagtaacaacctcatcttgttagcatttggacagtactacactgccatccgtttaatttttgagttatgactaattcattatcgttgttatcgatgattttatttccatctcgttttatttgttttcgtaatcacaggcctgatatagttcccttttcatcatttaattttgaaatgcagtgggttttatcttctaaggaaataaactttccgtatcctcttgggttgactcttcttcacatggttttctcttcagtcttatgttttatagtcaccaaagtttttaaggtattcagttgagttaatttgttatattcatctatgagtcaaatctttacaatgcaactgttaatcttcatctaccatacctcacagattataaagattgaagaaggaatgactccggaagtgtaagtgatggggagatagctttcctcttatctattatttttatttgttgtccttgtccatttattggttttctttttcttttttctttcttaatggtatttggctatactgtagtaaacattaaaaaaaaaaaaaagatgagctcatagtgagtattagtcaggaaaatttagttggtattgctcaagaaaaattatcgatgattcacgattacttttatgacaaatgttcattatgctttgacctagcaagagatttggtgtccgcaaattaaatgatttaattagtacttacgagacttcttcagtaaattaggcatactaatatgtggatctgtagaaattttaaattattggttcctagcaagtcatatgtaaactatcctacttcattctattgcacatcactctttaggaagtagaattacctttataaataaaagttataataagaatgaaaaacgaattgtgttacctcaacgtatagggaaacaagtttcttgcaaaagaagactaaaaattcttcaaattttctcatgagcaatagaaggtgttttttgggggcttaaatttgcttacaaatacttaaacattttccactgctactgttattttaataattgtgttggctggtgaagaaatagtcattttaatatattttatttttctgtagtttttgttatcattgatgaaatcaagcatgccaatgtttaacttatttcttgataatatttattagcattcaattcctgaccaaagtttttatgtatagctatgcaacatcagttgtgccaattggtgcaatgtttgcaatgactctttggcttgggaacactgcatacctttatatttctgttgcttttgcacaaatgctgaaggcaatcagtaagttttgatattctttttagcagaaattaaaagttctgaataatgtttgtcaaaagtaaaagctctgaatatagtactatttgttatatttataacaagatatatgacatatttatctctatccagtgccagtagctgtatttattcttggagtagcggcaggacttgaggtgatgagctgcagaatgctattgatcatgtcagtgataagtcttggtgttctagtggcttcaattggtgaaatacatattaactgggtgggagtagtttaccagatgggaggagttgttggagaagctttaaggcttattttcatggagatttttgttaaaagaaagggacttaagttaaaccccgtatctgtcatgtactatgtcagtcctttcaggtaatatcattttgttcttctgcttgtatctaatcacatttctggatgatttactttctacctgtaaatacatatgcctgttgtggactaaattgttctgctatgtagtgctctttgcctattcattccttggatttttcttgaaaaaccaaagatggatgctagcggcacatggaattttccacccttggtgttagcactcaattctctgtgtacttttgccctcaacttatcagttttcctagtgattacgcatacaagtgctttgaccattcgagtggctggagttgtcaaggattgggttgttgtcttattgtctgcccttttatttgctgatacaaagctgacattgataaatctcttgggttatgccattggtacgtaaatgacaactcattctttctatcttttgttacttgaatcacgccattgaatcctatgaaaagcctttgaaagaatattgaattcaggtctattttagtatgtttatctgctcaccattattggcctaaatctcttgtttttcttctttttttggttgcctttctttctcgggaaaattggataaacttggattacaagtaagacttgactgtaattatgtcctgcaccaactaacagggtgacctctcaagatccacctagtttcaattgtttattttagatagttttattctcatctattgcttaaccagttaagttggcttacaacaggaacaactagaagagttatatctattttccttcaacccttctctaatgcccacattattttcaaacacgcacattctcatatgtctaaattgttttctgattttgaagaaatgaagcattagattcttcagtagcttgacaatttttttcacttatatttccttcccttgtcccctccagccttttctgatcttgttcatcaatccttagaaataagcttatagacaattatatgctttgtcaaaagaaactctagtgatatcattgctttgttagataaaaatttgactttatcttagttaggttgctttgttagtgatatcattttattgtgtagtgattttgttgatatctctttccaacactgtcctataatttctaatggttctgcacatctgttggcaaaactagcagtctccttagagttagagggtaaatatgtttggcggtttgactaccttgactgtattttgaactcaattcaggcagatgcagttgatccatgatattttgaaaccaagattgatgtgtgctagaatggtactgtaacaagatattcattattgatattcttaatgcagccatagcaggcgtagcagcatataacaacagcaagctaaaaaaagaagctactggacgtggcactgaagctactggacgcacaactgatgatacagaaaatgctgctgagtctgtaccactgaccacatacttggatcccaacaagtagcactacattaggagcagtctttcaagtttaggtatgtctaacaaaatccattctcacaaagtacatgtttttattctattaagatctgtttccatccaaataactccaggcatcgtagaacaatccaatgaacttttgctatatctgcttttatgttacaaagttaaaggggtagctcaaatagtcaggatatatgacatgtgatgtgattttg

SEQ ID NO: 593 - DNA, 2936 bp, Cannabis sativa
aggcagccgaggccattggtgcaattggtttaaagagtaatgttgatttgttgaggaagagtttagtcttagatccagctcaagaagttcgagaaacatgtgaattggccctccaacgaattgagcagttgaaggatgatggtgagaaattcactgttgaaaagtcaccttttctgtcagttgatccagctgcagcagctacttcatgctcttcagtacatcagcttaggtttgtctcgttttagatactctaacatggtacgaatttgctatgtttttaacttgtatatcctgattgattcatagggatgttcttctggatgaagaaaaaggcatgtatgagcggtatgcagctctttttgcacttagaaataatggtggagatgaagctgtagccgctgtaattgattctttgggttcaaagagtgcccttctacgacatgaggttggttcaattagtcttattcttcatacttattagaaatatctacattttcttcttggttataggaaaggctcatgtttggggttccatgctttaatcctttggctacatatttcgctaaaaattcaggtggcatatgtgttgggccaactgcaaaacaaagctgcttcagatgctctttcagacatacttaaggatgtcaatgaacacccaatggttagacatgaagctgctgaagcacttggttccatcgccggtattatgttatacctgctctacttcttgctttttacatctatagttctgaatacgatttatttaacttacatgcttaattgaatgaaatttaagatgatcgaagtgtgtcacttctcgaggaattcgccaaggattctgagccaatcgtttcacagagttgtgaagttgctctatgtatgctggaatatgaacgatcagggaagccattcgaggtaagcatacaactgttttgagcttagaatctatcatgcatctatatcatacatagcccttttgttaaatgatgactaagaccagtattttacacagtttttcttcacgcaaactcctctactgcaataacagttgttcaacacttttgctttgtttgaagacactcttgtcatctcctagcaagaggagatttattcttaaactgtatttataccaatttatggctcaaatgtaactcgaggaaagagagttctctttcttttcgaatcgttttagctagtttggatgaacatgttttggtaatacatactacagatattgaatatgtataacacatcacgagcatgtcttctcgcgaagagttttaacagttgaattgtctattcttaataaggctttcttgttagtttacgttaaattatattcgttcatcaagatcatttcgatccaatttatttgagtgaatcggataagggattaaattaatcttttaattatttatttatttttttttatttcatatgaaaaataaatacttgttcaagcttaagtaggttgaaatcatagtgcaagcaagaaaaaaatttagataaatttagattggctagaaattaagcttgaacaaattaagcttaataaatttagataaatgaaatatggaagtttcttaataaagattacataaatttgaatgatgatggtgatgacaatgatgactattaataggactttcattgaaatgtgtttaaaccttggcacacatttactctcattagttattcaacctattcctcttcccaataggaatcaaaatttcaattatatgtattttacatgttagatttttaaaaaattaaatatccatgtgatatatgatgtcattttagtatatttaaaaagttagtcggcactctcatgtatgtcaagttgaacctgactataagcggactaggtctgtactaagatcccactctaaaatacttcattgcatatactataatatagtagtagatatggaagagattttgagaacaaaaccttatgtatccatacattcttacattttcttttttcatatcaatgtgataatgccttctccaagtatatgtataatatattagtaacttgtcaatgttatttcttgataaaagttactagaaaattctattactaattcaaccacctaaaaattcgtcaagtttcagaacatttaggccctgtttggtatagcttttatttatagcttcgggaaaaagtcttttaacactcttaaaagtgcttgattttttaattctaaaagctaaaagcagcttaaccaaacaaggtcttaatgtcctgaaaaactctgtaaccgggagagtcttgagtacaatcccttggattctaataagcttgaatgtgaacccatttcaacaatctcacctttgtccataacaacaatagtatctgagtttttgatggtggaaagcctatgagcaactgtgatttgtgtaatacatgacattcgatcgccatttagattcatcgattccaaagcattgacaatgcttttctcagactcagcatcaagagcacttgttgcttcatcgagcagcatgattgcaggtcgcttcagcagagttctagcaatggcgactctttgcttttggccacccgaaagttgacaccctttttccccaacaacagtgtcatatccattgggtaaagtgcttacaaattcatgtatgtttgcttgccttgatgcttccacaatctcagtttctgtagcctcatttgtcccataacaaatattggatcgaatcgaagaactaaacagtaaaggctcttgttgcaccaatccaatttgtgtcctcaaccatctcaggttatattcctttatttctttcccatcaatgagtatattcccttctatagaatcataaaatctaagcaaaagtgccaaaatggaagactttccagccccacttggaccaacaagagcaactttggagcctgcttcaatttccaaactaaagttgtt

SEQ ID NO: 594 - DNA, 1989 bp, Cannabis sativa
cttatagacccactgaaggcaaatttacaaactatttatgaactgttgtagtagatatttctgttcctaattctagatgtttcaattaaaactcttccagttgaatgattggggattgaaaaaataaattcttttaaagaaaaataaggatgggttgtagcttattacagtaggaatagatttctgtagttaataacattatgaatttttgaggactttatttttgacaataggagtttcttgtggttgcaatgtgtattcttaattaaaatgaagtagttatggccaattacaatatttagagcttaaatttgaattgttatttggtttactgatgacttgacttttcttgtgatctatgcatattaaattcgatttcctttgggttgatgatgtatattgtataagaattacactgtttggaaattgtggattttgattttgttgtggattgttattcttgataaatgtaatctttctatgtggaactcccaatgtttctttattctttagcaagaagaacaagtgtgatccaaagtgtatgaaaagatctactaagaagtgtattttaagctaatcttggtttacttatcaaaaaaagctaatcttggtttctcttcatgtgatctttgtggccaaaaagtgttaaatttcatgaagagtattgctaatgctaatgctgctctattcatacattgtaactttgaaaggaaatccaatgtctttcggttgttttcgtataaaatgccatcttaaagagtttgaggatgatttttcaactgttgaatcaaaacccagtaatatttatttcttgacttctgtttttaagctggtaggacttaggagaggggaacctttgcatcctaaataagaaaacttttaaagatatatataaaattagaatgggaatgaagaaaaatattagagaaaatgaaacttggagattttgatatttcttgttgtgaccccaacttttgatggtaaagacaaaaatgtcaccatgacattggcaaaggcgtggaggatggtgaatgagatttttttttttttttcttgagtggaggaacaaagcaaagaagtcatgactgttctgttctgctgtgcttttggtggtaccattgttaggagagtgagaataaacttaaggaaggaagttgtatggaagatacgtcgatgtcagcgaaaagataatcttgtatttatgcacttgggcatatcagctgcttcaaaagctgttgtcatgatctaatcgataagtgtggtcactactcagtctgccactgccaatggtgcacatcaactatagagagtataaacaaaactagtgattttttttaagtttttctttctttttcaaattatatatattaaaaaaaaagacttagaaaagagtaatggttatttatttaggaaaatctatgataccgcgtatatatcactctccccaaaaacatagtcataatttttttttctgattttttatacctcgacaattcatattcgtgttgtgtgaaatgccaaactcaaatcgtgttaaaaatccaacatatttataaatgggttaacgaatccgacccgtttaactgattcatctaaataattatttttaattttggctatcaatatgtttaagagtttaacttatttataattattttatgacatatttatgagtaatttaatatgtttatgttttatttaactaacttaaaacatttaacgtgtaataaatataagtgtatttttaaataggtcatagtgttatttttgggttaggcacttaaacttgaaaatttaataaatcggttagtcctgtcaactcaaaaataactcaaattcaattaaagaaaatcatagccgtttatattgtgtgggtttcaagtcgtattttcgtgtctaatctatttttccgctcctatgggttccctattagtttttaaattttttttaagtaatttttaatgctgaaaatagaatttattgtagtaa

SEQ ID NO: 595 - DNA, 2279 bp, Cannabis sativa
attgtgtaggaaaaaagtagaaggttgtgggcatttcttgtaggtgtgtactgcgtttcatttgttatttattacttgttgtggaaggcatacaaacatgttggtgggttgagagtgaaggcattaatgtcatcatcacaagtgaagcctgaacaatatgcagttcttgttagagacattcctctacacaaaactaaatctacaaaacaacaggttgatgctttttttaaggacatttatcctaatacattttacaaatcaatggtcgccactaacaatattcaggtatgtatatataacatatatattattctttaattatatatatttaagtatctattctgtaattatttttgtttttatgtaagtaaggaataagaaattgaggttataaagaaagtaggtcggggttcgggcctaggtctagatcttggaccgaaacgagatctaggttcggaactaggtctggatcagggtctgatattccaaaatattgattgaaaatacaaataaaatttataaaatatcttaaataattacaatgtacgtaaaaaaaataatttaaattatatattatttacatatcaaaaacatgataagagtgcacttatacaccaaataattttccaaaagtatatatttcctcaactcattttctagcaagcaagttgagtttgttgaactcatcacaaaaacattctaattcaatcttatatatatacataatatataggtgaatattctttggaaaagattagaaaagcaaagaaaaaaccttgcacaagctgaaacaatatatgaggagtcaaaaacaaaaggcaaaaaatcaccatcatcatctgaagtagccaaaagacctactcacaaattaggctttcttggactatgtggaagagaagtagacagcattgaacactacacaaacaaagtcaaagaacttgaatccaaacatgaagaagaaagaacaaaaacacttaaagataagcaattaaatgctgcattagttttcttcacaaacagagtatctgcagccttagcagctcaaagcctccatgacaaattggtagatgaatggacagtaaccgaagcccccgaaccatcgcaactcctatggaacaatcttcgaatgaaattcttcgaaagacaactaaggaaatatgttgtttacttcattgttgctctaacaattttattttacatgatcccaattggggttgtgtctgctttcacaactttgaagaatttgatgaagcttctcccatttttgaagttggttttgaaaatgaggattgtgaggacagtgctcgaggcttatttgccacaacttgtgttgattgtttttatgtctgttttgcctatgttgcttttgtttctttctaaggcagaaggggttgcttctgtgagccatgcagagagaggtgctgctgggaagtttttttacttcactgtgttgaatgtgttcattggtgtcacacttggtgggactttgtttaatacaatcaaagaaattcagcaagaaccaaactccattgttgaaattcttgctagtagtatacctcaaaatgcagccttctttatctcctacgttgctctaaagtaagaaaagtatttttctttttcaaaagtaaatactattttggattctgtgttttgcaaaagttaccgattgaccttttattttgttaaatgacaaaatagaccttatatttttcaaaatggtaaaaataggaccctgagttcaatttttgacaacttgtttttaatataattaacttgaagacaattcctaacacgaatagatataaaaaatgtaaacagttttgtcataacacctttaaattaaatcataattaaattttattttgataaaaaatcagttcagaatcctatttgtaatattctgaaaaatacaaggtccattttgtcattttgtcatttacccttttttgaattttcccatggaatgaaaatgtgtaatttttatgtgtgtgtgattaatttcaggtttttcgtggggtctggggttgaactttctcgaatagctgctgtgattgcttttcatataaaaagaaaattgatattcaagacagaagcagaagaaaaagaagcatggccaacaggtgaccttgggtttcatacaaaggttcctgaagacatgcttgttgtcaccattgttctttgctactctgttatttctccaattattattgcatttggcctcgcacatgttgccattggatggcttgtcacacgtaatcaggtacatatatttataatag

SEQ ID NO: 596 - DNA, 3628 bp, Cannabis sativa
atgttgatgcttaataaaacttcttaccaccattaagaaacttagatatatgcccagcagcctaaaaatgataagaaatgatcaaaactaaccaataatataacaaaaataacattaagttgtaacaaaacttcagcagcataaaagatttgtaaaaagaaaaaaaaaactctcagcctatgtctttggtactggccagctaagcactcaaaatttgacgatagttgaatgcataagatttaacaaaatagattttaagcaactgggatatcaatttcagcaggagccataactggaagagcttccctagcgtattcctcttcctcctttggaggatgaatggtgacaatatcaggaagaggagtcattgggccttgctttcccttgggatcccagtcaagcatgatcttcaccttgattccaagcactccctaaacaaaacacaattcaaaagcaaaatacataaaatgctcgtagtaaaaaagtaaaaagacgctcgggtttaaatatacaaggaagattcaacaaacctgtcttagaagaacatgtctaacggctgagtcaatgtattcttttgttggctgcccagatgaaatcatgtatccatccttgaacttcattgacttagcacgctgggccctaagctttccactaacaatcacctgtttcaatcgaaaaattatcctaatcaaattacaagagagaataattttaaaagtgtgagagcaaaaatagttaatgatagacaaacatacctcacaacccttagctccactttccataacaaacctcaaaacaccatagcatgccctgaagaaaataagaacaaagtatttagacgattgattaatatgcaacacaaatggaagataatagaacaattagtgcagtgagccaaaaatgaaaatcaacatatttatgtcatccagaggaaataatccttaataaaaaaggaaacaaaatgcaaacacaaacccacatcacacaaaaatgaatgttggaattggtaaactgtagcaaaccagacaacataagttacatgacaatacacataactaaagtagcctggtaagcagtttcaatgttgtcatcttccgacacaaacacggtacaaaaataacctatttgctttaaggatgactgctcaaaataatgatatgtacataaaatagaggattagagctaaaactaaaattcacaatttctcatgtatcacctaaaacattactgcatgaaaagcacaaattttcacatagataaaagtatgaaggagagcttttagtctcgtcaacttccgacacaaagatggtacgagacaaccaaattgctttgtagatgacatagtaaattaatataagaatcagaacaaaaaccaccaaacaaccaaaatgagattacaggtcttggagaggtacaagagccagaaacaaaacccattcagcaaagtcatacttgtgaatgaattcttcatcaacacagaaaagaaaaaataataatgtataatgtatcacctaaaccgttactgcgtgaaaacaaaaagaagtcacagagaaaatcgtatgaaggagaaatttatttcgtcaacttccgacacaaagttggcataacaaaaccaattcgctttatagatgacatgatacaacagaagtatcagaacaaagaccactgaaaagcagctatgcaaaaaaaaggcattggagtggaacagaatgagaaacaaaaccaaatcagcaagcacttaaaaggactcattatgcaaacaaagcaacctatgttctttaaggatgcataggtgaaaaacaaactataatgtatcatctcaaacctcaccgcatgaaaactacaaaatttcacgaaggtaatagaataaacgaacttttcttttgtcaccttccgacacaaagatggcaaagaaaaaccaaattgctttgtaggtgacataacattacacaacaaaatttaatggatgtcataatgagataacataacatgaatgcaacaggaattatataaaggataatttcaacaaactacatgcacaaagacagtgaaatcacttctagttctagagaggggtttatgttcaaaacttacaaatcaagatattaatcggttaaattttactttatctagtataccaatcaacatatcaatttattagaagaaacgaatggttcagctttttccaaccatacaaattcgtataagtcggaacataccaggcaagaccaacgaggaatacttttttaacataattatcaaaactaaagagacagtaccttctgacggcaagaccaccgaggagcttgtaacgaagagactcagcctgagcaatagcacaaagccctctgttgttcaccttctcggcgtaaagctcaacactgttctctggaaatttgaaacgcttctgcacaacagaagtgagctccctgatccttctacctttctcacctgtaaatccatccaaaattcacaaataactgttaaacaataattaaattttgataccaaaacttcaattaacatctcattaaatcagaatctgaccaagaacgttctgagtccgggtagctctgattatgatctctgtgcgcatgggagtaaccctgacctcaactccagagtagccatcctcggctagctctctggtcagaacctcattaagctcggcaaagaacactccatcagcgacgaactaagaagatacacaacacaaccacgttagaataacactagaaatagtccaaacatcagagcaagctaaacatttaaaagataaatcgacagttgagacagtttagatgaattacctttcgctttttgctcatttgagtcgccatatttgcagaaaagttgcagatacgagatctgaagaactgaggagtgtggaggctgaaaattggatgccctgcaaaccctagatttctaactagggctttgaggagaaagaactcaggttatatgcattaactggagatagatcggacggttacgatagacttaacaatcacttattaacgaacgagattaggtcttattttttttgcctttagtaatagaggctgtaaaacgcaggccaggccttacctcggcccatttaggaaaaacctaccctaagtccaaattaaaggcacaagccacaagtgttgtactaaaagcatgtcagcccaatgcttggtctgcataatgtcgacttctatttttttttttagagaaaactacaatttatatcctttttatattgtcattttttatttttaccctcttttcttaagtttattatttttacttcttttttaaactttgtaccaattttgcccctatcacttcaagatactctccatgtgactctcttgtcagggtatttttattttgggtaaaatacatataagaagaggtatgtttcaattaaataaaaattagaggtaaatttgattaattgattaataaaagaggtatttttcaacttacccctctaatttgctctttctaattctctttccatagaccatctccaatggtttgatttttatgctccaattacaacttaaaatttcacaaaagcaccagtttctacttgatgttttggtaaataattaaataaaaatttaagggattatttcacaaa

SEQ ID NO: 597 - DNA, 2048 bp, Cannabis sativa
ggatatagagtacgttatatagagtaagggcttggtttatgcatactgtacctatgttaaaggaagatatcttatgaccattaggcaaaacaacatgctttcgaaaagatgtattataaaatgaagtaaatcaagattgattggaacacatgtggtgtgcagcaccactatcaagaattcattggaaagaagggtgagaaaatgcattaccatccaagttggatgcagcagtgttcatggcaggttcaatccgaggagcagcctgattgagttgttggctaagtagtgaaatcaattgttgatattgagaagagaggtctgaggtaatggaatgacctgtagcatgatcaagtgggttgctagtagatgcttgattttcttgagccttgcttttttcatttttctttttatctccatatccaagaggaaaatcgtggataaagaagcacttatccaccaagtggctaggtttaccacagtgagaacaagatggtttgggtttcttatttcttgggagattggtggatagaagacgaattgatgaagcaaggggtggattgtcagaagaaccaagggtgtgttggcgtttttcttgaacaatcataggaaagacccgagataggtttgggatgggttcattgagtaaaatttgggcacgtactgaagcgtaggactcgtttagcccagtgagaaattgcagaaccaagttttgattataatattcaagaaaatgttttattgcaccacaagtgcaagtagtgtttgggggaaattctttcagctcatccgatagggattttaattttgtgaagtatgaggtgactaaatgataaccctgttgcaaccgagtaagttaggtttaaagttgaaagatttgaggcttgtttcccacattgaatcgttcaactaaaccgtgccacatatcaatagcaagatcaaagtacattatgctttgagcaattttagaggagatagaatgcacaagccaagacattaccatgtttttgcaatggagccaagaagggagaagaggattaccagtttcaagccatggaaggcagcaatcgatgaaggcgatcttgttcttggtagccaaagtcatggtgatccctcgcttccaagactgatagttgacaccagttatgacagtggacaccggttaccaggcctggatggtcgcctgagctgaggaagaagggattggacacatattcattagccttccaatcaagaagaggctgagatcgctgaggttgaactggattttctttagttcttggagattgattgtcgagggtctcgttgttattttgagatcttgtcgtggaagtggtacgtcgagaagcagccatgggaacgactgtatgagcagaagtaacatcaggagggtgatctgatgaaggatttttcagttgttggtggtagaattccatcctgggatcttctggaaggtcgtgccatgggaatggacagggttacttctgataccatatgagaaaaccagagcaagaagaagagtgaaataaaactctgttattgaatattgaatttgagacacggtggctttatataggcaagttacaatgactaagctccacacttaacaacctaactaattctacttaacagtataacagaaacaactaactccagtaaaaatgagaataacacactaatctaatatcttgcatcggaaggaaggaagttttcatcaagtaattaaaagggagttcaaaccttagtgtcttagtggactcattttgcaaattggagtacatcaagattgcggcaaaatcattataaggagtctaagttctttttaagttcattactttgtatttgttaaaatgtgactaatgaatcttttctctggtcgtggcccgtagactaggagcaatctgcaataattgttgataccatatataaaatatcacctgtcattttaatttttgtaattttactttagaaactattattctgttctataaggttggatttttaatagaggaaattttgattctgttcaaataattttacaagagttctac

SEQ ID NO: 598 - DNA, 6870 bp, Cannabis sativa
tacgagttgaagttcctccattgaagatgacaaagattctttaatacaatcagacaatttattcggcttaggcagatgagaagttgggaaggctataattttgaaatcagacaatcatggatttcatgtttattacatggtagacacggatttaacaatgattttatctctatttcttcctcacagaaaacctattggagtaaggcagcaagattgaatttctacctaatttttactataccttcttttcctttttttattaagttcttgttgggttaggcagtctgctatgagcacttggttattgaatatagttatgttcaaattcttcagtggattcttttataaagggtgagagcacaccaaactagcacatgaatcaaagcttcccatgcaactcaattgccaatctgtggtttgtattctttatacctccacttagttgcaaagaagttgtttgttgttgggttttcgacaggggatggataattaattattgggaatttaccaagtggcatattccaagtgttaatggatatgggggctattatccttcactttgagaataaggtgaaatttaggttgtcggtaatgttagaccccaaaagtagtggaatatgatagaagagagtaaataaaggggtagatgagccattgtggtaaatgttagttttttaagtagagtaggatagtataagtaggtgagtatagggagagagagattatgccatgattgagtattctctatttcatcaaggagagcctaggcctctagatttcctaagaccttgctctgtaattctcttttgcaaaaatatcagcttataatacaatactttgtctgttttgtactattattagtagaaattgcatctaataattgttctaggaggtacaagttataccaatcttttttaaaaataaacttagtctcagctagcttaagatagttaaataattctttgtgctgcaaatatatctttgggcgtggctcatttaccacgtaagcaaattattttttaaaaaatgagttgaatgcaactgtaggaggatatttgtaatgactaaaactattttacatgtgttagcttttgatgcttttatgtatttcttgagcagcattttcaacagatatgccaaccacaacactttggcttcttctttgttgagtccaatcaaaggagctatgacgtactatctaaatttgctagaactgccattgtatggatttcgtactatctatgacatgctcattttgtatcttcattgcggtgataagtgaactaaaatatttgctttttctttcaaggttcaattctgaaaaggactctttgcatactagtaaatccattttgtctgagtctcattcagtacaaattggtcagaagtttcccagtattgcacgtcgtaagctactggatcaagctactaatctcccagctgcacctgcacttggtgtttcacctcctggacaaatcattgctcttccattttcacgaagtagtggggcattccctgctataccaaaaggaaagaagaaacgatttcctactcctgcaccactttctttgtcagccactcctccaatagacaatcatttaaatcctcaaggacatcattcaaaacatgcaactgaattccccttgaattcaacaaaccatgatttttcaaataattatgagaccatatggaagtatataattattgctggaagtctcgttttcttatttattgttgcggcagcaatgctctgtatgtggcaaagcaaagcagtgaagaccataggtccttggaaaactgggctgagtggacaactgcaaaaagcatttataacaggtaatctttcttacacaattgagaaaattatttggaggtactagttcttgcttatttggtaatatgtaaacgagatttgtgtgctgaatttgttcacaaaatttataaaattggtacattaatgcaggtttatattctaacgttataatatgatcaagattttatccatataaaaagtaatatcaagattttttaagcaatctgtatatgtttctatcttaaataaatttatagccaagaaatgataatttgtaagatagtagactgaatcattttccttttgtaatttgtgttgagtcttgagcttaatctgttagtaatgctatgtaagatgagtaagatatgtgcagacataaattaccaaaaattgaccacttatgtaggtaatcacttctaataaatgaagcccatcttaaatttattaaaacaacatacctctgttaaaaatattggatttatttaaggcttgatttctagtttactttccttgatattgattcgtacgattgtgatcatattatttcaggagttccaaagttgaaccgttcagagttagaaacagcatgtgaagatttcagcaatattcttcacactgttgatggtgccactatgtacaaaggaacattgtctagtggggttgagattgctgttgcatcaaccacggtatctagtttcaaagaatggaaaaaatctgctgaactagcttatcgaaaaaaggttcattagctaaagttccaattgtattctataaataaagggctgaatctttcttacttgtttttatttctacgatttcttagtttattttctctaaggtttctgagttaattttttcgatctgtcatagattgatacactttcaagggtgaaccacaaaaactttgtcaatctcattggttactgtgaagaggatgaaccttttgtcaggatgatggtgtttgaatatgctccaaatggatccctgtttgagcatctgcatggtaattttttatttatcagttttagcttcaacaagtttcaggtgttaatttatattttagtcaatattgatcaaatataactaaatattccaaaggcttataacttattggtgtgtttgcagttaaagaagttgaacatcttgactggaatgccaggatgaggattttaatggggactgcttactgtcttcagtatatgcaccatgatcttaatcctccagtagcacatcctaacctctcttcaaatgtcatctttttaacggatgattatgcagctaaggtaagacagtaactgtgttatgatttattgcttcagtaaaatacaattatttaaacgcgtacacatttattttacacagattggagaggtgaatttttgggaaaattttaagttaaagaatcacaatgacaatgataaagaaaactcagaattgccaccatctgctgatccagaaacaaatgtctattgttttggaatcttattgctagagatcatttctggaaagcttacctactcagaagaacaaggttcccttgttgattgggtaagtgtcaaatgaacattatattttaatatatcataaaacaatgtaaaaatctttttcaatgagataaaataacaatatggtggttattttacaggcttctcaatacttaaatgacaaaagaagcattagctacatgattgatccgaacctaaattcgttcaagaataatgagttggatgttatttgtgaggtcatccaggattgcatccaacaagattcaagacggagaccaacaatgaaggaagttacttcaaagttaaggacaacgatttctatatcaccagaccaagctaccccaagactttctccactttggtgggctgaacttgagattttatcagtagaggcaacttaacatctctatatgtgttgtatgtcaagttcctctctatctctttgtatcaaaatggtataggaaatatttttacatgtgctccacctacttaaattgtatttaaatccttttttttcatcgtcaatggtcacttcattattcatattctttcttttttcttcattctctaaggtaaaaataattacgcaatacgattgttatcctaattttacaagtggggtgtggtaactttgcacataacactgtatgtactcataccgcaagtatatatttgtattttggtgttgtttggaatgtaaaattaacactactgggattctttagacatttgaatacgtacttgtgaaacttatattatttgtaggttggtcaaaaatcttatccaaattacttgtacattttttttggttatgttcttctccttcggtgaagaacaatcaataaaaaaataaattaaagtggcttttggtaacacttttatttttaaatttttaaatcacaatttttaaaattaattttaaaaaataaaaatgcattctataaccacttttgtattttaaaaacagaaaataaaagtgtgctatgtaaactttattttcatttgttaattttatttaagttgggttcggttccaaactcgggatcgggattcgaggtttgggctaggggttcatttggtttccaaagtctaggttagagtcagagtccaaaatatttattaaaaaaaataaattgtttaaaaaaatttagaaagtgatattttttttttcaaaatttttgacattttgatttttaattaaaaaattgaaaagtaaaaatagttttatagaacatgatttagaaaatattttcatttttttaattctaaaaataaaaaattaactaaaaaagtgttactaaatgcaccctaagtttgttcacttattgatccccatatcttgtaaggtgcaatatcaaagtctcaaaatgtgactattcaaaatacaaagtcgagcctataactatccccaagggaggcttgcattcaccatgcccttgccccctattgagcctaaaaaaaaaaatcaaccctctagtgacccccaagttgttgttccaccagcaagcgttaagggtgctcactcacttgcccccactcgccttccacgcctgcctagcgagcctaagggcgctcgcccccctagtgaccctcctagaaaatatgaagggtgctcaaccccttagtaagactgaagggtgcttggcccactaacggggttgtttagacctctaatgagttccagctcttgctacaccaaggagccttaaaagcactcatttttttgctgcaccaaccatttgctcactctctagagagcctcaacggtgccaactaaatgaggcccctggtgaccacaagcacaccaataggcctctgcctaagaaagcatgaccgcaaaagtgaggctcttcttaccttataaagagatgtcactgacgtggcctaacccttaatattcttcaaagtgcctcacaaaggaaaggctcacttcctttattatgagtgtgtattaaagttgttacaagttgttagttagttagatgagttgtccatttttctgttatttttaagttttctgttatttctctttctttctcttgttgagctatatatagctccttctctttgtaatcaactttgtacagaataatacatcttgtttgattcagttactctattcttcttctctctctttctctggttttcattttgtaatatggtattagagccacgattctagtgtgctccgttcttggtgctgtcatcttcaatggctcgtggtggaacttagactagaagtacaactgctaaaagaaatggatctgagaatagtatcaggtcctctgttcttaatgccaatgacagatctcctggagaaaatcctcgaagtccctactacatctatagtggagatcagtctgtggttaatttggttccataaattcttacaggatgtgagaattatagctcttggagacgatcgatgatagttgctcttgcagctacgaacaagattaaattcgttgatggtcgattaccacaacccgaggaagacgatgaagtgtatgatatctggttcggatgcaacaatttagtgttttcatggattcttcatgcgatttctggggaaattgccgatagtgttatgtatctggataatgcaactgatatctagatataattacaagaaagatagtatcaaaagaatgcacctaaggtgttcgaggctaagagatctatgcaagctttgatccaaggttctaattcggtgactacttacttcactaaactgaattcctattgggatctaatccaggaatacaggccacaacctgtttgcagctgtggtgctatgaaagttattcaagagtatgaagatgagaatcgtgctcttgagtttctcattggcttgaatgagtcctacagtggtgcacgatcataaatcttgatgcaagatccctttcctagcatcaataaagcctttgcctcagttattcaggaagggagacaaagaggtattatatccaatactactaaaactgagaaaacatctgcttctacactaaattccggtaactttgctgggagtgttcaaccacacaagcctaaaaccgtgtgtcatcattgtggaattgctggtcatataatggcaaaatgatataggttgcatggttattcccttgggcacatgttgtatggaagatttccaaataggaatgctgcagaaacaggaaaggcacctgctgctaatcagactgatgcacaggaaaatggagatgctgctgtcagtggaaatggtaataatcatgggaatggtaagaacatggagcaagatcttgtagctacttttgctcagtgccaaaagcttatgaacattctgtcttagaaagttggtgagaaacaaaactctgcacaaactagccagccatctatatctcaaattttcgggaaaagttctcctcacttacctttttcttgggtaattgacactggtgccacacaccacatgtgtcataatctatcatttttcagcactactcatgttgataaatccatttcgtatgtcaatcatcctaatggaaattctgttaaggttgtgtgtcttggtac

SEQ ID NO: 599 - DNA, 1551 bp, Cannabis sativa
aatatcagattttgttagaaaaatatataaaacgtttactcgtcgtttgttcactaaattaaaatgaaagatcacgatcacaaatatgatgacatatagagattgggtacagaaaatctgagcatatactcatatcaagaatattttattttggaatttcacgacagcaagataacataatttactcagaaaaatcatataaatgactttttgattaagcatatgactgtttgagaccaaagttttacatggaaatcatgctaaatgaatctttctgtttggacaattaccatgctttagttatatcttccaatcgactgtggagtcatgcatttaaaacaaaatttatttagattattgcatcaaaatccaagctgtacaaatacatgaatttccctcccacaccaaggtctaaaaaccaattatgaaggctatgatcagcaatagtgccacttggaagatttgtattgagttgaactaaaattaatgcacatcattccaacatgcaaaaatcatcaacagaagctaattaaagtataccagcattttgaagctcttcaatcaattatagacttcccttctcctacatctagtatgtcaaattatccttaaaaattagtttttcttgtatttacctcacaattcaaatgttgcatgtatctgtacatgggtactgtatataacaaaactagatacactcaaattcaattataaagagaaactccttctttcaaaaaattaaaaaataatgacttttacaatatagccaaatcctccatgccacatattattatctactagcaagaatgtcacttttgctcaatccttctcaacactacagtttcctgccttttttttttcttctctgtttcaaattatgcattatactgtacctacttgcataatcttctcagcttaacaatactaatttaagtcatcatgttaaaaaattatcaagcaaatcctggtcaaacaaagataaaaggttgaataattcattacaaaatctaaaatgtgagtaacttgtttcaatttccttaactaaaaacccatcattgaataatcaaaagaagaagttaaaaagtctgggttaattgtaacctggtttggtagttgagaaatgtcatcatcagcaagtacagcagactcagtctcactaagcaacttggtagcttcgtcctgccataacatatcagaaacctttgatataaaatctccattcaattgtctctctctgaggaatgtttggactacatcttctttcgttattccactcactgcaaatcagtcacatttgcaacaaaaattctttgaaaatgtctaaaaacttaaatgttataataaaaaggaataagagaaaaggattgagattgacctggacgaaggcttgttctgagaatggagttagatgggtttaatggaggacgaattggaattggagaagtggttgggaatggagatttgaaggaaaaggtgaggcagccgaacctctgaagggtgtccattgtggtcgatgctccacagcttcagacactccttaaaatatctccc

SEQ ID NO: 600 - DNA, 2406 bp, Cannabis sativa
ttgcgcaggggccatgctaatcttttccaatacttttcttttttctttcaaattttcctttctcctaaaagctttgaatgatcattgtacataatcagtacttttatatctatttgttggacagagtttaagagatcattaaaatggtaagtcatttttacttatacttttttatttacataaattgtcattagatgcatatatatatatatttttcatatatatagtttagtggagcattttgatcaatcagattattattttaagcaaatattgattttgttatattcaaataatttatcggcaagtaatggaatcgtttttctatacatatataggactgtattgttgttttctattcaacttgtgttagtgtggtttgttgttttgtgtctatgacaaattcaatccccattatagttgctacgatcaaaggattgagatgaaattaaagaagatgagaaagatagtgtcacccattattatttacacattaatatatgctttattattttttatttaattttattggccaattgttatcgagtacaaaattttatttctttttgtaagagaaacaaatatgaaagatagatcacgttatcaacaattcacaccattattcttcttcgtgaagcttccaccaggctagtgctggcttgtagatttcttacccttcgtaaatgtctttagcattaattgctcaaaactgtcaatttcccttctttactgttatgattaccccccatatactcaaaattcatctcatgcttgcattaattgctcttatttggctgcatttactgtcaacgacacacattcttcctcaattaatttggcttcaaaaatttcatggttcacaactcttcgaacctctcttctctgattctcctaccgtcattttgagatctttcaggcttattagagcaatcattactccttgcatgatccctactcaggggggatatgagcagacgaagtctacacctctccaatttcttccacgccctttctcctccaagtattatttcttttccctctcgttaatctgctatttaaggtttggtttggcttttttctgttagtacttctcctcctggttttagccttttctatttctctattgtccccatggcttcctcttccaccacaaatcctccaactaccctttcactcattgaagaagaaaacctaatccacgactttgaccatgtttccctgaactctggaccagactctaaatctcattgccttattgtcaaaatcctcacctttaaatctactaagctagcatggattgagaaagtgatgactgatgcttggaccctctgatttcctattactatctatgaataccattctgggttgtttctcgtcacattccaatgtgagggacaccgcagaagggtattagaagaccaaccctaacattttgataaatgccttatgattattgccaattcggaaagccttgaaactctcacccctgaccaattttgttttgttcctttctgggttcaatcccacaacatccctttcggccaaaaatcaccacaacttgctcagttcattgctgatgagcttggtgatctcattgaggtctatcccctctccttccttgaaagctttggcccttatcttcgtcttagagttctcctggatattaccaagcctcttaggcgtgggatgaatatccgttttagaaggattactaagatgaaatggctaaattttaagtatgaagggctgcaaaatttcagctacttctgtggtatgcttgaccacacttataacaagtgtggtagatacctgatgcattgtgacaactttcctgtaccccctgaacttagctataaagagattcttcaagcccctgccaaatcccaaatcaaaaagaacccctttgatctttccaactccacccccattgaggaatacctgaaccaaagtaacacctccgaacaagaccttccataggctgttgaccaatttctccatgttgcgtccgactttgctgtcccaaatctcaattcagcttccaccaataacaccaatgaaatgcacacttcacctgttaacatgaatatggcttcttccaccatcccccttctcccatcatggttacctctgtcatcactcacattgacaaaggtaaagggattgttatccctaaaaatcaaagttccccaattccacccctttccaggcccctgaacaggggcatctccattcaagaaccgactgccatcacaaccactactaattctggcaccaaataatctttctgaaggcaaattttgtcaagagcatgctcaagcgggcaagagcttctcagtctaatgatgctatggtcccatccatctccccacctgaagaaatggcaggtgttgctcggcaaccctgccg

SEQ ID NO: 601 - DNA, 2739 bp, Cannabis sativa
tgaaataactctaatgggaaccagatagaaaatgtgtaaataagtacatataaaatttgaccttaatcgaagaagctagagaattacacaaaaagaacatgtaacagagttttaaaagcaagttcgtgtgttgatcccccagttgtactgttactgaaaatatcttagattttgagtaaaagaaaaatgccaatctttctagaaaaaattgcaataatttacaaatgggatccaattggaacactgtaattcatgaggctaaccatgacttgacaaaatgaaaaataatttgactagctggctgactcaatacttctgttccaaaaaacagacgaatcccaaatttgctttataaaaagatcctactcagattataaaagacagttttggatgaaatgaaatctatttgatcacaaaaaaccacacaattgttcatccaagtactactgagtagaagttttcgagtctagtattttgtagatgagtactactggcacagcatgcaaatatatatatacctcaacatgcaggacaccacaaggctcttatcaccttcaccttggttacaagtgcacgtttgtccctcctgtccatttgaaaaaaaaaaaaaagaaaattgtattattatgtaaaaaaaatgacaaaaaaagaaaacttaatcaagacccttttgttagtcaactttcctttcctctagcctgtggtctaattacaacaaatcacatacgtaaattccagctttaaatggagtttttcatgtaataacatagcaaacagataatgatcattgtcatttacttaaccaacttggtgcaagaaaattcagtgtctttactgaccgacattaaatgtagaaaaacaaaaaaccatgacaacatcattatttaggtacttagatatgacatcacaaataagaaaaaccaattaggccataaagtgcaatcttttcaaacaagtgggcacacaaagagagctctgggaaagataataatgcaatgaaaaaacatgtggcgtgatacaaatcgtactctaattatttacaaatcaaagatatatggcttaagcattaataagcaaaccttcattgaatttgtaggagttagttgagtggtatttttctcaatgcagagcagcctaaaaagtttgacttgtcccccccacactgtcctggtcatccagcacaacaaagcctggttaaagaattaacatacagcaaagccaaaacaataatacaaagttatgtaggagtagagaatgaagattctcaaaaagtaactttttttagtgttatcaactcaccagtacaatcaccatttacagctctatttgagattagaagcatcaaaaggacaggctttggtatgtcagtaacattatcagcctgagcatgaagctttgtcagactccaaaaagagaaatacaaaacagaataaactttaggtaaaaatatctagcagtcaaagaaaatgggatttacccaagtcttttattatgatataattaacttacaaaatagtgggaagaagatatttataatttgatggctgttatgattctttgattatgacataatctaatgattaaaagaaagcattaacaagccatgcatactaatatttctaagcacaccaatgcccgctattttactattggataagagacatttagatcatgaacccgaccaggtgactattcaaacttggatgactcaaaatatcaacgcattaatcaaaaacttaaacatataagtggtatgactcaaataacattaaaaaatcattatgttaaagataagacctgaagaaaaagttcaacatttccgcattgttaaaaaacttacatcagtcacacaagaatgtttttaattcttgaccccaatggaaaccacactaactcgctcacttactcacagtgcttttctgctctgcattttctcgagcaccaaacttacacatttgtaggagaggtcacatggagaagaagtgtacctattcttgggcaacactccaaggtttgggcagctaaattagatttacttgggcagcaatccaaagccttgtctggggtagatggccttagccacatcccccaattgggtttcgcagaaaaggcccaacagcgttgaaatgataaagaaagacgtatcaccataaatgcttggttgcatcacagtcaaacccattaaggaaaaaacgcactcttagcccaactgtccattaaatttcctttgatagagacagaaagaaccccacacgccatccatgactattggacttgctctccaagttttcttcttgcaagtcaccttcatcatctagtgtctttttgtgcatatctaacctactaactaggctgctactatggctggacatttattgtctttctgatcttgagaagacgtatgaacactaacccgatcttttatttattatgacattaattaaatattttttcaaccagtagaatttggacaggaattaggattttccttgtatactacgatctcttcattctccattatagcttctgaaactagacatcttcattcttatacgtatgcatgctaccaagtatggcagattggcagataggattttcaacaaaagcaacttggatttgcaaattaactggtgtttcaaaaggtatgtattgcaaggaaataaaggagaaatgaaagttcccaagtaaaaagaagattttattcaaaggttgcttcagagtaggctttttaacaaattg

SEQ ID NO: 602 - DNA, 1058 bp, Cannabis sativa
aatttcaaagatatatgtgtcttgggaattttcatggacaaatttttgggaacgacattcgtaaaaagcgacattaattgggacaaacgacatcatgatgagaaaagctgtagtagcgctgttataggcgacgtggcaaatttcaattgggggaagagagtaggtaggaattgtgagcaagtagaggaagttggggtttgcgaagaaagggcaaaggcgagttagtattcatggcgacttcgaagctccaagcgctctggaaccaccccgctggccctaaaactagtgagttcgaatattctttattatctatgttttcattcaatcaattattgatttggaatattcactcttgaaatatatttctaccgaattacttatgattttctcctgacacggatctcattcgcagtggcactggaaagttaggtttaatactcgcctaatttttagtgggggtggggaaatccttgtgggtttggggaaaatggtcaaattttaaccccaaattgttctttgggatgatatatttaacaaggaaccccacctcacaaacatgttgcttttttgggtaattattatgcaaagtaggttgtgttcttccaaaaaaatggaaagaaataatattagttttttacttttgtatgaattgattgattggactagctttcactgcttgatcgcaaaattaattttttttaattgaatattcaatatgtggttggaatttttcataatatgtgagaatgttgtccatttgaatggtttttgtacaatagactcagttggcaagcctggcatatagtgaaaaattcaatcgtctaagtagtttacaagattgtatactcatattatgacaacaagatgtggtgtcatatgtattgaatgacaaagttgtggtgatttatgtattgattgattgcttgctcaatgcagttcacttttgggcaccgacatttaaatggggaatcagcatagctaatgttgctgacttctctaaaccacctgaaaagctttcttatccccaacagataggtatgttcttactcagttgctta

SEQ ID NO: 603 - DNA, 1247 bp, Cannabis sativa
tatggctttaaaccagctaaaagaaatacggtcacaaacatgtacgtaaacaaaagaaataaacatcaatactcacacagtcaatgaagctagtaggtcggcattggtgaagctcaatccaccattgaatttggtgaaatttccagtttttgagtcaaatgagacatcagtgccaagtgcaacagcattggttccaataacaccagaaaagttgacaataggattagctgtcaacccaacactggtgcttatacctgcatactcatgcaaatactggagttccacctgtttaaaaaaaggtataaaacggtagtttcagtactgattcgagtcaggtcgtctgctatgtaacatatgcctctagataatgttacttcatagacatccaagccatcattatgccaaactcgcagataaaactgcttaccttgccagatctttgatcaggaactctgaagcttaaaattgttttcaagccaggacaagcttcatcaacagtaacagttgcaatgagctgaaaatagtaaataatttcagtaaaatgatcaaaatttcaaatataattaattagaccaactctgtttagaatcatttgcaaaataaattctcatcacactcaataacacttcagtctgagtattaaaaatgtgagtaagtgttgtatattgtcaagaaagctattttgcgaagaatttattagcaaaggccattttgcaaaacactctttgaaaacaaagtgttttttttactagttctccgcattatcatataaaccaagttacaattttgattccattgcttcaattagaaaattgaccatgaacctgtgaatcttaactattatcatcatgtgaagaaataaaatattttaaaaaaatcataaagattccgacatgaatagcaagacggaaaacacatcatatggaaacatagaaggtaaaccgaaaataaactgtaagacatcggggggcttacattggagtttgtgtcaactttgatatcagttgtgatgtttttgttcttaagctgagtgttaacatcagccaaaaacagctcacccttctttgttccagacgatgtaatagcctacagaaatgaaaaaataataattatttagtaagttaaattatcaatttatggcacaaacggtattgaagatatcatcacacgaactaaactaggtttaaatgcgaacaaaacataactctcacaatcacataataaatggatcccttaaatctaaatat

SEQ ID NO: 604 - DNA, 6201 bp, Cannabis sativa
atacagatataaatataaccaacagggacgcacaaatacaaatgctgtctgtttgtgctgagaaaaatggcaattactaaagctgtccatcaagcaactaaatattagagtcggattatgtatagagaggagttccgcaattccatttcagaatctagtcaccctcttaacatctaaaactcaattagagacagtcagatttatccaatccaagaagatctaatcacgcagacatttaagatacactactgggtatttcctactttacataaaccagacaaagcagctctgctctactctctctataatatatatggtacaaaattattagacacctaaaattgttcaatactattcatcacctctgccttgcaggttgtcttgtaatgtcccgtttggttacaccggctacaatgtactgtgtgtttctcacggttcagttcctctacacaaatccttttcttttcagggcgccctggtggtcgacggaactttggcggtcgtacaattcgagcatcatcatcatcttcatctgtagcagcctcatcagtctttctccatttgagttttgcaggaatagggtatatttctttagcataactatcacggtaactagctgttgtaaagcacttctctgtgaaggtatatacatcttttcgagatgagatgatagctgcaactgcatgggaacatggtattccatgaagctgccaatcacggcaggagcagctatgtgtaccaatgttcacaatgtctgatcgctcagctgaaatgacttcaaattcaacttcatcagatcgaagaacttggtatgttgatgagcggctcatggattcaatcatttgtttttcagcagatggcgcaagtacggaaagccatgaatcgctctttacacggcgttcttcaaactctgccattaatttactgtggatctgctcaatcacctggactacaggcaattcacgagcttcaagtatccatctattaaactcctcaatattcgatgagagatgaccatagcgtgttccttccgaatagaccgatgcccattgagaaggatcaaattgttgtagccactttgcagcttcagaagaagcctcttcgatttcagccattttttctttgaaaccactagtagaggtggcatatgcagctttccacaaaagatggaccagccttgagttcttgaactctttgccaatgctttcactcaagtagcgcaaacaataggcatggaaagatctcgggaagttccttcttattgcatcaacagtgcccttctgtccatcggataaaaatgtaagctgcggtaaattcggtgtgttcatctcaagtgccttatgcaactctgataagaaccacgtccagctctcgttattttcttcatcaacaacaccaaatgcaagtgggtataaccctccatcagcatcgaaagaagttgccgaaagcatggtaccaagatacttgcttttaagctggattccaccaagtccaatgacaggcaagcaaccattcaggaatccacaaatggacgcataaaatgaaacaaagagccgctggaaacggttatccacaccagtggtaaaaacctctgcaacactgccaggattggacttctttatctgctcacaataagaaggaagcaggcaataaccttcttcagaagacccataaattgcagcaagtccccgttcctttgcacgccaagcttgcttgtatggtattgtgattccatactgtttttgtatgtcatgcaatatatcctttggtttataattaatgtcatcccttaaacgctcctctatgaaactcacaatccaatcaacagaagcttgatggtgtccattgtgtgcatttctaccacaagtatgcgtaccttctaggcttcttattgtaaaagtctgggcattagaaagcttcacagcacgaattcgccatgggcatccctctgttgcgcattttgcaaagtaacgaatcaaatcgcttttaataattcgaagctcaaaatgttgtgcaattgcagcttcttttattgcattcctgaaggccttaacatcggaaaactcttgaccaacaacaaaagtatggtccgccataaggattgagaaactcaactccccaaatgcattgatttgcctattccggtctctgtgaatccagggaagcaaatataaaaactacatcctccatagtacgaacaaatataattgaaatgtactctgatcccatcatgaaccactctgcaggaagccaagggaccacgttcaattttaagcaaaccataaggaaggaattgggttatccaaagaatggaaaaagccccatatagggattaagcattggtatcctagagttctaagaactatttaattctcttactttctccattaaataattagttacttcttaaatatataaactcaactttagatttaataatcatgcaatatagttacaactttagaagtatatgttcccacttgagttggatcttggacccagattctatatagtttactgtttgaagatattctttacactactaaatggtttattttcaaaatatgcatatagcttaaaaggaaaaacgttttcccggtaaaaaataaaccaatcacctataagcacgaaacaaactcataaataatattaataaagcatgtaatggactcagaagtatatttccaataatcaacaacaaagaacttcattcttcaccccaaaaaatagtaagaggtcctaaataacattcagttaactatattatgtgggactttgtcatttcaacactagtgtgctgtagtcagatacacataagaaactcaaagaagttgttttctgtcagtgaaatgtataaattctatacctttactcaaaaccagtattgtgatactgtcaaattaatatttttcattcaagttaacaattttttataaacaaactgtaattcagtttatttttaatttattttttaaattgcgacggataaaatttgcaaaacaacatattataaaataataattagaacccaatccaaagaacaagattaaaaattagcaaaaaaaaaaaaaaatatgtatcccaacaaaaaaccaacataacccaaatctagtttgaacagaacaacatgtggtggtcagaagcaagttcagctacaaattaattttttccgttggaacattataacaaacagatggtggacaatagtcaataatatctaacgaaaacacactaattacactgattaacacgaatcaaaacagaaattaagagagttaagcgtgatgaaataagtaagaagaagacaaacagataagaaagtaaaggtgttttagatctacagaaacgttatcagggaaccaaagagagggagctaagatatagacctgatggcaacggagaaggacgaggatgaatgttgagaggagaggagtgttttcagagtagccaaatagacggctccatcgatacttctcacttctcacagagttttctgagataaacgacaaactttcctcaaaattctatttgttttcagagagaaaacaaaaaaaaaaaaaatctattttaaaattgtgccaaacttccataactattttccatatatttttttttgaaaaaaagaaaagaaaagaaagttcagtcatttttttttttttaacgtgttctttaaaaaaaaaaaaaaaaaaaaaaaattggaaaaacactatttttgtcgtggacagactctccatgcacgacatgtcgtttcattccttctaaagttttatgtcgtttaattaggaaaataaatactatcaaatacaagccttcttaggattttttcggacatgatttccaacggtgtttggatctgtttggacaaatttgttttgttttcgagaaaagtagatattaaaatcatagaagctcccattaaaaaaaaaccatggaagctcaaatgcctctaaaagaggtttttttttttaaaaaaaaaaagaaaaaaaatgcctctaaaagtaattaagatttcttttgtgataaaagattattttttatgaaaaactataaatatggctataatttcttttttgaaatgggataaatggttacagtttcaaactaaagaagggacttttgataagataaaatgaaaaagtaagatcttttttgttttaaaaaaaaacatttagtgatacgtaactaaaaaatcactcattaataaaaaaaatccagaattaattaacacaacataataattaaatcatatgatcttacaataatagcaaacaaaaatggggacaaatttaaaaaatttggatttcacattcactcatgcttaataacgtgatcaactaagcatatatataaatgtgtaaactgtgaatgccttgttgtaatatttagctgcttcttctataaattaatatatattttagctttgcagaacaaagaaatcatatgaaaatgacacgtacaaaacattcacctcatcattctaacgtacgtgtaccgaaacaatgaataaacttacaaacaatatagttgagagttgagtgtgtgaaactgataatggccgaagataccgaaactccgatgctactagtcagagctgtcgaaggtgccattgattacaaaggccaccaggcttcaagatccaacacgggccgttggagatcagcttctttcatcataggtgctgagattgcagagaggttcgcttactatgggatcagttcaaatcttgtcacctatctcactgggtctctcgcccagtcaacggcggctgcggcgaccaacgtcaatacatggtgcgctacggcgttgttactaccactttttggagcttgggtggctgattcttttctaggccggtactctaccatcgtcatggcttctctgctctacattttgggacttgggttgttgacgttttcggctcttctgccttctttaatggatggttttgatcctcaaaccagcgcggttactaaggcgctgttctttttctctttgtatcttgttgcagttgccgaaggtggacacaagccatgcacgcaggcttttggagctgaccaatttgatggtcaagatccagaggaatccaaatccaaaagctcgttctttaattggtggtactttggtatatcagcaggtgctacagcaacggtaatgatcttaagctacattcaagataatctgagttgggctcttggatttgggattccttgcatagtcatgatcattgccttggttgttttcttggctggaactaaaacttataggtacagcattggaaagaatgagaagggtccttttgtgaggataagtagtgtatttgttgcagcatttaggaataggcaaaagacttgtcctttggattgccatggcttcttgtctaaacaaagctatgaacaatttaagtttcttaataaggctatggtgggaccaaatgatcatgattgtgtttgtagcatagctgagattgaagaaacaaaggctgtacttaggcttgttcccatatggtctacatgcttggtatatggtattgtgtgtgcacaaatctcaactttgtatatattacaaggagccaccatggacagaacaattgtgtcaagcttcaaaatcccacctgcttcacttcagtgcttcatgttcatttcgattatagtcattcttcctgtgtatgaccgcatttttgttcccattgcaaggtcattaaccacaaatccatctggaattacaatgctacaaagaattggaactgggattctcttatctgctatatcaactatagtagcagctttagttgagatgaaaaggctcactgttgctaaagagtatgagctggtggacaagccaagtgtaacggttccaatgagcgtgtggtggttggtaccacagtatctgatatttggattagctgatgttttcactttggttggtctgcaagagtttttttatgaccaagtaccactagaattgagaagcataggacttgcgctttaccttagtgtaactggtattgggcacttctttagtggcattcttatctctgttattgacaatgcaactagtagagatgaaagagatagctggttttcgaataacttaaaccgggctcatcttgattacttttactggttaatttctggagtaagcctaataggatttgttaccttcttgcattttgcaaaatcctacatttacagtagaaatgta

SEQ ID NO: 605 - DNA, 1255 bp, Cannabis sativa
tccaccagatggccctccggtactgacaaattataatctaatactgagaaagtttttactacctatgtgtgattttaatttgagctcattgttaatggttctgaaattttttgagcttaacacaaaatatggtatttttataaaattttatatataaaatggtacttttagtttagggcctactttaatttgattcataaatactgacttttgaataatttatcataatgcaggttcacacttctaagaaagcatgtgtttctgtttacccaagcactgtacaaaatggcattgtatggttttggccaaacacagatccaaaatataaaaatattattacaaagcaaaaaccaccttacattgcagaaatgaatgatccatcattttctcaatcaatattaattagagaatttcattatgggtaagcaaagatttaataattatgttacattttctagtttatatattatgtcactttgtgtacatttttcagatatgaagtgatggttgagaatcttatggaccctgcacatgttccatatgctcattatggattaatgagaacaaggctgcctggtataattaattataatttattaagagcttaattttggttttgttttcatatgtttataagctcatttttgaaatgaatgatgagatataattacacaccttacaaattgtgtttatgattatgcatgaatggtagattggaatcaactaattaaacactcatacacttgaccatatatatccctctcaatgctttaaaaggcgtacctctcgaggtgcgtctcagaacgaggcattcaaaaggcgcctctaaggcttagcttcagtcacactctccatgaggcttacactttggttttgtgaggcgtacgccttgagaccagggtcgaccctaggctaaggcagactaggtccgcacctaaagcccactcctattagaagcccaaatgaaaaaaaaaattaaataaatataaaaagggctcaaaattttatttttttttaaagcccactcctattaggaccggtcttgcttgagacttaagcctctaaggtgtgtgaggcttacacctctgctaattaagttgttttgggcctttttttaaagaatttgattaggcttttttaaagagttttaatgagcttttctaaagggaaacttacaaaaatattagaatttgggttaatttttacaaacatactgtcacacgaaaaaaaattcaaaaatactgtatttttataa

SEQ ID NO: 606 - DNA, 1050 bp, Cannabis sativa
gtatatatagatatgtatcgccatggccgcaacaagatacatgtccacttcaatggtgaagaaatattcactatctatatcatcaatagctgtgtttgaagttgcaacgagcttgcctaccgtcatggccttttattttcttcttaataatttatctaaaaatgatgaaaaatgcaaacaaaaagggggtgtgtgtgtacgtctacatattatatataactaaatatgcgtgtgtatgtgtagctatatttgtgtgtatatgtgtatatatggacgtgtttataggaatagagcggaagcaatgaggaagaatagggagtagtaagtgaagctaattttgggagctgcaaaatttgttgaatcaatggtgttgactgaactgcctctgttgagtgggttgggagcagtggcaccgggagcagtggctcccggtgttcggccaacaggtacagctgggtttcctaccacagtgtttgaggttagaacaacgacgaaccaatcatcttcagagccaattccagccacggtgaacgagctgtcattgagatatttcccgtattgggaacgcttgaggtcagagagggcgagggtcggtactgatctaggaatgcaaacaggcaatacaaagccgtcggttgtgttggaaacgatcaagttgcatttggctaaaagcattgggtaactggagagacggaattgaggctcagtgcctggtgcaaggacagagcctgtggtgttggtgcaaggttgatcctggaaccggtctgcgaattctccagcaaagcactcggctctgtcattctctaacagttgagttaagttttgtgcagcacgatcagtgttaatgcctctaagaagaagatcttcctcatcagtatctgcacgaaaacagtggagagatactccatttgactatattgctaacacattttgatatttatgagaaatcaaatttaaagcatatatatatgttcatacaggaatcaattaaatcagcagtgtgaaatcaaaacagattattcaaacatggtgtgttcgccttcatccaga

SEQ ID NO: 607 - DNA, 2679 bp, Cannabis sativa
gtttttggtgatgccattcggagccaccttccaaacactcatgaatgaggtattccatgatttccgaggtgaatgtgaattagttttttttaacgatattcttgtatacaaccctacccttgaagaccatgtgatacacctcggtttagtgttcaaaggccttcaaaatcaccaattgtatgacaatagaaaaaagtgcacttttgcttagcctcaagtggagtatttgggccatgtaacttctgctaaaggagtggcaacagacccgagcaaaattgaggccatggttccttggctaaaccctcaaggagttgcgtggtttttagggcgtaactcggtattatcgcaagttcgttcaaggttatggtagtattgcttgacctctcacttatcaattgaagaaatgctattttatggtcacctgaggcacaagaagctttcgatcaactcaaaaaagccatgtgttttgttcccgttttggcgctgcctgactttacagctccctttgttcttgaaacggatgcctcagccatgggccttggcgctgtcatcatgcaacatggacggcctcttgcctttttcagcaaagttttagctcaagctagtctcaaatttgtttatgtgcaagaaggcatggcaattgttttaaccattcaaaaatggtgttcttatcttttgggtcgcaagtttgtgatttgaatggatcaaagaagtttgagatacttgctggagcatcgtttggtttccatggagcatcagaaatggctcactaaattgcttggatatctttttgatattgatacaaaccagggtttgaaaatagggtagccaatgctgtttctcgtttcatggggaagcatctcttgctgtcatttcgatccaaaatgtcttatctataacagaaggcttaagttgccacaaatcccatgctttctaaagtcattcagaaccttgctcaaggtcaagatggcaggaggtactcaatggtacatggatgtctcaagttcagaggtcataagtgttaccaacttcttcatcttttattcagctgttattacaataatatcaaagcagtaaagtaggggtagacttaggggtgtacaagacctttcaacggttggctgctgacttttattggcacggtatgcgccatactattcaaagatttgtggttgagtgttgtatttgtcaacaatattataaatatttggcaaaaaaggtttctcttcgttctagctcttgcagctcttgagttggtgccatggcgaaaacaagatcaaaggcgcaaaggaaacaaagatctgagataacaaaattgaagaaaagagggccaacatctactattgatgttaaaaaaacaaaatccaaggatgctatccttggtattgagccaatcgatttcactgatgatgaggacagtgagcttggggatactttaagggaaagaaatgaagtttcagatcctcttcatgatctacgcaaaccattatctcctagatcatctcttagagctattcaacagcaggaggatatacgcacagactttgcttatctcctagagacgaacaagcaatgtaacagtaacctcatacagggtatgaactctcatcctccagttctaagatctagcagaattgtttgacagcaaaaggatataagcaaagactttgctcaattcatggaagcaaacagacaatgtaagagtaacctcaaacaaggtatgaattcttagcctcctattctgagatcaggtacagtcgttcgtaaccttgaagcttcattcaaaagttctgaaaaagaatccaaagttaagattacaatggagaacattgaagatgagatatcatactggaactcggcaattgtttgctatgtcttaagagctaatcctcctttgacaatattggaaggctttgcaaggcgaatatggaagggtattgtcaataaagttgggttactatcttatggaatattcattgtaagatttgtttcaatagaaaaacgtgataaggtactcaatgggggctatacatttcttaacaaaagacttgtaatcatgaaggtttgggattctaatgtcaatttaaaaaaggaggacatcaaggtgataccaatttgggtacaacaagaagatctggagctggaatactaaggagagaagtctttattcaagattattggtaaagtaggatcaccatcaatcgttgatttagtcattaaggagagggataagcttagctacctaagagtattaatcgaggtaactctgaatcaagagttttctgatcagatatcttttgaggatgaacatggagaaaatatatatatatgtgggggttcactatcaatggaagccattggtttgtggacactgcaaaggaatggggcatccaaatgttgagtgtaggaagcaaccaaggtgcaaacaagagtggatagtcaaggaatatagaaggaaaaaagagcttgatgtgaaaggaacagaggataaggttgatcctgagggttttcaactggtttcaaaaggttggaaatcgaagggaactaatgaagtggcaacaacacaaacaggaaatgtttttcaagtactaactgatacaggggaagaacaaatcacaggcactagtggaaacaaggaacaaagtgattttgagaatggaaatacagggaggggggggg

SEQ ID NO: 608 - DNA, 1602 bp, Cannabis sativa
aaaaaaaaaaaaaaaagctaatatagtggcccctttttttgggttactaaatttttaaaataataataaataataaagaaaaaaagaaaaaaaaaagatatagtgacacttttgggaggttgctgttactttttcagtctggcaaaatctgactccatatgcctacaataacgcgcaatgagtggttgtaaaatggtttagtgacatgcacggaagagtcacttaaaactggctttccagtcaccttcattagtgacgcaaagtaaagaattactaaataattttagagtcactcaatgtgggttattaaaacccatttttctagtagtgcttgctcccttcatccaacgactgcattgtagatcattatcatcaccattatccatacattccaagaacgaaatacattgctcaaaaagatgcccaaatcgaccacattcaaaacaaaactcaagtaagcgttcatagcagaaatcaacccagaaattatcacttacttttggcaaacagatcattctcccacagagaagtggtttcgttatattgatcttaacacgggcacgcaaaaaaagcccccaacccttgcatgtagtctttataaacttctataaattccccaataatgttgccaagagcttcaaccaaaccagcagacttgctgagaaaaggtaacctgtagatttgtacccaaaatggagtatggaccatgtctttctttgagacattttgcaggatatttggtgagtacaaaactataagatggttttggaaatgtcaaggctctttattcaacacccgagctttgtccccagcacaatcaaaaactatatggaacatatcacccttatattcagtgatggtaaaggaaaagtgcctattccaatgaccagacatttgatcatagaaaaaccggtttgtacacggttttctcaataagcacacggaccaacagagtgtgaccagggcgtgatgaagagattgagtggacatgatcaggtaatgagatagtagatctttcctcttcagtaagagaaagtgaagcattcatagatttcataagagaattcatagaatcgtggtagaaagaaacaaaaaagaaatgtgagcagtatataggcagtggaagaacacgaaaagggaacccaagaaaaatgaggagcagtttagatcccagtaagatgaaacaactgacacagacccaattcaggcacgtacatataatattacattgtatttaaagattagttatacattataatatgtacaaattaaaagtgtttctatcattaccaataagatattattttttcttcgggagttcagtggcaacttctttttattctcatgtagcggagataataactctcttaaatgagttgttgtggcgttgttttgattttagtattatagtttataatattttacatgtttgactttttctatgttttttttactcattttactcgttgtaaaagaattcaaaatgtcatagttcattctcttgcagggtgactttatcttttagttttggatatggtgacctaatttatccccttgacctctaatctcttactattctgtattttttttttttttgagaaa

SEQ ID NO: 609 - DNA, 975 bp, Cannabis sativa
cataatgaggcctttctcacttagttttaatcgaaatcgaataactgtgatttggagcttctgttgatgaagttttttcatgactattctaatttcaggatgttgtattggcctcggtatcaatgaggcctgttccttttgcaccagtcatggagaaactctctctttccgaagcgaattatggctcggttagcaggttttacattgtaacacaagaagatcatgccataagtccttctctacaggagattatgataaactcgaatccaccagagcatgtttttcggatcaagggctctgatcattcaccttttttctcgaggcctcaagctttacataagatattagtagagatagctcagattctaccaaagtaaaacttatttccaaagtacaccaattctcaaagagccttgattccttcaaggctatagtgcgcttatatttaaaggccacaatgtgtagattattattaaataaggtgcatcattcagaactttcattgtcgcttgtacactgtttaggttgattattttattggtgtgagactttgagagcttaaaatagatgtagatttttttttcttttcgaatttttgtaaatagtagaaatttgatgtgagttggaaatgagccattagttgtgcatgttcggatttgttgattttgaagtttcgagctagtattattattattattattattgttattttttttgcctttaataaaactccattcaaaggaaatctaaaccacaatattagtagctacatgaggagctacttccctaagagaaccagaacaggaaatacaattcctcctagcccgattcgccaataaagccaaaacattgtcattcttagggacaaatttaaagtctatgatatcaaaattacaaactagagttaatatattgctaaagataggaaaagcactccggcagggggcttgttcactcagaaatcaaagattttta

SEQ ID NO: 610 - DNA, 2646 bp, Cannabis sativa
tggggagattgctgctgcaccagctaagtgcctgaatgaactcgggttccccgaaccccgagcattccaactaactattttcatggcgaagtgcggggttgcatagcaacctccgcagagaagtcatagcaatcggtagaatcctcagcaagcgaagaaactacagattcagcaccctcttcaactgaccaaggagaaggagtagcagaggaaagtccacgacaacgttttagagttttccgcaaggataaggaatcattctgcctcttacatacagagttagtagcaatgttttccttgtcgatgtggatagggatatgtatggtgggtggagcaggagtgaagatttgcttacctttgttggagatggtattatttttattggagacataggaggactgcaaggtattagtagatgggggataagtagcataagtgttcagagacatgtttcccaaatcaggtgtgtatatatgcgataagatagtgacatcaggaggagatgatgatacaggaactgatggagaaaatatgggtgggatattatagttttgggagtccttgacactagacagtatgggtgttggggatgatgtagaggtattcgaatctaccataataccttttaatttaggactggtatgggccggggtttggtatgttgtgtgagagggttgcagtgagtttgtgttgttccgagggatagtaggcagagtaggtgtcgaggaagaggagttggtaagtggtcgtgtatggtttagaataggtgttgatgaagattctcttgcaaaaagcaatcgtggttggggttggatctgagaggatgaaccaggaagagttgccgtaatggactttcgagccaagcgggtaagcaggggccatgcattcccttttgagaaatcagtacggtatcgatcttaactatctgaaggtaattttgagcctttcatccatggaccaaagggaagatcatcatcattaccattatccattctctccatgaaagaaacacattgttcaaaaggatgaccaagtttcccacattcaaaacaaaattcagggagtcgttcatatcgaaaatccacccaaaattcatctcgtatatttggtagtttaatcattcggcctcttggtaatggtttggtgacacaaagcttcactctaactctcagaaaaggtccccatccctcattggtggaatcatcgtaaacctcaagaaaatcaccaataagattggccaaggcctcagccaattgtgcagacttactcaaaaaaggaaggcgataaatctgaacccagaatggagtaaaaaccagatcctccattgaggcattttgtagagcatctggtgtgtgcagaacaatgaggtgattttggaaatgccatggttcttttcgaagcacacgaagtttatcacctgcacaagcaaaagaaacatgaaagatttcatcattgtagtcagagatggaaaccgaaaagcgacccttccacaggccagtcatttgatcgcagaatctgggtttgtatactggtgcagaacagagtacacgggcaagaaggacatgagtagaaggtgttttatttgaagtgggaatagagtcaggaatcacgaaaacattactttcttcattagtgagtgagagtgtagcgtataaagaatgcgaaaggggatccatggaagacaatcaaagaacagagaaggatgaaatcaagaaaagttgaagagaaatcatcaagaggcagttaatcacgaagaagaagaggaaaaaactaccatcaggatagaaacaaatttgaaatcaaatttgaaacagttaaaaagaaaataacggaaaaaactgcaacagaccccacacgggcaatttagttttagaatcagtaggcagcattattagtttcattaaataacgaaatcattgttatttacagttaattatgaaagcattgttgactaaattgcttaattacaattctttaaaatttaaattaaatagttttttttttttggtatttttatagaatttcacgtaaaaaattttataataaccaacggaataatttaaattgcaactaaaatccctataacaacctatatagaagccatcggaaaaattaatgaaacacactcaaaccgtaattttttttttttttagaaaaaaagcttaattacaaaagcgagatctaggtaggtgttcactttcatgcaaaataaatagataaattttttaaaataaaataaaaaatggatatggtgatgtagttataaaataaatacgatatatatatatatatatatatttttttttttgaaacctgcaataaatacaattttaaaataaatactttaatggaatactctatgccttagtttttttgaaaaaaatatatttagtaccttatatatattttcaataatacttctttcatatcttatattttgaaattggacatatatagtacctaaagtaaaatttgattgatataatttattagttcgacgaaagtttttagttatatataatcatcaaataattaaatttgaattcataatttataaaactgaagatagtttgataataaatttaaatttaaggtaccaaatatgtatgattctaaaatatgatgtaccaactaagtattataaaa

SEQ ID NO: 611 - DNA, 4337 bp, Cannabis sativa
tctctctctctctctctctcggggtgtgtgcatttcattattcctgattcagttttcttaagatgcattcataaaacataatttctgcaattaataatacttttatgccaaaaaatgttgtgtatatctttagtcaagggaaaggtatatggtcctgaaatatgccactattttttgtttaattcttaattactttgactggttatctttccgccacattctttgtagtgacacttgtttttgttgctaattccttttttcaggctaaaccttgtaagcatctatgggtgggtggaattagcccttctgtttcgaaggaagaactagaagaagaatttcttaagtttgggaaaattgaggacttcaagtttcttagagatcgaaatactgccttcattgaatttttcagacttgaagatgcttcccaagcaatgagaaacatgaatggtaagcgtttgggaggtgagcagatacgtgtagattttcttcgatcgcaaccttcaagaagggtaagttcttgttatagcttcattgtttttatctataagaggcaatatggtcattaagttcttatactagttgatatcttgagagcaatgttaatttgttaaggtgatgagacaaatgctaaatgctatgtttttaaagtaaatacatttaaaattattcaaagctttatcatatgattttaagtatatgtattatgtgctatgttgtctcattgattttcagtacatttataattaaatacattaaatgattaatggtagtatagttggtttgccattatggtgttatattgaatcattttgttatccctataatttagttcataattcttattaccttcaattagattgttattattgttgaataaatttcagatacgtaaaatgtagttactttttttcaagtgagcttatgtttctcatgctctgtggaacaggaacagtggcccgattccagagatggacaatttcagggcaggagcataggtccggctgattttcattcttttcaaagaagacagctggtgagtcataaattttgttgcagcaatctctttgctacttatacttatggcctttttcctacaatgatatcattatattataaatatgtctaaaattgtcttcttaggcatgacagactacttcaatatattttgtcagaaagctgtctacagaatttgagattacagcagtgtgtcaatattttttttcatcattttaatttattttgaaatcttgtattttctgtagtattctcaagctccggggggacgaaaaggagatggccagccgagtaatgttttgtggataggttaccctccttctcttcagattgatgagcaaatgctgcataatgcaatgattttgtttggagagattgaaagaattaaaagtttccctgagagacattactcttttgtggaattcagaagtgttgatgaagctaggcgtgccaaggagggtttgcaaggtaaacttttcaatgatcctcgaattagcattatgtactcaagtagcgggttggcaccagcaggtaaagggcctgggccagatatggtgttcaacgacccttttcgacctttgcagatggatatgtatggtccaaatcatccaatgatgtcaaataattttcctggaccacttccaggtagtggaattcttggacctaatatggccatgaggcctttgggtcatcaaggaagatttgaaccactgctttcaggccctaagattaatgatttggcaaatcttcctaactatcaggatggtaattccaaaaatttaatgagttcaagttggggaaggccatctcctccttcagctggtgtgctgtcttctcctgtgtcaagcattcgtggaaacacaagatctgcatctggtgcatgggatgtgttggatgttaaccattttcagagggactctaaacggtctaggatagatggcccaatgtctattgaagatacttcaattccattaagaaaatttgatgaccatgggctagggttggatcaatcttatgtagttggggcagttgatggaggtgcttctggtccatttggtaatgttcaagggaagggtctccttagtcctgttggtacaaggggttcaactggaggagcagctcaaggtcattctgatggtgattatgtctggcgtgggatgattgccaagggtgggactcctgtttgtcatgcacgttgtgtcccaattggaaaaggaataggatctgagctgtgagtattttccattttgcatatgttattgttttcctttagatgtttttgcaagctgctatagtaacttctatctagctgcctgctgccctgacttagatgctcctgcctctttttcttgtcaatgcgtgtacattgcgataaagttataacatgggtgtttattgtcttgcagtcctgaagttgtcaattgctctgctagaacaggattggatatgttaactaaacactatgctgaagccattggatttgaaattgtgtttttcttgccagatagtgaggaagattttgcttcttacactgaatttcttcgttatttaggtgccaaaagtagggctggtgttgccaagtttgatgacgggaccaccttatttttagtacctccttcagaatttttaacaaaggttttgaaagttgttggtcctgaacgcctatatggcgttgttcttaaatttccacaagtttctagtagcaccttggggcagcaaccggctcacctgcctattccttcacagtatactgatagacaacagaatccttctcaaatggagtatggtgttgtttcatcaaaggaggaacgagttatgccaatggattatggaagggttttgcacgaggaatctaagcttcccataaaacaattttttccacctacaagtgagtcgcccagattgcaatcagtatcacaagattatgcgcctaataatactggagcattatcacaagctggagttgcattgacgcctgagctgattgcgactctagcatcctttatgcctgcaaatgctcagtcttctgctccagagaatgcaaaacaattgggcccaacaattcggccttcacttcctcctggtcaactgaataaattaattcctcctggatggaaacaagatcatcatcaagcttatgaccatacagggcatggattacaacaattgggtagtcagtttaatcctcagggacagaacctctcgcaactgcagtcttatccatctctttcaaatacacacagccactctgcacaacaacaccatggtagcactcagttccaagactctagtttaaatcagtcactgcagtctaggcctctgagtaactttccagtaccttctcaaggtggacaaaccagcgcatccccacgtgttacccaatatcaggcacatggaacagatgcttctgggttgtaccatcctactgtttcccaacaactttccaatcctgtgaatttttctagtcagtcttatggtgctaatgctgtgcaatcacaaagtgtgccgttagcttctgacacggtaaatgcagaagtttcaaatcaggtgcagcagctgcagtcaatcattggggcgggtcagagcacatcagagggtgaagttgataaaaaccagcgttatcaatcaacattgcagtttgcagcaaacctgcttcttcagattcagcagcggcagcagcagcagcatgttggtgctcaagcagggcggggttctggaagtcagcaatgaaatagctacatctaggtaacttctcctattcattggttatcttttggggaagatatatatgtgtcatattcattgcaagttgactaagttaaaattgactctgcttttacttgttatggtgatttgttgttgttgtttcttttctgtcagacttaggcctagcttagaaattttagatgggaaaagttggaattttggatatttctggctgtatagcttgctgtgagaattgtgtttagtgctgtgttagactatttgtattatgctttgaacgctagagttttgggaagagttttctcgtgtatgtctggacagttaccacttacatgtattagcttaggacaagaacaagatattaagaattaacatccttttgggcaagaataatgtgtcattacagttcttacagtgaaatgatattaaagttgatttcagctaaaaatatataaaataaaattgggcaatgagtattactcttacaaatgtattttatataactgaataactttttaagagtgattagctgaaaagtataaaatggtttaggactccttggttggactaggattaattagtccataaataagccccta

SEQ ID NO: 612 - DNA, 1308 bp, Cannabis sativa
tttattttatatagttaagattagtcattatattagtagttgaaagctttagtttaggtatagttctagtactgaatcgatctgatagttaggctctcttcaatgaattaacgttagaaattaatcatgtgcacaaatttgcatgtgtgattgagtttttaaaataaactttgtttctcatgatctgatattacattatgaaaatattacgaaatattttgagatgagaaaatattacgatgagtcacttattaattggcagcacatataattaatgacattgcattataaccttggttggtgatcatccaaattttatatacattgtatagaagggccttctagcccttatcgcgtctctcccgcttcttcacccacgtgtttgtttgtttgccatgaaaataagggagaaaaggaaagaaaggctaaaccatgtgggaaaacgaaatgaaagaaaattgaatccttgtgtagagattagttgggcgggagggacacattgtttttgggctctattgtcctgttgtgcttgctttttatcaccaaatggattatgatcattaaggaaccaataataatgtaaagatttgaccataattaatattctttatacatataaattgaaagcaaaattaaaaataaatcttggtcacacatacattttctttttcagaaaaaaaatatggtggcacacatacataagtaaacgccaaaaaccaaataattgtttttttttttttttttttgctaacacaaataattgtgacatgataatatatgattactatatcatcagtagtgtcggccaatattcagcctattattcttctgtggaaattttattacacattgatactcagatacatgcaatataaatattttaattacttgtgtttgtctgaatcttatttttgtgtacattttaattaggctaagtaaaggtaatttataaatttccaatattattatcaacccttacagatatcatatagcatgaacaataataaaaacgtaaaagtgaattaggtagagaatataaaaagtagacgttacagatggggttacccgttacagttgtcgtaagaatatgtttttattatatattaatctagaatctgtttcaactctggttgtgtacgtaatttttatgtatatacgtttctttacaattcaagttctttgtgatcttacatgtgtggtttataattacttgagccacgtgtataatgaaacacaaattacagtagtacattttgaattatctttctaggtgctaatatatagtcgttgcttaaattctagcctctg

SEQ ID NO: 613 - DNA, 4637 bp, Cannabis sativa
ttacttttctcaatattccaggcacaatctccttgttcaaggccaacaatttttaggtttattatataaccagttctgcatgttccagtatcttttctagccaatatcaaaaatcaatcagattcatctactacttaagacccgaaatcaactctacatgaacgcttcagaaaaggacaaccagcaaagttatcattggcaccacttcactaccaactttcatcacaaacttattacaaattttaaaattcaatattcattgatttgtaaatcattctgaaattcaaaagaaacttaccggtcatactcaatattttcttcaggagatactttcaagttatttgcactttctaaggccaacaggtaagctactccgacctgtcaaacagaatgattgccccaacaaaatgacataagttcatccaaaaaaatggatgtgttattctgtagaaaactaatctaaagcttccaccagaagattagagaacaaattagacaattttactcaaacgaaaaaacacatattacataagagtaacccctattctagagttctggtacaaaggcttcactagccaaacaacccaccgaaacatatggagaatgaaagaaattacctggaagggaaacaataatttgtgaaacatatttttaaaatagctgaaggtaaaatattagaggcagaacacccaggagttgtcaaaataaaactagttcatttagaatcttagaactcaaatcattttgttgtaactaaatttctgttccttattgtttcttttagtgggaaaaaaataacttacagcggcagaagagctaaggcctgaactgtcaagtccgtcagaaccgcgcaggtaccctatgataccctacaaatgtaaagcaaatacattaaagtttggtggggtgccatatttattctattatgaaatcacatatggttctatgaacatgacaaaataaataaaacatatcaccagcacatttcacctgcataaaatatccttcaaaaccatgtctacaaaagagattgctggattctacatgcaaacattttcaggatgtatctatgcatatggttgcttcctcaaaaacattcacgagtttgcacttcatttcaaagagaggaaaatgcttgtataaaatatttttgtttagtttgtcgttgtaccaaagatatgtagtagaaaaacaactaaataaaataaaagttgtacaaaaaaagaaggttatttttgtttttgttgtttaggggatttttcttctgcctaaattattattggtaaagtataactttggccagctaaatattatgtgttatagaagtgtacatagacttagctatgttttaattatttactttttcaaatcctctacccaaaaatcttagcatagtaaagcatgaaagcttttactaaggagataaacgatgtagaatagtaaaaaatgaatattaaataaagaaagaaggggggtagtgaacaaagatcagtaactaaactaagcttaaaaaaacattatctagactgattaagaagtacaagaaaagccaaccagatgatatctctctcacctgggaaatatggttcccctttctctgtagtgcgtatagagctcctcttgcatagttgccccaatcacattcttcatattgtttcgaagaatcatttgcatcattcttggaaacttcaatcttgtgtttagggtgcacaatttcattaacactataaaaccaacaataaaaaaaaaattaaatcttgtaaggagaaattgtcacatggagaagcaggaaactgagatctcattgtacacataaagttagaattattctgaaaagcttaagctactacaaaatgaacaaactaaacgatactttaatacacctggtaacttattggcagacattgagcagcacaaggtttgaaacaaaatgacatatcatgggatttagtcagaaacaattgtagcggtaggatgttagctattaattttcccagaagttaagctgttacatacagcaatttgaaatagtttttatcttaatcattattttgtccccagctatataactggaaatagctgtttacccgatgcatgtgtggagtgataaggatcaagagtgggttttttcttttacctgaactttacttctcctttaaactgtcctgagcgtaatacaacctaccaaaagacatcaataattaaaaacaaggaaatgacattggaaataatgatataaaattttcaactcagtttataccgtactgatttatacagtttttcaacaaaaacctgttatacaatgttacagaacattttgttttaaaagtaaagctattcaatgaatacagactgtgactttattgaaatcagcatgtctgttatgatgaatactcttcagaacactcagagaatgagagtatcagctgagcaattttgacttttgtaagacataaaatgttattgaatcaaaaagaaagactaaagcacaaattggattagagggccagaggttgacctaacatatagagctaaaaaaaatattagattacatttctcagctagcgttaattgaaataaatatgtgaacaaataagaaaaagacgtgcgcaaaactttactcaatctcagagaatcaatgtctcctgaggttgtcttcaatccaacagaatgatcactaaggcgcacctccaaatcattctataaaaaaaccagacccccaaatccaacaaaaaaactgaaaatttctagtcaagcagagaagtaatcacatgggaagagacatgcaggggaacccaattgctagagcaactaatcccataaatgattgaagcaatgggtcaagacctgaaaattggtctgcaggttcagacatacttttacataaacaagacagttgcctggacatttcatctggagcacattgaaggtattgagcctattacaactaatgacaactaagcaaaatttcatgcttctcttggcaacaatagacgggcaaatgaagtgaaaggctcgaatgaagtaaataaagaaagagtcaagcttagtactttcattttccttctctataagaaacagaagctatggtagatcacttaaaacaattacagaacaaccttggtatttgatgtcataagcacaaaatcattcgcttctattcattcccttcaatataaaaccattgtatggttcaacagacaccaggaaatcacataatcccagagctttagaatgaaacaaatttggttttgatttaacataataccctaccataaacaattgacggttagatgtcacaacccaacctaagtggccatttcatatagttctcacgtctgttttccaccactgcttttattataaaactgattactacaaaatataaatttttgatccataagccttcaggggtctcgaataagctggtggtcaatttgaaatatatccatcattcctggatatcttttagaaattaatagcttcaattttagattttataaatttagatttcataggtttttttatgtgaaacttggctctgcgcctaaccttataataatttggtacaaagcaactataacaattgctatgtaagtattcaaggactcaaatatcaaagcttgtgaatgtgaacaacatgcctgaatattcaattaacactcttgggtaatttgcaagttcattttcacataatgctactcagtaaatttgaagtcaaagttaacatgtacaattttctgaaattgtgagttacgtcctccgagttggttagattgttacagaagagtttgtatcttacctgactatcactagaaggaataaatcctagaagtactcctctattaattgccatagctgaaaccgtcccaccctgcaaacagtaacagtgtataaaaatacccttgttaaaaaaaaaagaaaaaaaaaaatccttgttaagaaatttaaaaataaacataagaaatcttaatcaaaaacataaaccaagaacaaagttttaattattaatccaaattggattggccaatgataaattggttcacaaatagccgttaaaaacaaacaagtgtcttaaacgcacctgatgatcaatatgagctcctaaggggcaaattcggtaaggagaggctacaactcgaacatcttcgatgcatcttcccgccaatgcagcaactatgtctctaatctctttcaactgcaacaatgtttaatggacaagcaattaacatgcattgcatacatatagctatatatatgtgtgaacagaagatttaaacccacatcacatcgaaggatgtcaatgtaataaaaagaaaataaaagagtagatttgcataaacacagttctggcttccaagcgcaattcgtgtccgttgaaagtaaatcttaaggcattgattgtgatttattcaccatattaaaacttgaatcgagcaagaagtaaattcaagaaaaaaaaaagaatggataatttgaacatttatataagagtgaaagatgagaaacagagagtacctctgattgagatggccatgatgagggatccatcgtcgcagttttcaaatgaaaagtgaagatggctttgagagattagcttgttttgtatgagggcatttagagagagagagagagag

SEQ ID NO: 614 - DNA, 2536 bp, Cannabis sativa
acaagtgctaattataacttttttcttcgtagtgacaatatcatctctagtttatctgtaccactagtgtttaaaaaattcagatctattttcagatataatattgtgactataaaaaacaccgccataaataaaaaattagaaataaatattgtgacattttttcttcctagtttgggtaaatctctaaaggaggctattattggattcaaaaccttggaagtgatgctcacttttttttatggtaagttcttaagtgggtcagcacccagcaccaactagttattgagcttggacttaagctctcctatgttgtctgtaaattgatattaataagtcaatctcacaacatcattttcctggcaattcaagtcataaatgagtcgtttggaaaacggaatcagcatgggaagacttgtaaggttgactgacccaaataaaaagtttcaatctttctgtgatataattgctactaaaagttctttatctctttgccaattgaagagccacaccattcattttcttgcaccctaaatggggtttcctaatttttgttgggccttcttgattcttgttctttctttcaaggtaagtattctaacaagtcaaaatctttcatgcaatatgaatgacttggaagctttgagtggttttcaaagttgtttagggtcagccattgaaggatgggacaaatccacttcctcggattgctgcaattggacaggagtaacatgttctgatgatcatttgcctatcttaggcagaaggatagttggcttggaacttgacaacaaaagactcactgggaaagtttgtgagtccttagcaggtttggatcagttaaaaatcttgaacctttctcacaactatctcagtggaagtctggaagacaagattttccgtttttataatttggagattctcgacttgagcaacaatgagttcactggaactatagctgcaagtatctttgaagtttcgaccctcaaaattctcgatctctcacagaaccatttctatggagaaataccaaacatctttggcaatagtacctctcttcaggtcctttctcttcatgggaacgacctatctggaaatttgcccgaaagtgttttccagctccacaatctaactgagcttcaacttggagataatggcttttcaggaaaacttaatgatggaattggaaacctttctaacttggtcaaattagatatttcgtttaatatcttttcaggtagtcttccagatatttttaacagccttggtaagcttgagcatctttatgctgcttcaaacaacttcactggccacttacctgcttctctgatcaactcaaaatctctaatgattctcaatatcaacaacaactcgctcgatggtctgatcaatctcaactgcactgccatggttaatctgatctccattgatcttggctccaatttctttcagggtcccctccccgaacgactattcacttgctggaaactgattagtattaatcttagtcgtaacaagtttaatagtgtgattccaagtagctataagaatttccagtcattgtcatacttctctatatcaaatgcaagcatctataatgtatccacagcccttgaagtccttcaacattgcaagaatttgagtatggtttttctcacaatgaatttcgctgaggaggagataccatatcaggtgaattttcagttcaagagccttgaggtgtttgtcatggccaattctcaactaagaggtaagattccagattggttgagtggctgcaccaagttgcagctattggatctatcatggaacaacttgtggggaaccattcctccatggattggtaagcttgatttccttttctacttagatttgtcaaacaactccttgagcgaagaaataccagagaccttaaccgaattaaaggaatttaagaaagagtttaacttctcagtagtgcctattctaaccttcccagtttatacttatcgagaaggttcaaagggtttcaagtacaaaaagatgtcaaatcttagaccatctttggttctaagtgacaacaatctatctggaccaatctggccaacctttgggaacttgaaaatgcttcatgtgatggatttgaagaggaatagtctttccgggatcattcctaaaagcttttcgggtttgaagaacttggaaaaattggatttatctgagaacaagctcagtggctctatccctgattcattgttagaacttcattttttgtccaattttaatgtgtcatacaatatgttatctggaaaaatcccttctgggggtcagtttgatacctttccattttcaagttttattggtaataagggtctttggggttttaactttttctcttctggtgttccaaaacaacatcactctacttctcaagtttatcccaatatcaatgggcaaattatagattttggtttggtatttcatttggggactgtaactggttttgtcattagtgtaacgatttgttttatatctggatgggtgtttcaaaatgcag

SEQ ID NO: 615 - DNA, 1512 bp, Cannabis sativa
ccataggcattaacctctcacatgatttcagagctttaatggagtccttcaaacttttgagcacggattgggagaagaacctctctgtcttcgaaatgagattgtcctcagaatactcctccgtcatatccagaaattcaccggcgcagcgaagaggagcaacattgaaagcggtcaagtcaatcttgacgccataagagaacttcgctgctaactcaaaagtctccgaaccgccggggaagtcggagaggactatgtggcaatggacttcctcgatttcgtcgacaccaccggcggcaacttcttcgtcgtcctcatctcctggttcggcggcggcggcggaggtagaagtttggtctttagtagaagaaaaagcaataggattcttctcttgctcggtaatcaggtcgtgaagccttcgacttttcgacattaatggaaactgaaccataaaaaaagataacacttagttcaaccgttttttaagaaattgcagtatggtttcaatggaggaaactaaccttgtggagatgaaatgtcatttcattgacttcaactacaacgtcacttggcaacccagtagtgcaaaacctgtaaaaaaaaaaccaaatatgattatgggtgggtttagagcagaaggagaagaagaaagtgcaaagagtcttggtgttaccatgcttggcctttggtggtgcccggtttctcaggtgctgccattttctcgggaataagcttcttcaagttctagactttctactactgaagaaaacccttttcagaaaactagacaaccagatccatgaaatacccagtggtgactggtgagtgttctctctctttctctctctctctctgtttctttctttgtttttctttctctgtcttatgtaaattttagataggagagtagagtagggaaaaccaagaatattaggatggaggcttgtttgagtgtgagtgagtgtaaggtaggtagaatgaatgaatgaatgaatttcccttctctcactccaacatcacattaacaaagacagtacatgaaaattgtttttattgtggtttagtagaagaaaactaggtgaaagaaagaaagtgtaagggttttgaaagagagggtaggaatccaaaatatttgagagaagacaaatagagcttgaacaaatatcgaaaaaggagatcatatgatcatgtttctttttattatttttccatttttttccttttgaaaccgattcagtatctaacccactccagcaatgacacacacattttctctctccctcttttctcttcttgcctcaaagaaaggaaattgggactatcatcataaagagggtgtgttactcaaagaataattttaaatttttgcttttaaatattattaaaacccaccatcacaatcatccatatatcacccattattaaccaaaaacgcattgtatgccaactggggtctcattgcttttttgagagttaaaataattgaattttataattgcatttgcgtttcat

SEQ ID NO: 616 - DNA, 6543 bp, Cannabis sativa
ttttttttttttttttataaatagcaaaagtgtgattattttttatatataaatcacaccaatgtaactacacatatgagtaatgtggaataacaacacaatttttttttataaatcacatcaaaacatagcataagtgtgatttttaaattaagaagttcttgttatcaaagtagtgttttttttatatataatttagcatatccttttaaaaaaaatagatttccaatggtgttgcaaaatatatgtttaaatttgtactaaagttagcacaaaaattacattcccaatgttgttttttatttattcttttgattctagctaatgtttttaatattgataagtttttttttattattattatttataattttttcaaagtgaaatttgtagactttttttttaaatggaaaatgtaatttattaattataaaattcagttaccaaataaggtaccaaattaattagaacagactccaaactgaaactataattagaatacaatgtagaaactctaataaaactatgaataaccacaatagtttatcgtttaacaaacaacaaagagacatttttcaactcaatttataatcttgaattacataatcactgccgccagattctttttatctaatttagagtctcacaaactcccatcctttcagcaatcttaagattcactatcactactgcttgtgagaaaaaagtgcagccttcaatcaaaagaccattacaatctctagccattatgccaaaaccatagcttcgaccactctcaaatatagttgtgtccacattaaccttgatactatcaattgatggtaaatttcaatgctccacgccatcatccatctgtaaaccggaccatgatgatccttcttgagcattttaagcatttctgcattgatcatactcctttgcgttagcaacaatagttccagcactcaccactttcatagaccaaactagatcattctctggcaccccaaatagcccaacaaacagcagaaattatacatttcttttcagcttccaaaccagtaaaaacagccgagcaccaatctaaaaaacagctgatcccaacacggttttatctcggggcaagttattaaactgtgcacaatagcttcagtgccacggcactgggacaaaaagaacacacctccactctcttagataacagttgaatcatagtagggagaccattcataccagccctccatgataaattctttactttaggcgggcatctttaacttaaaaaacattagcttcatccaatcatcctcattccatctgccattaagtttctgttggacattatatgcactttctcgacttttttggtttattatttaacttattttcacacttacaaggttctaggcttctcaaaaaataaaccattgtttatcaacgtaaaatgattcattggggcctcatttcaaataccatgcagcaaaattatcatcactaccattttttattctcgtgttacaaacacaattacacaaatataactacaacacgttaattcgtgttaactaagacttcactaccacactaacaattaagaacacaattatgattacaacaaaacagtcatatgtagaggtcacacttataccttgactagattcttttgttatttccaaatgataatctaagctaagaacaattctaactaagacaccgtactgaaaatcctgctgagtcaggagttagcaaacatcttcagttgaaacagctcaggtctgtcagttctacgacttgcaagagcgatgttgagatgaacatcatccttaaagattaaaaccataactataagcagttgtcaaaggatataagcttactaactgtacaggcaaggcagagcaggggagcgtagggcagcgactgtaaatgcagaaagaagatcccatacatgtcaaggatttacaatccaagaaatggcctgagcataaacataggattgcgcaacccgacagttcaagccaagactgttgtcttaacttctttaaagaaactttttagtccagaaggaaggctttgacaccaaaattggatcagctttgtgccatgcaccgtacttatggatcatccaactcaacgagttgggcacgtttctcagcagccctcttcctgataaatataccccatctcaaggctgccttgagcttaagccagccaacaacagctttcccagaccgggttcgatcgtcatccaagttgtagtttaaatctgtattgggcatgtagtctgatggatatggaaacgcatcttcagtaacactgggaatttggccatgacctcctcccatgttgaataatcgaagcaattgctgcatatcttcgttctcaagcatctcatggctcctcatacgaatatcttcctctgtgaagaaatcgtctactcccctaaaagatgaagcaatattgttctggaagccaggtgttattgactgcgtgggaccaacagcaaggacattttcgcttctttgtaggtgagcttcatttgaagtgcttggtaactgattttgacacgcgaatgaagagccattgtactgaacatgggcattcagacttgggttatgcggctgaatagggaacctggtagccataccatcgttgtaccctggagagaaacagcaggcaccatcaagaaccaaatctaagatacacatcagaaaaataaaacaaaggcgacatagctgccattttagagcatgactaatgccaaacatagaaaatatgacagattttgaggtgcaaaatatatacctgttagtcctgaatccatggtgtgctgctctgatggaacaggaactggaagcgctggtaggtactgctggtcaaatgaatgggtataatcttgagagtttatgggaacttcactttgagatatacacaagtttttctccggttcagaagttagaaaagacttgccgtcgtactctacaacatgcatccaattgtcatatgccttcttcaccaaggtgtccacatatacctgcaaaaccaaaatattcacagtattgtcattcatcaattctgtgtcaacattctactaaggccttgttattcccaaaactttgaataattagagtttcacacactgtgctccagaaaacaccagttaagaatgcttccttttaagctggatttagtttgggattgatttggtattacagttggtaacaatagtcaaaagcagaaagcaaggtagctgaccgaagtcatgcaagaacactaatggtttaccttctgactatcagaaagagaatctgctgtgtaatattgtccattggcaattaggccactaaactcatagatattgttgaaagcaacaccaacatttctctcatcctcggaatagtacacataaagtttcccacttaaagcacaagtctttgcatgctccacaagaacatcccacattttatttgacatgccactaccgagaatctgcagaatttagattgagtattagaaacggctacacactcacataagtgtgaatgcataaaagaactgatataaaatccccatccttacatttctcaatctctgtgaatctctaaccacaagccgcaagaaatcttcaactgaaaagattccagctttgttcaacctcttgtgaaaggacccatcttttccaattttctctaatctccaaacttcatcagttaatgctggtggatagtgtttcttgtatactgtaaaccaaaagatcataaattttttgcaatggaggagagcacataacatatagaagaaatgtattgggatattttgttaaactcacattctccacggtgatccttaactgtgaaagcttctgttttcgcttcacgaatacgaataccctcacaagagccagaggcaaccttcaacccaagtctgaatttcctgctcctaatccagctggaattatctgtgaatgtcaactcccctagcgttccaacgccttctttgagtgttatttgcagatctccagtcagtaatggcctctttccttcacgctctttgactacatggccttcaaattcttcttcggtccagttttcatcttcctcgttgctaaaatcaccttcaagcacaataatatctagtctcacagaggattctggacctgatgacacaatttggcctgtggttgcatcaatcaacacaatgtggattgcagtaccctgctccccttctacttttccacctgtaaagaggggaagagacaacttggacttgaaacgcagctgcaagtttcttccatcaggaccctctatacgcttgggagaagacctgggatttcttgaccattagaagggaaatcagaaatcacacacacaatatatctatatatgtaaaacacatagaaacattaacataaagtattgaacatgaataatggttactacctcccattgagtttggcagggcataacttagctagagcacgctccacttcttcactaacctgttgttcatcattacaaatagtaaatttaagaaactatttagtaagacaaaaatttaattccaacttcagaagagaaaccattttatcttacaactctgcgaagaataggctccaatgacgagcaaagcttttgcagactatccaccttaagagcttcaacaattacgctgcatttaaacccaaattacattagtacctcgctatgtgaaaatttaagctaactttactaagtaaagtgatcatagtatggcataatatgatagccccttaaaaaagaaaagattttgaagaagaaaaagaaacggttgaactaatttcaacgctaaagatggaaatacctggctaaagctggtctttttctttcgggttgtgcttcttcagctgaagttgaatccaaccctcgtttttctctggtcatactagtggtcgatctctccacatacctattttgcttcttcaacgcgtccattctaaacatccccgtttggttactgagaaagtgaaagaaaaaaaaaaatgagcaccaaaacaaaaaacaaaatccaaaacatacatgaattcacctccatcccacttacctgaaagtttgacctgaatcgtccatttagataaactcaaaaaatacaatcttttgtgttttattctcagcaaccaaacgaagttgggtgcagaaagaggcgtaaagaggatatgaagagagaaagtagaaagagtggagcgggaaagtaaaaagaaaaagatgatgaaattttttatgagaatctcagaagtttccacgaagtggctgcgaattttcttactaacgtttcggaaacatcatggatagtaatatagtgcatgtagtacattgattgagcgcctttttgttgtacaaactactgtgttcttttgtttgtacccaaagaaaatgaaagaaaaaaaacaacactaaacggctcagtccaacctaacaactcacttgttatctaaagcaactactacttcagattgcccggtggctgagatctctcgggactagaggatcatctgatcttgaccgtccattgcatcgaagtttaagaatctttgaaggaatcgtccacccgatgatttcatcttgtgtgtccattaaaaactgtccgaagcgaataacaaccgttggatgtcaaactgtttttttttttttcagtggaattaaaattcaatttctgcttttattcatcatctttttcttgtttttcttttcttttttcttgaaatagtaaaatgtttcaatgatattttgagagttaagttgaataagttggataatccttttaacttataataattgaaaaaaaccaaaaaggcaaaataaatgcaatactacggcacaaaatgacataaggccaaagatggatttatatgagaggattgtcaacagccacagtaaaaaagactcaacccatatgatatgtttttttttttaagaaaaactaataaataaaaacagataagactctacggtcattaaaaaatttataagaatggttgatatggaataaaatcaaatctctcgtgaaaaaatatccactttgccatattatgggaaacaaagttaaaagtcctactaatattagagaaaatacaactaataaataagagagaagaattgttacaaaatgagacatagttttcaattgcccagtgagactacttcccattaaaagtattgataactaccttagagttgctctccataataacaaacttggaactaaagtccttagcaactaataaagtcaaacaacaagtcgttgttttttcacataacacattagtaaaatctagctgagaagtttgaacctaaaccatcctaccaagatggtttttggccacaactaccgtacacatattttctaatcccacttaatccaaacttgagggaaaggatgtcagacctccttcaagcacgaaacaaaagaagaaaaaatcatgtaaatctgcaaaagaagtacaagtaaagttaatacacctcttctttctaattatcttgtaccttgtatgatatgattagttatgcctgatatgattagttatgccttatg

SEQ ID NO: 617 - DNA, 1942 bp, Cannabis sativa
  modified_base (185)..(188): a, c, t, g, unknown or other
gagttctatatatgaggtggtttattttcattagttcgatgtgaagcttatcatgtagtccgccgtagcagattagtgatgatacaatacaaattctttatctgaaaactttctttgtctatttgtcgaatagtgacaaaaataaatcaaacgcatctacaggagagagatagagagagagagannnngagagagagagagagagggagagttgaagttcaccaagagccaattcagaaaattttatgattctacccacaaagcctacaggtttgtaatccttggataaatttttggtgaattttttttcgtccttttttgcaaaaaattcaagcaaatccttgagttattgagcttggatctgagaaaaagattagggttttgttgtttctttcatcccattgggtatggatttcttgttcctgtgaatcacggttgggagtaaggttatttgatttgtgggggtgcatgggggacatgtattttgagttgagcattggtaaatggtaattagctcaaggtaggaactgggtcattaggatttttcttgtttgtaggaaattgatcaaaatgggtgatattggagaatcttctgaatttgggtctggagtgaatacgagaaatgggttttgtcatgaagaagtgagatgtccgaagcaaatttcccctgttagaggtggtgggtcgaggaatacgagtccattaggtcgtgtcggatcgagaaacactagtccatctaggcagaaggtgatcaagacgaaacctcgaggattggatgaggaaacggctgccacatttgctaaagcagttcacccggatgttcagatggaagataatatctgggcaatgttgcctgaggatttgctgaatgagattttagctagggttcctccatttatgatatttcggcttcgttgtgtttgtagaaggtggaatttaatccttcaagatagtagctttctcaaattccattcccaagcgccttctcacgggccttgtcttcttacattctggaagaattcacagactccgcaatgttcggtattcagcttgccattaaagacatggtataggattcctttcacatttttgcctcaatgggcattctggttagttggttcttctggtggtctaatttgcttttctgggctagatgggctaactttcagaactttagtttgtaatccacttacacaaacgtggagggctctaccaactatgcattacaaccagcaaagacagctgatcatggttgttgatcgaaaacaacggtcattcaaagttatagcaacaagtgatatttacggtgacaaatcattacccaccgaagtgtatgactctaggctgaatagttggttccttcaccagataatgccagcagttaatctttgctcctcgaagatggcctattgtgattccagattgtatttagaaaccctttctccactaggattgatgatgtataaactggacactggatattgggaacacattcctgcgaaattcccacgatctctactggatgggtacttggttgctggcacacagaagcgtctgtttttagttggacgcatcggtctctacagtactcttcaaagtatgagaatttgggaattggatcatgcaaaagttatgtgggtagagattagtaggatgccacccaagtattttcgagcactgttgagattatcggcggagagatttgagtgctttggacaggataacttaatctgctttacatcttggaatcaagggaagggcttattgtatgatgttgataaaaagtcttggtcttggataggtggatgtgctctgcagtcttacaacagccaggtttgcttttaccaagatttgatgcttccatctgttaatttatatttaatggccacagaactataagaagatatcattttcacctggcatatttttgtttttgtctcaa

SEQ ID NO: 618 - DNA, 4374 bp, Cannabis sativa
aaccggaggaaccaagagatccgcttgacaatgtttcagccagggactgttgtaatgcctccatcccttgagataatgcatcttctgcttgttgggaggactgttgtaaattcgtaatccccaccaactgctgttctgttagaggctccaactgatttacaagaagctgcacaatacattaatcattcttttcattttctcaggtggaataatagatcaaacaagttatccaagttggttgagaaatttatgtatgactagaacatattggcctattacaagtgacaaaaatcatgggttcataagtgatgcagtcgaattcactctcctcaaaagacgagcacaaatgtcaatgaacgtgaataaagttcttcctacataacatacagaattgttggaaatagaaaaagaaaatcacataaccaccaaaagattggagaatatgatgttccttagaaactgtaagtacatacttaaacaccagaatacataacaagttagtcaaaattacaaattcattaacgcctttttcgttcttttccaagaaagctttttcctttcaaagaatgaaaagaatgatatcaagtggcacccagcactacagtcatttagatcaatggaggaataaatgcaaaaaaatctaatccataaaacatttatatcacaacaatactatttaaaaagacaagagaaaccttctacggaagtatatgaagacataatgcattcgagatcattgaatagaaaaactaaactccagaataaaaatattaggatatgtgctataagtcacaggaagaaccaatgtgctggtttgggaaaatattaaaaaccaatgtgctggtttgggaaaatattaaaaaccaatgtgtgagtttggggaaacttcaccttgaggagctctgacgagcgaaaaccaccaagccataagaaacacctttcagcaggagttttccacataccagacaacaaatgaaaaacatcagtctttgctgcaacgcccttgagcctaaaaatctcatcatagtgtgccaagataccgtcgttaataatacggagctctgtatcacctgcatgagaattaactgctgatctcagttcattaatctgtcgattctgctcttccaaccaacgaccatattctacgtcaaaggccatcgcgcctgcagaaaaaacgtggtcctcagattaataagcgatagacaaaccaacccatataaaatttacagtaaactgtcttgcaccttcccaacttaacagttggacttggacagtatgtatttccattttgattacttataacagttatttttttggaagaaaacagttattgatttaatatcaagcaaatcttatgcaataaaaatcagatacatacatgatttttttatttacttatcaaaatattttcccatgcacgtttatgggcgagtcttattacgataaacacatttcaaacttcaaacctcagaaaggatataccatttccactcatagaatgggcctggtctccagagcttgatataaagattccctgtagatagtagaattaattagaaattaagttgcatatcctatattagagagctcatttgtgaccgatagagaattttaacctgctgtcgggcacgttggagctcttgttctaattgcgtgagtttcaaacgactactctccagctgttggacatatgcctacaagacgagaaattgatgcaacttagtcaaggcttactaagcagtagagcatgtaaatgaaaaatgttacacataagtattgcaagttggcaaattgcatggcaagcaaatctgtacagctatttaaaaatgtattacttactataactgcttacgattacgaaaggcattagtgtagattaaaaaataaagcgagtagtgaataggggatgaatttaagaaaacccggttcataatgagaaacattgacaacacaagccttggaaaggcacacaagtcgcgaacccagaaattgatttaaggaggggggaggaatattgatatgaattcacttgaagctaaatgttatacatctagggacaagggtaattataattgtgtgtatacatattaacttttggttatatattatgaattaaaagaaaaaatcagcatagtcaatagcccacccttgtcattcattaggtccgacactgaaccacacatatattatcgacaatcaaggtgtcagatggagctcaacaataacaaacctatcgctgaaggtgaaaaaaccccaaactatccatatccttaagccaaagctatctggacagtgtagacaattaactcgggatcgatatggctctcctggacagaagtaaataatattatagcttgagcactaaaaggtgtaccattttcaggacaatgatcaaccaatagaaagtaatggtgttgcaaactagttttatgtctcgtactcctaattttctaatttataagcctaccatttccagaacaaaatggagccattatatcatccaattaattttcaaaaaaaatagataactatactctctgcctaaccctataatatttagggaccaagaaactatatcacttacaatgtaagtacccaggaggaattcaaagcaatatcaacaactgatgtcagagaatacttgtcctatacttgttccaatctccctttgttttaacaagtgtcaatatcattaaatgaggaaccaaccttgtcctatactttcttaattgatagatagctaacttccttcctatttctcgaggaactagatatccttgacactatttagtattttccatggacgcttccaataagtttatcagactcaaacggggagtaaatcataggcctaaccctcttgggttgcattgcatgaggatgatttattagttaatgaagttagcctaaagacaagatcaatgatcatttcagtatgttccaatgaaatctaattaaaaggattggttttggctgttactagtttgttactcagttggatttgttattattagttggccattcttgttgttattcttttattagttttcatttgtatatatattactgttttgtactattctgttagttaatatgagaattcgctcttttcattctctcaaacactttccttttcccaagatggtcattatcatttttccaaccatcttcaactttcaaatcatcccataacaacaaagttcagaatcacataaaaccaagataacaacttctagctactcggtccaaactgctcaatataaagtaaaaacaaagaataaagcaagtcactaaaaactcagaagcttggtttattatgaacttctaaaatgattgttacaattagctaatacttattagctaactcttaaaccatgattacaacaaggagaccatccagggatcgaagaatctagtgctataactttatcaaatttcgatggtaaaagaatctagtgctataactttatcaacagttaagattcatcatatcagtctgagttatagtgagacatggaagaagccaacttgtcataaataattcaagcttttcccagatattgttgaagttttgaatgttgagaaaatattgagagaaatgtttagccacactaaacataaactttagtaaacaaaaggcacatttagaagacaattgagtataagcattttgaatattagcaaacaagaaacataagtaaaaggggttcatactttctttcgcaatcggcttttccttgcagcctcgcgattctgagcaagcctacgtagagtctgtaaacagaattaaacaaatgatcattacagtttcatcaaatttatacataaatatatcataaagtttcaacattatcaccttctgatctgatttatcctttgatctgtcacttgaatcagaagccgccataagaccatattgacctctatcaaactgcatacaaggtggggtatcacattcacaactttgattaattagtgaaaatgatcaatctatttttattcctaaaacagaaaaatcaagctttgtgttctcaatggtatcaaatttttgcatacatactcactcagttgaaagaaagaatatagaaacgagaaaaagaaagctttaccatttgattcttctcatctgtatccacatctgtagatatatcagtcctaggactggcatcagccatgggagttgactctttaccagtggttctatggcctaaaaccagatttgacggttgacccttttgagactacaacccctgaaactcaaccggaaccaaaaaaaaaaaattgaaattcaagtttgtgggtataccttaaaccattcaaaggcacaacctttatcactttcgtattaaatttttaatgaaaaaaaaaaaaaaa

SEQ ID NO: 619 - DNA, 6591 bp, Cannabis sativa
aagattaagatttgtatttggttgaacagaataatgcataaaaaaaattaataattattcttattttatatttagttgtaagtttaattttttatttaggtactgtattttaatctttgttatagtaaataatgtcatataatttaattaaataaataatgttctttaaaaaaatatttaatgtcattaaggcaactttcatatatagaatgatataccaattaattatatagatccatcaccatattatacatattgtttcactactcaaccaatcaacacaagtaaaattctcattggtcaaaataaaatgcggatagggatgaggacttcaaagtccacatggagtaaattgatattagttatgttgaacttcaaagttcattatcatttgttactccaaatacaaatagactagctaaaaataaataaatataatatataatgtcaaaagttgtaccatacatgaaaatcttaagaaattactattcacaccaaacagctccttacacttcaaaatcataaaataatacaaaactatctttctatggagactcaaaattgacctgtgtgaatgctttcttaaatttgggttgccaattacaacatcttacaaaatcataaagttgccaaatacaattagtagtttctgctcgactcaaagtccattttagttccctactttccactcttattgtagctgtctctaagcgtcaccgtccgattaaagaccggcttctccggagttgaatccttatcgaccacaaaataccctacaccacatggttaattaaactttgaatcaaacaccttcaattatggttatgaccaactgaaattctattatgcaaattataggtacagcaaagaaataatgcttaagcggcaaaactacccaaaattactaaaactaaaatcttgttactaagaactgttaacttccattaccaccacctaatttttaaaaaatattaatgaggtagccaatttggtaatcacacgtatcatcctaatcaccacctaacagaagtaagcaaacagaaactaaccgaattacagttttaataactttaataagtagatatgccgcaaatatcccattacatattatagcctaaaaatgtatacgatattttattgttacttaaagattaaagtaaagagcaaggatactgttagataaagatatatagcctaattttgtgagcttgtatgacagaacaacaaaaatggggacaagagtcaaaatcattcgatgaaattgttaaaaagtaagggctaaggaaaataccaagccgttcaaactgaaatccatcaccgacagctgcatttccaagcgctgacacagcataagcattgtggataaccgttttggattgcgggttcaaatccgcaagccagtcttcaagttcaccaggattctaatgtgcattgaaagaataaaataaagttaaatttcaatatattttctaaggagaatgaaagaatgagcaagaaagaagctgcatttgtaaagacctcggaaaggaataatctgtcaaacaatctaatttccacattgattgggtcaaccccaggagaaggctcaccaacccagtgtaggacaccctgtaaaatatttattatagagtttcaaaaaaaaaaaagccgttggtcagtttggcaccactacagatctcttcaaacaaaaatgtgacataacaaatacctttggctttgtcttcttagatggatcatactcggcccgaacttcaagaacagtttccttatcatcggctaggatgacatccgtacatttgatagggaaagcgtatctgaacccaacatcaagaagtattacgtaaaaatctacgacaaaaccacgaataaataacagagagacactattattgtgtaccagtcttacctgagtaacacagatttaccaggagcaagcccatagtaatcttttgaatctttcaaccgaaaatcagagcgttcgatatacactacattggaaaagggaacctaaagagaaggaagaaaagaagttacatattagaaaaacaaaacgccttcaaaataacattaggccaaaatcagaacagccgggaccagtatcaattttagaaagaataaaaaataaaccaacatattgatattgctactaaaattacgtgttatgttacatagatgaaaaactttatcaactgaaaatcacaggagaaaaaatgtaaataatattctagtgagggatatatcaaagtatgtagtactcggtgttaccttgtagaaagcacaggcgtcatcagcttgcccatcgggccatttcctagcgtcaaggtccattgcagtgccagcttctaagttggtaataacaaccttaaaacaacaccaaatattagaatgatgaaagaggcagtgcataacgaggacaacaagaaaacaaagaatacctttagtggatgtaaaacaaccatcattcgaggagatgttttgttcaattcttctctaatatgaaactccagacgatccacacgaatcatgctacaatcactgtaccacaaggaacaataaaagcattaaagaagagagcaataggcatgtagatcttgaatgtttttatcgtgatatactgaaccttctcgtgactccaattcctcgaacaaacgtgttaattgcagttgaagtcacacccctacgccgtaagcccgctagtgtcataaggcgagggtcatcccaaccatcaacccatttttctgtcactaatcgatttaactgcatgcaacagggtatccggtaagtcaggaaaatttgaagatactgtcataaaagtttcatggctacacctagaaatttgttccttaggtttcactcaccttgcgctttgacatgacagtgttactgatgttcaaacgtgaatattcccagacatacggttggtaaatgcccagtgagtgcaacaaccagtagtacgatgcccgtcgtgtctcgaattcaagggtacagagctacaaaaattcttgataaatttaatagaggtatataacacagattaacaagtccaacatggctgtttaaatattaaaagaagaatctttaaatattcactacgatcttttatagcatttaacgtgcgtagtgtatatgattaaccaggaagttggatgaatactaatcaaaagggatgcataccgaatgtgtaacattctcaagagaatcaacgatacagtgagcataatcataacttggatagacacaccacttgtctccagcatgtggatggggagtaaactgtaaagatgaaacaacaacattaagataatatgtgtatatgttcaccttaggagtaatgagaaatgttgccacttgccttgattcgatatgcaataagatcatacatattaaaattatcactctgcatgtcttgcttcattcgaagtgttgcttttccttcttcaatgagaccccgcctcatatcctcaaagagtttcagagattcagcaatgggtctgtctctccaaggactattcatcttcttttccctatactcctttatctcagtaggtgtctataaccaagatttcacaaacaaaagggactttctcagaccaaacccatcatatggaaaattaataacagttactattgtactgataatgatgaagaaaaaattcattatgcatgggagataataatcctagagaaagatgaaacctaaatcacagttcatattggtgtaaattagagatcaggtcatgcagtagcccagtccaaaaatgtgtcattatacattagaaatggtatttcagtggcacagatagaaacaagaagtagaccaggattcagaaataggatgttgaacaaaaacattaaaaatcatgacacatcgaaagaacatatacacatacacattttttatagaaatgtgcagagtactagtatggaactagacctggtgatcaacataagcatgacctcttcgtatcagctccacagctaaatcaaatagctcttggaaataatcgctagtatacgtaatctggaggacaacccaagataatcagctacataaataataagagcaagagagtcaattaatgcaagtcatcagttatataccttaaatggctcccaacccatccatttgacaatctctttaatatgatcaatatattctttcttctcagcttctgggtttgtatcatcaaacctaatagagatcactcaatgaactaagaaaaagtgatatgctgaatttaaaatatttaaagattggaaattcccccacttacaaataatagtaagtacaattttcattatttttttaaaaacaattttttctagcttcgagaatcacaaaactgtcaaatgatacttctatttttcctctgcagtgaaataatgtacaaaacaaagaacaaaaatgagctttttctcaccttagatagcatccaccacctctttctttagccagtccaaagtctataaacattgcctgattaacagcatcaaatgtaaatatttcaagtatatacttcagaacaagaaaaataaccatgttgaaggcataagtttgaagcttaaagcatatagaattcaaaaaaaaaaaaaaattataagcttgatctaattatcgtaaaataaaaatatatatacacacagaaataattaaaaaaaaaactattttcaaggcaaccaagtatattaatctaaaatatgtagacttgtaccttggcatgacctatatgcaaatagccatttggttcaggaggaaagcgagtcaaaactttccctcctgtcactttcaagtgtttttcaagcagctccttggtattgcaacatctgagaatggagccatcactaaagaaaacttcagtgtgcacctgataatgacagcaaaattgtacacatgttggaaagaagaacaaattgttcagcaaagaaacagataaaatatccataactactttcatgccaaaaaattacattcatagacaagatgaaggcatcagttaaagctaatttcaaatatgtcaacaaaaactcagaatatcatgtgcatgaatatgttctaaactagaaaaaaacgaaactagcattgatgtgaaataggaaaaccgaatcaaaaatgcatatccaaatgtaagtcaatctaataagaccctgctgctaatctctcaaaccagtaaccaatataataacaagaaccagcaatagtagcaatagaacagtagcaaattggtaggcgaacagtaggaaaattatattgaatataagagagaaccaattacaaactatgggagcccttaggcccctttgatgcaaatagagattcactcaatacattgcatacccattctattctcttactcacctatatatagcaatttcttactcaaaactaccctcccaaataaagactcaaataccctttttttatttaccatatgctagtacaccctaccaattctaaggcctaacacaatcaaattttaatcatctaaatagacggaaactaggctgcaaattttcaaacaaatatccacctgtgtcaagttttgttgaccatgaacattctagtctgaaatatcgaattcaacatagattttctacagaatattctataaattttctatagaattcaacataaaaaaatgactatcttcttaaaagaaagctgtaaaacataccttaaagttttcctctggttgaggaaaaatcaaaaatggattactgtcttcttcagatggttctggcgtagaaacaataatctttttctcctagacatgtgtatacaaagagagcaattaataaaatcacaaaaggtagttgagataaagaaaaaaggaaacatatataattaattagcacacctctgctttaggatttttttctttcttctttttaggaaccttttcatcatctgcagcagtcctttcaccaagtaattcatatagttttgcatcaatgagtttctatgacaaaaagaaaagcataaaaaacacttttaataaaaaaaaaaatatgtaacattttaataggatttgtatataagcaaaataaaatatcaccttcacaatttttggatcagcccatggctgcctcttccgaacatttgcgaataaatcacccactatagaaagcaacagatgtgaaaatttgatacaatacaatgtatacaattataacatgaaaaatagaccaaataggaaaattaccgtttgttcgatacctttgctccaaaatgacacccttactctcttcaaacacctcatttacggttctttcaatttcttcagctgaaacctcgacacctaattgaacacaaaaaagctccagccacatgagaaacacagacgaaacacatgatacaattacacaatataaaaatgcaatccaatgttttatacctacaccacatgccacttcaaaatcttccaacttaaaatcttcagagccaatgtttgtaagaaataaaaatgcagcttctaattgagctggagttttaatctgcgtttaccaacaaagtaaaaataaacaaaatgaaaagctcacaatcagacgatttaatgtagtttctatgtgtgaacccacctttgatgaaacaac

SEQ ID NO: 620 - DNA, 3381 bp, Cannabis sativa
aatcggctctaaaccagtggatttttttgtcaaaatttttggtttagaattacaaattaactattggtttatatttttcctttactttttttttcatgattatttgtttctttttggcagaaaaatcagaccttctccaattatgaatcctggccggtcatttaagggtttctttttattttttatttaatttctactggtttgatatattttttttgggtatatagtagtgggtgtgataattatagtgacagtggtagtgataatggtagttgttgtagggtgataatagaagaaaaagaggtaagaagaaatcatatggtcatccatggttctagagagagaaagaagaagaaaaacaattaagaaaaaattgtaattttataatttgttttatttttaaatttaaatttttttttataatatttaaataattaatatcatgtagaccactaaatattcgtcatgagtgcatcaaaatatacagtaatgttttatgaacggaagggtaaaaaccaaaacaaaagagcattttaggtaattttgccgttaaaaaaatcaatttgacttaaatgtcacaaatcataaagtttatgtagttttaccgctaatatcctatttgttaaataaaaacaaataaagttgaaaaaatggctaatagagtatatttctggcattcaagaggaatactatgcttttcaataaatcaccatcccaatccaccataagataagagatctagttattctagttattgccttgttatcaagttcagctacaacaagaaacaaaaaatcaatgtaatcaagttcaactacaacaaacaaaaaatcaaagcatcatcatccaagaggtactatactcactgcaaattgcaagctacgatatcgtcacattgtatggcagcttaacatacgcaacgatcaaacagaaaagtaaatacttgagagtttaagagacagcagagtgcggaagctgatacaatagaaatgcataaaaaaatgagccaaaaacgtctaaatagctaaacttagcaaccacgatcgctagcaaacctaattatctggaattattagttcacagatagctcccgcctcttgtaccggaccatcacctttcctttgacacccacaaccatggcattccaatcaatctcagggaaaggcgagataagttcgaactcaaagttcctaagcaaatggctccagattgccttaatctgcaagtaggcaaatggctcccctaggcagccatgcctgccacctccaaatgagatataagagaaaggccctgccaccttgtcctcttctctcccaactgcaaacctttcgggatcatagctatctggatccttgaaaacatgaggaaggcgattggcgaaagctggtgatgtggcaactatgtggcctttgggaatgtcatattgtttcccttctcgggtttgcactgtaaagtcactatgtgagctacgtaggagcataattagcgggggatggagtctcagggcttctttaatgcttcggtacaggacatccatctcagacaagatatcatgatccaccttattcccatgctttttcaaaagttctctctgctcctccactgcagcagacaggaactgtttgtgactcagtagatatgcaccggtccaagttgaggtgatagaactagtgtgctggccggcaaatagagcagcaatgagcaagccagtgacctcagattcacttgttggacgaccatctttgtacttggaatcaataaaacactgcaacatgtcattctctgacttgccactttgtttgcgggaatttatgatgtgtgaaaagatttgagctaacttcttgcgtgcctggtcacgacggcgatgagctggaatgggaaggtaagggaggaggacactgataggaagcatgccattgtcaaggtcgtggaacaaagcagaaacatcatcaaagagcttgtcacgaacttctcgacccaaaagacatctgctagcggtgaggataatcagatgctctagttcatactttaggtccacttctccactgtctccccatttggagaagtaatcctgcatagtataataccgcaatatcagagtcaagtaagtaacatgtgcttctgtggtttgtgggcatatgtgttggttttgtttggttacatgataattgaagcgagtagaagttcattattagtttcagaacaatcaatgtgcattgtgggcatattcgataattcattataaatctcagaagaacaatcaatgtgcttttgtgggtagttatggtgtggttcaaattagataaagagcaaatcgaaaattaatgaatgagatagataagaaaagtcacctcagcctcggtaaccatctgatcgacataacccttgagcttattgactctgagagcctcggtaaagaagcggaattgctcctggcggacagtgtaatcgacatcgaagacaaccccaggtccgaaagtaggaacattgaactggtaaacctcctgctggctgagatcggactcggaggccttgaagaagtgagcggaaacctcatgacccaccaagaaggtgatctttttatgaaagatattgagagtaaatacactgccaagcttagggtactcttcgcgtagcatgagaatgggaccattgatgaaccggagaagacccccgatgagaggccatgaggggacaacgggaggaagatgcttattagatcgaggcataatgagggcagagatgagcttggccaccaaaagggtggcgactatgagcaaacccacactgtacatcttgttatcgacctccatcggatcggattgagctgtaattatgaaaaataaaatgaaattagcaaccaaaataattcaggattagcagcgccattgatgatgagtgaagaagaaattagggatcttggttgattttgttgtaccttggaggtgatgacagctctcctgataatcccaatgttaagacggaaatgaacagagatgtggatttaaaaccccacaaagtcactcccctagtctacactctccctctactaatttttaattataatttttcttaattttggtaatttatttatttattaattaattactgtgactgtgtgctcaaacaaaacggtgggttgcatgtggaaaatttcgcatcatatagttacggtcgtccacgtggcaatcttttattggctaagaaaattatactttgatctaaaatggaagatactcccagaacgtgcaacttcagcacagtcacatccaaatccaagattagaattactcactcatgcgatacggcctggtttcgtgaatgtcccttcaggctagaggtgctcgcggtgcgggtggcggtttttactttttttttttt

SEQ ID NO: 621 - DNA, 1643 bp, Cannabis sativa
gatgatgtttattctgatgcacttgaaaccttttcttccaaagactctgcttccttgaattgcagtagtgaaaatggttatgaaggagccttttcgaccgatccgcaaactcgcgatttcatgatgaaaagattcttacctgcagccaaggctatggcgttggagccacctcattatgctgtcaagaaacaagttgaacagcctaaagaggttgtgaacacagttgttggtcttaagagacttatagtaccaaaatatggtgattatagagaaggagatgatgaaggtagtgaagatgaaaataatgattacgatactaaaactagaagtatatcaacaagaggagggtgtggattatttcccaagttatgttttaggaattcattaaacattttaggtccaattcctggtttgaaattgaggacaccaaaacattctgaaaccaagagtgtgaataaggttaaactcaaactctttctttttcatttttagtttctttacttaaaaatcaattctaattaagtaacattgtcacaaatgtcattctcagcatactttggattcaacttataaaccgaaaacaaactgtggatttcgatcagctgaacttcacatgattgagaagaagaagttggttagcgaatcgaaaaggttgacatactcatgtgatctacaaagaggaagatcatctccctcaacgccttcgcgagcaacgagcatatcgccttacaggaatcgaccgtctcaatcgccttttagacgagcagcatttcttggtgttcccaaagaagagaattatggcaatgccaaggtgcctaacattaagcctaattatctttataacaaaaccactaacaagtttgaggacataacagctaatcataggaacatgaaccctgctgttgagaaaactgtctatgtagattctgtatataatgctgagagttcagaatcaaaatcaagttgtttagatacaaaggaacagctcaatattccaacaagtgcagaagaagaagcagtttcagaatcaatattccaagatattcagtgtttaaatagtgttggtaaacaaggggactctgaactaggacttgctcaagaattttgtgaaatggttagtagaggaaatttaagcaaggagagtgaccaaattgcaattgatgacagcttgttcttaccatcacctctaccccaaccaccattgccaaaatctccctcagagtcttggctttggcgaaccgctccttcgatttctctgcacagttcgttttcacgcaagaaattaaacaccaccccgaaatcaaatgccaaaatgttgaaatctaatacctctttgacaaacaccaagtgggaaacaattgtaaaatcttctcacctcactcatgatcatgctcgttactctcaggtaatttcaaactcgttcttgtcactgtttttttatagagtaatttgcagcataaatactaagtttaactttcagttgcaaatgacgataataatactttaagttatatttctagaacttctgtagttactttagtcaagtatctacggaggtccagaaacataatttacgtattattaccactaaaacttaaatttttttataacacttttcaatattagaaaagatctaataagct

SEQ ID NO: 622 - DNA, 3477 bp, Cannabis sativa
aaacaagaaaacaaaaggctcacacttctgctttgaagttaggttgagagtttctatgaaagcaagtaatttgtaattgagttttctgtcctactgtttgatgtactcgcaagtgccaaacaataacagaaagctaaaattggttgagaattagagttacttattgaattgaaataaagaacagtaagacccaggttttcaagagacctggttctctcacagagccaaggttgacaaaacaagattcaagctccttccatctaaaaccacagtgctgaaataaaccagatctggccattacaactttccatattcatccctatataaaatcttcctaactaaattcacccacgttgtgcataggtgtactttttattttattttttattgaaaaaactagggtacttatttgagatccatcactgttacacatgtccacttatatcttatgaatagttaagtatggggtggtgtaacaatgggtaaataaagctcgagtgataatccaaaatccggaaaggggtctggccctatttattgtgggagctatttgttttgttaggcttcgtccagtacagtctttacctaactatatttgtccaaggtgatgtcctcaatattgaagccatgatttcttgtcgtaagagcttaaaggaacaatcctggtaccacttctcaagatggaggtcatgtaccatgccaaaattgtagtgcgtaaagcatagcaagacaaattgtacccacccttattattcacctatctaccaaaatctgtgagatatttcagattcagaataaggacaaagtgctcacccttcagaaccctcaaggggttcatttattagctgaagaaactctgcatggttctcctctattaatctcaaaagctgggggttttgttttccaagctcctgaagcatgggctgtaagagtagaagcaagcaataaagcttagaaaatatattaaaaaaaaaacaattagactataaatgtaataaaagattatagacctgtaaaatttgtggattagattgcaccattgatcgtaaagtctgaaactgaaatttagaaaagaaaccaaaaaaaaattcagttgccagatctccaacaatgacactgaggagcataagactacttgacaaaaagcttttgcttggtgggggtatgcagttgtgaaagcccataatatggcagaacagaattataaacaaaaagcaatgaaaaattattttacttgaagccaacctgtggattgttccttaggaaatcaagagttccaagtgctccaccaccatcaccagcaagtgtttcctgaagaaaaccagtttaatttgaacatacacacagaagagaagaatgcaagaaagatccttatatatcagaaatcttacctgtgggaacatatttaatggagatgagttaggagcaccagacactggagcagtggttccaccagtttcagttgcctgatttgcagggaaatgagccgctggaactgcaacttctgctgcttctggaataccctgaagagaaaacatcaatagttaaaacaagataaaacaggtgtcatcagattcagtgaatttaaacatacagagtacaaatagtcgactgcgcgttctggattgttatatgctgctcgaagtgcacgagtaacagtttctctgtcccaagttccaccacccatgtccattaattgttggacagtttgctcaagattactaccagcaaccaaatttgaagcagcttggccataggtatcagcagtatcactgcaagacaagcattatatagtaccgttgtttacaacagattatacttatagaacttacaaaagaaagggaaaaaaaaatctagatttcctaagtctagacaaaactgtgcagccatccccttaactgaaactactacaatattcccacccatttgaccatcaatttttttaggagtggctaacatcaactcctattaaccacctaaactaaacaaatttatttattttttctgcataacaaaaagtagcaatgtgtaatagtatcgtttccaattatttactcttttatgacctcataactcaatctaattttctaaaatatagaccagtggtaagcaaatttcttagggaacaacatgaatatttattttgcaatattagttcaactctacacaggcactaccagtgcaccacttccatagatccaaaattctaggtaatagtaaaccattgagcatcctatcccagaaaagctacaaggtcatgcaaattagtcaaatatatcccaggaccctaacagtaatataaatacctaagtaaaggctccaacatatctagttttatcaatgcatcacatacgtaaatcattaccatatccattgactgcttaaatcatacattaaagtttatttaaatatgtattccacctatgtaacgataaatcagcaccacaccaatcgcaaaaagattggttctacacatactgttcttccttggtaaactagtacaaagctatcattttaatataagattttagaaacaaaagaatggaggacatgttgtttactaaatctagcaacaaatgacgggtgacaggaagtaggacagtttggcaaatcaagcagctgggcaaaaagactaggtacacacctaaagggatctctatgcatctcaaaccaagaactagctaaaacctatatatttttaaaagtctaatgggaccattccataagagaatgaaatgtcgcttattttaccatgtaatctgaaagagtaaaacctgattctccagtctgtcatttttctctcccataataaactagaatttcatgaaagggaagacaaaaaaagcacataacaagtcctcacagagaaaaaacacaaggcgttcatctaattttagtctcacttttcaatattaatgccaacaaaggtcatataaaaacattatatacatatatataagtgacgtgatgctctctccatgaccagaatatcaaccctataaaatacgaaatacatgtaggattaatcaatctaaaaaaagattttttcaagtacactgacggggcttggaccggagcttcagcaggagcaggggctggaattgtagcagtatcaggggctggagctggagctggagcagcaacaggagcaggagcagaagaatttgaggttggtgcagctgcagaaggatttgtagaagatggctgtggcagacaggtagaaagagatgtgactatacaaaaataacagaagtgagaaataagcctatgacaggtaagaacagtacctgggtggaagaagccgtgccagctgagccggagcctaaagttttactctgtagacacgcagaaaggaagtaagaaaaactaggagcaacaaaaatagacacaggaaacaaacaagattgctagaaggttacagcaatgaattttagcaccacaaaatatttttggagcatcaatgtcagtatatcatta

SEQ ID NO: 623 - DNA, 3681 bp, Cannabis sativa
agaggaaacaacaaaaaatctattttgtatttattgtcatttatgtaaatacagccatgcttggagataaactcgaatgataaagtcaaaattgaaatttaaactagtagagacatcctccaaaaacagatacagcataataaatataagcaagccttctatgctcgtctaataactacatatagcaaaataccataatctatgacaacaaatgccaaactatgaagctcattaacttcattacatcaacatcaaggcgctaataaaccccttattacatatatgttgcatacaaaataactgaaaaataaggctgatgtgtaatttcggttattaactaatggagggaaggtatgtatgtaaggcatggctgtaaaatgttagcggttgttgaaatgtatggttgtatgtggtcggatttgggagaggctatgctcccaaacaccctagttttaccatggactcttctaggttactttttgattaataaaaccattgtccctatacaacaatccactaccaaaatggttcaaacttaggtagaggcattagaggagaagatggagctgttgtatgaagtatggaaagattagtaaggccaaaaattttagtatcatgaaactatttgttgagatgataaaaggagctgaactaatcgatcctagattgaataacccgtgattcgcatggtttgacttaaggcaacgacctatttgttgtagattgggcagatccttattcaccaacacgtggaacaaattattttcctttacataaggattgaatctaatcacaatccgatcgtattggtattaatgattaccgtgcagaatattggtataatactttgaacatttagcaacacaatgtacactatttaatctctatatggataaaaccctcccctgctccctcttaatactatcgaaaccgtattcagctatggacacattgttgaaagataaggccaagaactagatgaacttcgcgtgcacttgttaaagtcgctccaaatttagttttccacaacctaagaccatataggcaaaagagttgaggacaaaggaatctgaaaaacttgcagcaaggtgcccatatgagatattggcaagggttgtatatgtagcttgcaaactagaattacaagctactagttctatccattcgtgctccacatttcacagctgagaagagcctacagaatgagcaattttttatctaaaattcctaaacaactccttgttgacctatagttggtagtagggtctggaaactcttagatgtgtgccaaaatatcaatggagagacgagaactcgatgggctaatcgagtggagatcattacctgaactgggtatacatgggaagattttcaaatgatacaaggacaattaccaaattttcaccttgaggacaaggtgaatgtttggccttgaggtaatgttagagaccaacaattcacttgatcagctcaatggtgaatatctataaaattgaataatgtgacattcattttacgtgaataaaaaggcagttacactcactttagaaaagttaatgaaggatttcttttgggaagagggtgatttttctggaacaagacatttggtggcttgggacatattatgtaaatctcgcctccatggggattgggaataggtagtttggaaaaacacaacattacaattcttatgaaatggttgtgaagattctagttggaaaactgaatcattgtggcataaagtaataaaaagtaaaaatgaagatactaattattgggacactagaaagggaaagtgccatataaaggcccttgaaaaggtattgctggcctgcatgatgactttctaaacttggttcagctcataattggaaatggtgagagaattagattttgggaagacaaataggtaggggatatcgcactcaaggatttgcttcctaacttggctagaatttctttggctaaaaataaaagcacaaggcaagtgatggtgataaatgaaggttcgtctattttcgattctgagtggagcctttattttcaaaggaatgtaattgacaaacttgttggaattgttgagcattctggaacagaaaccagtttttaatcttatagaggactcgagacgttggaaaccagatttggggggagtttgggatccattggtgtatgccccaaacatgtagccaactgatattatgtaaaattataggggataagaggagttctagattatggacagacattttggctatttggctagaaagaaatagtgggatttttgaaagcatagatgacgaagttgatgtcctttgggagaagattaaagtttggacttcaatatgggtcaacaaaaagctttgaggggctatcttttcaagacctaacaagggaatgggggtctattttgtattagtgccttggtttggggatatagaatgggcctaaaagtatcagagtttgtgttttatcctgtttttatgcttttaattttcatgtttatcatgctaccacggctttcctctgccataagtgaggctccctaataaatttgggagaagttaagtcttagacaagtgacctttgtccatttataaaaaataataactgaaaacaataagcacaatcatagttttactttttccgagtaatctgaatttcatagccagaattgttaatgaaatcctaaattgtcccacacaaacagtttgcaaaacatgaaaagtcattccaaaccattcttaaggttcaagaaacttgagatacaaaaacaaatgcaggcataccaattaagaaaataatttagtgctatcacattgccagcaataactaaaaagacaaagcaaaataattaccactaatgctttgttctcaataagagaaatcctgctacaggttgtaagcttcatggcagtaactagtcgcttgatctgccaatcaatggataaagagtctactagctcaaaaaagtatgtcgcgtagccatattcaggacgctctagcacgattctgcaatcacgtataaatgtaaagatcatgcactcctagtcggcaagcaatcaatttttagatgcaatcaatgctgcaaaacacgcacctgttgtgtcccttgaacacaaaaataaatgattgtaggtctcgacaccaaccccattccaccggccatttgcgaaattgcaaataccttgtctattgacatgaaaatttagttcactaaaaacagtcataattcgagcaggcaaattattgatcaaggcaagcattatatgatatcaataggttagcagaatctagtacctgctctacgagtgatagtaaacaagccaggcaataactagttcttgacccctttgtgtaacgtataggagctaacttgaaaaatgaatggcgctgagtgaaaatctgttcaaaaaatttagaaagtaaaatgaaagccatgctagatgtattgactggccaagtaaaaactgttgcaagtacaactcttcaactaaaactcaaaaaggaaaagaataagttgagataaatttgaaaggaaccatatataaaagtgtgagccatccttgtagttgagatggctaaaccaaatgacactattattcccaaaataagtatgccatgacttttaaagctaagcaaagcaaacattactaaatgacttagttatcacctatcgta

SEQ ID NO: 624 - DNA, 3859 bp, Cannabis sativa
actctcctatatatactctcccaacatccctattacaatgacccatatacctttttatttatcctaaggcctaacagattgaaaagtaatttccgaatatgtacactgcaacttgtggtatacaagtaacagggaagtaaaactttttaaaggtgcaagtaaaataaaaaaagttaaggaaagtaataaattgagagtaatgcaagtgaaaattattggtagtgtcatagcggttaaaatttaactgaaaatattaacatagacatcgaatctaaagcctgtgagatttcaaatctgaaagatgtaagcatgtttccaaatttggccaacagagagaaaaattatgttaatttttgcgcaatatattgtatctacaagactatgtttctatacaagagcaattaatcagctaaaaaatgttgttaaggactttgatctttatcacactgaccaacatactatgctaggattaggttcaagcactccatttatcacactgaccatgttgcaacagatctgatacatctgaattctacaatgaagcaaagatactagcctggattctgtattgcagatcataactaaagctaaaataaacacagcaacaaagagggaatatatactaatagatgattccactaactacttcacaaagtccaggaaagtgagcagtcagcgaaaatactcggtaaaattcaatcatcaaaagagccagaaaaaatgtattagaacaagtgctaataattcgcaagagtaacaagagagcatgcatcaacatgtgtttggaaaaataactcattatcaactcaacttcagcaacataagtgtctcaccttctttaaagattcatatcaataatatgcagatttcagtgctgtcaaatgcctagaaatgctcagccattggccaaagcagcttatctttcttaagatgataaaatgttttaaaggtaattgttaatgtacttaatgttgaattaaagagttgctacaaactggaagctacaaaattaaagacattagaagcaggatctacaaaaaatttcatcaactacagaagttaagcaacaattaagcactctgtagaataatgttatgcaaggaaaaaagttcgaccaagcaactacctgattacagtcttaaattgttttacgcattgactctgaatatagtaatcttccattgaaataaaaaaaattattttgacttctaacagaaatatgaaacatgttaagtatatccacgaccttaagagaaatggattaagtgacaaagctataaacttgtttatgaacctggaaatgtggactgttaagacagcggcctatctgtctaaaaagaggaatcatgcatctctggaactcagcagactgagtagcttctaaaacctcttctagctctccaagaaagagaacctccttctggcaatttgtgacaggccaatacttcaacaacccgcgaataactgaatccgccaacttgtaatccttctccacaaactgcgtgatgcaataggacaatggctggtgatatactgctatacatttgggtttatggagtggtataagcgctcttgaaagaaacaacttatgctcctctttcatgggcaatgcaaatccattaataatactcccaagaatctccaacaactcggcaataccacaatgcctttcagtctcaaatataaacctgtagaagatgttattaatggcttttctaacaaagggtcgatgcaccatgaacttgccataaatacgatgaagaatagttttcaaatattctcgctcacgtgggtcctcggagtcgaacaagtcaagcaatttcagcacaaagacatgatcaatgtaacgcttggctatcttagtatcggtctcggaagaaacaagatacctcaatagaatttcgtacacaatttgcaaatgcggccaagatggctccaaataaggctcatcatcttcggggtcaccggcggcttcagagccggtgttctcgtgagccgccggaggcagacaccgaaaaacattaacggaaaccattcggataagctcctcctgcattgtctcgttcaatttacacgaacccgcttgtatgaaatccacaagctccaatagagtttggcgcttgatctctttttcacgaacccctttgagagtatctgaaaaatcgcattgtacccaacataccttgagcttgcggaggaacaacgccgagcgctccgaaaccgaaacgtctcgtaaaaaaggtaggatttcgatgacgccaccagggttgagaggaggcgcctgagatgaagtaacgttctgtgattcggaattggcaacggctgaattgaaggtcgtccgagaagcgtggttaactgtaacgttaccgggtccgagcccgaacccggcattgtcgttggattcggacttggatttccggtgaccccgtttcatgaatttgttcaacattgtttttcccctttcaacaggtcgattcgccaatattaatcagtaaacaacatatatatgtatatttatatatatttaaaacctaataaagaagggagtgaagaaggattggattgggtggtagttaaggaaagaaaagaaatgaaatggtgtggagctgaattgggtgaagaagatgaagagaggaagaagatagagagatgggtttcatttgatccgataggccaggaaaggagcggcgaatggcgatggcaacaaaaaaaaaaattgggagtagagagcacaaaatggattcttgatttttttttttttttctttttaagtgatgtgtgttattattaatattaatattattatgtttgcaatgaatgatgtgatgtgtggataaaatgataataaaggaaaagaaaaagattgtgttatacaaccataaccggagaaattgtttatttaatttaattatttctgaaggaatttatatttaatattgtaatattatttatttaattggaagaatatagattgtcactttttttttcttattttaggacgggaattattatttattttattcgttagaaagtgggttttttttttctttgacatgaatttatgtttggtccctttttatattatgttgctctcagcattgtacagaaaatgaaaataattagacaaataacagaagaatatgttaaaatgattggttttaaatgcaatttgtcaaatatttagaggacagttgtaggttaaattcctactgcattatcatattatgctaatctatcttttaagtagtagggttttcttgattgataaagatttgtaattcccattcaaggctaactgccaaaacgttagccaaaactagagacagtgtagagtctcaaatcaaggtggacgaaagtgtaatgtaaaatataacttttaaaagaatttaggaaagaaaaaaaaaaaagattgaggagaaccaaaaccacccttctcttcgacatggctccgttcatgattattaccaaggtaaaaaaaaaaaaactggttgtgattggcttgctccatggtaaacgcaagtttgaagttcgttacaacgatcaaatgaaataacattcaggtggctacacaacttatattaagcagtaagttaatcgtacaagttactatgtttactttagtggtgttaataagactaggagcacaaataaggttgtgctttataatttaaaaggaaaatatgttagggaagccacccgcctctcattatggaagctcattcactccaccactcgcttcaatggtgtcaaaatcattctcccataagtaccttcatcgaatctgattgtacaacacttgttgattacgtttgtaatagctctgagcataacctaaacctccacctatagggatttgtat

SEQ ID NO: 625 - DNA, 4642 bp, Cannabis sativa
tagttattaaattaaagtatgtagttctgatattaaattatattaataggcggaattgatagcggcatgatgttattgaacatcaatggtgccctttaacaattctcttatttccatctcataaatttttgatcatagtgctgttacttaccttagagaaagtcaaagaagtttatttaagttttgtagtcaacactgcatctgttggtttaacttgcattgcaggtaacattgaagaaaaagcaggatgtaaagaataaggtaatgctaatttttgctgctggccacccataggattttcgtaagtttgattctatcataactcacagggatgtgatctcgtactttttttttttttttaattcagtgagaccagtaataatcttaattaaagtctattgctgtcatcttagtcctaattcctatcaggccaagagtttgtgttgtaagtccaaactgcaaaacaattggaagtttatggtccatttgggattaattttaagaatacaagtgtcatgattttttaaaatacaggaaaaaaaacaaatatgctttgaagattcattatttggcaacctgattttgaatgctagtttagaaatctaggggctgtttggaataaatactcaagaactgtttttttttttccgcagcaattgagctatattgtagaacatgttacatggtttcaaacttttcttttcatgacttctgtctaaactccctgattccaatcaacccagaaatctgtttttgctccacagctttgaacctatcaaacactattctacaagtctgaacaattcttacaaaagcacaatttctaaattagaaactttaagttactttatgtagcaatactgagagtaaagattaaaaaatctaccaactacaatacattgttctaactattttaaccaccaggtgtctatctggaaccaaacaaaacagtttggttaaggcgaaacgagtatgagtacaacagttacctaactcaagttagaaatgtttcaaggtcaatttaaacgttatgtggtttcaataatttaactgaggctcttcacaatgtttctacggtttcacttctttctttgattttcaaaatatttggtcttgctaggccaagatacttgcaaacatcatggtttagatgagtatgtcagaagcaaaagaacctgctaaggtttttctttctttttttactcaagataattgatcaatggtccaaacatatacacaatttcacaagatatgatttctgtttgcactctaggtagttttttttcggttgatcaaacttttctggttgttttggcatatacaattgacattttaactattgctggaataccctgttgaatctcagcaagaacctacacatgttgatctgcaacctgctgaagctcttcctgaacctacacttgttggtatgcaacctgccgaagctcaggtaaaacctaagcctattgattcaccaactatcattccagatgctcttctgagtgtgctcccaacaacaacagagaatcatatattcatgagcaaatagcacagacaattatgctcaagcgattaatgctgctactttcttaattgagtccttacaatggattcaacaaattgcacttttgttttgtgaacaggttgaagctaaaatagcgtccatcccattggctccgtttattgttggtcaacgaactgttcagcttcctcaggtgaacttagacttcactttgtcgtattttatatgtgatcactgagtcgttctaactattttgttttgtttcagcagccaacagaagcagaggctgaaataagaccctcttacttatctcaattggatgtcttatttggtgacattgaaactctaataggtagaaagaattccaattcaaagactttgagcagcttcttcctttgtcgtgcatgcagcgaagaggagatttatgcacacaacatcttcaaagaatgcctcaacatgaagcttgccagtgtcattgaagaaggtcgagaaattgagctcaagaaatcactttctatcatgataactggcaatgaatgtcctgataacatggtaagttttacaaccaagtttatagagaacttagatcaatacataggtgcacagaaagacttaagggaggttcaagataaggaaaaatcaatagagaagctggagactatcgcgaagcaattagcctctgagttcatgcctctgaggaatcaagctgaggctgttgatcaagaaatatttgatttagagagacaactaagagaaaagaaggtaaagaaggtatgtcttagaaagagtattgaagatttagctgatcgagctacggcttcaaaacaaggattgatcgatgctcatgaggtcatgtcactgttgagaatcaagaagaaaatagcggagaagatgattagtgaaatggaatgttcatgggagtttttaaagtctacaattccttaacttgattgactatttggaactgaacagttgtgcagcctctgaagttaactatattaggtcagttcttacccaaaaaaaaactatgtgtggtcagttggctaaacattcttcgtgtaggcaaatacttttttgtatagtccttttaaaagctaaactagggcaaaagcaaagactaatttcagagaaaagagtcttaacagatgatttgccaaaaaaacctttagtctctcttgttatcctagctttatttatactgtaattagtgttacaagaaagtcatgataacagctcacctattgacagttaaagcataacaaacaactaacattttttaactatcttagctaaagagaataacgaactaactatattggtttatagtcctctgctagcttttcattcattttttgtgcctgggcttaaggtagtatagtataattgtactctctaagcaaagctaccaactctaaattagactagcagtggggggtggctggcctctatcttgctcttctttattttgcttcttagtaatctcagaagggctcttggagtctctgcataattaatgcgtttcaatttccatgctatataggaataatctttctactaagattttaaaaaaatgggataaacatgttgagcttctggttttataaaaaaaatggcccttggttttggcaaagaaggtttaaattcgtgcgtgggtattgttctcataattatatcgtatatccatgaagagaaatgctaaaagttacgtatacaattaaatattaagtttaatataatttaatataataatttttataaaatatcgttaaccattagttattataattgtttgtcatataaagtggttcttttgtaaaagtggtggtactacattatagtcgttttgatgtaaaagatattatagagtcgtttccatttcccacaataaattattcagtccataattgcaggtttttataacttgttatgaagattgattattttctaggtgagatagtgatcattcatattaagttggaatttaactctatccgtttcagtttgactagttttgcctcgtaactctttacataatgtaaatttagtattttatatgggtaatattgtcggttcagatatcgaaacatgtgtgtgccttctcagttctctcccaatatattcatttaaaaaaggtcccctaaataaatatacacacacatatagaaacacaatacttcctcaaagcacgtagttaccagaaaaaaactaaacaatttggtaacaaagcaatattagagatttccttgattgatttgctcatggaaggtaaccaactgtgttatttttatttataaattatgtatgttttatgaattatttactgtcattttataaattatataccagattcaggattgcgtattgaaaattgtaaaattgaattttatatgaatattttgtaatctttttcgagtgattatttggagaaaaagttgagtaccatatgggttccaatagtttaattttcaaaacttattgatagatttcatacatccatattccattagatacatctatcttaatattttatattgttatcttacaataatcttgaatgttatttaatttaatatgatgataaggaaaacaaatatttaattatttcaaaaggagaaaatgaaaacactgatcatgaagtgggttacttttggttaattagttgttatcttttagtgatttctttaattatgctaacaattatattgctcaagcaattgaggctaacaattatggacggttaagctggaccatcaacaacttttccaagctccatatcaacatcaacaagctctattcagatatttttaatgtcggaggatataaatggtacaaaaactcagttaataatacctttggtttttatgcacgtattttaatttattggtgcttattattattgattcatattcaattaaaatatgcaggaggatactaattttcccgaaaggggacaacgttgaatatttgtcgatatatctagaattggctgagtccgaaacatttcttcctggatggagtaaaagtgtccagttttattatagcttatcagttatcaatgaaaatcctcaactaactgttaaaaaaggtattattaattgtgcaaaagtttcattcttgtta

SEQ ID NO: 626 - DNA, 2325 bp, Cannabis sativa
cacaacaagcttttatcaaatgataatacctaggtctggaatcacagttgttaagtggttaccataagagatgaggtatagtttaccacattcttttcctttggaaaattaccaagcaagttccatcatgggatggacttaactttattagtataattacatttacatcatgaggccaatgcaaatctgtagtagaaatcatcgaggcagtacctgaggtctgaagcatcagactgtaaagaggcctcaatagcatcatcatcgtatacagaagcaggagaaattattggctgggtctggggtggagtaaagaatggtacactgctctcttctcgaggtgggaattcaactccagcagcctgtgatatacatacaaatatagattataatttattagaacaaatcaaaataagttcttttccaaatactgcagtagcaacctagctatcaaaactctaaacaggaaaaaaattaatagacttaatacaacccatccaaacacagatgcaatacttcattcataacttaagcatcaaggacaaccctctaacttcagcaaaaagataccttgtaggctagtataagcatatgtcttatctaacattcatctgcaacccatgttattgcatatctcacactttaagcagaaaccaaaaaaataaaaaaggatgacaatatgatatttaacacttagttatcaacttaaataagctttgcccaaacgcttaggcagacaaatgattaatgagagcaaatattgtatcaagcttaacaggctaatataacatgtaatacaccaataaccttcaattcattatacgctgcatagtattgaggatatctcccttgaggtcccccgaaggcttcttgccatgtgtcaattaggatcagtatcttttccctcacattcaagtctggctgcagaatttaagccatcattgaatcagttaagttagatttactaagaatgaatgagtgattaagaagataactgcatacagattcacagtgaaagaacaagattattagatatgatcagaagaaaattaaggtaccttcttcttcactattttaaccatttcatgtaagatatcacgctcaacaatctgctgaaaaacactttcaccacagtttttgctgagagtttctaaagcctagaccaaaacattcaatgaaaattgcatcacaattgagttatggatgcttggttgaatgtaaaacatagcagcaataattgattcatataataaaactcttttaagttatattttgcatatgttaaaacaaaaacataaaatgacatcataatgaacaatatgacgaaaaggtcacatgtgaaacaagtacaaaaaaacaaatcaaaatatcttatgtacaaagaaatactaacaaaaagagccagaagttgtattttcggatttttactgccaagacgtttcttgagtgtcttcaaggcatctttcgcttgcctgccaatcaatttgagtaaactttggtgataaattggaagtaaatttaggatcaacagaagtacaaaaggaaatatatatatatatatatatatatatgcacaagcgttccaccaaaaaagataaatagaaagtacccagggtccatgttaataatatcacataattcaatgtttattgcccagtctggaccaatcagcatatcactagttgccctctcggcacaggctgcagcattaccagccatgtctcttcccttcagtcaaatcttttgccctcgaattttccttaaaacaaaatcgacccacaaatttaatccttgaattagtccaaaacataagacgcaaacataaacctatgaatgatcatcacaagtattttccaaccattgtcgaattgtacatactaagtccatcataagacaatataatccatatttggatatggaaatcaaacatttgcgatttctgatagaaaacaattaaattaaataaactactcgcctgacaattaaatgaataatatcaaagattcaaaatcacgaaaaggaaacaaaaactagataacgcccatcaacaaagaggactctatactcatcaatccactaatcaagaaatgaaaaaaataaattgaatccaaataaaaagacctaagaattatggtcagctctagagttgagaagcgcaatggattagtctatacaggaagttgcaggtttttatcgtaaaaacatgagagaaccccaattgaaggcgagaaaaagcaactacgtaattggaaggaagagaggtgatctagaagggcttaccagtcaaaacccagaagagaggattaggatcacagagagagagagaga

SEQ ID NO: 627 - DNA, 5768 bp, Cannabis sativa
acctgggaagagtacaagaagaagcaaaaagaagatgaactgcgaaagggggagcttgagaaagacactgatagaatgatgagagagtaccgagctcaacttgatgccgaacgctctcgcaaactctcccaaggaagaaaccattcctcttcttcttctactcgcaaaagaggtactctttcattcatgtcactctcaattattccccttttcactactatcttatctcatgtgtctctttctatatctatgtttcattttagataggaaggagaaagatctaaagaagcgcagcagcagcagcagcaaaaggaaaaaggtttctcttttcttttcattgctgatcagatattctcctcctttactttaagaactagttcaacttctctttaaattatctttgatgttttctgttagattcactcattgaaaagcttcataccatttttatttatatattctactacttctaggcctaacttgattaatgctcctctctcactcctattagatattaagaaaaaagattaattaataatagcaaactatactaatggatatgaagagggagggagaattgcatagttaaattatcccaatatttctaaatggaaattctattaatgtttcaatactagctctctatgattatgtgtgaatttggtattcatttatcttttatctgcacaaatctcaaatgctataatacaaatctaagaaatgttctactgctttagcattcttcaagaagaagatcatcggaatctagttcatcgtccagctcgtcagaggattcttctagcagtgatgaagaagagaaggaagcaagaagatctaagtcaaggtctaagagatctaagaaggaaaagaagcacaaatcaaagaccaagcacgctgggaatggtaacgatgataaggctgaaggacctgtacccctttcaagattctttgagagtgtcaagagctagtcattgtaatagattttgtgttccttatatcattaggtgatgatatccatttgggtgtacaaattattccattgtttcttagattcatgttttcccctttgataatttttaatgtctcttagtattttatttttctcttttattccgcaccttcccttgacatttctaagtttgcttcaacattgaaatttgatattgatatggttcaaatgaaagtttacccatggatacatggggagtttagttttcgaaatgtaactgtaaatcagtaagaataaaattgaaacatgctgacattgtattaagaaaataaaaaaaaaaatgcatttttaataatgcataggaatgaaagggtcttttaatatcataagtcagtaacagctcaaatgaaacaacaataagaatcaaaaaaagccgatactagcaaaaacaaacaccataaataccgctgctgagaaaagattatttttggcaagattaccaccctgtttcggatggaacatatttacattaagaaatcgatcatcataagacacatggaaaatactaaaagagagagagagaaagagagagagagagagagatagaccggtcaacaccacactaatcaaagtaatgataaaactaataaataggaacgaaatctttccatcttcattattgctgatactcggggttaaatgccatagcttcatggtagatcagtgccttcatctgttcctctgtaagagcacgctgctcaaagtcaaagttgaagggagtcatgcacactggttcatcgctgatgtcgtgcagagatgttaggtagggatgagctagagcatcttcaactgcaagacacaaaatattaatatactatatcggtttaaatagcatagaagctaaaaaaagacctgtataatgaaaagaaagacatattcaccagttatcctctgtcttggatcaaatgttagcatcttttcaacaagatcaattgctgcgggatgaacgtgaggaaacttttcagtaaatgattgccgacgttgaactgtcattgacctaatgtatctcttagcattttcgttaagaaaacccaactcagcctctgatggggtgccaataagctgcgaggttagttacacaggttacagtaaacaattatacaccttattcaaatcatgtacaaactgcacacgaggcctatgttggaaaaaaaataaataaacaacagcgattcctggaatgctataccgcaagagtgacaaagttatccaatatgaaacacaatgttaagggatttttttaataaaacaccagtttgcactctttaagttctttacattttttatgcaattcttccatcctcttcagcaggaaataactaacaaacatttcagtttagcccaaacattgaaaacgaaacaaatatcacacagctgacaagtgagaatctgattttgcaaaaagaaaatacctccataagcaaattcagctgattcacatgatctctgccagggaaaagaggctttcggtccatcaattccataaaaatacagcctacagaccacacatcaattgctgcagtgtaatcagctgagtttaacaacagttctggggcgcggtaccatcttgtaacaacatattctgtcataaaatcagtttctgaggtgacacgagctagcccaaaatcacaaattttcaagtcacaattggcatttagtagaagattgctaggtttcaagtctctgtgcaggacattggcagaatgaatatattttaatccacggagaatctgataaaggaaatactgcaaaaggaaatttaaaagaaataataaaattgcagcagatatgaatgatttaaagatggtaggtagagtaagaatgagcctacgaggaagctccaacactaaaaatataaaaatgaaaagttatgaacttttaaaaagaagcttatctacaatgaaagacttcaactgtgtcattctcattattgattggcaggattcgagtcaattttcatgatcagttacagttacaacgaaagcaatgaaatttggaaactagtaagctagatgtgcataaataaagggtcaaagacagattatagtaaaatgaaacctgacagtgctcctccgacaaggtttgattggaacgaataatctgatgaagatcagtgtccattagctcataagcaatgtaaacatcgttaaatacctccttttgagggggtggtataatatccctaattgcaacaacctgcatcaccaaaaacaagagaagagggtcaaaaatcccattccaaaagttaaagcaaccacctttagactacattgcaatgcatttgtataagaaaaaggaataagaatgaaataaatgagggcacaaacgttttcgtggtccatgtgacgaagcagcttgatctcacggagagtccttttggcatcgatcttgttatcgaaagcatttgctatcttcttgatggccacgctctcgttcgtctccgaattcaaagcggagctaatgagtaaaagagaacacgaatcacaatcatctttatccaattaataaagtaaatatttgatctttcatttcatattgaaattaacaaaaggaaaggtaaggatgaaattaccagacgataccgtaagctcctttgccgatgggcatgatagggggcttgtacttggcggtgacctcgaagatgttgccgaagatgttatactgtatgaatcggccgccgtggcttagggtggcggggatgctgtccatacccatgggtgggtggggttggggctggggttcgggatgcgccgcgtcggacatgacggtgtccgttggctgtggctgagctccgtccatttcagttgggaactgagttgagtttcgtctccactctctctctctcttctctctctatgcctacgcttatgcccaaatctctctcttcacttcactcaaaactgttttttttttttaatttgtttttatttcatttctgttctgttacttcatcactcttaattttttcttcatcttttaaaaaaaaaaataaaaattatatagatatgtacataagtaaatggtgcacgagcacgtgtggtccttcaaatttggacacttggtattattagaaatcttgagttttgtatactttagatttggtatttattattagaaattttgagtttgtttcttttagatttaatatttattacgttaataagcttgagattatgtcaactttcttctctactctaataaatttgaactcaaatttcagcttttatttagagcaattttcaaccctccatttttattatttaagaagataatacaatgaaacaaacaactaaaatagattcctattggttaaacacattaattaattaatatgatttgatggtattagtaattacatactttggttggtaatggtaggtactaggtagctctttataattaaatacatacaaatactaatacaataaaagaaaaaaaaaaaagaaaagttctgaataataaaaataaatatgtatgtgattggtgaagacgtgtctccaactactaagtattaaacaaaacaaacaaagcaattgctacttttctaatttatcattctaataacacagctaataaacttcctaatttagcactaacaacaataacaatcataataataagaaaacaccaacaattaccactttgagatttcaacacacactcaaacaaatgatgatgaataacaaaagaattgcattccttctcattcttcaaattaccaaatcaatttcagtatataagctttgtcttagtgtcacacacacacatgtataattataaatacatgatttctcttcaccatgtaaaagcaggtatcacatatgatggataagcaccatatttggaagccagagcttgcacagaagaagagttggcaatctccccaaaacagtttagtccaagttcagttgcgtggattcctcctgtggtgaaaaccgattggattccagcagcattcgcacctttgatgtcgtggtggagtgaatcacctacagctatagaatctgaagcatctacaccagccatggccattgctgattcataaattatctgcaaaaacggtttaaacaatgaccgatacaagcatctaaactaatgtagcaagttccagccaaaaattcatgttaataatcaatggtggtggtgagtatgagtaccttgtcaggcttgcccatccatttcacttcacctccaagctcttcatattttgcagccagagtccctaaaaaaccgaaaaaaaaaaaaaaaacagtctaaaactgaaagacgcatttctgggaaacattgtgtaaatttccaatacaaaaatgttcagtgagagttgaaagagaaaccagttgttatgttaccaggcattactctcaaggctctagcttcaacagttacaaaatctggattagccaccaccataggaatctttttagtagcacattgttccaatatactctcaagttcctcaagtttcatgggacacgcaacaccagaaggatggcccaaagcttcggtgccatgagccaagatgaattcagcatccttaaccttgtccacaacttgtaggcctaatccctacaagaaattctgacatgttaggccattcattacaatttccagtataacagaaatggcgtttattttcatggtaagctagtcaaaagatgtgttgcagaacaaaatgaagaaagtaacacaagcaaagggatccaattcatttggcggggcgcttttacatacaattcaaacaatttattagtcaaaacac

SEQ ID NO: 628 - DNA, 1540 bp, Cannabis sativa
ttttttagagctaaaagcttaagctcaccagtagcggaagtgcttttggagcttcagaaacccaaaagcaacttttaaaagcctagccaaccagggcctaaataactaataggggatgcaaaggattatgaccaaatcttcttttatcctccaagctcgaaaaatatcacattaagacaacaaagcggaagagatttactttagtatttcaattctagtgagtcaataagaaacaaaatagtcaaaataaacacttctcctcagcctaccccgatctcggctcatcacatgtattcatttcacaaaattactaattaggtattattacaaatcaattacggtggcaaaatatgcacattaccttctacgttgacgtaactgctctctttcatcaaatgtgctcttcggatcatagcacccaagtaagaattcccacacttctcctctaatcgacggatgaactccctaaagatgataaataaaatgtaatgatgtggtattactataactaatcacacaaattgttcctctacgattttttaataaagaaaaaaaataagttaaactactaaaattttcaacttattttaacctgtcctgtaaaaaaacgaacaaattatattggctctcttccgaaagtttcaacaaatagaacatatgagagtatcataggtcagtgatcctcaacaaatcagaaaatttcttataattggtagaagaaagttaaatattacttgtgtgataattcaataatcttcagattacatcacatagttggacagaatagctacatatctgtaacaacaaatgtagtacaatgctttagcatggtagtaggaacaatgatcagttttgaagtaattgcaatatcccgaaaaagaaaaaaaaaaacacgagccagcctcttcaattcggaaaactcaagaaaaatatcaacatggttatgataactgaatttccacagaaaaatatgcaatgaaactaaaatttacagtgtgattgaattatgataatgcacttaccccacgttggatccggcttaaagtcttgccgatatccagatacccttcttgagtaaacgcagcctgccatttcctcacacttaatgttttaccagcctataaaagcagatagaaacaataaagaaacttcattagttgacctttaaattcaatgtggcattgtgaataaggacttggagcaaaaaaaaaaaaccttgagctaaacaactcatcaagttcaacctatgataatcatgattgtaatgaggcattttttacattaaacctgcacaatcattaatcacacaagattctaacatttaaataaggatcatattagctaatctaaatgtcatcatttcaatatcttgaaaacatttgattggggcgcctcaaaactcaaaccaatagacaatatttgtcatgaccatcgaaagagatgaagatatcactaaaattgcttctcaaactcaagaaaaaaacacactgaaagctatggtctatgaattgtcataacacaatccattaaaagaaatctg

SEQ ID NO: 629 - DNA, 2237 bp, Cannabis sativa
gctgcttttttccaagtaaaattcatagtggataaactttaacatatattctttcttttcgtaatacttaacagccctgacacccttgatcagctggaagtgaacgaggagctgtttggaaagaatgctaagtatctacaaggtttgttcccattatggttcctgctctcttttgttaatttgtatcaatgttcatatcctagcggagtcattttcactagacatggatggctatgttattataaatggagactgataatattttatgatttcatctttcatgttgtcatttttagaatacctagtttactgtatattgttagggtgctgatttgtccttagtacagatgttagttgtcacatttgattgtaatatgacagctaaactgtgatatttttggtgaacagatgacatgaaagttagagtagaggtttacaatggaatccctttatctgcatcggttccaaaacatgttacatgtattgtgaaggaagcacagcctcctgtgaaggggataggagtgacacctaggtctgtttactttccgttatttgctataatctttatcatatatgcactttaacttctcgttcatcgttctcctttaatgagtacacttcttgatgcgtggaacctctgtagataagttgcttgccacatctgatattactaagtatattcatttgtaatttttctgaagcttatgtaaatgtatctatatggaaaggggataagatgatatgagaatgagacattttgtggataaccatttgtagagtgtacagtgctttatatttactgagttgtcttcttatttgattttatttgtagtacaagtagaatgcattctggaaaatattgtagtgaagacctattttattgtggataagagtaagaaagagaagaaagtaaaatcgaatcttgcctgcctactactgaacaattatctctattttaattaagttgagtctgatcggtgggtaaattatgctgtttttccagccatttcacttcatcattacatgtttctagtttatttatgatttctcttttgtgggttatagtgtctgtctggtaaattatagattcagatgttattcaccttcatatctgtggattaggactattttggctttacttaatatatatctatatgctcttcatttatattttcccctcttaaagttttgcttaaaaagagaatacacaagtatagatttgtttcttcaaaacttgctatgagattctttcctacctacccgctttggttttacccaagattggagtttcgaaattcttaagtcgagttttggtttaatttaccatatactacttttgatgcagggagaaagttgctgtgctggataatggcctttctatcaaagtaagttgaaaatactatttcttgttggaatctctgatggtaaaattttattgtcttattctatttagcaaattctttccaaaaatccatgccttctggctacacgatcagattcagatctgtgtttctcaatggtgtgaaaggattcacaaattatttttggtagcgtaatatacattccttcatattactataatataaagattgacgatggtttctttgaaatcaaacgttaatcttataacccctactgtcgttctatctgggagtgattgtgaattttgaaaagtggtgtgattttggtctcttatcctttttatcttcctaatattccctttaggtaccacctcatgttctagccggtgaatctgtagttatcgatacaacagacgactcttatgttagaaggtaacattcaatgtagctagacagtgaatgaatgaacatattcattggtttcaatttctgaaatgaaatggtttacgatcattaatcagttgatgctttgctttgtctatatttttgcaggacaaaggtgtaagattggatgttgctttattagtcctacggaaggataatttcatttttgtaagaattaagatcatagaaattgtttattttaaacaacattattattagttattattattattattattcatacaaattcctgagagaggagacttaacaatcgagcaaaaattaatgttgttgcaagaaataaaatatgtaacacattacacagaatatataaaccagttttgcatgtttctattatgtctacatatacagagcacaatgaggatgaagagcttatcctttcacattttgtcattttattattattactat

SEQ ID NO: 630 - DNA, 3858 bp, Cannabis sativa
agtcaaggaaattcccaaaccctctttctctctccttgtgttcggccaaagaaaaaccaaaagagaaaattagtttttctcttcaaattcttaccaattaaggggtttctagctaggatttcattgagtaagggagaattcagctcaagataagcttctcctcctttttttctttgaaatttcaagtaaaagttaggttttcacatgcaattttgagttctagctactgttagatcctggtattgttagagttgagtttttaaagttgatttaagtttgtgtgagctatcttatgattgtttggtgggcagtaacaagtttgagctaggtttacttagccctgtaataatgaatttggattctgagccttgatggtattaatttttgttagttatgtctattataatgtttttaggtattctgaagctttgtgtgagatctgggtggatttaagttaaaaattagattttttgaaaatctgcagcatgaaacggctcagaattggattttttatgtctgttatatggtttacacataacccctaatgatcatctaactctcattggtttttctgatactgactgactggtatgttgtcagatgataggaggtttttagtcctcaaagaagcaattactgttgcaacgagggcaaattagtcacacctctgccacactgctgtcaaaatatctttgctctagaatatccctatgccaatactgtttagaatagggatttgctttacgcctttttgttgtaacaaattctatacgtgtaatccttatattggttcttcatttccttataatgatgggcatttgatcataaatagacaagctgagcactgtcagtgctgagctttttcattcatcaattgtgtaacgataaaactatagcgataaaaccaattgctgtaaataaatttttttttatgattcccttttctaatatttatttgaagtgattatgcatttaatgaaagtaaaataaccaaaaaaaaaaagttggcagagccagtagaggacaattttgtgagacggttttgaggcaatcggtaacgaacaaagtagatataacattacaagacctaacattacaattgatagaaacaatcgattattatgtctctccctacaaaaaagctggcacattccattcaacatattccatttcagcgagcatattcaagaatgcaccaccacattggtcaactctcttcttctctccacgcctagaaggaaagataaatctcgctaagaaacttcatattttctagacagtaagtccctgtggtggagcggccacgggtgccttgggtttagccttctccaccactatggcctgagtggtcagcaccattccagcaactgaagccgagttttgaagagcacaccttgtaaccttagctggatcaataacaccggcatcaaccaagttctcatatgtgtcagtcattgcattgtaaccgacctcccattcacttgatttgattttctccactactacttcaccttcaactccagcattttgagctattaatgaagctggtgctaacaatgcctgcaaattagtttcagggtcagcttaagcaaaacaatgcaccacttgcaattatatatgaaaacaatatccaataatatatatataattaccttttgcacgatatcagcacctagccgctcatcagcatcttcaagttgctccttgattgcaggaacagaatcagagagatgaattaaagcggcaccaccaccaggtacaattccttcctcgatagctgcaaaagttgcattcttggcatcctcaatacgaagcttgcggtcctcaagctcagactctgtggcagctcccacctttatgactgcaactcctcccgacaatttggcaattctttcagccaatttctcagtgtcataaacagaatctgtctctgccaactcttttttcaactgagcaaccctagcttgcaactcatcttttgatgctgcatcggcaatgagggtggtggaatccttagtgatggtcacctttcttgccacaccgagctgctccactgaggtgttctcaataagcaaacccagatcgctggcttgaaactcggctcctacaagattcacagataaaaaattgagacgtgacgattcaattacttggtatttaggaaataacacacatgaacaaattgtccattaccatacgcaaactgaacttatgtacactaacaaattcacgaaaagcgtttcagcaggcagtctatctgcatacctgtcaaaatagcaatatcctgaagaagagcctttctccgttcaccaaaaccaggagccttgatggcagcaacattcaatatgcctcgcaacttgttcacaacaagagtcgccaaagcctccccggtcacatcctcggcaattataagcaaaggggatctcaattgggtggttttctccaacaatggaattatgtccttaatagctgaaatcttctgatcggtcaccaagactctggcattttcaaattcagcaatcaatttctctgggttagtaacgaactgaggggaaatataacccctgtcaatctgcaaatcaaatgaagcaaaaaaatcagaaaccaccatgtacttagcgattggaataaaaaataataataccaaagtacaattcaaagttaataaacacaaacctccatgccttcttcaacttcaacagttgtttcaaatgaagacgaagactcaatagacaaaacaccatcagggccaaccttgtcaattgcatcagcaatcattgttccgataagttcgtcattcccagcagaaatggtggcaacagctgcaatgagaaagataaacaaattaaagaatacgtacatttttccaattagattgtttaacttgtccacttaagcaaataaagaaaagtgaatgaagtttcattacctttgatatcatcacgacccttaacaggtctagccttcttctccaactcaactatcaaaccctgcacagttttgtcaatccctctcttaagggacactggatttgcaccagaggtaacactcaaaagcccaagcttaattatttccctcgcaagaactgatgcggttgttgtcccgtcaccagcagagtcattagttttactagcaacctaaatacatcccataattaaaataagtcagcatatttcaaatcaaccaagaacacagctcatactagtttaacaattacatttacaaataaaacgaacctctcggatgagagctgctccagcattttccatagcatcaggtagctctatggcacgagctattgtaactccatcgttaaccactttaggactaccgtactcatccaaaacaacattcctccctacaaaaattgattaaaagaaaacaaatacaggttaaattctaatactaaagaaaaaagagatgatataataggagagaaaatagagcaaagacaaggtaactacccctaggaccaagagtaaggccaacagcgtcagcgagtttatcaatgcctgcctgaagtgcagccctcgagtgttggtcaaaggctatgtccttcgcattagctttaacaacaaatcgtctgctagattgcttgtagttcaacctactgctctgctgctggctaaccctcctactcaaaccctgctacaatgaaacatattagataattctgaactcatacacacccagaaccacaaaaacagcaacttaagaatactgttatctaatattaagatagagcaatttagactagaattctcagaattcccataagaaacgagattagaattatatacaaggctcaacactcctgaattcttcaaacaacttgagctaaaatcccttaaacccagc

SEQ ID NO: 631 - DNA, 786 bp, Cannabis sativa
gtttgttgtttgagaattgtaagcggttgttgctttcattaagaaatgtttatcttttgtcaccgttctacaaatttgtcagaaataattctcgattattagataattgtattattacggaaactgactccatatgaattgttgtctgttttgttgagcaattgctccgtttaataaagaagaatttgtttcaaaaaaaaaaaaaaatactccagtgttttgttggatcccatatgcataaaaacacaatagctacaatgtaccctcactccaaaccatcggattatatagctcttacacccaattaaatcctcaccgatagggctgcatttaatcacactacatctataaatatgtattgataatgattaatgatcaaaacactaataaggttatggcgtgccgatgccactatgctttcgatctatgattaaaactagtaaacgaaaaggatcagtacacatgtagctagctacaatatagcacaagtacaacacatatatataattcatagccactaattaaagtaggttatctttctattttacacacctagatagattaattatatcaatcattcactttattttcacaatttaaattattttatttttttttaaaatcacttaaaaatataatattttattttattcttttttatattatttttaacactttttattttaaaatgtttcaatactaaattattttaaaaaatattaaaataatattatattattatttaatatatattaaaacattaaattttcttaatttatgaaaaaa

SEQ ID NO: 632 - DNA, 4292 bp, Cannabis sativa
aagagtgagcaattgggtattcaacgctatctaaatattttcaagtttttaaattatcagagctagttagggattgatgtagcttttgaaaaaaggctaccagttatggtagagtttaagtttataactgtgtgtcactaactcaagttcattccaattatccttaatgtctcaatggaactcctttatttaatatgaaactgtatttaagtctgccccacccaatcaattttccatggtttacgtttttaagtttaataaagtggattatgagaggctttagaatcatttccaagtggccactaatgttttgatggtctcatattagataccacaaatgcatggctctaaacaattcggtttaggatgactagattttgcaatggtactttgttacttgttattaattgaagatcttaagttgttgcattttaaagaactcataagagtctagattgatctatattgtgataaattcatctaccgagccatgttggtgctgctttgcattttaatcctctttatgtttttgtaagtcagaatatagcccttttatatttctactgttactaattgaagactgccttttgaattatgattatttatgaatgacttggatattattgcatttccttgttattttggtatctatatggtgattttagttctaattctgtcagatatcggggattctgtgcacttggtggcgtcatgacgtcttctgtgcatgaactttctggtattattttctcctcaaaagttacccttatgcaataccttttgatgtatttattaacttgtaaacaatttgcagaattggactgggtatgctttgttacctgttaacctcctttcatatgaaaagattgacttatttttcaagtatttacctacttaaatttggactatttgatattatattttctttatattatttataactattatactatttcacgtccttgttttttggtttaaataccaactaatattcacgaggtgacactaaattacaaaataccaccttgagcgtatttttagtcaaagttattatacccttcctttatttaactgaaattattttatatttttaaaaatctgattaaaataaaacaaaaggatatatattttttaaatgttatttacaatttgaataaaattatattctaaaacacttcgagaaagtaatctttatatattataaaaaaggatgtagtttttagtgacatattaggaatttgctttcttgacaaataaattaatgataatgttttaattaaagaaaatatttttaagatttttataaaatgttaaaatatataaaaataatttcaagtaattacgagagttctattgaaactttggatactaactgtacttttactgtagtaatggtgatttatgcagtcatatattgtgaacaattacttgctcaattttcggtttctttcctccttttaattttctcagaagccttgcttcactagttatatcatatggtttcggcctcatgatgttgatatgatatggtaatggaatatgctatatagtctatagtagcaagtttttagtcactatgttgttctttggatcttctctaaagctatacttaagtacctgttgcccaccccgtctttctttttttgttctttcctgcaatgtttaaccttctttacaatattgattacacagacaactgtgaggctgaagagcagcaaaaccactcagattctcagaaccagtcttcttctcctgcacctggaatgcctaatactgtaatgtcagctccaaatgttcagtatgcaactagtccgcaatttggagcaggacatgcagtggtatgttcttgaaacaaaaatctttgctgctaatgtctttcatacaatgatgtccacaaatgttctgtttcactgtagtttgcatctaatggattgattagctgttctgattcatatggatttgctcataatttccatatgatctatacctatttgtgtatacacaaatattattgtgtaatagtttttgtctctaattgaatgaagatgtgaaaggtgtgacattttgatgtatatgttaggaaggaagaaagatccaaataggaatagatcattgtagggttatgtggggatcctagttttaaaaaaataaaggaataaagatccacatgcatgataaatttgactgatcttctacacgattttaaggattctacacataatttatacgaaggatgttacaaggacattaattccttcttggattcttgatgttgggctttgttattgaaattttttcttctttgttaggaccttattttctattaatgttgcttccgagtttgagcagctctatagttgaataatttgctaggtttatactttataggcctctaatttacacattattttgtctttcagaaagaatatcaagacttattagaattagatttaagtttttatcaagggttttaggggactggaatcatgtgatatttgactgcaaagtttttttagtgtctatattgtgtttaaatatttgtattgttttttcctcatagcctcaaaagggaattggattgctgacactaaggtggtccaacagaaattgagttcccccttagtaagcaaatacaggagttggaataaaattcattcctttcttctccatttccctgaaagaaaacctggcataacttagtagcgttgtcaaacatttgaagtaatgcaatgtggaatcaaacacttcgtgaggtttacctttttcattcttctagatctgatttaccctctaaatatttttcagaaacggaataattcaaatgaaaaaccaactggtttagcttgtttttgtttttccttatatgctttgatttcgggcatggatattatgtggtgtatattatgatattatgggtgtttatagatgtgattgcccaagtacggacaataacgacttctaattcagaaaacagaaatcaattatcaactgtatactatttaaaattaagagctttgagaaattcaactaataaaaccttatttgattgcaggcaccggcggcagcttatccgtatccagatccttactaccgaagcatctttgctccctatgatgcacaaccttatcctccacagccttatgggggacaaccaatggtatgcagtttcgcacattcaacagattaaaatttccatattagaatgtggcagtgtacttgtaatggaactcacagtttctatctcaatatcaatatgtttaataatatgtatgtatattttctcaggtccatcttcagttaatggggatacagcaagctggtcttccattgccatcagatgccgttgaggaacctgtgtttgtgaatgcaaaacaatatcatggcatcttgcgacgccgacaatctcgtgcaaaagcagaatcagaaaataaagttatcaagtctaggaaggtataattattgaacctgaaacatcttgcttcttttcttcgagtatgaagtgcctgatctgtccaagtaaagtgttatgatagtagtagcatcttggttgcgggttctgcttttgcttttggttgtttctaagttctaacttgctatcaaacttaccttgcagccatacttgcatgaatctcgacatttgcatgcgttaagaagagctagaggatgtggaggcaggttccttaatgcgaagaaaaacgaaaagcatcaagatgaagaagatacacaggttgacaaatcacagtctcacatcaatttgaactcagataaaaacgaacgagcccctgcagatggcacaacttgaataatctggaagaatcattcaaaggggtctcacaaaaatcagttagtcataatcaaatgctaggaaaactaagatccgctggtgggttcgttggctagttggtagctgatgttcgtgcatcatgacggggtctatacttcgaccgagtagtgtgaataggttttttcaagtggtaaatttgtaggaaatgttacaaagatgaagcagtgaagtctttttgaaaagcacgtgatagtttccttttctccacgaggagattactacttcattttggcctttgcttaatgaggttggaaacttgttttccttaacaaaactcaaaaagagagtcgttgtagtttggtttgattatgtgtcattagttttagaagataatcagatttagatgctgtgagatgtggtattagtttcattccattattgtcaattgaggaataaaaggtgagtggtgttggcttgaaaaaaaaagatatagtggcttttttttttt

SEQ ID NO: 633 - DNA, 1090 bp, Cannabis sativa
gttcatggggttgggggttcaactatccactcctgcatttttatttgacaaaaattataaaaattttgaagtgattgaggcttgaaccttcttcttgtacatggtttgagaacatatttccattgtgcttaagaatattatgccaataatttattaccaaatttatatttaacttcttgccccttctgaaaaaattatctaggttcgcctatgggcagaagggaaccacattatttacaaaattattttgtcataggcctctggggatgatcggctcaagtgaaattcccattttataagggttttccagctactacatgttgttcccaacaccatctaattcattcaatcatgggtagaacttgtcatgctcaactatcatttttttttattcccttcatagctaggaaaacaggatatgaatcagtctaatagcacaaacactaacactcacatccacaaaataaacataaaatgtcagttaacaatgagggcttaattgaagacaaagcaattcagccaaagtttaaaattgtacagacagaacaatgatcaggtctacatactgtattaatggcatcacccacagcatttacacaccctagaagtacccatgtgacacttgaattccttctatttttgctcttcattatccatagtaacaagtcaagaaataaacctaaagaatctgacctaccagcccttatatgtatacatatatgtgtgtgtgtggggacgcccgccctctcataaatatatacaaacaaaggatcattactctaaacacagccagcagccatttgaaccaaagacccaagtttcccacaatcgtaatttcagtaaagataacttatttatagtaattgaagtccaactaagaaaaaattccaaatgagtgtaaaataatatcctttcactccattttttaataaatatacagacagattttctttgctaaaataaacaataaatcatttcgttttttttttccttttcttcgttctatttcattttgcatcctttcccactaagcaagcaagcaaatatagaaagtaattattgggttttgaaaactcaagttaaacaaaaa

SEQ ID NO: 634 - DNA, 2068 bp, Cannabis sativa
  modified_base (224)..(226): a, c, t, g, unknown or other
ttagaaaatcatcatatcataatctgctgtaatctaaattctgccaaatacttgtaccataactccttgtaaactgacaatatagaaatgatttgacctatagactttcatcatgtcttacaaaaaaaaaaagaaccgtgataggaaaattatttggtaaggactttgttcctgtttttatccatcatgtttatttcattcaaaaacctttttttttttttttnnntatatatatatatatattagataacactcgtgtcacatttttgctgttgtatatgtgcggttttttgtttatcttatgtgtacttatcactttttgaaataatttcagcttaaagatttggctaaaaggttgccgcctggtgtttatgataccgagagtttgaagcttgcttacctacccaatggtttggatcaaaatggactgcattaccaagatctaaatggggagcgtcattcaagatctgattctatcacttccacagggactgattctacttttctaaatgggactcatggctttaattattcaccgagagattcaactggaattaatgaaattaatattccacaaaaccgtgagcatctgagttccaatgggacagttgaccattcagacataagactttcaaacggtggaggcaatcagacagatactagtagtgtctctgaagctcttgagggcagggattctgggcctctccaagatggggagaatggtatgcgatctaaaaattctgcattggctggcaacaataaccaagttgaggcagaatggattgaacaatacgaggcaggtgtttatataactcttgtggctttgcgggatggagctagagatcttaaacgagtgcgcttcaggtacaatttattttctgaaatgtatttattaaaagttgagttgctcataagggtaactctattggggccgattgtcttgagttcgatctgatatttgtgcactcgtgatttccgagtcaggtgttggagtagctaatgcatttatactttagatgaaaaattcacaccaaaatttactataaagaaaaaaacatagaagagttcagaatgaatctcacaactaaactattcaagtgcattgctagtccaacaaccattcccatcacagattcacatattgtttgatgggggatccccccagcaaatattttccttcttattttgttatttgttaacccgataaatcccttttgagtgcaatctgacaccgaacaaatgtgcagccgaagaagatttggagaacaccaagcagagacttggtggtcagagaaccgtgaaaaagtgtatgagaagtacaacgtccgcagctctgataaagcatcaatttctggccagactgcacgtagatccgaaggagcactctcaccttcttcccaacacgcctagctatagcttcagtggagtaaacccctccattaacatattttgtaccattaatcactaaggcggtattgaggcaaatcaagatttcggtattcagggaaagcaagtaccatgtttttttttctttttctttttttgggtcacttgtttagtcctgttcttctctcttaattttttttctctcttcccatttctaaatttattatccatttaatttctgggtcgccaccctttatacacctgttgtattgtagtgtatataaaatcatcaattatcagttagtctctgagcaaaagaaattttttcttcttgctttcaccttccttaccaccttatgctctaatagatctactgtctggcctcactgttagttttgattatatctataaatatatatatgttaagtagatgcaactttttagccttaatatggaaaatgcttgttaatggcattagaatgcaactaatgtgaaaaaaaaattatgtcattttggtcatgtgtatcaaatcaaatctttcttaccttaatgatttcaatgctattcatgtttgtctcagtgctcatcatgaaaatcaccttatacatatgtattttcttatctctcgtgtgtggatagaaatttaagagcattgtaattaacgattttatataatttttaa

SEQ ID NO: 635 - DNA, 2158 bp, Cannabis sativa
ttcataacgacgacattcattactattaatttcttagcagtgcgaagcaatggcgggaaggggattggatgtgcaaaagttgcaacaatcataattatgcatctcgatcgcaatgcaataggttagtagtaatagtagtacttactatcgacggttttcttcaagagtttttcatggctgagatcatctgattatcattgctcttcatttatacatgaataccacacaatcagtaatactctatatttttactccaaatgtttgctatattaattgcagatgcaaaacagaaagagacggagtaacacagtccgtcgataccagttagccccaccccgcccccgagtagattacataattggtgtgagctgtgataataagatatgtagaaacactctgtaatgatcccaatgaaatagtcctagaattagggagcaatgtcatctccaatttcatgttatgtgcacattagatttcatcaaacacaaacactgagtgagttttactataatttatttatacccaaaacgagaaactaactcataaatgatcagccttgtggtttgacagtctttgctcccacattgtctgagattcaagttccttgtggttgtgggtaaaatttcaatatatatataaatatattataatttacaatttctgtttgtgtatatatatatattcatttttagtatcctctgtatttaatatttctgtattttaaactgctcttatttatacataattaaatatttaaatttaaatttgaaactcatctaattaaaaatatgtactgaataatatattttatttttctaacttaaaaaataatttaaaaaggagacataactaattgaaaatttaccattttggtttgaatatatatacaaaatagaagttgaagaataataactgagttcataatcttcatatcatcgtcatcagattcagagccagagaagctacaaaatctctgaaaaagataagataagataaaaaaggatccacaacaaaaggatcaacacaacacttttgagattatcatcaatggctcatcatcatcatcaagatcccttaaacaaattaccaggagaaagaggagcagaatccaactgataaagattaagcgacggtccaacaaacctgaacagaatccatcctccgataacgataaagatcgaagcgtaagcaaacttattaagccaatacaaagctcctttctctcccacgtaaagctcccaagctttctccggcaagctcatctcctcccacttcttcaccactggagtaacagccttcttcgtctttgcaaacctttcgtcttcttcgccatcaccttcctcgcgaagcttcttcgatttccttctcgacgatcgccttcggaatctcacctcgactgtttcaggaggcggtgttatttgcgaagacgctgccggagtggtgtcgtcggaggtggagttgttgatgggagtgaatctgagtgtccggtgagtgtgaggtgagaatagtcggcggtggttttggagagataaggtggtcggcaatggcggaactctggtgagagagttgaggagtttgggttccattggtgagtgagtgaatggagaagaatggttcaaactcactttatccttttcttcggttttttctgttagttaacggtaacggaacggagctggtaaatgtaatcctttttcgcttctattttctatcactccgttaagttagttagcagttggactatatattgggcctcagtataaaggataggcggcccttaagactctatttgggcctaacacaagaaaggaggcccttcttaaatgggcttttatatgaaaatggcctgcttctggcttgccaactgcaacattttatactctttatcatggaaaatgataacaaattttatcctattactgcattcattttactaatttttttagataatttgtagagttttcattttttgaaatgaacgattttgatgtggccacaaattagtacaagtgcttatttaactaatttaagctagtttgaaccaagtgacatttctttcaaaaaagaaaaagtataatgaatttaaacattcaaacattaactaaaattagagatatacaattttagatcttatcattaaagtactatctatgcaatt

SEQ ID NO: 636 - DNA, 5956 bp, Cannabis sativa
actcattcttttttctatttatagctcatccatttttccaaaaagaaaacatcacaatatcaatcatggtttattactattagtacttgatttcttagaacttattagaagaaacaggctgcatcactctgactctattgaggtctgaagggacaattaggtctattcttgcattgcataatgcttttatgtaagtagttaactagttttgtcaacaagtacccataattcaattttaggacccattacaagatatttaaaatgattactttttttggtttagttgaatcttaataataataatattaattcattaataaagccatctatttcttcaaaattgcaccaatttatgaggcagagtagccagtagtcagccatagttttctttttttcacttcttttttattaggaaaatggctttaaaaagtttaatatttatttaatgaaagtgtagttaccttaacattaatggtcctgccatgctgacgtgcttctgatttccacttgttagcaatttcattagcagcattaacgttcctacacgccatgaaaacattggcacccgccattactagctctctgttttttatttccatcagaaataaataaaaaaaaacaaccattaaaacaaaatttacatacaatgaagtattatgagatgacatatttgacaagatttaattttctattatgtgaaattggttcacacacgattctgcattcttaggccacccattatgaagaatctatacattgtttgttcttttctcgatcataaatgatagtatgtcaattaaagagaagtgtaatgctctaaatttttggttactaagttttgaagagagagagagagagagagaacctggctgtttggaggccgataccgctggtggctccagtgacaataacattgagattaagcaagtggtttggaagaataagtggagaagaacgaagtctatatgttaagactctctgcaaaaggatttccttcaaggcctcccatatgccccttaaccatgctcttctctgcaactccatcctctctttctctcactctctctctcgtttgacaatttttttttctttttttgtgtttctcttagaaaaaaaaacgaataaatttagcaatagcaataatagaactatagaaggaaggtaggtatctttagttcacaaaaattggttttaaccattttcacacgattctagctataactttctacaattaaaaccttccgaatcaagtaaaaagatattatgaattagtgtagtaaatatgtgtatatatatatatataaatacatgtgtgtgtgttacacgacaacgataccacaccacatatctttggttacatatattgtcgtgaaattaaatatattaagtcaatttgtagtagaagaaatatggatatcaagattgtaatagcttgtttattataggttaatttttgtccttagacggtgactgaaaatacaagtttattttttttaatttatttttaaggtaaaagtaaacacatcatcattaaattaaagtagtaggtgcagcctacagttgtagcccttatctagttttcatagtgtgtacctctttccattcagctacaattctatgttgttgttgtttgtttttttcctctttctttagatccgtaaaggtatagccttttcttattaaggatagaatagaagttttgcttgttttagtttaaattcaatttaagtaacattctcactcttgcaaaaccaataatgatttcataaagacacgtgaataggaaacaataatacaatagtatgattataattgattgtttgatcctttaattatggctggatgaatcagaaaaatctaatttcacattgctgtctttaattacaggcttacacccaatttaaactcagaagagtaagcgtagtaaaaactgaaattcttcatctcaattgtgaaagccaagtgctatttaattgcagaaaagtgctgtcagttggttcatgcagtcagcttgcatgttgtcaggtcaactcttggatcatcagcacttataaaccactgattagaatcagatcatatctgcttatatgtattgtatatgtacatatacaaataaatattaagaatctcaaagctaatccctagcttggatcttgacatgtaaagctgatttttgttaaattattatgcatgaaatagaacaaaataagaaatttacagatttcaccatacattaaatcgagttaccagatacacatgagaagggtcaacttgtaaaaagcaacaaatagtagtactacgtgagataaaaagatcatataggtgacaagcaaggacatttaaacagttaggtgggctcacaaccagtcacattactatttactacaataaatttcctaagaaatgtcacattacaagcaatcaagagttgacctcgaaacagacaaagtcattataatcacgagtataaaagaaaaaagcataacaagtgggtgtctttggttcaatataacgagatataagtattaaaattcctcatataaattacaaagacaagatagcaaaacaaactgccatcaagataatcattctcttgagggatacgtgttgttgttctaaagagctatatagtggtagaagtttcagaaaccaggaaggtatccatcctattacaatttacagtaataagctgacatgcaaattttaaaatagacataattagcccaaacactacatctcactgaccacagaaagtaaaataagaaaaagaaaaaagaatgcttttatccgtacataagaaaaagtgggtactagtagaataaggtgattactaacattcaacagcaaccgaccatctaaaataaagctttccataggaaaatattgccttttttttagtagtcaaggttgcccattgatggaatcccattgctagagtttctgaggtcctgtcgattgatgtagtcatcacaagcgttactgctattagaaaccttgtggttcgagacagaacttccgggggtgaggccttctttgcccatttgctgcacttcaagtggagacagtatctttatgtaccacacattgtttacaaactccctggaaaaaaggttatcatttaacattaataacatgtgtaattaatagagttgaaagtaataaataataataagaagaagaagaacccaccaaacagtgggtacacacatttttcaatgccacgtgttgttaaagctcaaactgaaactattatttatgatggagggtaaagcattcaatccacatggctcaagacactcaatcatactgtaattaaagaggaaggaacaatacatatttattcaccctattcttactgtttctgaagtggacactagacacccacccacctcatttatagttcaaataaacaatccaaattcaataccatcctgatgtgactgacacacatcgtacctaccttgtactagcaaaaatatacacattgaactgtacgcattcccactaattaaacaccaagatcatgatttacaaaaataactaggaaacaattcaatccaccgtctgagcagctcacataatttcattcgtagctcattttccattttcagtgccacgaaaactattgacacatttccaataaaaacctctattaaaatgaaaaaaatttgacactgcagagataaagctcagtcatacgatcctacaatcagattaaaaccctacataaaatcttgtttgcaatcctgcaatgctacctggagatacaatcagtcaccattatctctatgaagcaacgcatctagcaaatctcccaacgtaccttcctaattttcctaattttgtaactccccaatcttaagcatttgtcgtaactttccaatgtatactgctagtcagtgatatctccatagaatgaacactccaaccagataaattgaaacttgtatcaaaaatctttaactgcattaggcacctttatgtcatcgttgcatgcttaaggaaccatgcacacaaagcctcctgactacttatcttcccatactcaactcaaattcagtaatccacaaaaattgaatacacagatgccttgacctctcattattatcgcatactaaaattatgataatagttccccagtcatcatgcaacagtgacaactctactgttattctaagaaaatcaatagaatagaaaacaaaattgcagcatgttaaatggagcgacacgaatcaaaagccgccaactgaacaaggcacctttacgtcatttttgcattcttcaggagccatgcacaattttcggagattttattttcacactacctttgtcaatgcattcttcaaacttattttcacagccattcttcatttttgaaaaccttgaatatgtagatttctaacctctttacacttattgcagaaagaaaaaaccagtcatcgtgtaattgttatttcataaagtattcattgaacgaactatttcaggccataaaggcacaattctctcaatttcacacaatatcttagcctaagtgactaaacacttaataccatttccagcaacaaaaaaaatgcatgacccaaccaataacataaaaattaattcaaccactactgtaaaatcacttgcaaaaactgaaaggctgaagcctgcacctactcttagaataactactttcagtgtcgagctagcaaacagaattaatatcctaagctctgccatgttttatttaattatgcatagtgaaccagagtttttaaagataaccatacaaactgctgaattattaaatatggggacttactgccaagggtcatcaccaaggagaagaacatcattctccctgtctacaaatacaagctgccagcctgatctctgagggtcctccagttggccttcaaggccaaacatgcgagcgagctcactgcgcagttcatcataactgctgaacttggatatatccagtgacctcccaaaggaccccgacttgtgaacctgtgagaaattaaaacatttaacaagacaacagattcagttataagaaacaaatatgagtactgccaaaaataagaaagtaaacaaataaataaccaatgttagaaatattctacatctttcagaagacaactttatgagcaccaatttaaattgggttaccttcacaaaggttctagtcggtggattcacttggtccccattctcggatgactgcaagaaacctgattcatctacacaactagtagtagtcatgtccgagttaaggggaaaatcagtgccggcggcactcgaataattcgaagaaccaaacggcatagacagtgaatcattttcactgccaatatttctaaggttcgacatcccattctgcaacatgagggatgaagaatcaatgttaactccaaacaaaagattgctttgcggatcagtagcaccgtggtatgctgagtactccctcccaggaaatggaggcaaagtagcaaggtctgaaacatttgactgaggaggtcctaattgttccacctgaggcagtacacttggagaacctccagatgaaatctgtggttcaactgagatttgcttggctaacaaagaagaagaagagataccagaattggaaccacttaagttaagcaactgggatcctccattctgggatagtgaacctaatatactatggatttgggaaacatcagatgaagatatgggatttccaacagagtcaggaaagcttggctgctggcactgtgaagggatggcctgcagcgatggagactgagactgagtaccagaggaaaaactggatagagcagacataacattaggaatctgctgctgaacagacaactgatgcaattgttgtgacggttgaagctgctgctgctgatgttgctgctgatgctggtgttgctgctgctggtgttgctgatgctggtgttgttgctgctgctgttgc

SEQ ID NO: 637 - DNA, 521 bp, Cannabis sativa
gagagtatataatatagttatagaagattttcaataagttttaattaatttcgaataatttaaattgttaaaattacaattcgaacaacttgctgcccaagtgtataaacaagcatagaagaagctacttgaatctttattttttacttattaaatcatatgaatttattaaaattttctaggtctcttctaactattatacactgccatttaaatagaaaaaaaaatacaacatttctatgtaccaaaactactaaaagtacctatagataataattaaaaagcaatcactaggtaacgatttatagagagctagttaaacaaaataaataaaaagatgttcatttgtggctaggttgaagaaaatgtagagtagttgaaaaattggtgtacttaattaattttggagaataggagagtacaaactttttgaaggagaagtgggtagtccaaacgaaatgtactttaaaataaaaaaggaaatcttactattagaaaatgtgaaaattagatgatatatg

SEQ ID NO: 638 - DNA, 3765 bp, Cannabis sativa
gaacctgcaacatagaccacctactttaccgtttcgacaacattttttttccctttttttttcttttgttctaaatttaataccaaaaacgaaaagaaaaaaaaaaacttttctgttttagttcagtgttgaatttacaaaacagcaatgttcagaaatcaagttctttgtctgacccgccgaccattggtatcacccccatctgatagttgtgcccacacacttcgggtcttccctccaccactgctgcattcctcatcacatcctgcaattgtcttcagaagttctgactgcagagttgggcaatgttctttaaggtgctcgaatccgtctgttcgcataacagctgaaatattcaattgaagatgagaacacaaaatacatgagtagattgaccctgtaatttgccttccatgggaaggaagataaatccagaaaatacaataaactcctccactatgcatgtagttacaattattttacaagaagaatgcatgcaggaatataggatccacaattaactagttctgttttacattttaccccatacttaaaagacaaacaaattaatgggacattcaatcacaaatactactaaagttaaagatttgaactacagcaagatgtggtaggattataacatagcagaaatttgacatcaagtcaaagtaatttatttataacacaagcatagtgaacttacaacacaagccactgttctcccctttccatttctcttttgtgcttggcaaaacacccaaagtagaaagaggatatataaatacataaaccagtattttgcaacttgatgcaactaaccttaaccattaagctaaacaaatttcaaagaataccaaattcaaagcaggaaaaagaaaatggataataagaaacctaagctttggaaccccaatgttcaagtctgatcagatgataaattattcaacagaagctaagttcaaacgaaaaaagtaaaactagcctatctgccggaacattcctcctggaaattattaaccaaataaccttgatccactcccccacctgtattttattaataataaattaaaaaaagagaaaaaaaaaacttatcaattagtatttcaaataattccaagacaatacaagtaaagaagggcacaattcaccagaacatgaaattccatcacagtataacctctaaaaccctttttaaaaaggaaacgagaaaaatgtacccttctaccttctataaccaaacagcaatcctatacctaatctttcccccaagaaatcatccaaccaccaatttgtatctaattgcacaagccaaatgccaccaaatgaaccttaacaccttacatctaatattcttttctaaattcctaattaccaactcaacattcaaattctgtaaaaatagtctcgtgacttggacttagcagtactttgtcaatctgtgatgcataaataaaaactcttataaatacctcttactgtgtctatagtcagttaggctaacaaacactgatagaaagtggagtgacacaataggaagccaaatattaatatcaaagtccattctgtaaagtatacccttaagttaacctatcagacacacttatatcttttgtttattatgatactatgcctaatatcaacaagtacattctaggctatatcaatatttgaaactaatacacacaatgcttagcacctctaatatacatttcattaggcgaaaactgtctcatttgcacaacattaactacaaatcacttgatcttctaacacttccatgcactaattatccagtgaacttaaaacattaaagcccaatatgaaaaggaaataaagacactggatttccttgcctaaaagctttgcaggccaaacaaggtttatcaatcataaatcccaaaagtagacatcgtttttacacaccagttatccatgcaattactatattccttatttggcattacacatcagtatgggacaagtaacagaacactagttttatcaaaaattgtaaaaaaaaaaaatccaatgtagcagatttatccaaactcaaacaaatgagcatttctgtttcaacttcagagaatcatccaatccttaccaattgttttggagttatactttttagtgttgcatttcagaaactaccccacaaaggataactaactcacagaaatgccaaattccccattcacaacatcccatttatttaagagccacacagagaaaccatataacaatacattcttccaatggagtaatatgtacactcaaaatatacatacaaacatcacatagttcccagttgaaatagatgtgattggttaaaaaaactgtcacgtcactgtatgtaatgtttgagtgcatattttaggtgcaccattactcttatccaatttcttaaagaaaccaattattcataaactttggcaactattcttttttctcttttcttttcttaacaactaaaaactgttttaagaatgaaaatcactctacaatgtcactgtgtatatacttctttgggaagacatatccatataagttatcaaataccaatttagaatcacatgcatccacaatgtaataaatttttaaattaagagttccaaagagcatatatgtaattggatgcaaatctaatggatatcagaggttatgcttgcataaaaatggtcttagtcaattcaattacacaagattcacaggaaagtcagattgtcaaaactagttcgctagactttacacatcatgtaatctttactattataagttactaaaatgcatcaatatccattacacatatattgcatatctgattttagcatgttttgaactttggcttgcatcatgaaaataggagcttatacaacaataaaaaattgatatagaaaagcatacctgcaagattttcggcagcaaatcttagacaaacagcttttagttcagaggcattgcaccggtcagccaaagctagaatttcagcaacagatttcacagatatatccttgcagagatgagactcacacattagtctgagcctatccagaccatacttatcagctgcagctaatagttttccagttaatgagtcagataccaaggatgtaggcgacgtacttggtgtttcaagctgcacatcctctgttagggaatctctgtatataaaatgcaacatggcctgttgaatataatagtaagtaggaacattaggttaaaatccatagaatgacagtaataattctgaaaatagaccactaaagaaaaaatgaaataacatttcttcaattgaaatttcagacgtaccttgaaaactttaggttctaaatctgtgatttcaacctctgtattatcttcctctagcccctcaaagaatttagaacgaaatataggggaccgagcagccaataccaacttatgtccacgaaacttttcaccagccacaacaaaactaatatctgaaccttccttcttttccaatagcatcccaaaatgtgtaccaatatcagattctgggacccgaatagagtgtaatcgtggacaatctaccgctgaaactacaactccaactgtacaattgatttttaagcaatcatctttcaaaaagtctgaagtttcaagtaaagctcgtctgaagaaacgcttgtatcccctaaagtacaaacaaaacaaataaattaacatcttaaagatacatctacatagaaattttcaatgtgtgcactctataattcattgcaggaagtagcaattaaattcaacaag

SEQ ID NO: 639 - DNA, 4702 bp, Cannabis sativa
ccaaaattttatcagaagcccagcccaatatgagaagcccaacccaagtcagcacaacttcatcccgccctctctctccaactctaactaccctaagtccctaacctcgttcactactgatcggagaggaggaattccgtttgccttcattaccacatgcgctttactcgttgctcggataaacaattacttcactcacagtcacaggtacgggctttgaaagaaaaggcaatgaaatcaacctgtgttttgttctgaagaataatagtttagaagaattagtggttttcaaatatgctaatatactaatttgattctattgagttgtctacttgaaacttgtatttttattatgcagccctaaatttgattcgaggtctttttacagggatatgagttagctgttatccaattttctaaagatttggtaatggagtccatattagcattcgaggaggagcagagacaactccaacaccaacaaatatcatcaacaccatcatccccctcgtcgtcttcatatggtctcaaattggtgccttggatgagctgggaagaatggctcttcgtctatgactctctcttctccgattcccctcacgcagtttcatctgctcttgcaaaggtattactctcttgcagcttcctatgtctgactatacattgataaactagggttatggagacacagacagttcaaccatgatctatggaacagccttgatactttgttgaaagttgatatcaaatttgaacccacttgagcatttgttataagaaaaaaccagaatattgtacttcgaattctagaaagggaaaaggacagaatgtctctttcaaaggcttcgaattccaagaatttttaattcagaaggggttgatgctgaatttcttagttttcgtaaagggacaattagacagacagatagatagttacttggtgataaatggttataaaattagaaagttaaggagctaacggatgtgcttactactttgttttttctcatgttgagtagtattctttagctagcattggttcgcgatggtactggcagtgttttatgggattgagatatggacatatgttcaatgttgctgtttcaatatgtatgattatctgattggttgcttttggatatcagatatcaacatggggaagcagaggttgtcttcctgttacaattgaagttacggcttcaatcattgaaattcaaatgagagatccttattttaggtacctgtttcacactattatctgtttgaatcactgtcctgatattgtttctacttctagatctttaatttctataatttcataatccattttttgaggttaacaattgactgtggtaatctattttatttgtaaatttaggaaggaccaaaatatcgatgcttcagataaaaatagaggaaatcaaggttctgatggatcactttctgacgaaatgctggctatgctttattgcatggcaatcatgaggtgaggatccttgtctatttgattgttcactaattcattggcagatgttataatgagtgaaatgaaacttatcaataattgctgactgaccatatattggaataatggtgaggaaatctgagatgcgatgctggcttgatgcttttccattttcatagcagtggcaaaatgagattgttgtgttctatgtgcttctattttaagttttcacagatcatcttgtttaattttgctgtcttttttgttgtttgtatttgtacactgatggattgggctacatatttgtcactttttgaaggcttgtcaacggtgttgttgagaaaacacgtaagcaacgtgaggtttcaattgctgtggccgctgatgcaattaatatgccacgtacattgattgatattcgtcatggtaagtgacttgttttattcttattttctactcttttgagtcactttccatgtgctaaccaactttcaaaccaatcaaattaaaccttacaagctgcggcatacttaaaatgtaaatgatccgaacaccgcatttattctagtgtagtatgatgatagtgaactttttttttgcagcttgatgttagtgaacttaaatcatgtggcttactcatattattttccatttactaaggtttatttttcaccaagcatttttattattgtagagggttcgcatcgtgagcttcctacacttcagatagttcgcagtgcctcaatcaaggtatgcttcattggaatctgaacataaatgttactatgtagttcttattcttcttaatggagcattttttgttttgtaaagctaatataattaacaatcacttttacgtacattgagatgaaaaaacttcctactaatgctatcttttatctttatactatttaggtgtgctagaatatagtaattcttatctgttgataaggttacggtaccgcagatacattacatgacagattagtagagtaaagttgaaaggttgtattgcaaatcataactgattacaaactacttggattttgaaagcctggttctctccctaaaatgaagctctacaatgcaaaccaaaaattagtcatcccctatcacacactaaaaattcttttaattattctcctgacaatcacatgagatctaccacccataagaataatttactaagaaacattaagatagttctaatatgtcagcacacgcacttaacaacaggtaatgaaaatccaatatgtaagcacaaacatacttagcaacacctaagcacgccatttaatccagcagggctggctcagtggcttgtcctgctgttgattcttttcaagcctgacaaaggtaggtaaacctgattggaagtttgtcatatttctgcaatggtatcgtatcatgtggtggaatattgcttctcttttctatttggtggagcacaccttgaatcagttagaaaccttggttaagtaacccttagtattttgaaatttctttgatcaatgatttgaatgcagtaaaggtttattttagtgacattcgacttattttcttatttgtcttgtacataataatgcctaacctaactataccagctttgtaagcttgaacgtactataactttacaaagttgtaagtggtattctactgtttaaagggaatttatatattgtcatttatggtgttgaactgttgatgtttccaggcacttgattggctaaaattttactattgggaaccacagaagaaggctgtcccatttcaaggtgacagtacaactaagatcagaaaaagaatcaagtctaaacttcgtgaattggccttctgtttgaatgctaaggagagtcctgaactgtcatcttcaccattacacggaaaacgtatgtggaactcttttattttgcttgatttgttttattcgggcaattaagtatcttcttcttcaattttctctatttgatttaatcataaacttgatatgtgttcttgtctctcaattgttttacagtgatagagaattcccttggtcatactttagattattttgggttgttgggtctgtttgagatcttaacttacttaatatttgcagcagttcaattatttataagctctagtttactgtaggtttatggggccaatggtctaaaaaaaatgctagtttagtttatatctattcagagagtcaagctaagtttgttacgtgggattactatatcctaaggaacttcgatattcttacacctctaaagtagtcagggttttaaattttcaggtttataatattcttctttttaaaaaatgtctgcaatgtctgtaatattctagccctttggcttttagaagttgttcctgtagttatattggcatgctaatctacttatttttcttctatgtaagcaatctacctcttgatttccattaattgcccctacatcagatataattaaatctagtgttctgggtttaaaaatgcattcttctttttctaaaggaaattcttatacaaaagggaattttacttctgatttagctttcaataaaaacattccgtatggcagttacatattttcaactatatagtatttcactgttctataggtcgtagaaaacatgattggatttgtgggcgtaaaatgtttctctcacatgcagctggcaagctccactcaaattctggaggtgaaattaactgctgaagttgttaacttttttttttttgaatgtcatagtaattgccattgaattcttaagctttatacaccagtttttgatgtgacaccaaaaattttaagaaagcattttttaaacacgaattactgctgtgttttgcatctattgttgatatttatttgcttctggatctacttttatgttcaggtaacaagaaacagatcaagaatgttgtcaaaaatcttgttggcttgtattcttcctgttcctcagaagttgtatcggtactgttggattttttgctcaagactttaaattcttcacattcgtcagagctttcagaagacacccaggtcggctctggcacagatactattttgaatgattggaagcctgttataactaagttttcaaataaggagccagaattactcgttgcccttcttaatgcagttcttggtatgattgaagtccaagaaaccagtaaagatgaaataggtaaatcgaactctacttgtgtgatgtttaatttgtgtcttctcaacatactgatac

SEQ ID NO: 640 - DNA, 2992 bp, Cannabis sativa
acttgccaagttaccatggttgaagaaaatggaatgcttttcattatgcatgacaatataatgttggttttgttctttggcatctatctcaggtttgacgggttcgattgtattaaggagtgggcgattatctgatcttatactgcagctacaggaaatactcactagtgtaaatgaagctgagatatctcccaagtacgatagcgagattattgcagctcaggtattgcaaaatgaacactcttttcaatctagtgtagctatagaattactggtcaaccttgtaactttagttggctcatgcttgtagaacattgtcaaggttttctcatatgatttccaaaaacaaccacacatgttttaatgacaaagtccaagcatcagctttgggttttcaattggcaaatacaaaatgtagaacattcagcttattaacccataaactgtgtgcttattcataagccgtcaaataacttatgaatttaatttaatctctctattctaaatttttaatccataaaacggagtgtgcttttgttgtttgcaatttacatttttatgttttcatatcttcagattcggcaattggcacaagagatcagagagttaacattaactcgtcctgtaaatatcttcaatgggaattcatcatctagtggtatgtgcattaatagttcaggtggctgtcctttgttggaaaaaaattattttatgctgtcgagtattctcttcttcttcttttttttgtcttttgaaacaaaacatgagaacttgtattaatgacatgagaaataatacaagaggtatgggggtagtagaaacttactagccagccatatataacaaacaactcaaaaaaacagaatataagttcctagaacacgtacaaggaacttactagccatatataacaaacaaaacaaaaaacagaatataagttcctagaactcagaactaagaacattataaaaaaagcatttaggcaaaacattgtctttctctgaagagaatggcacactctgagaatcttttcttcaacaagagatggatttgtccatctccttggttttgtatttcagaaattaaaaaagatcaggccattcatttagtcactatttccttgggatcctcatcaataataatagaaaagaagaatcagaaatcagaatgagatttcaagctggcaatttcaccttttgtgcaacaaatacaaacaaatcttttagaatacgaaatagtctacaggaaatattttatttgcttttatttgtcattttctctgaagtgatttttcacttcactgcactcagcttttctaattgtaaagatgtttcctgagctttccatttaatcactgctcagttgaactcttacttttcaattttaaaacacatggggagaatatacaagtgatatgcaaatgcaacaagaaaccaactctgtccatttatagtttaacatgatttaattcttgctgatcaaattgcataaaatcatgaggaagaggagacttatcctaattgaggtcctggaattgaataactcttgtatgtatttaaactctcatccagatgcctaataaagtcttgcatttcctcttttcatacatataaactattttgagccttgtcaattataatcagtagggtaataaggttgtcagtttgcgatccactgacacttttagctgttttcagaaaccgaaactaaaactgacagttcgaataaagaggaaccgactggtttttttttgttttggtttcatgtgtagattttttttttttgaaacaagtttccaatataatgagaaactaatagaaccagtcatggttggttagcaatttaaaagaaaacatgaacaaagtgcaatagtcagaaacagaatcttcttggcagattgctctgtgtgtgtgtcgctccctccttgacagactaaaaacagagcccacaagagaagaaaaaaagaagggtggtcgtggagttaaaaagataatcttagtagtacatatatgtcccaaggatcttctgtacaccgaaaagataatattcattcacaaattcggcctttatttaaaccaagaatgtcagataattaggaaggaggattttttttaagcaacatctggatttaggtcatccaaaaattgtagtaggggtaggttggtagtagttctcctctatagccaaaaataaaggatgtagatactgatactgatacaccaccttttgatagatgtagtatataaaattgggggaaaatgtatagcttctattcggtgatattatgttttcaaaagtcaaagttagtcgctcaatttgacctgctctgctcaatcagagtccttagaaggacctggtgaagaagaatcatgttcaaatattatttcctcttgatttgcaaaagctgaagagattccttggttgttctcttcatttccactagtttgagttcttcccagcattggctagacacttgtacccatggggaagggctctggatcaccagcatttgggccatctgtatgaaacagaatagggcgacatcgtttatcctcattcattaagcttgaattctgaaaatgggcgataagagcaaatttccttgaatacgagcaaattcactgttaaacttttcccactttattttccattaaacgcctgatagattttttttcccattcaataccttttttattatataaacaaagttgtatttagaatagatgattatcatctttattatagcctagtcagccacaagaagatgatccattctataacattgaatagtgtatagtgaactgtcacacaatctatcacactactgctgcatttactagtcattcagaaacatggagaaagagtatgccttaaagtcataattgaaggtccttaaccttttcccaaatatatcccacatcttcatcatggttgaacaatctattcctcctcttcaaccattttacctacaaaatagcatggacactacatt

SEQ ID NO: 641 - DNA, 2979 bp, Cannabis sativa
aagagttgattgctctcttttgagctgtaatgagaatggcactttcattcatttctttctctctttttgtttttctcaacaatattcatttatgttcataattcatgattttcattgaacaatgaaccttacgtttctactttggattttaaataattgtttttttctataaagaatttgggtgataataaaaaataaaagaaagttgaccgattgggtcaacttgttgacccgaccaatccggtcaatccggtcaacctgaactcacgaacatgaaactatttcacgagctgtgtctgagtacaactttttgaacccaaaatccaatcaactcgctcaatgttcaatcctaagagcatctccaatggagagctataaatgtggtgtattgccattttttagaatattttgcaaaaagttaactctaatagtgatctaaaatgtgtgccaaatttggcccaagtaaaaattgtgccaaatttggcacaaaagatagcatgtgctaaattttagcccacaataaatgacacattttttaattacttatttgccactcattaatactatttattaataaaaaatgtttttatatttataagttattaaaataatataaataaagttaattatttgtatatttttaatgaatattaatggtaatattaatttttataattaatttacaccttgtacattggaggacaaatatgaaaattggaccaaatactttatggtatattttaggtcaaatttaacccaaaatggtctaatatatgagcaatatgatactttgtaatgttggaattaattattttttaattgaagggtttagatgcaatattataaagttgttgtccttgtagtgtaaacacaaatcttaaagtaaattccaaagactacacacgtcatctctcaagtaaacatatccacctatcatttagattttctactctgataatccacagcttcaagctttgacaaccatggaggattgctcgcctcatattttactctactccttttcctttactctctcgcattttctttccttgtgacctattatagtatatcatcaattcactactcaccaaaccttttctcatttttctcataactgaactgaaaaaccaaaatgtctcttcgtttctcctcccatgtgttaaatcttcactcggccaagcaccaaactttcttcaatcgtttctcttcagacttcatcaccagaattcaggtaagctccaccactccttacgccttgccatactctcctttgaataagttaagcagagaaaagttcaaccaccaccccattacagcttcagtaaccccaagtgctgaaactgttgaatcatcttcattcagagctaaaaaacccaatgatgttaatgttttggtggtgggttcaactgggtatattgggaaatttgttgttaaagagttaatcaatagagggttcaatgtcatagctgtggctagggagaggagtgggatcaaagggaaaaatagtaaagaagagacattcaatgagttgaaaggagccaatgtgtgcttttcagatgttaccaattttgattgtttggagaaatctttggaaagtttaagtgttcctattgatgttgtggtttcatgtctagctagtcgttcaggtggagttaaggactcatggaagatagattacgaagcaactaagaacagtcttgttgctggtagaaaatttggggcttcccattttgtattgctttcagccatctgtgtgcaaaaaccccttcttgaatttcagcgtgctaagctgaaattcgaggctgagttgatgaaagaagcagaagagaatagtgggttctcttacagcattgtgaggccaactgctttcttcaaaagcttgggtggtcaggttgagttggtgaaagatggcaagccttatgtgatgtttggggatggaaagttgtgtgcttgtaagccaataagtgagccagatttggcttcttttattgctgattgtgttttgagtgaagacaagattaatcaggttttgcccattggaggacctggtaaggcattgacaccattggaacaaggggagatgttgttcaaacttttgggaagagaacccaagtttttgaaagtgccaattgggataatggactttgctattgggattcttgataaccttgtcaagatatttccatcaatggaagatgctgctgagtttggtaagattggaaggtattatgctgctgagagtatgctgattttggaccctgagactggtgaatatagtgctgagatgacaccaagttatggaaacgacactttggaagagttttttgagagagttttgagggaaggaatgagtggacaggaattaggagaacaaactattttttgaaaagaatttgtgctaatggtaataaagtttgtaaacaatggaatggaacacagtcaatttattaaaccagtttcatataatactgtctgtttaattatgtacattatttgagtttcaatcaggggcttttgtttaattatgctctttgtcttctgattattatatgggagatgtttcaatcttctttcaaattgctcgtgtcactagcttttggaatatctagttttgaacaaatctttattattatcttaataaattattgcataggaaagttttgagaaaacgcaacttcttatgacttttggaaacaaggaaaggaattataaacacaagtactacttatattggtttgtgagactttgagaccacaacttgatagagtacttgaacaaatctcttacaactacatgtcaatgaagttcaattacaggattcataaactacagatggtacaatataaaacaatggatcaatgagatatgctgcacaagtagaaaacatatacaaataagatatacacaaatccaaacactgatatctgatataacacaaatccaagacatgaaatggctttgtgaggctttactttggga

SEQ ID NO: 642 - DNA, 2175 bp, Cannabis sativa
aatctttttctgagaaaaatggaagtttttattaaacaaattagtcaattttataatgatatgtcacttaaagagcatatttgatcgaattaataagatagcaaatcataccatttacaaaataggaatgaaaattcgaatcgcaccttcaattaagataccaataaggtgaaagtgttaagaacgctgacagaatcgtttggtggtggtggagcgacagaagtattaaccattggaggatctttgatcagtggtagtagctgaagtgcagcttgtgtatgccccatgattgaattcgatgaagcttcaattgatttcttgaaggtttggtttttcatctgataccatattagttgtggaaaacagagtaaattgttctcattgaatagagagaatgtaaattgtttgttacaatggcaaagtgaattatgcatatgttacgtatatataagcaatgatgcactgtgatatgtttagctaattaattgactaaatcgacttaattaacataattagactgactaaaccgacttaactaacactaagttttaataagaatgcaagatatcaaatcaaataaacataagataaattacacctatcaataactatcataattttttttaataaaaattgggtaataataaccttattatttaatctaaaataaaaaggaaataatcaaacgaccaaccacaacgtaacaattataacaaataatcccatcataaatcatggccaataaaaatcagagaatctcccagatttgaacatgaataaggatagtaatgctactaacacaaacatactttgatccaatagaaattcttctaatatcccaaaaagaaataagactaaaatatcctaccatgaatggataaagctctactactaaatgaggatagtaatgcacaaccaatatatttttagcattttccttgagaaggaaacattacctgaaaattacattgtctcttcggtctattgaccatatttataggttttctacaaggagtgagaaaaagaagctttgcctgaagtccctcgcatttccaacaactctcgtatcacaaattgcaaaaaaacctatcataatgttaagccaactttgttactttggatttggaaagcacgacctaagcattaatatgtgtccaaacttgtttccccgcgagaaactttgcatggactctattacacactaagcccattccctcactaaatctaaatgatagaaaaattgctacaacattctgcttaaggcagccaatcatgaaacacatggaagggagttaagctctgcgattcctatggcgattcgggaacaagctaatgctccctccatgtaaaattaactcgccaaagtttacaagtgccacgaaggaaactttaaaaatatttacatctaagaaaagaaatttgtagttcccacacttcctagattcaacaagcaatttcgaaaactaaaaagtctaaaggcatcaagctttggccgttggaactatgagcttcgaaatgagaaaagaaaagcagaaaaaaaaagcaaataaaagtatggcaagcaatgacaagcatacataaatgagaaaagttgtcttctaagttattacacacgacctcgtggttaaggcatgttcaaagtgtctctgcaaaaaaaaaaaaaaaaaaaagaggttcaaagtaataaaaagaaacgctagaagataaagttatgccttggggttgatcctggacttggtctagaactgaggaagtctcttgaacttggtcttaagcttgaactagaggcacatcatgaggattatcttaagcgagatctaaaaggtcctggggtaggtcttgggcaaaatccgaaaggttttcagtcttatcttgatgaatgtcctaaagagcttgagtagtattccctgaagaaactacaacctcggctgaatgcttcggttcaagatcttcagctaattcctcaacagattcatcatcttcgtcatgtaggctaaattcctcaagataattatcgaagttgatagtctttaccctccaggtgtaatcttcttcatctggtcccagatgcttgagcatagtgagattttctgccacaacatatgaagaagtatcaaataagacatcttcaatgattgaagacaaaacctcttagctcgagcctctattttggta

SEQ ID NO: 643 - DNA, 2697 bp, Cannabis sativa
tttcttcatatccgttactatggtactgcttctatcacaattccccaattccaccaatcttcacctgttgttaatagatttctttctctcttacaaagatgtggaagaacacttgtttctatcaaagccatccatgcacagctctttactcataatatgtccaaggatcagtatttgtgtacaaaactcattgctctttattgtgatttgggtagtttgagtgttgcccacaatgtgtttgatcaattttctcaaccaaaaaccattttgtgcaatgctttgattaatgggtatttgaaaaatgagctgtattttgaggcaattgagttgtttaaaatgatggggttttgtaatttgaagattgatagttatacttgtcattttgtgcttaagtcttgtattgggttgtcagattatgaattgggtttggaagttgtcaaatttgctgttgataagaaaattggaagggagaagtttttggggactgcaataattaattttttggtgaggtttggtaaattagatgatgcaagaagggtttttgatgggatgattgaaagagatgttgtttgttggaattctatgattagtggttatgttcaagctggtcagtttaatgaggcattttttatgttctttaagatgcggaattgtggtattaacccaagtgcactaaccatagttagtttgattcaagcttgtgctagaagtgggaatttagagcttggaaaatgtgttcatggttgtgccattgaattgggaatgacaaatgatgttttggtggttacctcattcatcaatatgtatagtaatttgggtgaaattgagagtgctcacttggtgtttgagacaatgccaaatagaaatttggtctcctggaatgccatgatcttgggatttgttcaaaatggtttggtgcttgaatctatttccttgttcaatagactagtcacaagtggttgcggatttgattcacgaaccatagtgagccttcttcaaggttgttctcaaattgctgatctaaaatgtggaaaaatccttcatggttgtattttcagaaggggtattgaattgaatgtcattttgtctactgcaattgttgatctctattctaaatgtggtgccttaaagcaagcaactttcgtcttcgatagaatggaaaagaggaatgtcgtcacgtggactgctatgcttgtaggattgacacaaaatgggcttgcagaggaagccctgaaactgtttcatcaaatgcaagtagagggggttgtggccaattcagtaactcttgttagtttagttcaatcttgtgctcacttgggttgtttgaggaaaggaagaagtgttcatgctcatttgattcgttgtggatatgcgttcgatgttgttcacatgacagcgttgattgatatgtatgcaaagtgtggaaaaatcagacctgctgaattgatttttaatgaaggttccatttttgaagatgttattatatggaactctatgataacagcttatagtattcatggtcatggcgaaaaagctgttgaactctatcgaaaaatgatggttgaaggagttgagccaaatgaaacctcttttcttgctcttttaactgcttgtagtcactcaggacttgtggaagagggaataagattatttcatagcatggaaagagaccacaaaatcaggcctaccgataagcactatgcgagctttgtggatcttctgagccgagcaggtcgttttgaagaagctgagacattggtcacacaagtgcctttcgaacctggaagttctattcttcaacctttgttaaatggatgtttaactcacaagaacttcgatttgggtttacgaacagctgatagattacttagtttagactctctaaattctgggatttatgttgtcttatcaaacatctatgcccaagcaaaacaatgggatgcagtaaaccatgttcgaagccttatgagaacacaaggattaaagaaaacgccaggatatagctcgatcgaggtagaaagtaaagtttatacattttttgcagcagacgattcgcatcctaactgggcagagatttctgagtatttagagaatttaagattagaagtagaagcatctggctatgtgccggatacaagttgtgttcttcgcgatgttgatgagccaatgaagattaagctgctatggggccatagtgagagactagctattgcatttggactcttaagcacaccagcaggaagctcaattaggattaccaagaacctacgtgtttgtaatgattgtcataatgtgactaaatacatttccaagatagccaggagggaactaattgttagagatgccaatcgttttcatcactttgtcaatggtgtttgctcttgtaatgattattggtaataagaaacaagatttgccaacacattggaatattgttttctgttgttgagtactcttatcataaacagccaacaaagattttagagacaagaaattgaaaagggacaggtatgacagtatactatgatacttaatttccttagtgtgaatatgtttaatattcttttttttccttgcagcaatttaattaaaacttgatttataatgtagtaacttgaagcctctattcccgattcctcccaattcaacacgtactgactctttgctaggttgaatcgatgtggaaacggcgtcgca

SEQ ID NO: 644 - DNA, 3848 bp, Cannabis sativa
tagataaggaagtaaaaatttacggatgagtttacaatgcacttttaaaaaaatttcagtaaaaattttatttatttcagcatgtaagagaattttttaattaaatttattttaataattgtgtacgctataattatttaagattacatatagattttaataaattagtttataatattaaaagtaattatttttcggcactataaattatttaaaattttcttaaaatttacaagtaatcttaaatatgatacaacttatgtgatagataaaaaaaaaataattagcctaaaaaaattataaaaaatctacataacaaccctttaagtataagggtttaatacataaatttccaaaactttatacaacaactttgtaaaactcaattcaagcttcaatctttgtcaatacaaatacaaaatctttccttttttgttttccccaataaagaattacaaaaccaataatttcacataagccaatatcaatatcaaaattacccaaaacagaaatataaggggtgtagttttcatatggttttaccaaatattgcaaagtaccaaaaatccaatacaaacagccatggaaagtgaaaaactcaatgaagatgatgaagaaggtggagctgggatggtgccaaaggctgtttgatatgaaggtgcagcagagtctgatgcagaaggaccataagagggagagaatgctgtggcagtgccattcccaaccaaaatgtaaagcttttgcttcttttcacaatgacctggctttccacttgtgaagaagtattctccttctgaagttatgttaaacaaagaatttccattgtccatgtacaaaattggatctttaaggttgcagctgttgtaggattgtttgctgacttgaatcactgaatcttgacttggtgggtacaaaaacactgaaataaaaatcaaatctttatgtcattaactatcataatggggggaaatagtgtgattttacacatggggtttttttataatgttgaaaaagagaaacttgtatagaaaaaaatgtgtgatttctcagatgggtttttgttaaaatgttgaaaaagagaaagttatatgaaaaaaatgaagtctttgtgatcaaatatcataatggggaaaaatagtgtgatttcccagatgggtttttgttaaaatgttgcataagagaaatttatacggaaaaaaatgaaattttttagtgatcaaatatcataatggggaaaaatagtgtgatttttcagatgggtttttgttaaaatgttgaaaaaagagaaaacttacatagagaatctccattcttgaaagtgtggtattttgaccatttgacatagacttgtggatttgctgaagtgggtattccccaagaatctaaatctccaactttgtacttagaacacaagactttattagcttgaaataataatgtgagcaaaagagaagccaataagagttgatatgtaggacaagtagtagtagtagtacaagtcctaaaaatggccattattgttcctcaaagcttccttaaggtttcctttttcttttcccttttttcctctgaaatatgaaattttgaagtgattcaaagaagtatgaggagtactaaaagagtcactactagcaatcttaaattaatggccttttgtttctagagacagatggtataaagggtaattttacttaaatacccttcttttgaggggacaagttatgctggattttatctttctgagttttagagatcttttaataagttaaaatgtcaaagtcaaacacaatttataaatcaatccaaagatttatttttcattttaattaaaaaaaattagtgatctcttacataagattatcaagctaataaagatttttgtcttgaattttactttgtactaaattatgtattttaaatttttttgaattgttaaaaattttccaatattattaaatgggaaatttaattttttatgcttacatgtgcttaaatatttttttttctaaactcataataactaatatttgtagaatatgacaacttttatgatatcactaaaatacctcccatatacacaatcggaccccccctcatcagacacaatcggacccgtcggaccccatatcggaccccccatcggatcaacgtctcctacctcgcaaacttgcagattcattaatcccatcggaccctatcagacctacatcggaccttgccccagattacagatttgagattctcaaaaacagaacacgaactcacctttgacagaaaattcatgttatacatattcatgttatcggacagcaattggactgccatcggacggcatcgacccgaccaacatgaaaaaattgaaaaaaaaaattaccttagacattgccacaggtgatttgttgccacaccgattgagtctttggtccggtcggtacgtcggttggggcggtcggtgggtgataatggttgagggtgggcggcggtttgggtgggcggcgaagagagagagagagagagatttgaatgagggggtgatttaggaatatagcaattgttgatctatcttactattttaggtttagggaaaaaaatttcccctaatgtatgcataaaaaaacaaaattcattttatttaaatttttttgtctaattttactcatagaagcttgacgtagatgaaagttcagggagaacaaattaataaatgtcaaagtttagagaatacaattcaataaatattaaagttctgaggacacaatttagtacatagataatcgctgctttagtaaacttgaacaaaattagatagaaatctctaaatttaataattttaatagttttaaaaaaaatttgaacaacataaaaaattaaaagagcataatttgatacatatcaaaatttaaaaacaaaaattataattagcatttattttaatatttgagaggcccttatcttaaagggtaaatttggaaaagacatcaatcatatgattattaaggccacttttgataggcatagaaagggcgtgtgtgattgtatgcaaggttggatatttggaataaaatggtaaaagaagggtaggttctcaaaattataaatattatattatataataaaatttcaatggtattattgagaattcatgtgaagaagacaacatcacatgacagaacataagagtagtaatactaatagctatcatcctcacatggctagtctttttgtatattcattcatttccattaacttttgaaaatagccacatctcatcaataagtgagatttcaatgccctaatcaaaccactcttttcatatgcttttccaagattgccctttattgttattattcagaaaccacttgtgttattgtcaacaaataatattgccttaaatacttcatttaaaataaggataataaaaatactcatataattcaatgaaaaatgctaaaagaatactagtagtgcttagcactactataaatgctaaaagaaactactagtacctaattatctcataccgttattgatataattaaaagttaagtcttatattacttaataaaataaattttaaagagtatcaccaaccaatcataaaacatcaatcaattagatgtctcattgcttttaaagtatctggtccacataatataatttgataactattagggaataccattaactatttatgagatatcacttctaatttaatttatattatagataaaaaataccacttaatgagcaattgtaaattattgttttacttatttcattcttttgttatcattagtcccacaactaaactcatcctcattgtttggtaatcctcaaacaattatctt

SEQ ID NO: 645 - DNA, 4242 bp, Cannabis sativa
tttcttgccatgtttcatcaaatgctttgtctatatatgaaaaaaaaaaaggaaacaaaaaagaaacaaaagattactttcgtttcctacaaatgcaatcacatgatagtgatactctattccaactagtgtttacattccagtgcttatcttataggctggaaagattggtgtactgcaaggtgcagaaagatttgatcctgcaagaggttatagattctcaacttatgtccaatactggataagaaaatcaatgtcaagattggtggcccggcatgcaagagggataaaagttccggtatatatttttctcctttttaagaatatcatgtgttttaagagttgattattaatccacttgtttttctttgtatagggtacattaagcaaggcaattaatcggatacagaaaactagaaaagcgatcaccaacagtcgagggaaatgtcaagacgacaatgagatcgcaaagcttactggcctttcgttggataaaatcagatcagctagccaatgcctaagagttgtgggttcagttgatcagaaaataggagaatcctttcaaggaaagtacctggtatgatttaaaatcttctatcttgtcatatcttgaaaatgcaggggtgaagctattattactatttcggtatgattcaaattgtgttgtgactcatgttgcaggagtttatggcagatatgtcaataacaactcccgaagaaactgtaatgagacaacacatgagaaaggatatccataatcttttagcaggcttagattcaagagagaggcaagtgataattttacgttatggccttaataactaccaacctaaatcacttgaggaaatcgggaagctttttcgggtaagcaaggaatggataagaaagatagaaaagaaagctctaacaaagctgaggaatgaagaaatcaacagtgatttaagtcagtactcaaaatttacatactagattaatagagagtctctatggttaacttgtgaagatccaatatttctgttaccctgttgcacatagatattgaaattcacttttacagtagaaaagtttgaattctttttgatctatactgatggattattattaactaccatcatcatctggaagagaaacaagaactcagtctaaagaagaagaagaagaaaagagctccctttgctcttatctggcctaaatcgggcttcggaacatgtgattgaagtttgttgatcacggtacataacagtaaaaaaaaaaaatcagttagaggtgctcctgtgtaaggggcaacgtaatgtggccagagaatacgcggttttagctaccgaacaaatgtatttcatagctctcctttcctgtaaagcataatttttgaccaatagctacatgaacacatattacattttgtcgagaatcgtatttgtagctactgttgttatcaatactgtaaaatctatatcttctggtgcttcatattttaaatcttccacattttcagtcatgtatttgcaccattactgttgttgtaatgtttcagttctctagccttagggattgggagattccacgctacccaaattcattgttttctcagctatttactgataaaataaaacctcagcaatttttactgaaacattaatcattttaaagagaaaattaaaaactatatatttatttttggaaaatttatgcaaaccacctaaaattgctttttcttctttttttttttttatgaatatttttctttttatatttttacggaaggttgatttttaatttttttaattacatcttttcagaaaacaaggttatttttaagaaacttggtataatgcagcagaaaccactttaaaaattgagactgaaatttattattattattttttgagatggaaattattcttattattatggaaagttaagttttgtccttaaataataatataaaaattaaggatgtactcaaaagacacgggtgccaaaaaataaggatgcactcaaaagagaaacacttaaataaataaaataaaaataatatagttatataattatttgttttaacggttataacggtaaaactctctcttccaaaacaaaccttcccaattacatgcaaaatctttcttcttctcttttcttaatttttgcagatcaaacattattaactttttattttccttttctctttcaacctagaaatcgagctacctgctttcttattttatcatttttttctttttttaacaatgaacattcattgataataattatcatttcaaatatacatatatataaattcaaataaatatatagatttacggttctgagatttcaacaccaatatttggaaccacgtaaaaggtggtggcaacgtaagaaattcttattatctgattttatttatttgtgattatgttcaaatttcatttatttattccatattgaaatttctttaggcaaaaagtattatgtgggatgttgataattgattaatcacaattagcaatctttatttataaaaaagaaagatcatagattgaaatatagagggtattgattttgatctttgtttcttgttagtaggtgatttaaattggaaaaaaaataaaagaaaaaaagtttgattcttaatccttggaaatctggtgtggtacctatgtaaccaattcatcaaaaatgtttgattgtggatacaagtctcagtacattggtggccaaagacaaaaatttgtaaggtaacataatcaagtttcactttttgttcttagaatttgttaaggtagattgttatatttcaaaatcaattggccacgagaagagaagagaagagtagctcatttatcttatatatggtatttttttatgagactaattctaatgataatgtgattgaaaacatttgtaggttggatgagctagagtctacattgtcagtgacagctcccagtgccaccgaaatgaagcgttgtaaattcaatctcgacggattaccattacccttcaccggtcgatcaaagaaaaatgcatcgaaatcatttaggtatggagtgaagaaaggttcagatggacttttaacatttggtagatcattaagaagtggagtaacaagagcagttttcccagaagatcttaaagtttctgataaaactatatttgatcctcaagataaatccctcttgttatggaatagactctttgttatatcttgtatcttagcagtttctattgatcctttctttttctaccttcctgttttcaaccataaatcattttgtcttggaatggatacaaaattagctgttacaaccacaactcttcgaactgttgtagacattttcttccttattcgaatggctcttcagttcaggacagcttttattgccccatcatctcgagtttttggaagaggtgaacttgtcattgatcctcatcagatagctatgagatatttacaacgttatttcattgttgatttcctctctgtgcttccctttccacaggtttggacacaacaaaaaaccacccgaaatttgatcaataagatactccaaccccttttgttgtaaatgataactaagtttaatgctattgcagattgtagtttggaagtttcttcagagatcaaaaggctcagatgttttgacaaccaaacaaatgttgttatgcattgtctgtttacagctcttaccaagattttttcggttaataccgttaacttcagaccttaaaaaaacagctggtgcttttgctgaaagtgcttgggctggtgctgcttattacttgctctggtttatgctctctggtcaagtaagcatttttataacactatacccgccttagcttaggttcggccctgctaaaatctgtagccatttcacaggtaactggggctatttggtacttactagctgtagaacgaaacgacacgtgttggagggaagcttgtcaccgcagtggaaaatgtaagatagattttttgtactgcgggaacaaacacatggagggttacagtgattggcaaggcatcagtgaacaggttcttaacactcattgttctgttgctcctgattcaccatcacaattcaagtatggaatctacactcaagctatagcttctggcattgttgaatcaaggaactttttctcaaagttctgctattgtttatggtggggaatgcaaaacttgaggtgcattacctttcttttcttctttacagtacttaaaaagacaggtttgagtag

SEQ ID NO: 646 - DNA, 2174 bp, Cannabis sativa
ataatttaaacagacttttctttttaaccgagctacatatattgatatgtaattaatttttaaccatataactaaaattgatatggtccatacatataaaaataacgaaaatatatagctaatatttaatacattgataattaagtactgtgtgtaatttgagagtgtgttgtaacaatattaaatatattatatgtaatataggttaggccaaattaagttgatataatttatttagagtgatttggttaagaaataaaattagattaacgtaaagggaataatattctctatctctatctatgttagatatttaatcttctagctagctaagctatgtcaataatggtcaacgaaaattaaacttccaccctaatttagtcacttcaaatacgtcaaatggttttctcaacgtccactagcacgttatatattctatgtagatgccaatgggatttaaatttatcaatatatatgtttttgtgacacgataaattatataaaaatacacttcttgtttctgtaaaatatcccaatatatatccaaagtaaataaatattttacttttttgggatttctttgcaataatcaatacttgatcaaaatggcaattaaaaaacagcataattactatgttgcttgctaatgccatatatttaatttggtgaagttgagttaaaaattagaagtctgttgttggaactttccctcagtaatctatttttgtcataagagaatatatatttatatatattttttaaagacgaaaaagttaaatgaaaagttgcatggaagtctatactatccatatatatatataattagtgcttgttagcttatcttttgacaaattaattaaacaaattaaaaagacctaatttaatttgaacacaaaacttccttattggacctactacttatacagttatatcattccaaatacatgatgaactaattaaaataggtacgtattatatattttacaaaatcacatgtgccgccatgcttgtggttgtgggttccaagctagctagatagcttcaaggagagagtactatactatatatatatatttatttataatataaatatataaaaactactattagctagtactatacttcctcatttgacttagtatatattttttgagtgcaaacaactatattatccacttgagggagttagtcaataaaaaatggaaatgtgagtttctcaatatcttatcttgaatatattttaataatttcacccccaaacaaaagcaccccactatttaaatgtgttcacaaatgaaattttaaaaaaatatagaaaacagaaaataattgggtgaaaacgatttggagtccaaccaccaactaacatatataatttgcatcacaacacacatgggtattgagcattagaactgatccctttcatccatgacgcatggtcatactggctgtatggcacttggatattacactacgcactcaactatttgatgtacatataccattttgacatcatttataagattttgattacttgtcatgccacagatgaacttgtatatttgggaatttgttatggcccatgttgtatagatatgtaattaattaatggcaataaattagggtttgctaggacttttagatcgggtggagagagtagtgtgaactgagtggcacttgtacagattgtattcgttgttacaaaaataattgtcgaaagtgcaatgctgacgaggacactcttgtgatatataacgtttttcctactttcatattcctaattttcttttctttttttttttttttttgcttaacaaaatgaaattataaaattaatggtcataaaatgagaacaaaatgaaaatattctagttttagcttaaatggaataatatatatatataaaaaataacaaaaaaagtaatgaatttatactataatgtgaggtacttcttttcgtttcatgcgacaaaattaatattatgcgctaattgtagacgggacgtgatgcgaggccaatgatgattaggatagacttgtccaaattaaatcccatttcagaaagaaattataattaatatggatggttgtattaattgagaagtacatgatggtcatagcctttggggtgcggtgctgtacatggtcgccctggtagagtagtgtggtggctt

SEQ ID NO: 647 - DNA, 7716 bp, Cannabis sativa
tctctctctctctctcttcatacttctcactttcaaaatacattctcattttaatactgaagagagccatagctaaaaattacaaggttctagcctataatctgcttggtattattttaagagtgaatataactaaaaggagaataagtcattacttgatcaaagtggtcaaacctctataaattctggtgtctttatatttattatcattccacaagtaatagccataagtgaaattcgatcctagtaagactttgtgtcggttggctaaatttaaagtcaacaaattgtatttaaagtgttatttataattattaagaattaaataaatacttaaatataatacataaaaattttaattattatttattaattataattatatataattaaattaaaaaagaatcaccccatataccattttttaactttttttttatttttacagtttgggttgctttggtgattaatatgtgggttgctatgtggatttgagttgtaatttaagttgctctgttggttgctatgtgggttgctatgtaaatttctgtaaaaaaatattaaaaaaaaaccctaaattataatatacatatatattaagtttttcaaaactttagaacttagacatacattttgaattcaatatatataatatttataatatataattaattaaaaataatattttatttaattacatatgtatataataagaaagtaattagatctaagattatctaaattaaattttgagtgagatgcaatctcacccctcaaaataattcattatattattttaattaaataaatatttttaacataaatctatttgattgcctatataaacggagagattaaaaaaattcatataacacaacaacacacaattggcttttcttttcttctcttttttatgcaattttcaaatagcctacttcctataggaattcgaaaatcttctactctcttcctcaaagtttctagctacaatcttattcttagtaattgaaaaattgccccttgtcatgtgtgatacccagagaactgtgaaacactatatatatacatattcaaagaaaaataagattcacgttcagtacttggtgatactctgcaacataaaggattcaagagttacagtattgaacagaataagtccattattctgttgtgacactgctgtaagtatactcaaacttaaagtgtttatattctagaaaagcatgttctagtttgttaaattattagtttatgttgatgcggtttttcgtcaactgatctaagaagatcgtaaaaaaaataaagagaatcacagtgaattaatttgactaataaaactgtaataaattaaattgacactatggatttatagtagttcacctcccccatgtcgtgacgatgatggggctatgtctactttttattttgattaattaggtctgacacaccagaattatgttctcaagagtgtgtggataaaaatataacaaaagatttttagtagaaatcctaaacgacatttatgaatataagactcatgggagacttgatattcataaatctgatctaaattagtggttgtaaggttcttgggaagaataaatcaataaagtgtaaagaaatgtgtgtatcaatggtgttttgaggtctggtgtcaactgagtatggtggacttcaatggaaaatatgaaggaataagtgtggtgttcttggctgccatcaagtgagtctctaagagaggtttcagaaaaaggatccaagagagtccaaaagaagatcccccttttagcctcttacttctccttatataggttgtagagtttgttagtgatccccacatgtcgagatgtctctctaacaaattccgtataccattccttttaatgaataaatattacaagaaaataaatatatataaaaacctcctcgtttctaagcaaaaattccacaaatattaggaaagttattattttcggttgaggatgcaccaatttgaaatggagtgatgggatatcccctctatactggaaatgcatgatattggcaataaatactgaaaaacatgtgttttggagtgtcaatgctcgcatacaatgccacatgggctgtggcattgtccttcaacaaccctcacttaaccacattactcaattcccgagtaaaatgtaccagtttgcattttgagccaattttagacttgataacttcaaaattgggctatgactatgatacactatctttccaatgcaagttgaatcaggtcatttggataaaaattaagagagttatgcctattttactgaaggcagattatgttgtcttgtaccagttacgagcactgacatggccaaatggaagtgctcgactgtgcatgttctcggactcctcagggtgtgttttgacttttttttaatggtgaatcatattttgggggtcccaggactcaaaaaattcattccgatgtctgaaaccctaacgggagaccattgccaccagctggagccaggaagtggcaatggtcggccatggcttgtgggaagccatgggtggtgtttttttacttgtatttgatacatggatgttgaaaatacaatttgtccaatgaaactcctttccttatgtagtggccgaccactgccactctgttatggcagtgcccatcgaaattgatgggcactgccatttcctcatggcagtcgtcggataaggactttatgaagccttgggtgacttttttcacttttatttgatacatagatgttaaaaatttaacttggccaatgaacccttttccttatgcagggccgaccactacactccattgtggcagtggccatcaaaatttatgggcattgccatttccttatggtagtggttggccaagtggtttctataccacttggtgacttttttcacttagttttgacatattatcggtgaaaatgtattgttggaaaaaaaatctcacttcccctcttcatggtcgaccactgccatctccttggggtattgcccatcaaaattgatgagcactgtcgtttccttatggaagtggtcggttagggtaaatcctaggtgagaaatggtttctctcacttgtttttcactccttggtgttgagggaacccatttgaataattttccctcgtggtttgtaaggagcgaccactgccattcccttgtggcagtgctcgtcaaaattgaagagcattgccatttccttgtggtagtgcccatcaaaattgatggacactgccacttccatatggtagtgggtgcatatgccttttttcttgaggatttgatgtcgttgactttatgcacaaacccaagtcatatttatgcctaaatgagtcaagtccttgttggtttccttagcgaattgagatttctagggtgaaaatattcatgtgggtccatgaatcctagtttgggcacacttgggtgtgtgagtcccgacattaaatggttggtcgatattttcgagtcctctagaagtgtcatggggccctcaagaaggatgtcttaattcatttgacatttttataagtcttggtcaaagttgcaagattacttgagtgtcttcaaagtactcttggcatgtgggtccttgtgcgagagtagccattttatttttttggcgaaaaattgggtataacagtttataatcaatatatgtgatagtaaataagatcctgataaaataagttccaacagctagccttagagcatttggtaatttttactttcatgcatgaatatgtttaaaacagatttacatgtttatatgtgatttggatgccatgtgaattgtttgcaaatttgatgaattttagtgaaatttatgcatatttcataaaaaaaaaaaaattattaggcttgtttaaggctttgaaatattttagaaactacttttcattgaaaattatgcttaaaaaattggggttgttttgggtgtacttaatctgcgcgcatgggccttgggacacctcgactgaaccatgtgctagtgctaccccttagttcatttcatgtctcagcatgctcaaggtcacaccatctcggcatccccaagatgcggaccctctcggcatgtctgagatcaaaacatctctgtatgctcaaagtcactacatctcaacatgcccaagatagggaccctctcaacatgcccaagatcatagcttctcgacatgctcaaggtcgcaccatctcgacatacccgagatgaggatcctcttggcatgccaaagatcacaatgtctcaacatgctcaagttcacaccatctcgacatgccctagtcttcgccaacttggcatgcaagacatctcggcatgcatgcataagggcatctcggcatgccctaatctttgccaacttggcatgcatgcataagggcatctcgacatgccttatttttttgccaactcgacatgcatgcataagggcatctcaacatgccctagtattcaccaactcagcatgcatgcataagggcatcttggcatcccctaatcttcaccaactggacatgcatcttcgtgaggtatcccagcacatacatcattgacaacacctcgataatgtgtttgacactgagcgtctcaaccatgagctattacatccctcaacaactccaccaacacttagctgtgaaatgctccctaagtgttgagaagaaaatcattggacaaagagtcgaaaggacgaagtatgcacgcagtcgagtacatgtaaggatacgaccacaccacctgcaaggcttgaatttcaatggaaagtacaagtagtggaggcaccctgcctacacaccctaacatcccgacaaggggtacgttgtaaccgctacctctgcgcgttgggaccacctgacaccttacagccactacttggcacaagaccacctcctacaacttgttacctgtaggagtacaatgtccttgtcacctttggaccactagggcatcatcttgtaaataagagccaatagaactcatataaatacctcatttaggatttgaaaatgggttggaaaatctttgtaaacaagacatttttgagtgtaatagaaattcttactccttctccatttactttcagcaactcacttaatattctgaagttcatttacatttattttcattctagcttaacttttaatttttggccataactttgttgacaaaaaccaatcatcaacaaaaaccattcgcgcaatcacgtcgaggcaaagaagacaacctgcagcacaaagaagaaataagaatggcaaaagaggatcaccttatcttagacccctaccaagaacggcccaaataaaaacctcttcgttcaaattgaaagagtagtccacaaacaaattgaggcaaaaaccaaagttaaccatctttcattgaaactcccaacttcctcacatggcagcgaaggtaagaccattgacatgctcataggtcttggacatgtcaagcttaaatacaaagccctagtattacttttaaattttctctttaaatggttaacacattcaaaccaattatagtattatcagtgttcaacctaccaagaaagaaagtactctgctcttcaaaagtaatcaaaccaaaaatttctcgcaatctgtttgtcatagctttagcaataattttgtaaggaatattacacaatttaacaggcctaaaatctaaagctttacgaggaacctcaacttttaaaataagagaaatcagagtcgaattacgatcaacaatactaccattctcattcaaaaatctctatctaaaatctttacgagaaccgttattagaatataattttctgttgggcatctatgagattattgtcattaatcttcacataaaatcttattataaaactaaaaaccaattgaacgagctacaatcatttgctcatgtgttcaaccattaatttatgtcaactaagctcgaaatgttgttttaagcaggatgaacatttttcttcaaaatattataagttcagaaaaaaaaaaaatatttatctagtagaattgatgattaaggcaacttttgtcagctaacttcatagaaactttggtcaaacgaactttatcattagttatagaaatctaggagacaaaaaccaaaagctaggaatcgaaatgtccatttcatgtgtggtttgttagtgaaagagtcataatctagtgctaccatcccattcccacacaatgctgcaatgattatcagccacaacagcaggtgaatcattatcagcaagaggtggagttgttccctttctgaaaacagcaatctgggaggcgaaaccgggttccacttcaccggaaccaccgaccccactgaactcaacgctgtaattgtgtttagtggccaagtctgacgcccactgctggaactgctctctagtccactcgaacttatggtcgtgattacgaaatttacaggcttgagactgagttttgtcttctggatcttcttcttggtttgatagattagatctctggagtatgacattgtattcgtagttcggagtagacacaatcagaatcttcggacaaaagtaactcaacacaacgtcaccaaacagccatgcttgatcttcctccatatgctcaattacctatagcatcattaagtttaataaaatgaataagtgcataataattgcacagtttacttagtgttataaactaatgataactaatttttttggccaggcatgttgaaagtacaataaatatcaaatctcatactcagaaggcattacctctaaacaagtaccaatatcaaaaccacacaatcgaggatcgaattctgttatggaaccatcgtatagaatcgcagactttataccagcacaagcttcatttgcatttagtttagaatgtagtatctacaccattaacaaaaaagatggtgtcaaatggatatcttaagagcacaacaaatgacagggagtgatacaacttattttgctaaattttttaaacacgaatagcacaaaagcggataatgagacgtacttttgctgcacgtataagacttttgtgagaaatatcaatgccaacaattttttcaagagaagtctgataattcaataaagaatccaacaaacttccagagccacatccaaaatcaacctgcaacaagtgagaagaagatcaaactactgttgtatattaagtaatgaacattgaaaaatatggagaaacacatattcagttaccaaagtagtagcacaggtttgcctgatgtgttggactgcatattcaactcgctgctttgaaagcgggggactaaacagtgccttctccattctgtcttccaaaggttctgttacttgatataaagttatagtgtactccaagcagcagtcttctgcattaccgaaagtcagattaaatacttcggcacaaaagtacattgaacaaaagagaaaaagaagagaaaaacttacttgcagacagcaaagaaagaaccctttcagaatcatctgtggcagctaaaattaactcttgagaatgcacacccataggtaaaatagctgactgcccaacagtcattaacataatagctgcttcaatttggtgtatcactgaactagatccaatctcaaactcaaattcatcattgtgttcaagaagttctttcgtgtttgtacttttgatcaccaacatcactgaataacttatacacgctaacgatccattagatggaga

SEQ ID NO: 648 - DNA, 2436 bp, Cannabis sativa
agtgacgcacacccatacataatataaaaggcggaaaaggtaaagaacacacatgatgtcatttaaccatagagggtcgtagaagagggttcaagtagaaagcaatatcagcatgctcacagtacctgcagaatgtcatataagtgctatagattttaacaacaatcactaacaaaccaaaagttccaaatggtatcatgaagcggaagtcttcgtcttctaaaaacacattccaagaccataataatttgtatacgtggacccaacaaccaatagaacgtataaatgtacttaatgtagaacaggggttactgtgatccgtggcctctatggagcagtcaaaatggatcttcatgaaggaactagaagtactattctagccaaatgtttgcacggtgcaaacataataaaataagcaaataacacgacatagaaacaccatcaatttttctagactagaaaaaaaggctttaacacatacctccagaagatctgtttgtacaaggtttccactcgccacttttataggaatgtttccatatagttgagatctgcatggattttgctagcgtatgtaagtacttactagtataaaagtagaaaacaaaagtactaataggcaaaagagagaaaaaaaaaaaaaaaaactatggcactttagaaaaatagcaaataatgccttattataagaaaatacatcataattatggaactcaaaaattcagcaagccaaagaaagacataagataataaaacagatttgatatttttttcaactgccaattagcaagaaagactcaacaacgtcaatagttgtcaacaggtaaattatgatacagttcaacaacagcatcggagctaattgccaaaagttttcagagtaacaaagtgaacttatcttggaatcaaataatactattgcaactaaacaaaagccaaaaggtcatgaacaccaaagctcccagcaaacatactaaagttcacctcaacctcaaataattaacaaatcaaatcctacagagttttctttctctttcccaattcgaaaatggaattaagttatattaaaggcacaatatttttgtctcaatccccatttttttgtgatacacctaatgggtaaacaccagtagactgaacaaaaaaaaaagtgtacaaaactatgcacaagaactttttcacctagataattatatatcggtttccctatatgttgtttctcacttttaaacacttcggatcctaaaacctttattggtttcttcttcctgatgtttgttttctccaaagtcaacatgcaatataggtttcttcttccaaaagtttgtttgttccaaagtcattatgcaatatacagccacaatacacataatatcaactaataccctcccacgtaggataggattgagcttacattaatgttatgaccgcatttaatacaaactagcagccagactctgcaatataccgcattgatacagagtttcacattcaatcagccgccagaatcatgacttcccttgcttaaccctgagtttaagaacttgaacaacttcacctttactaatattacctttgggtgtacaccaaaaacaacaatctgaaattccttgagcatctaagaatgagtaatgctaaagataagtatatgctttaaaaccgttccgttcttttgcttctctttttctatctaaatctattaaaaaactatatagaaaggttgatgagccaagccaagtacgcaaaacaacaaaaagaatttatttttcggcttttctctttcggatgacccttttccttcgtttaaagaaaattaaaaagtaaaaaaaatggcacaagatcaaactcagagagatacagaaacccaacccagaagatcaacctgatttcagaaatagcaaagaaaaaatgaaatctcatttaatcaagaaattcactctaaagatcaagaattgaacaagaacccgcattctaaatcctccctaatcgaacaactaacccgaattcaaatcaagaaacgccaaaagaatcaaggagcaattaccattaactcaatcacaatcattgcctaagtacgaaatcaaaataaacaaccgaaacccaaatcaagaaaaagcaaaacaaaaacaaaccgcatcggtagaagtgttatcagcatccatctcgggtcggagcttggcataaagctgggggctgcgatacaaagaaccaggggcgggtcgatgcttgatgaccggaacaacgtcaaacgagacagaacccatgtataacaacatgccagagatgtaaagaagcggagcgaagagaaaaactccctggcggcgaataagtacagagagaatgtgccaggtgaatcgctggagcaagctccgaccaggcgggttaaaccgaccggtcttagaccgaccgtggcgcaaccgaggcgaccgtatcggc

SEQ ID NO: 649 - DNA, 1809 bp, Cannabis sativa
aaacagaagttatcacttctatttattctgtttagctttgatattcagctccaaattatatatattaataaatctggatctcatcaactgaaaattaaaattatatatgatatgtacctttagttctcagctggtaattgatcgcagttggttgatcttagtcttactgttgccaatcgatcaagtcaacttcagtagtctccagtcaatatgttcccaataccaagaaatgagaagctaatacattattttttttttctgtaagggtcataacataataataatagaaaaaaaagttattacaaaagtaaaaggaatggttcatgttcatctcctcaattgaaaagaaaagaaaaaagttatatctaatttgtggtctgagataagatatgttgtaatgtttatatgatcaaatatgtatggtgagaatttaattaagggataatttcacaaataacaaaaataataaaaatatggtttcacgtaattttaaatttgattttatttacataaaatagagtatttttatattaaaattttatttaaatgaacacttaaatatcacaatcattgccattcaaaaaaaaaaaaaaatatcacaattattgtaattaaccaaacaaaccacacaacaactcaggaaaaacaagttttaaagaaaaatacaacaataaattgattaaacaagcaagcaaattagaaaacataaaatctatttaatgatagtaaatacagtttgtacgatagtaagaatgagtagtatagctgctgcagaaactgaaataaatgcccatggatgtctgaaatagtcatgtatgagcactcttcgatatcttggccatcgacgttgacaatacttattcacctcattcacaagatcaaaataatagaaacgatctacactagtatcattaacgattcggttaagaaatacagctgtctcctcattatctatccagttttcaataattttttcctttgagaatatttcaacatctttcctggaattaataagataatccaaaaatgtaaggtaagaattgattacttcttcacaaaagggaagacactgctcgaagcatattagattccgaaatagagactctgtgtcatcttgaatgaatagagaaggaatctccattacaccattgttgaatttaatatccaaaatattattactaatttcagccttcttgaactttattcctgcctcaaccaaaattgtagctgatggtaaaacttgccactcatcgttcgataaagtatttgtttcttgttttgctatactagatggcaaaaccaacgagttccttaatagatcaagaatgtgcaagttttcatatttgtgaacctcttgacaaatttctacccctttgaagaaatttgtgactagtgtaatcaaagggaagtttacatgatctggagttatgatctttttgaacagagattcaagaactagccaaggtatttggttttccaacaaaatcaaatcatgagttagcattgacatcatgcaattcacaccaaaaatggggtcattttctcctataagctcatcattgttgtctttgcaaaacaattcaatgatgaagcaaccatcgataaccataacttttataaattcatccatactcattttgattgatccttcgtagcactctcgagcttcctcttgaagttctctaatggttgttgtgagttcattcaatttggtcttgggatttgtgtttggaaaacgagaaatgagttcatgcaaatacctcagtttgattttctgagtggttttcaaatgtagttggttgtagtgaa

SEQ ID NO: 650 - DNA, 4584 bp, Cannabis sativa
agagagagagagagagagatgtcggggtgggacgagggagcgatctactacagcgaccaggcgcagtcgctcggcgatggttccggtggactcggtgatcatgccgccggtggaaacgccagtaaccactcagtccttctcaagttcaaggaattcattcgaagcttcgagaccgataagaacgtctttccttacagagaaagcctccttcataactccaagttccttctcgttgatcttgaagacctccactccttcgactctgatctccctgctaagcttcgttctgctccggctgattttttaccattggtactcatagttacttttgtttgttggattgtctttaattttgtaatattttcagtgattgaacatcatttcgtgttacttttatggctgtagtttgagaatgcggcgggccaggttttggcgaatttgaaaacgaaggtggccggaaatgaagggcaactggaggagccagtcccggaggacgtccagattttgctcacttcgagggaggattcagtatcgatgcgctcgcttggggtgagtttttcttttgtaaaaatttgtgcaaatggatttggtttggggagtaatttcgcatattctacctgattaatgtataataatcattgtaaaatgataataatatgggttctgttttaagtgtttttgagatctttattgttgttatgaacaggctcaatacatatcaaaactcgtcaaaatagctggtatcactatagctgcttcgagggttaaagccaaagcgacttatgtgactgtgatgtgtaagaattgtaaaaacgtgcagagagttccatgtaggccaggccttgggggagctattgtccctcgctcatgtaaccatgttcctcaggtttagcctcctaccaactaccaagcttcctttttttatttttccattaaattcctaaggcctggaaattgattacagcccacttgtaacttttgtaggctggagaagagccatgcccaattgatccatgggttgtggttcctgataggagcaagtatgttgatcagcaaaccttgaaactacaggaaaacccagaggtaagaaaattagcttgatgatgaaagtttgaggcagggtgattgactcaccggaaacaattgaagcaaatatatttctctcatatctaactgttttttttcctggttattgaaggatgtacctactggtgaacttcctagaaacatgcttttatctgtggaccgccatcttgttcaaacaattgtacctggaactagattaactattatgggaatatacagtatctaccaagctgcaaattcttctacatcgtaagtaatgttaaaaccttgagactactgtataatgaggtattttctgtttgtgattgctgaatatggaatattttgttatggttgctgcaggcacaaaggagcagttgctgtaaggcagccttatatcagaattgtaggaattgaagaagcaaatgatgccaactctcgtggtccagcagcctttacctcagaagaggtaatagttggaatcattcttatgtgaacttatttgaaagatacttttaccagttgattcacatgagggctgagtgaatgttggttatgtatacatgttcattgtttgttacaatagattatattcgatactttcattattttcctgttttcagttttaaaattttaacaaagtttttttctcataaaaaaaataatagatagaagaattcaagaagtttgccgcagaacaggatgtatacaaaaacatatgctcaaaaattgcaccctccatatttggtcatgaggatgtaaagaaggctgtggcttgccttttgtttggaggatcaaggaaggtatattggaagctaaaaatattatatttcttttccatatagtgtttacatatcgtaataattcatttctgcaagcagagtttgccagacggtgtaaagctaaggggggatatcaatgtattgcttttgggagatccatctactgctaaatcacaggtttgatctgttttatgctgttcatgggtcaattggttttatattgtgcactaatgtggtattgctttgtttgtaaagttcctcaagtttgttgagaagacagctcctgtggctgtttatacatcaggaaaaggttcatctgctgctggtcttactgcttctgtaatcagagatagtagtacagtgcgttcttgatctgagaaacttgtttgtcttatcttttagccttggagtgtcgtactgatactaatggataagtttcccatcagtattttggattgaaagttttctgatttcattaacctctgcctttccagcgtgagttctatcttgaaggaggagccatggttttggcagatgggggtgttgtctgtattgatgagtttgacaaaatgaggccagaagataggtaattcaagctagaaatatgccctgtttaacctttacgttgtaatgagactaaaaaagtgtatacttgatgttgcatagggttgccatccacgaagccatggagcagcaaaccatatccattgctaaagcaggaataacgactgttcttaattctagaacatctgtccttgcagctgctaaccccccatctggacgttatgatgatctcaaggtctgtggtcacctgattcaacacttctattagtttgttcaatgcatagttactttctgctgtgaactgattaaaaaagctacttctttccagactgcacaggataacattgatttgcagacaacaattctttctagatttgatttaatcttcattgtcaaagatatcaggatgtacagtcaagataaggtaatttattacaatgcttctaatcaagaaaaatgcactcagtttattaaattttttattcacttcattatggattatcttacttttgagcataactatggaaatagctacttgatttagttttcattcatatcagattattgcaagccacattataaaagttcatgcatctgctggtgcgaatctcggtgacaatagagttgttgcaaaagaagaaaattggctgaagaggttagcaataagatctaatgagcattgaattatgaacaatattttcttcctaatacttgtgagttctttttactctttattgcaatcttgtaggtacatacaatattgtcgaactggatgtcatccccggttatcagattctgcatccaccttgctacaaaataattatgttaaaatcagacaggtattcttagatctcacttgtacaatgttcaaggaaattggtttaaaattactagccaactgctcaccgttaccattcacaaacataacgtattcagtatgcatgcctccataatcagtccacttttaatgggttttctttataggacatgagacggcaggcaaatgaaactggcgagggttcagcaatccctataacagtgaggcagcttgaagctattgtaagattgagtgaatcacttgcaaaaatgaaactgtaagtgctattcataactttatattatgggcttgttgttttgatgattagatactccaagttataataattcagtgtagttaattttattcaataatccatcttacaaaaaaaaatatttagcaatccaagttttcaacctagtgtttagactttggatactcatgaaatagggtaaagactgttcttgtaatttatataacatgataatgacattaactttgatttcaggtctcatgtggctactgaagaaaatgtacaagaagctttaagactttttacagtttcaacaatggatgctgcaaagtctggaataaatcaacaaattaatcttactgccgaaatggcaaatgaaataaaggtctttatatattttgtgcagttagtattataattctcttgcttttctaataattattaaaattaatgtatttatttcccgctaaacagcaagcggaaactcagataaagagaagaataggcattgggaaccacatatcagagaggaagctgattgatgagcttgctagaatgggaatgaacgagtctactgtaagtatcatgttagaaatttctaatttggttcttcgatctttaaagcctttaggtacatttttctgttgtgttaattgaatatttttcacaggtgagaagagctcttataatcatgcaccaaagagatgaagttgagtacaagagagagaggcggcttattttgcgcaaagcatgatcatttgcaacatgtacttcttaattcacactatatatgcctagtcttattatctatgtgtttattattacattaatttatgattcagtatgttaaatgagaccaagtttcactgatctagttgttatactattcattacatcttagttgattattggagtttatacagtgtttgattatgaaaactgtctaaagagcatgtgtgtatatataaacagggtttgatgattgatatacaatttaaaatgagatatgcggatagtaatttattaaatcaacatatcttacaactgcagtactgttgggattagatccatatactgactccaaatttgatgtttctcttaga

SEQ ID NO: 651 - DNA, 1281 bp, Cannabis sativa
aatgatgagaatcacgactatgatgaataatagcatccatatagggttataaaaactgaggtaataagactattagaggaccagaagaagagtgaaaggtggaaaagataaaaagataagcacaaaaagaaaaaaagaaaaaaacaaacaatatattcataaataaataaataaataaattgctagcttgcttgctcgatcgatcgagcatagggaataagaaagatattagattatgatatattttaatttatttatatgttcattcagatccatttaatattccctggattattttgtttgtctgtaatctcaatgtttttttcctaaatgaccaagaatttactttccaaggcatctttgaaggaatttaaatatttttgtcatgacataagacatacttaatttaatatgaaaaaaaagtctcaaataggcatcatcatctcaaggattaggttgggctacaagacaaccaaatttgactcgaaaatatgtgcatatatatttagtttgagaaatgttataaaagaattatattattggtgtttaatattatcggatccaaaatatttaaaattaaaataagtaaaatccttataatatagttaatagctgtaattaattaaatcattaaatagagggagcgagggagagagagattgatctagttatttttttatgaatatagtaagacaaatattcgaagtatataataaagtaagtttgggggagaaggaaattgggtctcgtgcagttaagaaaatgaggaattttctattaatgtatatagtactattattgtatttcgatctatgtaagtaagtaatagtgacaaaagaataggttaataagaaataaagaaatgagcagagaattcataatataggacaacttggttccactgacccgtcaaatataattcttgaccgggttatgcgccatattaatattaatatagtattataatatctaatagaatagttttaattactatagctaacttcttcaaaagttggtatgtgtcgctctatactattattgatttgtttaaccaaaaaaaataatggaagtgttcatattacgtaagttcatatcccctaattcccttttaacgttatgatggtgcatattatacctgactattattattaatatgatggaattcttagtttataattatgtgcgcctacatttttagctactagcaaatttagaggttatttggctgtctttactttttcagttttcaaaaatagaataaatttttgttttttttttttt

SEQ ID NO: 652 - DNA, 2182 bp, Cannabis sativa
ccaggtgcatggcgggaatatcaacaggcgcgtacactacaagcgatcccgcctcgtctatgcaagtctcctgcagaatcagcatgctgctctggtttgtgttcatagcctgaatacaagagcaaaataaaaaactattgaaaccaaaaaaaaaaaaaaaggaagaaacctacttcctcacaatatttacaataatgccacaacctctgacaattgctgctatatttttttaacctcttatcctcagaaaaaagggtttcagttttcagtgatagataagtcaaaccccgaaaaagccatattttcctttttacccaatgttttattattttgattattatattatatgaggtcagaagctaactcggaaaggcgagagccgtcctatagttttgacttttggacaaaagttaccgaaacaaacactgtcctatctcatatcatttgtccctaatgcaagccatgaacgtgttatgcataaccctaaataaatgtcctgactatgctcatagatacttccaaaccaaacccactcataactttcacctatttccagccccactgacgtggcagtgacaaaccaacaaaacaataataataataggagtaatagtaatagtaataatattcatttaacgcttacgctggctctgagaagagagacgcaattgccgtgattctggcctttagcaatatgagccatctcctgcatgggcccaccattggaaagtatgtcccactcactccgaaggctttcgtcgcggaggaagtcaaataagcgctgaggagacaccggtaaccaaactgaagtagcagcactgaggacaatgcccggaggttcaccaggatcgtccacgctcttccgggtcatgactcgaacgtcctcgtccacgtttcccgcgttcaacttgttccatttgtgcaccgtcgaggcgcaaacccctgcgcagaagttgtctgtcatgcgctgcgccagcttcagcatgctccttctcccgcttgatgttattcctgctgtaaccaccaacaacgaggccagataaaaatttcagttatatttcttttttctaaatataaaattcagataaataattatataaataaaaaacgttaccagtgtggtcacgggtgggaacggtggaggacatgagaatggcaagacactcgcattggcgctgaagagtggcaatccaccgttgggcaccgaaacccattccggaactcaataatggccggtaaagttggtggatttggttttcatcgtattctgcatgttccacccatgtaacctgtaacagtataattttaaaataataaaatattgttaaccatgctttttgagtttacttgtaaaatttaatatagccccgtgtatgtaggctatataggggcatgtaccagtgggaggaaaagagcagaagaaaatcagtaaactataggtgcattacttggaatctcacgtagatgatcataaaatataatatttgtagtgacatcgagaagtgtatgatttcatatagcaacaaaatagccagttccctgcggtttgactacaaagtctcttccccactttgtttataaattaattattattagaaggaatcacacttatttaagggttagtcacgttttattataataccatgggagagaatcgagagagcatcaaagattggaatagaaacatcaaaaacatagttttattcaatcgagaaatcaagattaaataaaaagcctgtttggaaacaaaattaggatatgaatttaatgtgtaatagaggcttctatatggtataaaataattcccttgagcatcgattcgctaacatagggttggcagtattatatagtacatgtaagcaaaaccttattgaaactaggaagctagagagagtacttattttatataaaaaaaataactgtatacgtataaggttgagatttgagaacagaagccaagcattgaaagatcaataaagataagattatttaacataaaatataatcccctcgggagacaaactaagaacactgacaatttggtcattatatagagtaaccactggaaaattaaataagtaaacaaattttttaaataaaaaataaaaaaaagctcttgatgcatgagctctaagtggctgtcatggggaatgaaactacttatgatttgatgtgattagtg

SEQ ID NO: 653 - DNA, 6227 bp, Cannabis sativa
ggaaataagaaagacagcatcttgattagaattttggctggaagccaaattggatggatggatagatggacatggatggtcatatggaagtggtgaaaggagttggaaataaaaaaagcatggcttggaatgaataagggggaaaagcttaagaagtgacacaggagggtattttggtaaattagacatgaaattgacctggtataataataataatgaataataaaagagaaagaaaaagaaaaaaggttttgtctttcccataaaaataattcatatattcatattcatccatagacttgagaaaaccagttcaccatctcagccccctcaaagggcacaaagcctaaagttaaggtacacttccaataactgcaacaacagaagaaaaactactccccaatttatctccttctttaaaggtttcatttttattttgtttttttattgttaaatttcatttcttcccatacttttcaattttagttattatactttctctctctaaaacaaggtctctgtctttctctctcctttcagaagaaaaaaagaaaataaaaaaggaaactttgatccaaagagagaagaaacgtagaagttccacgcatacaaactcttccatcaaaaacaaaggaagagtccacaacaccaccaaaccctcttttctctctctcctttctttctctctcttcaatggcccagctggaccaaaatttatgtaagaaggaaaaaccaaaaagaaagaaagaaagaaaagaatgaatgggaaagagaagatagatagatatagattatagatatagatttatgtatgtgtcttcaaatgtcctccaaccaaacccacctcacataaaaactctttctttctctctctttcttgtgtaaaattaataaaacatgtttgccaacaatacccttttctgcaaccccccaaaaaatcccatcttcatcactgtctttcaaaagagcaatatttttcaccgagctatgtgggcttttttgggtttttgttgtcttggtcagagtttcacagggaaaacaggaaagcaagaaccttctccctccttcccattctcttttctattaacttcctattcctcttatttctttaccactctattctctctctctctctctatctctatatctcttcttctctctcaatttttctttctcacccatctctctttctttcccttttctcttttccttgtgttctctctctttctctctctatctctgtagtttctggtctaaggcttctgggatcttctatttctactcaacacgatgttgaagaggaagatgaaaggggttgctgtcatggagactcctatgtaccctgtctatgaggatgctcggactaggtttaagcatcaaagtcttatgcaagactatcaagagttagagaaggtaattttctttgatgggttgcctttgtttttcattagatctgattttggttcagtagttagatctgttgttaggtttttggattttattggtggttttatgtaatttttagttttctaattattgggttttattggtttttttgttagattatagattttcattggtgggtttgataattccttgctcagtagttatggggttttgttcttcccttgtggttgttgtgacagaggggaattgatcattgtgatccaatacttgagttgtttatcagagattttggccctaacttttctaaaccttgtaatttctatttatcttggtttggttttcctttgttttctgtatataaatttcatgtaggtaaggaatcctatatcattgttaggctcatctaaattggaattgctttcaatctcggttttcaatcattttttccatctaatcactgggaaagttttctttgatgactatggtagtgttttggtttcccctattgttgatgtatgagtttatgagatattgagaattgagatgttttttttttatttttcatgttaatcaacccttttatgaaagtttagaagctattgatattctctatccattttctgaaagttttatgtatcttttgtttatgttttctcaactagtttctttcatgtacttctgtttagttttgttaattctgaatagactatagttatttgtttatccatgaaactcttctatgttcttaaagctagtcatggatataaggtgtagatcaaagtgagttcatgtgttttttcttttcttttttcaggaaacggagctcaataagaagagattgcaggctatgcaagagagaaagttgacccttttggctgaagtcaggtatggttcttcaaacctaggttaggcttttatttgcaattaagtttccatataaatgggaattgaggttggacttgcacaccgggttgcagatttttgaggcgaagatacaagtacttgaatgagaagcagcctatgaacagccacctaattcaaagggatcaaccccaattacaacatcatgaaatccgaactaccaatgtggtgatgaaagggaaaaagcatagcaaaaaggaatcatctttccgataccctgcaataccgctggacctgaaccaaaaggaaatgagttacaatggaattgaatccccgttgccaaagtctgctccagttttggacttgaatcagaaggtgaagaaccacattggaaaagaggcggctagtgtgccgaatttcagaccaacttttgacttgaatcagcaggaaagaattcacagtggaaaagaagcttcgaagaggaagaacaccccaatcttcgatttaaaccaagtttcggtaagctattagggaacagtctttcgtttgagatttagactcctacatattgctgtgttggttagagctaatgtgttgtcaatttgacttgaattttttttccctaagggcgaggaggaagaatttcagtttcaggcgaatgttgagccatttagaagagaagagccaaagaaaggtctgcttaaaattgctaatgatgaacagcacaacgatatgaagttactagtttgtaggaacatcggcaatggacctaaccgagctggaaagaggaagatcacttggcaagatcaggtggctttaagggtttgattttgtttcatcaaaatataatagtttggtggggttggaaagtttttgccttgccttatagctctattctatgcttaactatcattcttactttttctttacttatctctagttctcctctttttgtaaagtttgaaaaatagttacatatagtggttgtgtatagatgaagtggtggaattgatgctaaggaatcaagattaagtatttctcctactttcttttttccttttcatttggggttaggggggaaaacatgtagttattatggttttttgaaacttggctttgctgaaattatctaaagaaagggattttggaatcttttctatccttgcacattggaattggtttgtgatatatgccaaaattttcttgatttcttctttgggttcttaaatgattctcttgctagtcactcagtcagccgccttggttgatttatacaatagtgaatagaatagaatagtcttctcctcatattctttgctctttcttgctagtcattcaagtctatgtcaagattgacaattcataagtcatgataaacgttttgtggcattattattatttttcttagtttttgttgacacttgataagacaaagcagaaaagttacttttggggaatccactcaattttcttgcaccacaacaaacattcaaataaaaacttttctagtaggatcaatgacatatttcacaagtttagatcactttctaatattcattgtaatttgatcaatttagctttgtaatttgtatctttgtttataaaatatctaattcaatttacttaaattaattggatgttgatttgccgattcaatataacttacacctatttttaaaggaaaaataataatttaaaaaacttacacctactttaaacttttttttatttttctgcatacaattttttttcttggaatttgttatttttttagttgttttaatttgttgttggagacataataaaataattattttattgttacatatgtgaatatagtttatattttaaaatattcaaaaaataaccatctgcacggtgtaaattggattagatagttaccccattttgttttactttgttggacaataaaatagttgtataagattatgaataaaccatagaatttcttattgttttgtaaaaagtcattatgaatttcttttttattagtaaaagactactatagtttcaatatttcctaatttaacattttgatgttgttaatatggcaattttccccacaattcttcctttaataaattaataaataaatacatgacaactcttagaacgagtttaatagataagagccggtagcataacgccacaaccaaactattgacacgttttctgttcaagattttatcaagatttttcgaaaaatcagtgtgtgattagttatgctattgacaaaaagtttgtgttaagaatctcagtataatattagttaattgttacattattttagccaagttgttaagatcccctgttctaaaaatccaagtagaaagacaattactagctacaaatgaacatttgcttaaacgtaattgatactacgggtggtaagctaccaccaatgtcgaaacttcacaacctttcttttgcttacatcattttctacctaatgacttcatatacataccatacctactaaacaagtttagtttatgtcatgttcaaggatttaaattaaattttagtcactttcgagcaatcgaatggggcatgttagacacgtattttttaatgacgtgcatagcatcttctcctttaaacatttttgttcttctacatgttaagtcataaaagagcattagaagactacacaacaatttgatctctaactagctagtgatgcacattaattctataaagatttcaacaccactagtatagggaacaataaagacacaacgacagtcaaacttttttctacaccatacattaacactcgcccaatgaacttactaagcatgctctagaattggttatgatttatctgtatttgagatatcatcatcagtctcctcatttacttgattttctacattagggtcttccagcttgattctccacttttgggacttgaaacatttcctttgcttgaatttccgaaatcgggtcttgcttttcaacaaatgagacattagttgtcaagtcaactacacaagtttcctttggtttataaaaacaaagcttgttcttgtgcttcttcccttgttggtgatcatccataacttttaaactataacaaccaacctgacacatttcacaccagaactggaaattctttggcttattctttttctccttcactgcctttccatcagtttgcactgtctcaattatctcgccttcatttgcaacttcagggattggcggctgcagtgtagattccgaattctcagcagtttcatttagctcaaggggtttctcttctacttcagccttcacttctaaaacaatgcagtctggcagctccagtgtagaagcagtttcatcagccttcacttctaaagcactgctagtctcagtacacttcatcggtggcttcgatggattaccagttttcttcaatggcacattgatggagcaattaccattctttttaggtaacagtctcgcttccctggctttgtgcttcttactttgcagatgttgattcaaatttttctcgtttgttgcagtaacctggcatagtgcacaactccattcctccttaggtttctttttcataccaaatggaggttcctcattttcatccaatgcaggtggtgttgtagctttcctcttcgccccaaaatcattcgggttaggcttagcctgcaagacatcacgtaaacaaattacatagcaagatatgtgtcattagcaatgtgatgaaaacagttaaaaccctccacctcttagatttgtcaagtgtacctactagccctcaacataagcactggacctttcctaaagaacaaatatagaactgaatctgggattgagcaacaaagcactcatcccaaagtgtgcctgaagcatatataatctatatatatatataaggaaaagcaaaaaagagaaatgcaagagcaaaagaatcacccgagcacaatcgtttctac

SEQ ID NO: 654 - DNA, 2215 bp, Cannabis sativa
cttttaccctttgaatttaaggttctgatgaattgttgataatggaagagggaaaatattattgaatggtgtgttgtggccaaattattaattttgttgtactttattagctgtattgtacttatgcaaggcttagaagacttttagggttgtgccattatgctaattggagatggtggtactttaaattttgtgtaacaaagcctaatattcttgaaagaaacttggaaaacgatctcattccttgttttcaagtgctttggagggtgttctgaaatcttaaatatactaaaagcagggagcttggaaggcaattaaggttattactagttggtagtgtagcgataatgtatatttatttcaaacgaaagacttaccatattagttgaatatttggatgaataggaatatacttgtttcttttaatatgtctagtgagacatttcaattaacactctggttttttcaacttgtgggtaatggaggatggagttgtagaagctttctctagtaatagttatcttatatccattggatcggatcaagtgtcatagacgtgagccactatgaaaaacatttgtttcaagtttatgtaaagtaataaaactttagttattatcaaaacataaataaagttcatgtaaaatgaaaatataggtggtaaattttctcagctttaatattgtacatatgtgtatagtttgttgatgagtctcttgtgcaccaagagcagtttttgaagtagttcatcaccagttcacatcagtttgagaacaaataatgaagcttttaaccttaaggattatgagctatactatatattgaaatgtaaggtcatacaataagtaaaaagctaattcacaaaaacgtattttgatggaaatttgtggtttatagaaagaagctgcaattggagtaattggtcaaattttatttattgattaggaatacaaggcaaacatggcggtgagtggtgacactttcatttcattcaaatgttagattatcattaaattcaatctaagaatccactgctacttcttaattattaaaattttaactaatattatatataaatataaataacagaatcttaaatttacaatcacatcataagagggatagagactttgattgcttgtaatcaaggcctaacttgtaatttgattattaggatgattgtatatacctaaacaacgtgacttaaattatgtaaacaacatgttttattagaaaaaaaaaaaactgctcaacatactttattaggtagataaacaatgtgctttaaattaagtaaacatgttttattaggtaggtaaaaaacatgttttaaacaacataccttattagaaaaatagcatgccttattaggtaaataacgtgtcttaaattaggtaaacaacatactttaaattaggtaaacaatgtgccttaaataggtaaacaacatacattattaagtaaagtgagctagatttgcacccatagtgttattgagtacaccccaaaattttatatacatttttaaccttgtgtgaaatgacaaaaatagacattttaaaattaataaaatcattttttaagaaatatataaattaaatcagttatttctaataagtacaccccatttactttcatgtcttagttaaattgagtaacttctaactctaaaaaaaattcttcaacagagcaacacaataagaaaatttcattgtatgaatcattcacaaagtaagcttatatataaatatcttatcactttctttgtattacttcacttgaaattttttttactgctctctacttcataagataaacaacgtatcttaaattagttaaacaatatgtcttaaattaggtaaacaatgtgctttaaatttggtaaataatatattttaatagataaacttcataccttaaataaggtaaacaaaattcaccatcctcaaataaggtaaacgacactccttaaattaagtaaacatcatgccttaaattaggtaaacaacatacaacgttactgaaattaagtaaacaatgtgccttaaattaggtaaacaacataccttcttaggtaaacaagccataaatttaataaacaacgtgccttaaattaggtagacaacatactttattaggtaatcaatgtgccttaaatttaagtgaacatgttttattaggtaaactctgcgccttaaataaggtaaacaacacg

SEQ ID NO: 655 - DNA, 847 bp, Cannabis sativa
tctatgtcctgtggtttctatcttgaaataatgaattgagtttggataagcatttaagatatgcaattttaattaatatgttgttttatggtcgcacagtataatttttagtcgaacaaaacaggtaatgaagattcacgccccattggctcacgctgtagggacccatctcgtttctctcgagcttgaggatctttgctttcggtatcttttcccttattcctatttgtatgtggatacttggttgagaacccataatgaggctcatgagatgggaaagtctcaatctttgattgatgtatataaggaccagttgttggtggctttgaaagctgattctttgttggctggaatggttactgatattaccgttaagggtaggtacaaaagtaggtatagtactatgaagaagctcttgaatgatgggagaaagccagaggaggtgaatgatgttcttgggttgagagttgtattagagccaagaaggtttgagagtgatgatagtaatgtgtttgaagaaaatggtgtgagagcttgttataggacccgcgaagttgtgcagtctttgtggaaagaaatggcacatagaacgaaagattacattgctaatccgaaaccgaatgggtataggagtttacatatggctgttgatgtgagtgaagaaggtaggagtagacctattatggagattcagattagaacttctgatatggatgtttttgctgctggtggaacagcttcacattccttgtataaggctggtctcactgacccagaagaggtaaattttgttctgattaatttctaatagttgattctcatagtcatagtgaataagggtattgtt

SEQ ID NO: 656 - DNA, 1561 bp, Cannabis sativa
gttaatgagaaaaacaagtaaatcattggtgtggtaaaaaagtggcatcaatcagtacattaccgaaggcatgtggtagttgatgaagaaaagcatcccctagcatagccccagcctgaaatggagggcactcatatcagtacatcatttcaaatagcaaattaacagctaggcttgcttttaggtatcctgtaagccagtaacaaggcagattaacagtcaggtagagtttttcccttcagttttttttttatgttatttttgttttcatcttttcctccttcaataagatagatagacttaacatttaagcctttatcagcgccgtgtaatgcacattcatagtacaaattcaataagaaaaaattcagaactcaagccaaggcattcataatcactctataaatttaaattgtttctttgtgctggctaatctcatatccattctctcagcatgtataaaatatcacatatatattgagcacatgtgcaataaatatgagagttcagcatactagaaatgtcaagacagccagaattaaagcctatggtgcacaatgagcagtggaatatccccaccctctcgccccaagtcccagacataaatcatagtttttacatatttctgtgttgctgatgattttgatcatgtcttatacacatgtaccaaaatatattctagaacagatacagcaaacagcatttgagctttgaacttttagataaacccaatgtctgcagctttcccaaaagagaaagatagagttcaattcatgcaatatgactcaaaatcagtagggtgacaactgataagctagcaactgctaaacctaagcgtatgcatttcatgactaattaacagattttaacaaaaaaatagatataagtaaaatattagcagcaaaaggagctactagattaacaaagaaataagtaggccttgagaatctaaccccaaataaagccaatgaatcaacaactgtcttggatggtttcccttgaactgcaataacacgggagatttagtttcagattatcaaagtagaaatgaaaaagtaacttttccaatttaacaattaaatcacttaccaaacactactggcaagataattaagcaaataagggaagccatgctcaccaaaaaagagcatcccaacgcatgtagccaaagacctataaaatgaaatgactatcaattgctgaagaatagatataagactacatacaataaaggccaacaataagcagaataataatgatgacaataataatagatgtgaaatcgagtgaaaatttcagaaagactaaataaatttgcttatttaccaaagacaaagttagaatggttactttaaactttaaagcatatatgtttgaaatacataattatatcagcaaatggactatattgttccgtttgagtctaataaccttgcaggccagcatatcattaagccatttctatcaccgaagatctatatcactctgcatcttaatcttgctcaattgagtgacttagatttgttcacagggatggagccagcaaggccatagggtgggg

SEQ ID NO: 657 - DNA, 3255 bp, Cannabis sativa
atattaggtaccttttgccaacgttgagaatgaggctttttgaatacaacaatggaatcaattctctcaggagattccatcttccaccgacaataagggtgtcttgttctacgatccctaccataaaccccaaccatttctctctttgaaccacgatcatatcgaactgtgttcatgtaaaaaacataaggtttctgacaagggtgtttggtaacaggcctagtgttgaaagcataggcagtgtaatcagctcttgggtaccaattcaggaatgttcttgtgggcatttctagctctctaggtgagaccacacccctcaagatttgaacaacgtagccccatgaaattgagattgaccaggatcgacgcttgtcgtagcaaattgattgttgcattatgctggctgagtctaggttgaccgattggaatagttgttggagtgctttgactcgtgtggtgcgtgggaatattggttcgactacgtctatgtggtggagtgagagaagtggtgttactggatgtgctcctagaagtcctaatagatctccgtacacatcgtactgcatatatataatcattattagtcatcatcatgttatgtattggtcgtacatccccaaattttgtaatagtcaatgcaaatactatatagatttatagacacaatatatgcatgaaattaagtaacagctttgatgagatttattcacttattagtttggatttttagaatatgatcatggcgcctttagaggagacatcaatacaatcaaatagtaattaagattctcaatattatatattgagtttgaaggtatatatcttatattaaaatccaccaataataataaggtgtcaaacaccataagaggtgacatactattattaattcatttcagtatagagttttacatattttaatttaataaattatataaaaaatcgttaactaattataaaatgtcacatcaatacagtgttagacactttaaattacataataacaatattcctaataattaaggtatcctcttttttctagacctaaagggtgagaaaaggagaagttttggctgtacaaaggttttggtgaaaaaaaatattaccacatatattttagacgtaaaaattgagtaataggttataacaaaaggttgacgattattctagtcttttattaaaaaaccatttcaattttaatattatgttttgcatactttaactttaaatagagtatttctagggaggagtacccaattgttactacatcatcaaatctcattctatactatattgttatacataaatatcaaataacaatacttttaaggatgttgaacaagtactaattaaaagtgcatataacttagtgcatatatctttactcacattattagtgtaattattaaaatcttaatttggacagtggaaaacattatataggtagattatatatgagaaatactaaaggttaccaggggtgcattggtccaactaagtatctagttttatataatttaatataatagcttttagggagtatcgttagtcaatcgcaacacgacatatcgagaaggtgctaagcatcctggtgccttatagcaatgctcattatatatatagagattaattaagctaattaataatctattacacatacgtacgtacctgatgaaaaccaggttctctagtaagaggaacaccaagctcagccatacaagcctgcatacgatcatcactcccatacaacccaggatacctctgaatacaacgatcttgcatcttctccaattcaacagccaaaggataacttatagcaaatccaccaccaccataagccataccataagaaaaataaatgttttgtacgtgactctccgaagaactccccacataataaaactccctatgatcatatttcgataaaaccctaaccaaattctcaacaacaaaaaccgtatcatcatcacccataacaaaccacctcacatccttcatacccatcctaaccgtctccgaaactaccctagatatcctcaccgccgatctctgaccctgtcggttagtgtacttgaaccgcgacgtgtcgcccgagattctaatctcgggcaacaccgcctggtcccgccaactcgtccttaccttcttgtccatccaaacgaaacccctcgtctctttcggcctccaccacaccttgatgtactcttttcgcttgttccatagcttggacgaggccgcgatcccgaaaactacgtgttttagctccgttggagttagggcaccggcggcttttttgttgacgcctttatatttctcgtgttgctgttcgtcctgtagaaatgtttcgggtttggatatttttgaagagaggttggtggggagggattcgagatcgtcttcttcgtgtacggtggcggcggtggtgggacaggtgtggtggcgggcggtgaggatgagattggaggaatagagaatgtagagaatgcaagtgaggagaatgaaccatgtgagggtgtttcggaagcttgggatgttggaataatggtggccggaagggagaacggaacgcggttgtgcggtggtggcggtgatggtggaatttgataaaggcatatttgtagtttgactgatcgatcgatcgatcagagattaattataattattaattaacatatgttaataataattagttgtaaaatgaggttttgggggttaatacctgtttcggattattcggatcagagagtaagagcttggttgcatttgggttttgagagagtaaattttgtgtgagatgtttgttatgatgatgatgaaaaaaagagattcaacgctagtaatttggaacaagtcaagtggtaaattaatgtagctatatatgcatgttatatatgtaatgggaaatgctaaaaggcactagtggtgtcaagcactcttctacgtgtcaatattgttattggtctaatttagtatcgggtcccatatagtttaatataataatttttaaggagtatcgccaaccaatcataagacgatacgtcttaagggtgctagacacccctaatgcctaataaccatactctatatgtaatacattatatatgggaattgtattgtattgttccaattacaaagccagctttcacaaaaatatataataacaacatcttcaaaggaaaaacttcacatcattaacacactaattaaattattagtcagcaccaaactccacattcattctaagccttcttttaa

SEQ ID NO: 658 - DNA, 5034 bp, Cannabis sativa
tgggtatggagacgataaatgggttcagggagggactaatggcgaggcttattctatatggcattggcatctcatcgatgtttttgtttacttctctcataatcttgttgctcttcctcctgtttcatgggttaatacagctcatcagcatggcgttaaggtaaaatataaaatattatcagacaatttttgtttatttatttggtaaaatccatgattgatttagcttattcggtgtagatgaaatgtttgataaatttgctttgaaggacttcttgggatatatgtgaatgatgatattgtagctggtgtttgtgaaattcaagatgtttaattggtgagagaaagaatgtgatctaactaagaattgtgcaatgatgaacgtacgtttaacccaaaatttggttttcacggttgacttaaacttcttaaagagaaagactggttgacccagtcaagctaataaaatttggactaatggggttggccctgtgaatttaccctgttttttgttttttgtttttattaaatttcacagaaagatagtgcaaatgttatattttactagatattgcaggctagtcatagtcatagtactaacgtctagctttgtctaataaagttacaagaatggttggtggagaacataaatgattaaattaagaaaaaaatcagtgccagtactcttgcttttctttttttgaaccaagtactattactcttgttgttactagtgggccaatggcttttatggtaccagttaacgaagattaatttttccaaaaagcgaaatcccttcatggtttcagaacatgatcttagtaatctaatttaactgaaactaacgaaacgaaaatactgtgagtaaagtaccatggttgagttgttgaatacacatttacacgattcttatcaattgatttttttttttggttctccctatttgcttagcttcaagtttcaatataaatttgatcctagtggattactacacattttggattgagctcatttatgaattcattaatagaagaatttctaagtaacatttttttttgtttttaattcaaggtactggcgactttcattgtcgaatgggatgcagggagagctattgctgacaagttgcttgaaacagaagagtcatctcaaatgtacgctgagaggttgacagagctcgctgtagctttgggctttgatggatggctggtagataaaaattattgtcactaaaacttgacatgtggaagtgcatcttaaaatgcttttctcacctccattaactgctgttttgttgcttctttcgttattctgtagtaacaaaaactaaaaaagaccttcaacttaaaaaatttccttggtatttggttttggcaattcaatatattgtcctcccattctttgtatttgacattagaatgtgttatttgcagctcaatatggaagttaaattgaacgtgaaccaaattcctaatttgaaaacatttatcagccatttgacccagactatgcattcgaaaattccaggctctttagtcatatggtgagaataagatttatcatgttaaatttatgttttttccttgaatcttttgcgccaagcaacacgcttgtttcttttgtttccagttagtcttttgtgcttttctttctttgaggataaagcatcttctactttctgtatctttgatttataaaaaggtttagagtacctactaaaatttgtccgaatataccattggctatataggtatgacagtgtcacagttgacggctctgttctttatcaaaatcaactgactgaaaaaaataagcctttctttgatatttgtgatggaatctttctcaattactggtggcgggtatggttctctctaacttgcttacattttcttggaaggtcttttctacctttcttgaacttgtagttaatatttccagttcattatgcttgaacgtctgttctttcattgatgatctatgcaggaacactatcctactagatcagctgctgttgccgggaatagaaagtacgatgtctacttcggcatagatgtgtttggaaggaacacttttggcggtggacattggaatgtatgagtctcattacctctctggcattgtcatatatgcaaagtttcatgtattacaaaaaagaactccgttgctgtctgtctcacatccataacttctgacagatttaaagcattaacttttaaagttgcaattatatgaaccttttcgatggaataaaaataatgtcctatcttgcatgctttgtataaatatgaggttgtggtactgtttgttaagtgctttctctacactttttttcaatctatttctcttttatgtatagtcgtaaactaacaacttataaacataacagacaagtttcgcacttgatgtgctgaaaaagggtgatgtgtcagcagctgtttttgctcctggatgggtctatgagactaaccaaccaccagattttcagactgctcaaaatcagtaatgtcctgattgcatcttttcccaaattcttgtttataattgtttccattttcttagttttattttttgaatctctatttctgattgtatgaaccttttacttgcttctttttaatttctttaagaagaattctgcgaaactgaaatttgcttgcatccagatcctttcctgctattaatgctgtgtccctttcacttttttgtattcaaatcaggtttataaattaatgttgtatttgtacgtagactttatttgcataccattactgtgaaaatacatgattttaattctcaagttctctataattaatcataataatgtaccttctgctctaggctcagatacttaagcattgtaatgttatctataagagtacttcattgtcatgcatttgtgttctgcagttggtggagccttgtggagaaatcgtggggaatagcacaacgttatcctagagtcctaccattctactctaatttcgatcaggttgcagccaactttaaacaaaatgtcttttgagttcttacatcaatttgtatgaataggttcacctggtcagcagaagaagaaatctgattccagtaaaaaaacttgatatttatttttcagggccggggtcaccatttctctgtcgatggactacaagttctagattcttcatggaacaacctttcatgtcaaggttttcaggtctgtctgttacaatataaccttatagccttttcttctactgtgatattttctaaaccttgtcatgtaattatttctagaccttatttcaatatttcaagtcaaggttatgatgtgctcaaataggcaagggtttcaatggttgttttggtagatttagaatcatgggattacctattggaaatagttcattatggtttttcattttgtttgttactcagtaaacgatgtaataatataacacaggtacaaaattaagcaattaaatgaatccacacattgagtgaaattgaaatctggacggtcaatactcttattatatgcgcttccttttctctgcacgatgttagagttttgttgttcaataagcttcagtttgctttctaactcatgcatttgttgcagccactgcttgagtacaaggacagctctaccacagatggcataaaagtgcttgttgagtaagtttgctgattcttttgagattttgtgctcattactgtatttttcaaaggggaagtgtcaaaaatcaagagtatgtcggtattattaatagtatgcatggattttcagttattagctttctgttactccaattattccagtcatgaaaaatctaaaaaagtgcatgaatacctgtttacaaactattttttatgaatttcttatcgtgatgggtaaccacagtatagactccattttaaaaaggctagtccactcactctagtaaggaaaaagattgcagctagccctgaattcctgaacttttacgatttatatttccttgattgtgtaacaagcttaatatactaaacaaaaactgtgaattagtctgaaggaaggatcttacagaggtggaagtaatattacattcaaaggaagtcttaaaggcagtggcgatttcacagcaagactcttcctgggagagcttcctttggggaactcacctctttactttacttattctgtaagcttctcatctgttgatttgaactttgattattcaaggaaatcactatgcataagttgttcaagtcctgatatcaacacgatttgaataaactgtttataaacctgatattacatttcaagcacaaatgcatagcattatccaatctgataatatattttatgaattccattttttttttctgtaccgatccaattttatcaatgcaggtaaaatctaaggcaaattctctgcttggcctaaatctcaatttctcttctggggcaggagagaaaaagtctgtacttcttgcaccagcaaaagtagatcatctctcaggcaaatttagtacagtggtcacaacatgtcaactagaaaatcttggagcttcttcagaatggaccatacaggagagcagcatctcacttagtggacacacattaacagaaatctctgcttattgctacaggtctgacaatcagattgtgaaattagacgacgataacacttcagatcaaagtacagcctcagctgagtactatgctgtgcttggccacataacagttaaaagttcagcacagaaatcaaattttccaccctcttcttcgtgggttgtcgagggtgaacacatcaaatggactccatcctctgaggattctatgactgtgagtgtaaagattatttggaaattgaaagatgggaataattctacattcccaaaatacaatatttatgcaaagaaagcagaatcagcaagtgagttccttggagtggcgcgagttcaagcgttttatgttggtgactatgcagttccctctggtagttctggtgtcaaatttttcattcaagtgtgtgatgttgatgggagcagccagacactagatgattc

SEQ ID NO: 659 - DNA, 4315 bp, Cannabis sativa
tatcagagctccttttctctctctgatattttcttttccatcttcaagtttctcgatctttctttactgatcatcaatggcggctccagctacaactacgactcctgtcatcttttctcacaagctctctgtgaagcttgacaatcagaatttcctactctggcgacctcaagttcttgcagcagttcgtggtcatgatctgtttccttttctctcagcaacacctccgattccgacgaagttcctcactgaaaatgacgaaagatcaggtactatcaatccagcttatcttctttggatcaagcaagatcaattactctatgcctggttactctcatctatgtctgatacaattcttatgcgtattgttggctgtgacacttgttctgctgtttggaagattctcgatcaatactttgcctctcaatctgcagcaaaagtcgatcagtaccagactcaacttagaaatttcaagaaaggctccaaatcgattaatgactatctgcttggtgtcaagactctagtcgatcgtcttggatctgttggacaacctctcactgctaaagaacatgtttctgccattttcaatggattaccacaagattatgatatattcattatctcaattaactctcgacatgaggattatacagttgctgagattgaatcacttctgctagctcaagaacacagaatcgagaaacatagcaatgatcttgattctgctccctctgccaatcttgctcataatcgaaatgctttcaagaatcgttcttctttttctgatcacatcaatcaaggcaacaataatcaaaatagaggttctgtccctccctctgccagagctccatattggaatccctatgccactggccctcgcaacttacctcccaatacctctggacaaggttccacaatgccgtctaccaatcctagagctccctctcccaatcaatttgccaacaaacctgtgtgtcaactgtgtggcagaattggtcatgtttcttccaaatgctatcaaaggtttaatttggagtttccaggtcttggtgctggtcagaatgacaaatcctctccaatgcaagctatgcttgcgtctgcatcatctgtcaatgatccagcatggtatccagactctggagccacaaatcattgtacattcaatgaacaaaacctgatgcagaaacaagagtactatggcaatgatcaaatccatgttggtgatggtactgggcttcctatcagcaatgttggtaagactttatttcactctaatctcacttccagaacctttattcttcataaccttcttcatgtacctaatatcactcgaaaccttcttagtgtatctcagtttgctcatgataatcgagtttactttgaatttcaccctgagttttgccttgtgaaggatcaggtcacacaccaagttctgatggaaggcaaacttaagaatggcctctatgccttcaattcagccacagtgtctcctagtacaacaaattcttcattttctgcatgtactctgtcttctcaaaatttgtctctacctgtcaatgtaactggtttagattccaatatttctcttttctcattgtggcatggcagattgggtcatccatctgccaagactgtcaaaagtgtattgaatgcatgtaatgtccctaatgtcaataaaactgtctttgatttctgcactgcttgttgtaaaggtaaaattcacaaattaccttttcctaactcagaaacaaagtacactaaacctttgcaactcattcattctgacctttgggggccttccccaattctgtcatcatgtggttacaaatactatatacattttatagatgcattctctaggtacacttgggtgtttttattaaagtgcaagtctgatgccttggctacttttctcaatttcaaaaaccaagtggagaatgagtttgattgtaaaataaagtcactccaatctgattggggtggtgaatttcaagcttttgaacaaactcttcttacacatggtatctctcatagactttcatgccccaccactcatgaacagaatggtgtggctgaaagaaagcataggcacctcattgagtcaggacttacacttcttgctcatgcctctctccctcttcagttttgggatgaagcagttcgagcatcagcctacctcattaacagactaccatctccagtcattggtaatatctccccatttcaagttttatacaatctcacaccagattatagcaaattgagagtctttggctgctcttgctttcctaatacccgaccatataacaaaaataaacttcagtttcgatctgaggaatgtacctttttagggtacagtatcaagcataaaggatataaatgcttagctaaatctggtaggatttatatctcccgtgatgttctgttcaatgagtatgctttcccctactcacatcaggtttctcacactacatcttccactcatacaacctcatctggtccttctgtacctatacctgtcctacataatcccacccccttctctctgaagaacctactggttcttcatcacaccatgattcccactccactcatcccactccaccatcctttcctatccctgagtcatctccacccatgtcctccacttctgcttccgcacacaacaccatacctgagtctattcaaccaacagctgcctcttctttggatcccccagtcactgtgaatcatcacagtatggtcactcgatccaaagttggggtctataaacccaaagtctacatagccactagagaacctcctactcttcaggaagctttaaaagatccaaattggttctcggctatgcaacaagaaaatacagccttacaaaagaatggtacatatgttcttgtgccattacctcctggaaagaaagctataggttgtaaatgggtttataaggaaaaagagaatgcagatggcagtgtcaacaagttcaaagcccgacttgttgctaagggattccttcaaacatatggttttgactaccatgagaccttcagccctgtggtgaaacacaccactatccgagtaattctcaccatagctttgtcaaggaactgggggttacatcaactagacattaataatgccttcttgaatggtgagttaaaagaggaagtgtacatggtccaaccacccgggtttgaagaccctactcaccctgagttagtttgcaagttgaaaaaggcaatttatggtctaaagcaagctccccgagcttggtatgataccctcagctctactctgtactcacttgggtttcacaatgccaaatcggatcactctctcttcattcgaatcactcctcaacacacaactttccttctggtttatgtagatgatatcatcatcacagggagttcctctactgttattacagatctcattcattgtcttcattccaagtttgctctaaaagaccttggtcttcttcattactttcttggtattgaagttcaatacacgaatggaggtatgattctctctcaaaggaagtacatcacagatcttctctacaagtctaaaatgcaatttgccaatccattaacaacaccaatgactggtggagagaagctgtcagctacagggagtgatcccatccaagatcctcatctctatcgaagtttggttggggcattgcaatatgtgtgtatcaccagaccagagattgctttctctgttaataaggtctcacaatttatgcagaatcccttacagtcgcattggaaaacagtgaagcgcttattgagatatctcaaagggactcttcatcatgggctgcacttacagagtacaccaaatcttgacatcacaggttattgtgatgctgattgggccaatgacccggatgatcgacgaagcacttctggctattgtgtatttttgggcacgaatttagtcacttggtcttccaaaaagcaaccgattgtctccagaagcagtactgaggctgaatatcgaagcttagctcatctcactgcagaaataacctggcttcaatcattgatttctgagttgagcatccctcagtcccgttcccccattgcctggtgtgacaacctcagcacagtccttatgtctgccaatccagttttacattcaaggacaaaacatattgaacttgatctcttctttgtaagggaaaaagttctcagcaaacaattgtctgtctatcacattcctggctgtgatcaaattgctgatatatttaccaagcctttaggttgttccaggtttaccttgcttcggtccaaacttagtgttcaag

SEQ ID NO: 660 - DNA, 4802 bp, Cannabis sativa
gaagaaaccaactttcttttcctttctgccgaatttctttccacttttttttcatattttattgttattatttttcttactaagaaaaaagacaaaaatacagcaaccaaacaaagtctatagattaattaagtttaaggagataaaatggctagagtttacaagtcagcaatgcatttgtctccatttcaagtggtaaaaaatagttcatcttttataacataggtgtactgtagttcatgtacaaaaggatctgaatctgaactcgttctttaaacaaggcgcgaaaaagtaatgctgtacagattctaaatgtggtgtggttttaagttacaacacaaaatcctatcttcaacctaagctcttgtataaaaagaacgcttcttttgatcccttactattgtaaccaacaatgaaattttctcataccaccactttccttcttgttttccctcggtgcactccttccttgttgcccgaaaagctagaacacagctgttgctcgtgctgatctttatttctgagaaatgatttgtgtaacctcaaaataaataaaaagacccacaagattgtgttcttttaccaaattgaatcgtaattcaattgttggatggaatgaattagaactcaattttgaatcactgaattgtgtgctcgattatagagatcaagagtgtcggtgtggttcgggtccaagcaaagagctgcttgacaatcacgaagtgcagatgttgtgttccctattgaatcgtaaaatgcagctcgaagatgaagcatttgcaagtcaggtctgaaattcaaggcctttgtaagctcctccactgcttcattctctttttggtcatccatagacactgataatatatgcatttcagtaccattagtaggcataaaagatttcaaaaacatgaacacagcataagaaaaggagcaaatgtcagacaatggcaaaatcgaaatctcaccagctgccctgtatctgtaaggatatgttctcagtggatccaattctgttgctgtatcgaggtcttgctttgccatttcacgatcatcacagtattcagagcgtttctcataagcggatgcattgttttgcgccttttctacaagctttgtcatctcatcatatgctgcttttcgttgatttcttaaatggtaaactcgtgctaacccttgatgagctcttgtatgcttgatgtcaagggcattcttgtagcagcccgcagcctgatcgagattaccacaatccacataaatgctgcctagattgttaagtgcctgcaatttcatacataacaatgcataattaaacaagtacattgattcaaaatggaagaacagcaaagcgttaagtgattctcacctgtcctttcctaagaccatctgaaggacatctgagagcttcctccagtaactgaatgacagaagatgatgattcaggattcaaacttgtatccgccaatacatatgctttgaggaaaaaggcttcaaatgatctctggattgagagagacttctccgctctagagagagattcttcacgatttccagtgtcatataaaatccatccttcatagaccagcctttcatgctcagaactactatgatttctggccaaccgcaaactacgcattgcagatttttgacagtttaacctgaaacaaccatgtgtgttagttatagcgtctagtactttaaaaagctaaactagataatcaagacagaactaaatacatagctccaaagtttaccgtaaaagaagtagagattggcgaaattggagaacactattggcagggtcactttctagcatctgatgtatgatagccaacgaaccaacgtcatcaacagaagaccatttttcatataggcacatccagcaatcagcctgactccatttctgaacgagacgactgagaacctcaatcatgtaatctcctctaaccttctcaccaaacatcatgtaattgggttctaaagttaatattacacgaatgtctcttatagcattcccgtaatcttcaagtgcaatgaagaaccaagctctcaattcaagacaatcaggggagagcttaaatccaattattttgtcaatctccaaaattgcagctcgaatttgcttctcttccatctttgctacagctctatacttgtacggaaacaaaagagttggatccattttagtggcagtgctcaagtccaactccttttccttcccaatattatacagagaacgttcttgatacatccaaccagctggtttatattccgatatgacataacacattaacttataggctgaatactgttgtcccagcttgttcttagctctggcaacgccagccatggaataaacatgaccagcctcaactgcagcctcgaaactacgctgtgcagtgttaaattcctgcctttcaagcaaaacacatcccaattgatgagctgcgagtgccttctgccaattctcctttgcactctctcctaatctctttagtaacttcactgtcattttagagaccatgctttcctccatagctacctgactaagaaaacaatacagtaagaaagaagcgctgcccagcatggataatctccccctagtcttagagcaacaaagaaatttcatcactttcggtctacatagagaattcgggagccttctcagcaagacctgcaagcaggaagccacaagaatatttgcagtctcctccaaaccatattcaatcagaatcaatgcatcatcaatggtgacaacaagagaagccaactgggcatcacaagccgccttcatctcatcacaacagaacctatttgaaaaagaaagtagttccactagaattttgggactaaaaaaacccaatcttttagtcctactatacacttccacagctctcattccctctacagatattccattttgagaaaaatcaatattttcctttctagattccttaaaactaccatacaacatagctttaaatggggttgaaagtgtcgccattctacaacgaacacatttaatctcttcttcgccaatgtaaaatgaaacatcattttcctcctcaaaacactcatttttctctaatattgactcattaattacctcagaaggaccacaacaacaatggcagtctttaaaaatcgagttcggatcatacccctttaccaaagcagcctttggacactcaagaacgtgcccaccacagtccatgggcgaaacacccacgagctcatcctctctcctctcgaaccttagccaagccgagagaacaaccttcgagtggacatcctcggcttgttgacgcgccgcgcgtaggcaccgtcgaagcagcttgggatcggctaggccacgcatgagcgagtattgctcgacgagaagcaacgactttttagacggagatgggcagccttcgattcggcggtagagttcggctaatgagccgatgaggtcaactggcttgagataaggctctaaacagggttcgagaagctcagttgcagggagtccataaggaagaagagcttcagagactgaaacagagttgtgtgccttgttgggctttgagtttgagacaaaagatttgattatctgagcttcaagcttagctctcacagtgccaccacgtggggttttcccgccggaggtgtcagtgggattaaaggcgtgaacttgggcactcttgaatcggtctataagcttaagaccacgcatttttcttcttattttctcttccgagaaaaaaatttgatgaaagaatgaatattttgattcaaacttatcaaatggattcaaatctcaaatgggttttttccgctaattttctcttgagaaagcagagaaagagacaactgtgtaaacttaagcatggtgttagtttctcgggaaagtaacaaggaaaatggctttttagacttagttctttcttgtcccccttttccttctatcatatcatgggggatatattctttataaggcttaagcaaatctcagtgttgtgtgttgtggttctctgatttatggtagtttttgttaccggaaccattactatagtctctatagtcgattgattaggtggctaactccaaagtccaaactcccaaagcaacaagattttattttattttatatcttttatctttattgaatgaaggaaagctatggagttcagttctactgttctagtacccactttcatgatgcatgaaccactccataaatgccacgtcatcaaaaggtcccacttaagggagttggtcaactcactcatccagttcttatatttttaatcatttgtttcttcaaactgagctaataaatctctcatcctaattcttctatggttctaaaaattaataattaaaagtagacaagataaaatataaaaaggtgaattaagttgaaattacatgtcaagcaaaggtagcattagcatgaagtgaggtggtgtcaagctcaagcagattatctcaaaatgataaaagaaacaataaagaaaaactaaagagaaagagatggttaaaaaattctaattattataggttaatgggtcatatcaacacctaaccttaccctcctcctataatctaaaattggttaaaattagaataaaataagggatgcaaatttttttattttaattttttaggctaagaaaatgacatgtaaaaaaggctaaaatcatttgtgacgtgtttgagcatctatctaatgagactgaaaataatgcttttgtttcaattaattgaggacttatcacataagcaaattagaaccccaaaaaagaaattgcagaagtgattta

SEQ ID NO: 661 - DNA, 2805 bp, Cannabis sativa
tcacatcacagagtgcaaagaccagtatatgattatctcattacaattctggccctttaattgaagtggtaactggttagttctgtatagtaaataagaatgcagagaatcccaaatctgaattttgctggggtcaaccataaaaacttgaatatatattggatcatgtcgagaataataaaaagcatcttaattttgccttttgagactagctcgagtggattgacgggcaaatgcgtgttattggtgaaaaaaattaaactaagagcatctgattttcatgtcttttcttcattacattgattattgtctagagagaaagaaagtaggttcattgaagtgtgtaaatttttcatagattaatgaaggagagtgtgaaagagggtgcaatcgagagtttcccgatcactccccattgctcgtagtcaaattttaacaagtgtagtctgttttgtggttttttttataggtatcgggccattactagcgcttactaccgtggggcggtgggagcactcctcgtgtatgatgtcactcgtcatgcaaccttcgagaatgttgatagatggttgaaagaattgaggaaccacacagattccaacatcgttgtaatgctcgtgggaaacaaatcagatcttcgccacctagtagccgtatcgacagaagatgggaaatcatacgccgagaaagagtcactctacttcatggaaacttcagcactggaagcaaccaatgtcgaaaatgcattcgctgaagtcttgactcaaatctaccacattgtgagcaagaaggcggtcgagggaggagaaaatggaacagacgccgctgttcccgggaaaggagagaaaatcaatataaaagatgatgtttctgctttgaagagagttgggtgttgttcaagctaggcttttgtggagagaaagagaacaaacaacaacaacaacaactcttcaaagactttgaatttaatcagttcttcttagttactactttattattgtgttcagtacaatatttcagagaggagaatattatttagttttaagagatgaaaaaccataaaggcaaagtttctagagatattgatccattatacaggattgtatcattaagaagaaaaagcataatatttacattaaaatcccatctgtgatttttattgattttgttttttttgccatgtttgtaattttgagaattgtctttcttctatcatcatattcatttacactatgtttggtaagagtgagaagtggagggatgggagaggagaggtgggcggagataatcaatccctttgttcggccaaagggattgaaggaaagaaatgagaggagagaggatagtaaatccactcaaattcccacttttggaatcccttcaataatgaaaggattgaaattctccctcttcaattgttataaattacataaatactttcaaccaatattattaaaaaaataattataaaaataaaatagtaattatctatcttttaattactctattcttcttactcagtattatattctccaaaccacttgaggctagctcaagtggccataggagggtgcgtgcgtgttggaagtcctgaatttgagtcacaagttatgcattgtaatatataaatgcttaattcaaaaaaaaaaaaagtattatattctccattctttatcaactctccatccatcttactctccctcctaccaaacatagccttagttttataataacttgtcacaactcacaagctggtattctaattcacatcaaaaatttacttctataatgcaaataaaaaacaataataattgttataaattaagtgcgtgttttagaaaatttgaaattaaattttgagtgtaatttgaaataattacgcaatttgttgtatttacatgacacaccgtaattatatagtttaaggtaattgagaattcttcaattacactctttaattctcattataagaattaggtgtaattattaaaacctttaattttaaatatttattattttttttttatatttttactaactattttaccaaacaataaaaatttagatataattaccaatattaattacacccttagtaataataacatattttaaaagtcaagagaatttgctgataaaaatgataaaataatcaaatagtttcaaggataatcatggaataaaccttaaaaaatacaaaattgtagattacaaaagcctatgatgtttacattttcttcattttcttctaggcatgtgaatgaaatttttagctctagcttcattatagccataagtggtgtgttaagatgaagtttaactattgggagatttccaatcccgctcgaattcaacaacttggaatcgctcgtggcagccggccgcccccatgtggcaatgattggtcccgaaagtggtcacaacttcactgtttcaaagagccaacaacgtcggtaaaccattcaatcgattattcattaatgattaggcttgaaaggccttagattcctagctagcaactgcagccacaaccacatttcatagtaaaaccggtatagaatctacaattccagttatatctcaaatttgcaataaactcaaagccagaaactacaaataccaaagcatgattatctagattagtagtagatttattccttgtacatcaaataacatgttgaatatgattactagttttcttcagcaaagttaagaagctgaaattcagccccgtgcagctgaagcattccgattgttttcattgtccaatcctcgagataatctgcatgatcgaaaaaaccacat

SEQ ID NO: 662 - DNA, 1664 bp, Cannabis sativa
gaatcgttggatttcaacgacttcccggcctccccgcgagcctcgtccctccgattcgacacgtcatcatcgtcgtcttcgatcaaaacgacatccaaagtcggggcgtgcgcttcgtcccgattcgccttcaccgtctcccaccactttgactctctcaaaccctggtacctcagcctgaccgacacgtcaatatctaaagtgggcccaacccacggcccaacaccactaggcccagctctgatctcaccactcaacgctcgctccttctctttcgcttcacccggtgcaagaactccactgggcagcatctacgagtacggcggcggctccgccagagccaaccggaagagtctcttcccttccacgccgcttccacggcggagctcgtgtatcggtaccatagacccgacccggaccccgaacgctaggacctcgaggccgacgtttctacaatcgccggcgttgttcttcagaaaggagtgccacgtcagcaagacggaaaggtctcgggagtcgttcgttccttttttgaagttttacaggaggccgtatgatgagatggtgtacaggtcaaagatgaggcccccacttggtggactaatctccatcgtatcaccacatctacgaaggcgccacgtgtccgtatctcaacggttctaattgtaattctcttatacaatgaaaaagaaagaaagaaaaaaaaaattgagaatgagtgagtgagaatattgaggaaaaaaaaaattaaaatagtacatatattattatgaaattaaagttgttgacatgacattaccgcaaataattgtttaattatttttgctcagttcaagtccacagttccacattgtgcattaaatttgatttgtgtagaccaaaacatttaattcttaatttgttacaagaaaaaaaaaaaagaaaaacaaggagtgagacgccgtggttggcaaggtgtgaaatggtgtgcaccatgtaccatgtctgattttgatcggtgtggcttaattaagaaaagtctacgttttggggttatgaaaggcaaagcatgggaattagatagcgtggtcgagacggtgaacattattattgcattggaagttcatatgggaaaatgaatgattcaattcaaaaattacacatacatagtttgtattgtttatttatttatttatttatttattatgaagtaactaaagagtgttcgaatcttttggacgtacttggttggactttttaaagattatatatatattaagatgacgcagtttgaaatacttcgagttttttgtaacgttgtgcttgtatacaagctgttttacttaaatttttatttactttatattataatattgtttttggtttcaacaatggcagagagagtcggtaggaatatgtgtcgggttttgttgtttgagaagtcaaaatgtacatcaatatatatgatatgaatatgaatgaattatatatatatttggcataatatttcaattgaagtaattcgaattcaagttcgagtctggctttgggaagtgaaatgaaatcactaaattcaattttattattaataatacgtatatgtataatgtacacgtacaaaaagttgcgtatacgataatttatactctatataggaaatgcttcttcctttctttctttttgtc

SEQ ID NO: 663 - DNA, 4948 bp, Cannabis sativa
aaaaaatagttatgaaaataaccctaaaactttgttgaataatgatgttcacaatttactattaaaagtttgaaagaaccaaagaatgagtggataagtttttcgatcaatggtcggatgtattttttgtcaggctttttcttttgttcttcgtcttctatcaatgttttaagttttaattttgtgatgatagacatttggaaaaaattaatagaggtatttagccgattacaataggcgtaatttgtttagttggatgatcggacggtcatattggtggccaaacacgtcataaaattccaatcaaccactcacaatttctcaataactttttttttaaaaaaaaaaaaaaaaaaatcccaaaactcacaggagacgaaagtgagagagcaaagaacagaacagagtagtctctctctctgagcaagagaaaaagaagccaagagtcgtcgtcgttgttttccgttggccggccaagatgatgccgccggagctccaaccacgctccttccgaccatacatatcgtcctctctgagcgctccttctttttcctccttcagcaatggctccccaccttactcttcctccgatcggagtcctgaattggacccttcttccacttctagatctcttaacaattcccgtttctccccagcttcctttgctcacaatctcagaatctccgtcgccctccttccctgcgccgccttcctccttgacctcggtggcaccctcgtcctcgccattctcaccctcggccttatgatctcctacatcgtcgactccctcaacttcaagaccggtgccttcttcggtgtctggttctccctcatcttcgctcagatcgccttcttcttcacctcttccctcacctcttccttcaattcactcccgctcgctatcctcgccgccttactctgcgcccacaccaatttcctcatcggcgtctgggcttcccttcagttcaagtggattcaaatcgagaacccttccattgttctcgccctcgagcgccttctctttgcctgcatccccttcccggcttcagccctcttcacttgggccaccatatccgccgtcggcatccacaacgcctcttactatctcatgtctttcaactgccttttctactggctttactccatcccccgtgtttcttccttcaaaaccaagcaggaagtcaagtaccatgggggacaggttcctgaagataatttcattctggggcctctcgattcctgctttcacacactcaatttgctcttctttcctcttctcttccacattgcctctcactacaccatcctcttctcttccgctgccgctgtttctgatctgttcctcctcttcttcattcccttcttgttccaactctatgcctctacccggggtgcgctttggtgggtgtctaagaatgctcaacatcttcacagcattcgggtcatgaacggtgctattgctttgattgtcgtcgttatctgcttggagattagagttgtcttccactcctttggccgctacattcaggtgcccccaccgctcaattaccttcttgtcaccacgactatgcttggaggagcttccgcagctggtgcctatgctttgggcatggtttctgatgcgttcagctccctggcgttcacttttttggctgttgtagttagtgctgctggggcaatcgttgtgggttttcctctagtggtatgtatctctcattttgctagtacattgttgttccttttgaattttatctatagtttcttgctgaacaattgactgtctttgcgcttgcttggagtagtttagcaaaccatataatccattgatagctacatcttctaaccaagtgaactcatatacatggattgtatgctcaatgactaatccaaaaatcagcaactgtaaagagagatgacaacatgcataatatctctaatttgataaacatgcttatagccattgactgttagtatttattgcttttattgtagtttgttccattgccgtctatagctggcttctacctggctcgttttttcactaaaaagagcctcccatcgtactttgcctttgttgtgttggggagcttgatggtgatgtggtttgtaatgcataatttctgggatttgaatatctggatagcaggcatgtcactgaaatctttttgtaaacttgtaactgcaaatgttattttggccatggctgttcctggtatcgctcttcttcccgcaaaacttcactttttgacagaggcttgtttaattgctcatgctgtgctgctttgccacattgagaaccgatttttcaattattctggtatttattactatggctttgaggatgatgtgatgtacccaagctatttggttgttgtaacaacactagtgggtgtgggtctaactagaagattatctgttgatcatcggattggttcaaaggcagtttggatattgacctgcctgtactcttccaagcttgctatgttgtttattacgtcaaagtctgttgtatgggtgtctgccatcctcttattagctgtttctccaccagtacttctatacaggtagtttatcagttcattacatcaaagaatctttagttttcacctttgttcaaatttatttaatgtggatatgaattttcagggacaagtcaagaacaacttctaagatgaaagtttggcaaggctatgcacatgctggtgtggttactttatctgtctggttttgtcgtgaaacaatctttgaagctctccaatggtggaatgggagatccccatctgatggtttactattgggtttctgtattgttttgtcgggcttggcatgtgtacccatagttgcgctgcacttctctcatgccctggtacttccatttctttcttttgcttctttgttaagttcaacttaggttcttctatagaaccatttacaaagaaattgaggaagaaagcaattcttttatcaccaaaatctgttgcttctacaattcctaattaatatcttaaactatgggattggcagttatgtctttaattttgcttgtcttctgatttattttatttttacagaggtggggggagggaaagatttatagaatgtgttggccgatgagtagccacttaaaactatttgactaatttatggttgatcactttttttaacaataccattcaatttctcaatatgatgtcttatcataagaaactgaatacggttcttggatacttctaaaatctttatcgtttagacacgaatcattagtattatttaatgctaaccacatttttcttttctctttaccttgtcattttgcagtctgctaaaagatgcctagcactgatagttgcaacaggtttattgtttatcctgatgcaaccacctattcctattcctttaacatggacttaccgatctgacttgatcaaagctgcccgacagtctgctgatgacatctccatatatggctttgtggcaccaaagcccacatggccagcttggctgcttattggtgcaattctgcttacactggcagctgttacatcagttataccaattaagtatattgttgagttaagggtgttttactccattgctatgggtattgctttgggtgtgtacatttctgctgagtacttccttcaggcagccgtcctccacgctctcattgttgtgactatggtctgtgcttctgtgtttgtggtcttcactcatttcccttctgcctcaagcacaaagcttctaccatgggtatttgctttacttgtagcactctttccagtaacataccttttggagggtcaggtaagaatcaaaagtatctttggagatagtggagttggagaaatgggtgaggaagacaagaagttgacgactctactagctgttgagggagcaaggacatctcttcttggtctgtatgctgcaatctttatgcttatagctcttgaggtaaagtgtgaacttgcttcactattgcgtgaaaaagctgttgaaagggggggaatgagacatgttcaatctggccaaagcacatcatccactagttatcctccaagaatgagattcatgcaacatcggcgagcatctactgtgtccaacttcacaatcaagaggatggccagtgagggagcctggatgcctgcagttggtaacgttgctactgtaatgtgctttgcaatatgcctcatcttgaatgtcaatctgacgggtggctcaaaccgtgcaatatttttcctggcacctattttgctactcctcaaccaggactctgattttgtggcgggatttggggacaagcagagatattttcctgtggctgtagttatatcagtctacttggccatgactgctctgtacagcatatgggaagaagtctggcatggaaatgcaggctggggcttggaaatcggtgggccagattggttctttgcagtgaagaatttggctctcctcatcctcactttccccagccatatccttttcaacaggtttgtgtggagttacactaagcaaacagactcaacaccgttgataactctgcctctaaatcttccatctgtgataatcacggatattctgaaaattaggatattgggtttgttaggaatcatttattctctggcccagtatctgatctctagacaacagtatctctctggattaaagtatatttaggcaacacagaatctgtagactgtacaatatgtttttggcaaatatttcaagtgaggtgaaagttggagattgtcacttgcttctttcacagtccttactcttttttgtttaggcttttgaatgcatggaattgctagaagcatcatccattaccttttttgagttaattatagcaaaaacattccaatatgtgaactaaccctgtaaacgttactaatggttcctccttggttatcttaaccattttaactgaacattttgacttaatgtt

SEQ ID NO: 664 - DNA, 1938 bp, Cannabis sativa
ctcttctctacttttcctattcaccctcccatgtgtgttctttcttcctatcttttcagcaagttttgatctttttgttatgacctaccaaaaataagaaaaagaaacaacaaaggtggtaatgatcctgaagttggaggcattgtggctcacgctgactagaataataggattgagtaataaaaagtttcattaatctagttgatttccattggatccaatccatgataacctttactttccatcatatttccataggatttcgtagcaacagtaacttcactccacctccatttttgcctgtaagagtaactcaggatccaaaaataaagaaataattttttttcatactaattaataaagaatcatggaaccattgttttaagtgtaacaaaaaaatattaaggaacaatttttgaatcaaatatactttgtcctttgtttagttagatagaagtcatgtcaagaccaagcttctacatggtatttgccagccttttctagagctctcagccatctcacagcagcttcccttggagccccactttccttggaaattacatcttcgaaggttgataacacatctgacggcattttggttgaagaacctgcaacatatatggcagccccttcactcagcaacttccatactctcttgctgtgttcacatatcttgtgctgcacataaactttttgtggctggtctcttgagaaggcgacgtaaaaacctccaccctttgtctgggagagtaccccaccatcttctgcatgggacagccaaaaatctctgtataaatagtcactttcctcatttcgacaaccaaagaaaaatacaaccggagcgacgtcttggtttgcactttggatggctctctcctccacaaatccccgaaatggggcacagccagttccaggtcctacgagaatcagaggaagtgatgggggtggaggaggaagggaacctttagtgaaccacactggaacataaatgcctgtttgcaaatgaacaaaataaaataatgtatcagtgtaaaacagatctaaatccttgtgattttaaagagtttctgtaccgtaccatgttcaggatcaagcttgcttagccaggttgaacagagacctgaacgcttccttttgaaaggtgtagtccatgttactacacttacagttaaatgcacttgttttgggtgagctgagagagaggaagaaatagagaaagctcttgttttcaaaggaggaaccaactgcaccagccactcaaatggtatattaactgaagggaaatcctgtaatacctgtataagatcgtagcttaccatcatgttaatcactactcactaaaacaattgcgctggaatctaaaaagctaatcatttcctctaaacctgctaaagtatgtaagctatctctgcttttcttttctaaatttaatagagtatcatttatttgtaaaaaaatactgatgaaatataacacagaagatgtattttggaatatatattagaaatttatgttccattatgttaactacggatttgggaaaacaatgaaaaaacaataaatataatttgcagggacatacagtccaccaaataatgtactgatactaaggagcaaaaatgcattacgacatcacctcaagaacagtccgccgttctttctgattgtactggtaaaggtcatcccttccttcaggtgaagcaaaatattgcagcctttccttttcatgtgaagctgtggcaaaataactcatcacctggaaaagatgtttcatcaaaattcaagataaatacaaacacaagaatctagcaaaagtgcacgattgtgaacttagagatctgagagaaacaaaaaaagaagctttgttcaggtatacaatatgtttatctctttgactttatttgttgaagtagtatgaatgaatcgatgtaatccctt

SEQ ID NO: 665 - DNA, 2313 bp, Cannabis sativa
acagcagttggtatgaggactgaatggggaagacttatggagacattaagtgaaagttgtggtaataatgagactcctcttcaagttaagcttaatggggttgcaacaattattgggaaaatcggtttggtttttgctgttctgactttctttgttctaacaacaaggtttttagttgaaaaggcaatgcataatcaaatgggaaattggtcttcaaatgatgctatggagcttttgaatttctttgcaattgcagttataatcattgttgttgctgtaccggaaggacttcctttagctgtgacattaagtcttgcttttgctatgaagaaattaatgtctgataaagctcttgtgagacacttatctgcatgtgagacaatgggttctgctacttgtatttgtactgataaaactggtactttgaccacgaatcatatggtcgtcaacaagatatggatgtgtgaaaatgttaaagcgataacaaatgatgaaagagcggaaagtgaggtgaaatcctttgtctctcagagagttgttagctatcttttacaatcgatattcttgaatactacatctgaggtggttaaagggaaagatgggaaaaggaatacaattggtaccccaacagaagctgctttggtagagtttggtttacatttgggaggtaattcaaaaacttatagtaaagattatgagatagtaaaggttgaaccttttaactcatcaaagaaacaaatgtctgttcttgtggctctaccgaatggagacgggtttagagcatttcgtaaaggagcttcggagattgtgttgggagtttgtgacaaagttttgaaatctaatggagaagttgtgagtttatctgaagagcaaagaagtaacatctcaaatgttataaatgattttgcttgtgaagctttaagaactctttgtttaggtttcaaagatgttaaagataattgtgatggagatagtattcctgatggaaattatacacttatagctgttgttggaattaaggatcctgttcgtcccggtgtgaaagaagctgttaagagttgtttggatgctggtataactattagaatggtaactggtgataacattcatactgctaaagctattgctagagaatgtggaatcttgactgaagacggtttggctatagaagggcccgaatttcgcaacaaaaatccacaggaaatcgatgaattgttaccaaaattacaggttcgacaaatactttttaacttttttatttttagaataattttatgtttttatttatatatagttaaccttgaccttttattttggtagcaatactgcaaaatcaatagctaaggaatgtggtattgatctagataataaaatttgatagaggtcttaaatttggtgacatttctagaaataaggggatattgtcaaagaaaaaaaatatacgagaattttgctacaaattactcttatttgttttttttactctcaattcactgtatgtaaaagaattttctatgaaaagtacaggtaatggctagatcaatgcctttggacaaacacacattagtagctcatttgaggaatagtgtgttaagggaagtagtggcggtgaccggtgatgggacaaacgatgctccggctttgcatgaagccgacattgggctttccatgggaattgcaggaactgaggtaatatgttcattatcattcatatataatagaacaatagaatttatctccctaaattattacaacataaatcatgtcatctgaacttttttgcttgtcaaaaacttttcccgaactatttatatcactgagttatattccttttgtcaactttagtcatacaacggtaacaagtggtatacactttgtatgaattttactcagtagtaagaatagttcgggtaaatttttaacaagcgaaaaagttcagggcattactttactaactctttcggtttgtatacactttcttctgtcataactaataaaatatttttgtgatcaataggttgcaaaagaaaactctgatgtgattataatggatgataacttcactacaatagtgaatgttgttagatggggtcgagctgtttacatcaacattcaaaagtttgttcagtttcagttgacagttaatgtcgttgctcttatgcttaacttcatttcagcatgcatctcaggttggtcttttcatactcctataaaccaacaaaaatttgggtggattgaatattatttttctatgcctaagtataactcgaataaattacacaaattatacttagttatttttttttttttttt

SEQ ID NO: 666 - DNA, 3235 bp, Cannabis sativa
gtttatattaattttgtggtcacctagataaggacaagctaagctgaaaccattattttttctttagcatataattattaaaatttatttaggggatataatactaatatcaaaagcctctctctatttggtttttctgttgggaaggaaagtgtgcacacaacacactagctataagaacagttgcagtactaagtaagactgttctcgcgtgtaaactcaaatccaaatgttgtagaaagttgatcaatagatccaaaacgaatgtatgtatagatatgtgtgtatagctaggttgctcgtattaatattataatgtataaaagggaacatgtgggcactcccaacagcatgaaaaattcgcatttaataaacaagagagggacacacagcttttgtctgtaaatcctcaaccactatactcacttgagatgaagattcaatcctttggtccatagaatccatttcgattccaagaatcttaatttattgtttttatgaattcaacattcaaaacacttgcgcgcccaattaatactattattatttgttatatatttatatgtatgaacttgttgggagaaagatggctttcgtgtcccaaaaagggaaatttcttaagcattcgtggtagtgctatacttcattaatgatctaataatgagagggaactgatcatttatatctatctatatatctatgtgtatatttatatatatgtttgtctgatgtaacaaaagggacagcacatggatgtggccatgtttgagcttgattttgatgatatatggaacctgattcgatctttctggggtatgtgtgtgtgatttttttattggttctttttacagtacaagttccatttatgggatttgatgtttcacatagcaaaatatatacttgttaatataacgttatatgttgtttcaacaaactaatatatatccagaagtaactctcttgattaagatgctttgcttgttttggtgcaagtttagtaaaagttgtttggtagactggctactggtccatatgcggaaatcttggtcaaactttagttatataccaaacaaacacacttgctactagtacgttactacttaattaatcagattactatattagtgtcaacaccttaagtggatttttaacatttattatattaaattataggagaattatacttaattgcaccactaatactaggcagcagttattaggaccagtgttacctttttattaattaataattttatttgtaatatttcaaaattcgaggtgcctaattattacatcagatcgatcgatgtgatcgcaaagtgggcgatgcgatgtggatgagaattaattgtgatttaattggtaatcgtttttgtgcatattatttaacgttgagccttgtcatcatcaatgagtactaccactgcttatttttagtcacctcatatcgaaatcgaatcatcgatcgatatcctgaaagaaaaattaatgctacagaaagcaatatatattttcatctctctaattgtcgtacgctaactatgtaataatcacgaataatattatgcttatataattaattgattagttaaagcacttcttctggtcattatttggttttagctagcttcatgcatgtcacagcgctttcggtcaagttttttcctcttgatttgaccagcactgaactctaaaaatttgcataaccactactttcggttagagaataaaactaataataataataattctactttataatcaattaatggtaacacaaattaaaccaaacctttgaggaccgccgccattataatgcatgcggcttcggttttggtatgaaccaaatcaactatattttcattaaatagtagttaaagcattattccatgattaacatatatatatgtatattaaaaacaaaagatcttgtcactactcaacatttcaattcaagtttgggtgtaatgatatgcaaaagccaaattgatatgattatttaagtcattaaaattaaccatattaaggggggttaagtagtaaactttttgctttgtaatggaggcaaaaagtggaaaagataagggaaagatatatgggattctatttattttctttttccactccttataattgtctcttgtatgtgtatatatgtatgttactatacattgaccacgtttttagtttataatgtaaagataagtagttaattatctcttatatatacaaacatctactaatactatactactaccctagaaatgcaaattataaatgtggttgattcttttatagttgcagaccacatattggtggcaaaaggggactggatcgtatataatccctagatgagtccaaaataatgcgtcacataataaagacatgtcaagatgaagccgaaggcaaaaagggagagggtctcgtatatataagattcgtttggatgattttaacttttggaaagcaataaataataaaagagagacttgatgagagaataggaaagaaaaagggtttaaaagggatcttgggagcattggcatgcaccttatattgcaagccctttttgagactagttcaacgatcgatttggacccttcacattgccacactcacaccatgtaattgtaagaagctgaccaatcaaatatttgtttgttgtccctactaaatcccatgtccaaacagtgcttatgtcgagagagagcttttctataagggcatatatccctacactaattccccttttatatgggccacaggaccacaaagccgcatgctgtttcaacataattctttgtctatgcgaattttaccctccctttgttttttcaaaatatatatatatacgacatcatatataattcaagaaaataagaataagtaaatctaattcatatatatgggcacatgtctctataattactttgtaactttaaaagtactatactcaagtagtatatatagtactgttgtcaaacatgatcgaaagcttaagatttctttgtgtggctttctccaagcaaaaaatacaaacaatgggaaagaaaatggggctttgactaataaattgatgcgtatatctataaggtatatatacatctagctagtacttattgctcatgtagtctataaaaagagaatgtttatttttttgttagaaaaatatcgaaagggaaatgtttggcattcagtactatttaatcttggtttcagtaaataaaagataacg

SEQ ID NO: 667 - DNA, 2060 bp, Cannabis sativa
tagatattaaatacacatatgaacggacaacattagactcaattaacaccaaatattaataactcagtactgtacaacaacaaaactctagctagccaggccagctaaattaaattttatattctatttttttttaattgtaacaataattaactacacatatacttgcaacccaagtctattttacataaaatatacatattaaaatagctaaaccattaatttaattattattaattttaatacatgttgtaacaaatcctaataataaatccataatattaaagtcaacaaccaccaatacagctgtcatttctcaaaattacttttacttgcctcttcaccttatttaaaaaattaaataaatagtaaattataattagtagctcaatttttatataattaatatattttcaagagataattaagttacattcagaaacgagttacaaacaacaaagatcaaaactttgagatctgtctctacaaaattgatccaaagttccaaaaacacaaaccttcctttgataatatagttctagtgttttttcctatatatatgtatataaactaaatatacccattttcaaaaaaaaaaaaaatctttttctcattgtagtattgctctacttttccgggaaaatcagagttgcccacatgataattctccatcaagatcaaatttttccaatatattctctcaaaaatttcttattccatggtggtaatagtagtagtagtagtagtgtttggtgagaaggaaattttcttgcaattttccgagaaccatttggaatgcatgtaagtatctttcctccatggtggaatatggagcccactctctttgagtgactcctttgcagctgagcataaaagagtgacaacattcccaagtttctcttcagttccaataaaaaatgaaggaagagcttcaatcaactttttgtatcttggtgttggcctagccaattcaaattgagacctaaattccaagtctattattactcttgtaccatttgtaataacatcaagaaattcatagtgacctgaaaattattcaaaaaaataaaaatgaatatatttaaagaaaaaactaaaatatgacaaaactaagattgacccatgatttgattagggaaagagttttgacctttggctcctccattgaaaaaaacccaagtagttttacagagtgaggcttcataaccatccattttgagccacaaaactacccatttctttagattttggggctctattattaagctttctatgtttctcatgtacatgagaattttctcaaggatttcaacctcaatatctgttgtctctctccatatcatctcctataaaattttaggaaagaaaaaaaaatcacacatgaaaaacaaacatatgtaattcataggatatttatgattaaaaaaacagacctctaaagtgtcatcataagagggttgaggttctgaggatgaaatagctgaaatctgtggtgctgatgatgattctgattctatgaaatctctcaccatttgaatcagctgttcttctgttatgctctccatttttgtttggatgacaagaaaaagtttgtacttttgggaccaaaagaagaaaaagaagaaggaaaaatacttgacttgtttccaaagttgtgtttttgagcaaagtttaaacactagttcttacacaacactgttagataagtgagactgatttcactttcaatatatatacacacacagaaaaatgagtaaaatggcaaaggtttcatcctagccacacacgtgttttgttataatatttatgagtttctatcgaaatgttatagcattgatgtactaaatcaccttctcatatgtttcgacacaaattttggatgtttattttgagaaaattgttaaacgtattattatttttttgtgtgtaatattaatattaatataattaaatatttaatctcatctaacttaaaaaaaaaatagtactcattaagtaccactactatacccaatatggcaatatttttttaaagcatttatcttatgttttagtactta

SEQ ID NO: 668 - DNA, 4106 bp, Cannabis sativa
aaacatttttaaccagaagttaacttcccaaacatttatagttaaataaaattaattaatttgtttaatatgaagaaaacggataaaaaaacaaaacaaagaaacaagacagattacagtgctctggaaaactaggatattacattttaaaaaacagtaaaaatacaaaaaagaaaaagaaaaagcactttattccttaaaaaacagaaaaaataaaatatatgatcaaattttggttaatattaaaaaaaaaatggaagcttgcattagctgacataccaaactgtcaccatcatcggctccaagccaagcttcctgtcattttctttgtctgtcatttgttatttaatttcttctttaacttttttttttaagttcttccatgaaagctgcaacgtacagtgttgataaatttgaagcccaagccatcaaaatccatttttttttctttcttggacattgtccttttctctctcttaaacaaaagaaatccaagcgaagagagagagagagtttagtgtggtttgtttaaaagcaacattatgaaggggaaaacccatcaccagaacggcaacggcaacggcaatggcaatggcggtgccggcgaagagagcggtagtaactcgccaagtccacctctttcaccgcgccgtcgttctagtctgtcattttgccgtcgaaggctccggtcgaagccgtactcgaaccttgccagcggaatgattttccggtggaaccttcggtacctgtttgttctgccgatgctctatgtctctgggttgatcatgtgtgtgggtcccttctctgctctgatgggtcagtcacctcctcctccagggtcggtttaccatagcgatgagatgtttcgaaggctttggaatcatattcagtctgataattcatctgggattcaggtgtgcttctttttcttttttaaaaaatcaattgatttatttattcttagtcttacgaaatgggcaaagaataacaagaaagaagaaaaggaaggttttttgagtttgaaattttcttcgcatttagagatttggaacataaccttactgaaaacacagtttggggattgcatatagtacaagtcattgagttgggtgttactcaaaattgtctaagcaaactaagtggaagctagttgaattttgttccaaaagaggacttttgggtttgtacattggcctctgaaatttagtatatagtttcttatgagctctttcaagtagattttctttccaaatgttccaggattaggtgatgataaaaatgaaaaaaaaaaaaaaaaattctggggaataattggtgactataattttgctatagagcaaactcttcttaggtaaataaataatgacttttctgggacttatttaactttggttggtcttcttctgtataactgtaaatatcattttggtccttccaatggcttatgatattaatagtgatatttacaagttatttttgcaatgtgataagccagtgatgtaaatatatttttcttgatgcagctttcctctgtgtggagttacagaagaagactgaaagagcagaaaccttgtccaaattcaactgccagactactgtctggtacataccaatattgacttgaattgttgactctgcattatttctctccatctttctgcatgattttttttttatatgtataagaaaggaacaaaaaaagtacataaggatataatgaagcctcatctaccttgaacacaagaaaaaaaatggaaacagcactcagttatgatcattatctatatgggaagttacttatattactaatacttaaaaagagtactattttgtatattcaattgggaattttctcttgaattacagtgtcctcgggtcctagcggctacttgattgttgaagctaatggtggtctcaaccaacaacgatctgcggtatgtttatttgttagtacagaaatacaaccttttatacattgtggcacttgctttacctctcctgtgttttaagtgtgtgaaaataattcaataaactatatttaagctttttcaacgcattaacaaaattgctaaggaaaagtcctaaactcctaataaaataaagcattaggcgaccatgtatgctttgtgggatcttctgatttttgcatgcatctttcttactttcatttcagctttctcatatttttaaataattttttttcacagatctgcaatgctgtggccgtggctggacttttgaacgcaatactagtaattcctagttttgagttcaatagtgtttggagagatccaaggtaactactaactatcttaatggccaagactattgtcttcaaacataaacataaatgcactttttatcataagatccgtgtcatggtccttaaaatcatggtttctgagatatttttccataaaaagagacatcttttgcaattgtcaccatgtcaaatttagcaaaagtgttagcatttgccatttgtagctatcttgatgacagtgattcaaaaattatgattccataatccatttgtagctgcttaagctgtttgaaaatgtacctttcgttgcacccttacattggggaatcaattttatttgtaacagctatttctattaatttttgtttacagtaagtttgctgacatatatgatgaagatcatttcatagcaacccttaaggactatgttaaagtggttagagagctacctctggatgtgatggagatatatgattacaacataagtaacataccaactttccgcgttcaagcttgggctaccgtcggttattacacaggtgtagtttatcctgtcctgaggagccaagggtaagcagtaaaccataaatttcccccttttattttcatttctgtgtgtgtaaccaagttgttgacaaatgaccatacaataactttggtttgtttatttgattttcattgaaatttatttcatatcttatttaattttatgttcaggattattcggatatcccccttcgctaatagactggcaatgaacgtcccacctcagattcaattcttaagatgcctagctaattatgaagcattaaagttttcggctcccattttgaatcttggaaagacattagtcagtcgtatggctgagaagagctcaaggacaggtggaaagtacatctcaatccaccttcgctttgaggaggtaagaagactttgtctcccgaattattttgagattttttattttttagcctaattgtttgtttttataattttttccttgttaaataggatatggtggccttctcgtgctgtttatatgacgggggagaggctgaaatgtctgaaatggattcaattagagaaaaaggatggaagaagaagttccagcgaacagatcgtgtcatttcacctggtcaaaatcgagttgaaggaaaatgtccattaaccccagtagaggtattagcaggaccaattactctgtagttttgaaatggatgaacaacttagtattattcattcccattgttcttaatgttgtgaataataatctccttctgttgcataatatcttgtcagtgtaggtaggaatgatgctacggggtatgggatttgataacagcacttccatttacttggcctcaggcaaaatataccaggaagagaaacatctagctccgctgctgaagatgtttccaaacctgcacaccaaggagtctctcgtatcccctgatgagcttggtccttttcaggtaaaactatcttgctcatcatctgctgctgagtttctttttcattagttgaattaatgtatctacaaactatttgttactgctaaaagcttattgtctttaacttattatcacatctatactgaaatgcatctcaaaatcgctcactagttaaatatgacccaaactgaaacttggtcagaggacaactacgaactcggtgccaaactgcatctcacacaaaataaaatgtatttgttcaacccagtttgagacataattggaaagctcaattagtcactcaggattgcaataaaattttataccatttaacagaaaccgttgattccaatagagtggaattacctataaggtcttgttttggaaaaaaa

SEQ ID NO: 669 - DNA, 2260 bp, Cannabis sativa
tatatatatataggcaaaacccacatcacagaagagccatagcagcgagcttagtagaaggagcttacaaaatcgaaagagacagacaagagaatcgacaagggcctcaagctgaagctccaccatactgggaattcttccatttcagcttaaaccatgttctcatcgataatgttgaccactccatttttggtgccatttacgaatacaaatacccatttcaattaaatccccaaaatgcccccaaatacgtcgtcgctttacgcggaaccttaacccaacccgacaccagaaccagagacctcaagctcgatttccaatgcatctttaaccgaatccaccagagttctcgagtccaggaagccacgaccgcgattcaaaatctggtttccgttgccggggcgggaaacgtctggatcgtcggccactcgttgggatcggcgattggattactcgctggaaagaatatggccaagatgggtttacccatcgagacttatctctttaatccgccatttatatcagctccgattgagcgaatcaaagaggagagagtccgacacgggatacgaatcgccggaagcgtgatgaaggcgggtctaaacgccgtcgttaaaggacggaataacaatcacggcgagagcgaacagcaggatcgggacttgttttcgtcgatcgcggcttggttcccgaatctgtttgtgaatccggcggaccacatatgctctgggtatattgggtattttgagcaccggaagaagatggaggagatcggagctagtcggatcgggaaattggcgaccaagagttctgtggagagtattttgtctggtgctatcgggaaggattctgaaccttatgatctactcccttcggcgattgtgaatgttaatctgactccggcatcggattttcgacgtgctcatggggttgaacaatggtggaaccctaatttccattatcgttctttaacgtaccaattctctcactgagccgatttgaacagattgaacacgctggcccagtgattgttgctggacttgggcccaaattaatatgggcccaatgtttatgctcttacaatttgggcttgttgagttttaaaacaataatttatgttataattgtaaatttgagcacaatcacactaaaatggagcaaaaaggaacatgttgaattataatatgcataaaaatgattgataaaacaattattatatttttttattacatccaaacaggaattgtgaatcgtttttgatcaatgtatgataagttaagttctattctgttttgtatatttcttgttagtgggaatgtggtgacatttttggcagttttgtttctgacaaaaccaattcccagttttgtatggaaatggcttgtttgttcccaaatatgggaacaaacaagtatatgtatgcctttgtggagagtctagctaggcctaggtagtgctttattcctatatagggtaaatgaaaacctaaaccatttacctaacagggtgatcaaagtcttgactattgaagattaaatgggggagagaaactttacattcatcttacagtctgttgtgtttggacaagttttgcaaagagtggactcagtaaaacgtagtgccttgaaaatcaagcaaactattacttgaacttctctaaagaaaatccatgacatgggcattgtaaagtcagctaacttagtggtaacaaagcaaggacagatcaagctcatagatttcggtacagcaacagactttagaataggcaaaaactacgtacctaacggcggccttcttgatcctaattacttgttagtctcacattgttaatgtgtggaaataaattgtcatatataaaatgaatggactattcctcccattcttaattggttttgagatagaaccctatttaccttattccaaattctaacactctcatcgtgagttatgtcatgccagaggagacaacaagttctctgttgggcccgttcatccaacttgttgtgccgtaaacttaccttaactcccacattagtatgatgttgtctgttttgaaccttgtttgtaagaatttattttcggataccttcctagaatgactcatattaatggagtaggtagaagacttaaattcaaggcgatttctgtctattctttctcctattctttgcctaagtattgtaattttggattgatttttagagtttgctttcatacttttgcagctaaatagtcttgatctgtttcatggaattgtact

SEQ ID NO: 670 - DNA, 3611 bp, Cannabis sativa
gacatttttttctattttaattttcttttatatatgtctatccacatcgaaacattatacatagaaacgaaactttaaaaaatattgtatgacaaattttagttgaaaacaacacatattttattagagaattattagaaatacttaataaagttccatttgcattatatataaaacataaatttatttatacgtaacattcataaaattgtacacatttattatttattaatttgatgtatatatgatgaatgacacagaaatatcggttgttcttgaagaaagtagctgacaagggactgttaaatatgacagcaacacaagcaatgactgatagaatattgaagtcaagctttgctgcgggatatccacaagcatttgccttgcagagccatgaagcttctacttcttcatcaggtatcagtagaaattataaccgagccccatatcgaccattgcaaccattactgtcatctatgacgcccaataataataacaattacaacatcaacatatttcatcataacatccatcacccttcatcgtcatcatcatcatcatcatcacctattatgagttacagcccaccaaacagtaatgctataacaccaccctattcctcctatgctattccaccacatcaccaccaacaaaaagcttcaaatagtcgttccatagagttgcctcaacctatgatgaccgctacttatgatgttgttcaacgccaccagattcgtcctcctacctatggctatggacacattcatccactcactttcagaggaggtttgaataataataacaataatgaatatattgttgatagtggaactggtaataattattcaaataggtttgtgcacaccacttctgctggaattttaaatggatcaacaactcctaaccgccttttcagaagtacagccattaataatgatgctccatatttcaattacattaatgaagcagctaatagcataaatggtttatcaattggaatgagatcctcatcaactaagatgaataataatggtaccagagtatactcgtcaaaccagatgatgatcaatggtggttcaaacagtggaatacagtcaagccaaacgattcatcgtgacagtggacttaatcctatcagttctggcacgtatttaaaccaattgatcaataaaaataccagagaaagctcggttggaatgtactcatcaactcagatgaacaacgacaatactaataatggtggggccactactggtagcttgagcggaatgtactcaaataatatgatcaactaccgtgccaatgtcggtagctcatcatcactcagaatgttaccaacgaatcaggtcataaatggtattggagggcagcaacaaaaactaaaatgttttgttgacaatggctatggttcagtgaaaaataatggcctagtacaaggttacaataatgtcaattatatgaatgggaagactactagtaataccaatagcattgttggtactagtcaattagaagatggattcttattaccttctaatcatcatggttgtgagaggacaaatactagagtgaagacttcactggcacaatctcttgtttcctccaacaacaatttcaattatattcaccaacaaaatattcaaactcatttgcagccttcttcaaaggtggtaccaccttctttgacagtgccaccagaaccctttgtttcgcaacaacaatctggctctgatgagttaaataatatggaagaaggtgttgggaacgataatagaatgagtgatgatctgaaaatcaataatgatgattttaataatatatttggtgttgtaaccaataagggtacttcttctgcgtctcttggtgaacaaattccagtttccaacgttgacaatgtcgtcattagggatgattttattgacgagcttgacaacatttcactgcctaattttcaggtgattaattattatttgtatttaaataatatataagaaaaataagacaaatcccttatgacctatttgatatatgtatatgctatcaggctgaagtagcgaactctccaccagcaaaccaagttaacaatcagaaccccattattgctaatcaattttctgcaatcgcttcaagcacatctcttgtgcaagaaaatgaagtaccaactattaacaagaatggagaatccttaagtcaggtatgctaaccaaccaaaccatcaacatttatagcatatatatatctaacttaatttcttatttcctcctactacttattaatacgtaatacctatacatatgtattgacatgatagagaaatttttctagctataacaaatctttgattgaagaaatgaaaacattcctcaataataattatatcttatagctctatagcaatactatatgccaactttaaatagcgtacatacaataattgcgtatattaatcttaattttttattttttttttttttgcatattatttgtagccctatctattcgctttttcaattttgaactttattcgttttaattttttaccaattaatcagtctttctttcatccaaacttgaaaatctatgtatggaataggatgccaatttcgtttcaaattataagtaacatacaacttataaatttattgtgatattatatattacaagtatattataaccagagaatggggagtactatattaaaagccatatatattattgcccattgcttcattattatatatcaatataatcaacaggacaaaggtgtgtcgcaaagccttgatagtaatttgcttccatcagaagactattttccagtctttgacgaatttcaggcaagttgaattatatgtactcaattatgatattacttgcaagtatataatcataaaaaaagttaggccactatattgaataattttcataacattattgattatgctaatattatctatttgtatatatatgtatgtatgctcaaatatgtgcaggaaagcatgggagaagttgttgatcttactgatcagttcctaaacattcctactcatgtgctaaatgaggttaaaatatttaatagaatatttgaatgctaagttttttaaatatgttataagaatgtataaatttatattggttatgccttttgcagatggattgggacgaggttatggataagatgttgaatgataattagctagcaggaccattggaatgattagagatgctgaattctgaattgactattcccaacatgatcatggatatcaaatatcatttacaaacttataatagctagctagttcaagttgatgttttcatattacataattttgatgtgtttgaataagtttcgctagtacatataacttaaacttgtttaagtgaaacaatttatgtttccctttgtggtataaacttttagcatgtaaataaaatttatattaattacaacaatatatcttatatacatatgatcaacatttttatttaacaacaatataaataatccatctccatctcttctaacatggctagcagctcttgtagagtaatgtaaactcaaaactgtttagtagtaatttgtttgaattttgttgaatttaaaaaaaaaa

SEQ ID NO: 671 - DNA, 1886 bp, Cannabis sativa
  modified_base (333)..(337): a, c, t, g, unknown or other
aaaattaggtgtgtaatttaatatgcaattgaaaaacttatcaaatctaattagtaatttaattagattgaactttagagtttaattgaatttgatcggatgataattttccaaatctaattactaattagatttggattagataagaaaaaaaaatattaaattggattgaatgtcccatatcctacttaaaattactctttacactatactaaactcgcctcactctgtgccggccctgtaatgagtgtaagttgataaggtcatatataaaagtaatatgtgtattatatttatactcgattgagtgaactatataaatatatatatatnnnnntatatatatatatatctacatatacgcgtccaaagcaaaattgtataggttcttgacctttgtcgcctgaggctgcgcagacatggcaagatgcttagcaccaagaaaatttacaagttgtggggtcaaataattatgtatacgtacaaactaatagcttacgtttaattttaagtgtagtgggatttgaaaagaagtccttatctttggaaaattataccgataattaaggacttaattggaaacaatgtgtggtgatatcatttgtctcattacaaaagctacctatttagatcacgatctctggatcattctttgtttttattatatatataaaaatctgtgcctgtcacgtctgaagagaaatatcaactaatataagcaagattatagtgtgtaaggaatgagaattaattaataatgatcaaagttataagacctacctagctgctacttaacactatgataaactctaatattattggtggcatgtcatccgttatgagttgatcattgagccttatgtttttttttttagtccatgatcccattcacattcacatcactattggctatggcaagttttctactgctataagagttgccaatttgattgcaaattattgtgccacaccattatggatatcaagccaaaaccaacgctcatacttgttcttttccatttcttaattaattttaatatccatttcttatttggagctgaaaccatctcagcaaatcaatcactttctggtgatgataccattgtatctgctggtgaggtctttgtgctgggatttttcaaaccaggtaaaacttccaactactacataggtatgtggtacaagagggacccttaccagaccatagtttgggtggcaaatagggaacaacctgttatggatagattctcttcggagtttagaatatcaggttccaatttggttctattcaatgaatcaaatatcccaatttggtccacaaatgtgaactcaactacttcttcaactacttcagtaaaggcagttcttcaagacaacggaaatctagtactctctgatgatgggcttagagataagtctaaacttctttggcaaagttttgactatccaactgatacatggcttcctggagccagtttggggtttaacaaaataacaaagaggaaacaagttctgacttcatggaagagcccggaagatcctgcccctggtgtcttcacttttgagctaaacacaagtgatgtttcttatattagtatctggaacaggtcgaggagcttttggaccaccggttcttggaatggacaagactttactttggtcccagaaacaaagcgcaatagtgtttgcaaagttgaatatgtttcaaaccacagtgtgatcactttcaacatgtatgctcttaactctactgcaatatctcaacttatgatacatttttcagggcagctgaagcaactgttatggctgcctaataatggatgggattctctttggtcttttccaagacaacaatgtcaagtttatgctttttgtggtgcttatgg

SEQ ID NO: 672 - DNA, 1920 bp, Cannabis sativa
cttacagtacaagtaagtgtcatccatttgccactttacaccccgtgtatcatcctttactctcatactctcatcacatcaaataaataagacagacgataaatgatcaccttgggggatacatgagcaaccttgtatttagttgaagtaacactagccaactttcatcaaaccccaactttactcctatcaaatctcaaagaaaaccattatattatctaatttcactcaaaaactataattttcttttttttttttttttaagtacgtaagagaaaagaattaattgtgacattagcttactatcaaatatcaatcatcaagctaaatatctccatggacaaacaagactactgatttggtttggtctacttagtttcaggttccaacctatgaaaaattcaaagatgattctttccaaaactctttaccgtgattacacccccatcgtaaaccaaatcctagccaccatgcttcaaaaccgagaattcgacacccatctcgccgccttagccaccacctctcaccgctggagctccgaagcggtttctgaggtgttaaggtccgtgcccagattcttcttccggtcacctcgttccattggtacccaaaaaggcttcagacaccgttctccgttgaaacagcgcaaactgaaagaagagcttgataggttcggtaatggggtgcttgttcttgggccagctgcttacagagaccccaacaaggttgagttgggattggataaagcgttggaattctattactgggttgaggcccattttggattttcacatgatgagaaaacttgccgggaaatggctctcgttttggctaaaggtaatagattgaaagctctttgggattttctcagagacatgtcaagtagagggtgtggggagattgttactacttcgaccgttacctgtttgataaaagttctaggagaagaaggtttggtcaatgaagcattagctgctttctataggatgaagcagtttcattgtaaaccagatgtttatacttataataccattatttctgctctttgtagagtagggaacttcaagaaagccagggctttgttagagcagatggggttaccgggatttagatgtccaccagatacatttacttacacaatattgattagttcttattgcagatatagtttgcaaactgggtccaaaaaggctattaggagaagattatgggaggctaatcatttgtttcgaatcatgctcttcaagggctttgttcctgatgttgtcacctataatgctttaatcaatggttgttgtaaaacttgtcgaatcgggagggctcttgagttgtttgaagacatgagccaaaggggtattactcccaacaggattacttataattcttttattaggtaccatagtgcagttaatgagattgataatgctgtcaatatgttgaggaggatgcagagtatgaatcacggggtgccctcgtcgagttcttacaccccgattattcatgctctttgtgaaactgggagggtattggaagcccgggattttctggttgagttggttgatagaggctcagttccaagagaatatacttataaattagtatgtgatgcacttatgtcagcaggagaaaccagttctcttgatgataactttcatactagaattaaagatgagattttgaagaggtataagcatgtggggaagtttaaaccagtaatgactcgcagaggatatgatgacaaggaaaattgaatgaaggagaagatttttatttgacactgtggaattcttgtggagggtctggactctggaagctttacttacatcattgatattgcttatggtctcgaaatcgcccattcaccagctatgcttccctcaagttagcactcgtacaatctaacctaacctggttttcacc

SEQ ID NO: 673 - DNA, 1929 bp, Cannabis sativa
tcccacattattgctatatgatctttttgcaaaatcagaaaatgcaaaatgaagggaacttttttctacacatgtttgtggtttgtataattaattttatggaattagttatgaggactgtctggtacgataggagcagctctttccctcccttcaaaacatttatatataagtcaaaagcagagttgcactaaaagattcctagaccatcttccttgattcttacattcctaatgtttctataggttgcattaacccttgatgttttttgctatgaagatttctgaaaagtttcattttccagtccactcgaaaaccaaaagtttgatacaatcttagcgacacaagatttcttttttcagcatattcttgctaaggcagcggatgaattcatcaaaggctccttcaaacctaacccatacatctttcaagaatggaatgtgatttccattttcaccttcaaagaagtaatttgaatgaaccccttacctcatacaaagtgaatatccccgttcatgggcatctgcatgtctatcttcacatggtttttgtatcacgcccattcttatgaagactttacttttaatggctctgccccttcatgaaccctgttaagaaacaatccttagtttacgattaccaatacctttcccttctttttggttctacaaaccaaattccatgccacaagatgatcaccccttttcaaatctccaccatcagaaaagaaattcgtaattaatctccccaaaacctctgttactttacctgtgctctaaaaagggataaataggaaattgggagagatgacagttaaattacaaagtattagtctgtaaccgcttagagaccttcttgatatttggttcccaaaacctcaacttccttagattatctcccaatagtgatgcaaataattacttcctagctttcacgacagtagatgtttatttccttatgtaatgtaatgtatgagagactaaagctaagattaagtttgatgaaattatgagtgctacatgaattgttgtgaaaataaactatagaatagcttagaagaatgtctttagtctgccttgggaaatggtgcaaatatcacttgctgtaagcgttgctttgtatctgtcagcactaccattgtctttgtacttcatagtattcacattgcaacaactattactctcttttggtatgttaacgatctccttagtgctattgttcttgagcattcatttctatgtttaaatcttttggattattacaatttttttcccaaccaattgattctgaaagtcaatttcgggagttaacttgggacatggctttctttcatcttcacatattttttcatgtgtacttaagcttttattcaaactattgtagatacatgctctttagagctggcgtcccacgtcatgccattattaagaaatttgctggtgaagaaatatcacaacttgaggagctaatttcaattctatcaaagctttctaggggtgctcgggtgccgttggagtatgttagctacacagatcgtcaccgtcgaaaggtatattatgatttccaggtccatcttattatatttataacaagggaatatatgaggttttatctagattgttagattcctcaatcaagtatgagttgatgttaatgttcaaaattcaaaattgtttgtactgtccttgtcgtccttgttatctttataatgtctagtggaagataaatatcaatgatgaggtggttaatgttacaagaatttttttttaaagtaaggttggtccctatgacacttggataaatcgaattcagcccacttaatgactacaactaagtaatttatcaaatgcatggccacatattctatagttgtcttttaggggaatcccctaagtccatagttttcggtgctcgtgattgggaaagtga

SEQ ID NO: 674 - DNA, 1831 bp, Cannabis sativa
ttttgtttttttttttcagaataattttttatatctactgtacttgcttattagaaaaacttaaataatagattaaaaatttaaaagaaaagaaattataaaagtacattattataatctttttaatttttttatttataaatatgatttttttataattatattatattatagttgtgatgatattatttttttttagacattttatagatatcgtgaaattaatattttattattttttatttatttttcttttatttttattgaacaaaatataatttgtaattttaaaattttataaatatattttgataattaaaaattttaaactgtaaagttataaataaacgtaaaataagagtaaaacccctaattccttgcttattacatgattactttaatatgcatggcattataatttataataacaatgttttacctgatatatatatatatgtatggtgtgataattaataaagttgtaatttttcgtttattattagactctataattttacggtcataatataattaagtcggtgtttagttgtaatgtaactggtatgatcagtccattctttatactaactaatttattttgtaatgactacgaaatttgacattttcttatgtattcatgtattttatttaaaaaaatagttaataatatatgaggaaaatattattgatattatttactaccttgtaattagtttgagtttaataggtttgagtttggtgggcagttaaactaattatgcaaaattggaccattaacaaagttaaaaaagaaaaaatatgtgaattttttttgctttgaaacttaccaatatgtgaaatgaacaaactggcgttctttttcttgataaccaaacactgggattttatttggtagttataatatattaaagaaaaaacaaattgcaaataaaatgaaaaagaataaaacaaatggatatccttttctaccaatccaaaattatggggtgagaaacaaaaataaaagaaaatagataaaataaataaataaataaatagtcctgttcgtgaatgaacgtttttctcgatcaagcagactgtaggtggccacaagatttagagaaatttccacgtgtcacaatcttaaggacattaaaaatatgggtgggtcactcgatagcgaggaaccggtctttaggtggtttaatgaaaccggctatagcccgttggccgtaatgaaattacctataagtcctgtaaaggggtcaatggtataagagttgggggtttaagacaagagttgggtggttttcagagggttttggcgatcagatagagattgagattgaggttgagatttttcatttcagaaagagaagatcaccgaaatggattgtgtttgaaccttaaaattgtatcatttttgttttccgggcaaatatgggatagaaaattgagtgggaaagtgtttatttttgttttgtggagggaaaattccttattctctgaattgtccgacaatcccacgatcctacattctcctcaaaatttcactgaattttgtttctccaccgtgaagttttgaactttagaagaaattcggttccgaaaggtgagaatctcgtgtttctcgtcgatttcgcttcccgaatgatcaaaaagcttgcgtttttgtttgtgggttttgggttcttgtgacgatgtttgtcctttaaacccctgtttagttcccgataatctgtggaggaaatggaagggaaaaatgtgatttgttggtgcaattcagcttcataactccaccatgtctacaaattctggtttttttttttttttttttttttttttttttttt

SEQ ID NO: 675 - DNA, 4890 bp, Cannabis sativa
  modified_base (3766)..(3775): a, c, t, g, unknown or other
tacctatgttagtggtttacctttctaatgataatattttacaagtaatgttttaatttaattttttaaggcaaagaatatatttaataaggcgtgtgatttatctcactttaggctaggcatctttattatttattatagtttttagtaaagtttattttagtttatgaacaaattttaattcctttagttttaatttgcattttagtattatttagtaattaatttaaatagtagcaattgtggaaattaaaaatgatacgtcttattaggtaaaaaaaataatttattattaaaaaagtaaatcactactttaaaaatatggtgaacgacatgctttattaggtaaatttcgtatattaaataaggtaaacgaaatacccattgtatttttttaaaaaaaaaaagctaaaccactatccttaaataaggtaagcggcatgtcttattagatatagttcgtgtcttaaattaagtaaacaacatattttattaagtaaactctgtgccttaaattgggttacaaaaatataatttataattaaaagtattatttttttaggggaatatatttggtgttaatttccaaacttatgtattattaataggttaaaaacgctcatacgttgatgaatcatttaaaaaataaggtaaacaacatgtaatattagataaacaacattccttaatttagataaatcatgtgcctaattaggtgaacttaatgccttaaaataaggtaagcgacatgacttattaggtaaataacgtacctagaataaggtaaacgacatgtctaattaggtgaaaaacgtgtcttatattaggtaaacaacattccttttttggtaatctccatgtcttaaataaggtaaacaaaaattactacacaaaaataaggtaaatgacacgctttattaagtaaataatgtgcctaaaatacggtaaacgacatctttattagaaaaataacgtgccttaaattaggtaaataacagatcttattaagtaaactccgtgccttaaattgggtaaataaaaacataatttataattaaaaataatttttaaagattacattttagtaaaaatatatttgcataatttattgggctctgtgtaatgtgactaagtgagcttaaaaattgtgaaatgtggataaaaacttgtgtgctcatgcaatgtttgttttaattgctcaatggcatgtgtcattattaatgcttacagtttaagtgctagtgatttgaatgattagcctttatttgcaatgagtggaagacacatggtgttttaggagcatggtgtttcagaattccatattaatccttgtcttagtgatcaaatgattgagcttttaattgccttctttcaacgttgccaaaaggaacctgagcactaggacacaatctcttttggtggcctaaaatgaatctatgaaagatttaaattactatacacatactaatatacataatatatctatacatacaaactatacatagatatgacattagttgaagtatatttgtaaggatcgtcggacaccatctatttttctattagtatgatattgttcggtttgggcttaagccctcacggatttatttttgggcacctttccaaaaggtctcattccaatggagatagtgtccctcacggatttgtttgggcaccttcccaaaaagcctcattcccatggagatagtgtccatccttatatacccaagatccttcccatttctagccaatgtgagactttggttgtacacccaacaatattaattaataatatcttataatttaggtacgcttggaagatatattaacagaggcttctaacatttgctggagtttatgggttttggaaatatctttcaaagcttgagaggcgagagacaagacgatacttagaattgttttcccaatattttataaacttgttatctttatttttgggttcaactctcaaacacgtgttattagaaactcattatttgtttttatagcttcttgcatatttgtaacaattttattcatagagtacttaaatttgcacatacaactaatatttttacattaattagcgatcactccatatgtacacattgtggtaaatctcaagaagtggagtaaattgaataaaaatgggcattgtactaagaattttcaaaagagattcctaggccacttctgaaacttaccactccattcaatcatgaagcaatatgaataaatatgtgttctcacaacttgatttgttcatgtgttacaaaacttgtatatattgccatagagagatgaagaaggcttaattttttttttttttgaaaaatctgtagtactttgtggtttagtgacataattattagtaggactaagattgttacatgtatatctgtactgtaagagacatatgcatttgaaactcacttgatcttgtccttaagttccttcttgaaaactactttggaatgaacaactaacaagcctaacattgttattataacagaataatcttcatcaatagaaaaacaagagtaatgacctaaatttttattttattaccttatttaaggtatggagtttacctaaataaagcatattattattcttatttaaggcacgaagtttacctaataaagtgtcccatttatcttattttaaggtaattatttaacacgatacttacttaataaggcgtgtcgtttaccttattttaaggtagttatttaccttttaagtgataaattatattctgatttaccttatttaaggcataaaacatgttgtttaccttattaaggtacgaagtttacttaagaagacgtgtcatttatcttatttcaaagtagttatttggcatgatgtttacttaataagacgtgtcgtttaccttattttaagatagttgtttaccttttgaatgataaactatgtttttgtttagcttatttaagacacagagtttacctaataaggcatgtcgtttaccttattttaaggtagtcgcttacctttttagtgataaattatgttttagtttaccttatttaaggtgcagagtttactaaaataaagtatgttgtttaccttatttaagacacgaagtttacctaataaagcgtgtcattcatcttattttaaggtagttatttggcacaatgtttacctaattaggtgtgtcgtttactttattttaaggtgcttgtttacctttttaatgataaattatgctttggtttaccttaatattattattttttttttttgaaagaggcttagtttacataaataaggcttgtcgtttaccttatttaaggcacgaagtttacctaataaggcgtgtcgtttaccttatttaacgcaaggagtttacctaataagacatgtcgtttatcttatttagggtagttgtttacctttttaacaataaattatattttggtaaataaggcacaaaatttacttaaataaaacatgtcgtttacctttcttaagacaccgagtttaccaaataaggtgtgtcgtttacctttcttaatatatagagttttcctaataagatatgtcgtttaccttatttaaagtagttgtttacctttctaataataaattatattttggtaaataaggaacaatatttatctaataaagtgtgttgcttacctttcttaagacacagagtttaccaagtaaggcgtgtcgtttacttttcactactacaaaaaggactttttgcttcaatttttaagtgacatataannnnnnnnnntcagttggtgtaaccgacgttataacataaatttgaattgtgtatttttcttttaagatttaatttgctaaacatatccttgctatatggttaaagagaaagtgagaaaaaatgatcaaatcattgcttctttttagaagagatttgaagttaaggagattacaggaatgtaacgccgataggaacactaaaaaatgaaatatgccatgaattggaatctcaaaacctagggcaatactatgaatttgaggtcaaccatattgatcaccttaacactttggtttgatgatgaatttcaaatgttgttcaccttatttaaaacacatcatttacctaataacgtgtctcgtttaccttatttgaggcagaagatttgcataataaagcatctcgtttaacttattttaagacagtatatttacctaaataagacatttcatttaccttaaggtactggttacttttataatgataaattatattttggtttatcttatttgagacacgatgtttatttaaataaggtgtgtcttttactttatttaaggcaggaagtctgtctaataaagtgtgtcatttacattattttaaggtagtaatttaaatttttaatgacaaattatattttggtttatcaaatttatgacactgattttacctaaataagacatatcatttatcttatttcaaggtagtggtttaccttttaatgataaactatgttttatcttaacttatttgaggcacagtatatatctaaataaggtgtgtcgtttaccttattttaagatagtattttacccttttaatggtaaaataagttttattttactttatttgaggcatggtatttatctaaataaggtgtgtcgttaaccttatttacaacaggaagtttacatgataaggtgtttacgtaaataagacacatcgtttaccttattttaaggtagcgatttacctttttaatgataaattatgtattattctactttatttgaggcatgatgtttacctaaatatggtgtctcgtccaaatacttagttaaacgcttcgttgaactgccatttctcttcatccccaattcaacttcttctccaaaattaggggtttc

SEQ ID NO: 676 - DNA, 2906 bp, Cannabis sativa
tacttatatcgttatttatcctatatattacaatgcaaaacttgtgacttgaacctaggacctctaacacacatgcaccctcttatgactgaggtggatattagttatgcatattttgccctagaattgtcactgtattttccattgtttcattttttttgattaattgtgcttataaataagtgtaggtaagaaacgaagcagcagaggattttttgtcattgttgaaagattgggaaaaattatgcatggattttaaattgcttggaccacatcaatcccaagaccaagacgcttgcttggaaagtgttgaattagagcttgataaaaatgaagacaatacgagtgacagtgaagatacctcactttcatctgaagaatttgaagtgcaagagttgcttgcaatttgccatggtgatcctaacaaattaggatcaaaggggttatatttcaaggtatgacactataaaacctagatcatatcatctgtcggaacatttaatgaccctatgtagtgttttataatatgctgcaaacttgaaattctctattatgttttttaacttgctcatcttattagtgttcgtccatcctcaaatttattattgaatattcttgtcaatttgagaatatatacgagctagaaaaagacgtgcgtgggtgataaattgtaattttttattaggtattgattaatgtttatttttatgctattgctacaatgccatattatataggttcgctggaagggctatggttcagacgaggatacgtgggagcccattgatggcttaaggtaggataacttcaagctgaaaaagactgccagaatattcaaatatcttaatttgttattttgttttaaatattcgaatattttgcgtagtactgtcttctattctcgcgtattttattgtttttgtccatcatttttaatttttcttcatctcttcaatagcacatgtcaagataagctgaaggagtttgtcacaaaaggttacaagaggaatatgctaccacttccagtatgttcttatcagtcattttagtttattcatgtagtataatagtcctttcaaattttattttactaagcttattgatcataatttttagggtgatgttgattttatttgtggaggaccaccgtgtcaaggagtaagcggttttaatcgctttagagacaagacagctcctttaaaagacataaaaaatagtcagctgcttgtttacatgagcattattgagtatttgaagccaaaatatgtcttgatggaaaatgtcgtcgatattttaaaattttctgaggcatttttaggacgatatgcgttaggtcgtcttgttaccatgaattatcaagctagattgggcatgatggctgctggttcttatggtctaccacaatttcgaatgcgagtattcttgtggggtgctcagccttcagaggtaaataaattagtgttctcatgtaagattgtattatgtaattcatggacttaccgtttctttctctttttcctttagaaattaccccagtatcctctgccaactcatgaagtagttgagagaggagttgtcccaactgaatttgaggtatattgtttgtacttctgtttaggttcttatttttggtttttaattgcaacctgaatcgttgaccctaaatccaatcataggaagttcttgttggctttaacaaaaacgagcagcgtcatttggaaaaggctctttatcttgaagatgcaatttctgatctccctccggtaaagttgattttcaatttttagttttaagtaaatatttaatgggtagcacaattcattgtatgaattcatctggttttaggttgagaatgatgaaagccgagatgaaagaccatacgagacattacctcgtactgaatttcagaagtatataagattgaaaagaagtggtaagcatgttatggtatttgtacagaccacgtctaggcagtttagaaatgtattgtctttatgcagatgctgttttggaagccctaattttttatttgtatttttttgaaaaacaaatagatgtggtaggttatgaaaattcttctcctcaaagtccacaaaaggcaatgttatatgatcatcgacctttacagttgaaccaagatgactatgaaagagtttgccaaatacctaagaaaaaggtttcattcacaaattttagtttggagttgaaaatattattgttgtgtaattgcttagtctaagtaactcaacttttgtttcttctatttcagggtgcaaactttagagatttacctggtttgttagttggtccagataatgttgtttctcgtgatccagcagtagagagtgttcaagtttcttcgggaaaactgttggtataatgttgtttatatatatgttatatttacttaattttgtgaaaattagaagttctcttatatagttagcttgctattttttcaggtaccagaatatgccctaaactatgtgcgcggaaaatctacaaagtaggaattctgctttattgaattgaaatatgaaatgttttactttattttagttaggtttctcatgtaattggtacatgcaggccctttggtcgtacatggtgggacgaaacgattggaactgtagtgaccagagctgaacctcacaaccaggtttgttttgtattagtctacaaatgaccattttgctttttaagagcattggacttttgaaatgactggcatgctttttattttgttagataattattcatccagagcaagatagagtgctctctgtacgtgaactagcacggctgcaaggatttcctgatttttataaacttagtggaccaattaaacaaaggtattcaccaaactcttatcctgttaatcttttgcttattattttagtaatatt

SEQ ID NO: 677 - DNA, 4260 bp, Cannabis sativa
  modified_base (307)..(321): a, c, t, g, unknown or other
aacattcatattattatattaatttgatttcgcatggttatgcagattatcattactttcttatgaggtcagatagtgtgggtagtttcacaatagttgcttttcactaaacctttgattagggaggcagtgacttgtttattggctttggagacaatgcttgctaagagtttaattttgttattgtgaaaagggactcaaatatagtcatcaatgcacttcaaggaaaattagtagatttgtccataatgtacttaagtggactcccgataatgtgaatagtattagagattatttcacaaatacnnnnnnnnnnnnnnnaaattataaaaatacggttatacagaattttaaatatttttacgattttttaattttacttacaaaaatatggtatttttatattgtactcttgttaatttattgttaattttttattgtctgtatgttattttttgttgttattttgatattgtttggatgttattttcctgttactttatgtagtttcttgttgttttcatgttgtttttataagaatccgtaaaaatataaaataaaaaatcttaaaacatacaaaagttaattttttacaaaaaaattatattttatgtaattatttcatagtattatgaaagctttcgtatatagttattctttattgtcctatcgctgaatgatctcataaattattgaggaaacactgtgtatattgtatgtttttttatttttataaaaattgttttttgtttttttgtgaagttatgttaattctatttccagattatgttgtttttattttatgttatttttattttaaaattatactattttgatttcaaaattatgttgtttttatttttctaaataaataaaaaattaattataaaaatactaataaaaaaaaccctaaattattttagtatcacattgtcaaaaatgaaataaaataaacaaaaacaaaagacaaactgcatgtcgtttagttggggaaaatattatatgggacttcaaacgacaatatttttttttctctttttcattttgacatcgtcggagttggactgttggaccttagagccaccattaaaactgtaatactcaacccagaaactatattaacttcgtgattgttcagctttatttaaaaaagacgaggttttggattctgggtattctacttttcttctttaaacctcaaaaatctcatctgggcatctccctaattacactattcctcgctacttttcactttcaagctcaaaagacaacgttttaggatatgggtctgctacatcaacaaagacaaacatttatgaatcgtaaaggtgaagtttttagcattcgagtgtgaaatgcatggttaaagcttgtaatttcggtgttttaaagaagataatttctggacttattgaaaaaatccattttatttagtttatatgttgcaggaatcattgaaagctctttacttggaaagagaagagtttctagggagaaagcttgaagctttgttagcagaggaacaggatacttgctcatgttacatagagaggttattttggcttaaagtctactacttcgtcattagaacatttgtttacattattatctgtttaaattgctagaagttaagggccttgattttggtatggttatataaaatctaagcaaaaaggcagatttgtagttatgtttgacatgaatgttgtttttgtttggaaccgtacaaaagttggattcactgatgaaaatacttgaaattccacacactaactctctctcactactcttatgaatattgcagacattttatgtagtgaaagatccccatactagatatgaggtgtcagccattgattttgttcttatcagctttctcatataagaatgtagactactgccattgtcctcgttcactatttgtgcttcttgatatcccaaaacaacctcaaagccattttcgttttgcacacagtcaatgctcatctcaatctcagtctcatcattttcccttacattcgagtttgttttcccttgttgaacctataatctgtcagaacccggctgagatctcatcatttgcagctgttttcaatttcctcactggtcgaaacttgttgagattgggccgtcaagtccatgctcaaatgaccctaagattggttgagcctaatgctttccttggagctaagatgattgcaatgtatgcaagttctggtgatcttgatactgctgttactatattcgatcgtataaataacccttctttgcttttgtataattcaattattcgagcttatagtttgtatggttatcctcataaaacaattgggatttatactcaaatgcaatctctaggcctacaaggtgatcattttacatacccttttgtgctgaaatgttgtgcttcaaatgtttggatggggaaatgtattcatgggataagtttgagaattggattggagatagatatgtatgtgggaacttctttgatagatatgtatgtcaagtgtggcgaaattagtgaagctcacaagttgttcaatggaatgatagtgagagacatttcatcttggaatgcactaattgcaggttacatgaagaatggagagatttatgttgcagaggatttgtttaagagaatggtccggaggaatattatttcttggactgctatgatttcggggtacactcaaaatgggcttgcagagagagcattagatgtatttgataagatgatggaagaagattcagaggtgaagcctaattgggtaacgataatgagtgttcttcctgcgtgcgcacattcagcagcacttgaacgtgggaggaagattcacaagtttgcaaatgaaatcgggttgggttctaatgtctctgtgcaaacagctcttgttgcaatgtatgctaaatgtgggagtcttgttgaagctcaccaatgtttcgataagatacatcaacaaaaaaggaatttgattgcttggaatactatgattacggcttatgcttctcatggacatggtttggagtctgtatccactttcgaggacatgatcagagttggggttcaacccgataccatcacatttacaggattgttatcaggatgcagtcattctggtcttgttgatctgggtttgaaatacttccattgtatgacgaaatcatattttgtagagccagaagttcagcattatgcttgtgttgtcgatcttttgggtcgtgcagggcgattggttgaagcaaacaatcttataaatcaaatgccaatgcaagcaggaccaagcgtgtggggcgccttgttagctgcgtgtaggaaacaccgcaatttggaattggccgaggctgcagctaagaagttatttgttcttgaaccagataacagtggcaattttgtcttgctctccaatatgtatgctgaagttggaatgtggaaagaagtggacaatctgagagctatgctaaaaaaccgaggcatgaggaagactccgggatgtagctggatcgaaatcaacgggaaagctcatatgtttctcggtggagatacttctcatcctcaggcaaaggaaatttacatgttcttgaaagaactgcctgagaaaattaagggagttggttatgtacccgacactagtcttgttttgcacgatgttagcgaagaggagaaagaacataatcttagcgctcatagtgaaaagctcgccattgcttttggccttctgaatactagtcctggtgttgttcttcgagtaaccaagaaccttcgcatttgtgttgattgtcacacggccaccaagttcatttcgaaaatctatggacgggagattattgtaagagatgtgaaccgattccatcactttttcgatgggaagtgttcttgtggagattattggtgattaatattgttgtggaaaatggattttcttggtactattagggtgatatgaatatctggtgatgtgatttccaagcttcactctcgcttaagttagccattgttttcttcctgttgatttccgagttcaagtgatttagcccccacagtatctgaatctgatgctgctgtcatgagagaggctgcaaagaattttatttaagatgatgatttcgctactttcgccgaggcattcaacaatgatggagtgtcaaatcaagtaagagtattttcagcattgatgttgttgaaaaggtatcactttaatgttctgttatgattttagtttaggatagggtaaagagcgtcataaatattcaaagttt

SEQ ID NO: 678 - DNA, 1763 bp, Cannabis sativa
gaaattgttatagttttttggtcctgtttttaaaaatataatatgtattttgatggattttggttctgttttcacgttacaatttgttgctaattagatgcatgtttaatgccaaatgagtttccatgctcagtgtgtaagtgatctttttttttttcataacatttaaatagcagttctattaatgtttttggtacaactatgctaattatcgaaagttgttggattgattatacactaagaacatcgaaactaatttagcatcgaatcaccatcgaactaatcatcgaacatctattatatttgcattgaaattttgcacataataaggaattgaataacaattggcaagagtaacacaaaaataggaagaaaactggactaaatgtgtattattgtactttgaagctatactcatcaatgcattaggtccagaggtataactcgtgaattttcccctaccttaaagtacaattttggcatcttaatgggtttgctaaattttgcgttcttagttaggctatctgaatttttttgttactttgtgtgggagatttcaggttctagcttgagagaggacaagagtaatataatagggatattttagtccaaaacaaactttccccttgaaacaaagatcttaaatttcccaaataaaaagtcaaaattgtattcagaaaaaggcatgggttcaaatctagctgggaataataagctagggtaatattagggacacttttaattcatacacaaaatgtacactatgatttgccattgatatcaattgtttaatatttggatatggaactcccactttcaattgtttaaatccaagcaacttttcttaatgttgaccttattgctatggtggttgcagaagacggtgagttatttagctgggggtggaacaaatatggccaagtatgaccctttaactattctctcccacctttgttgaatgaaaacattaaaaatgagtccacaaaaagaaaattgcaaatagtcctacattttattacccattttggcacaccaaatctttaaaaaggctcaaataaagttctaagaagcagtttactcaatctaacattaagtttttacatattgaaatatatccaagagagaccaaactattcctctttagatctctaattttaccaagtttctaataagagtttgatcccttctaaaaatctatgtcattctatttggatgtagcttggcttgggggattcagttgatcggggtaccccatcgcaagttacaagaatctccggtgttgtgccgataaacattgcatgtggttggtggcacaccttgatgctggctgaaacacccaactgagctacagttgatgatgctaaagagaaaaaaacacatgacataacgtgacagttttgctagaaatagaagacacattactcagattggtttgtcagattctctccctctctcgcacacttttagtccagtgtaacaccaacattgtacatactattattcttctcaggaaagcttagtttttttctctcattcaaacgacacactggaaatgatctgatttgtacactaagcttataaaaagtacagctaaagatttcgcctctccttttgccgtgtcttatgatgatggatcaaatcttgttggagatgcgatttcttgcatgctgtagaagatgcaacaaaggtaaaaatacctccattctgtgaaaacccttggtagcctggattaaattccaatgaaacagaaattttagaaaatt

SEQ ID NO: 679 - DNA, 2753 bp, Cannabis sativa
atatatgagtgtatgtggggtatttaattaggagaaattatgctgtctagacttttcatgtaatcattcaatatcttggttatcatccaagctaggacatcagcagatcaatagctgagtagttaatgccttgattagtttacattgctgtagtagtatttcatttttgttgagcttctgtttctgtattaattatttagtttacctgaggtcattgactttccatttcaattgttaacggttaaagaagttgatacaattttaattgttgatacagtattacttcgacaccctctttccgcgaattcctgttcctgtaatgcgccaggttactgctaatcttgataagatgaatcttccatccaagcattcaggcgtgacaggagataccactcggcatggatctgatgatactgctcgacgtcctccatctgtgaaagctgctctttccgtctcatttggtcagcgtgctcctcatcgtgcatcaactagagattcctcacctgttcgtcgcactcttccaccacctcctgcttatgacagatccagcactgatgatgtacgaagccgacgcagccagagtcgtgaatattcggacagagagcatcatcgtgacagggacaatgaaagggaccgcaatagagacagagacagggagcgtgacagggaccgagataggtacaaggagagggagcgtgatcgtaacaaggaaagagacagggaaagggatagagaaagatacagagagagagatagggatagggatagagacagggtcagggacagagaacgggaaggggttagagaatccagttatgattatgatcgtaggtctagatatggagaaagagaaggccgaaaggactatgagaaaagcgaccgtgatggtagcagacgttatcgcagtcgaagccggagccgcagtcgaagccggagtagaagtcatagcttgcaagctgcagctgtgccttattcaagcccacagagagatgcgagcaaggaaaggacatcagcatctagcaacctagcaaagcttaggaatatgtacggtgatttaggtagtcaaaaaggagatgatagtacagacagggctactggaagcagcaatggtggcgaagaggttattagacttggtggttcttcttggaagtaattgaaagaatttctacaccaatttcttttatcattatgtgttatcatagtcttcatttagaatcaagatagctaatgaattctttcttgattctcattggcccctcatattttctcttcaaaagttgtcgaagaacaaaaaaggaaaaaatagaaagacaatgatatttaggggatgagtgatgtaccaaaaacatgtatactagaccttttctaaaattattattattttatatgaaaacctcatatttggacatcgaaccttttatctctctcgcctccatagatgtttgtaaaccgtgttagctgttcttatatcttaaaagaaaatgttctgaataactgttgggtaatatcttctatttgattaaatgtttggttctgctttgttatattgttcaggaaatcgagactagatatctcgaatataataagagactaaatatggattgttggattttgcagagggggatttttgttgctattgcgaattgtccataattattacttcttctaattacgtaatcgtattcctaaaatattccctaaaataaaagagagcataggggcttcatagaaaaataaatttatttcgatcaacataaataggtcagttatgtatgtgtagtaccttgacccaacaatattaggagacatgaatgaataacaatagcaacacaggtatcagcataagttgggaatgagaagtataaaaatgaacatcgaattattctacgccgaataacaaattacaaatgaaagcacattcgtattatcaataatgatccaattacatataaataaaggcctcgtgaacacaaatatcgatatatataattcgatcacaagaaaaaataataacataagaaatccttactacattgttgaaaagtactccatgaaagtaacaaaatcaaaaactgataattaattaagccgataaataacaagatagtgacttagacgtagtggtggatagtgtgggggtgttaattgatttcaacaaacaccattggtcttcttcctgtccaagacgaacttcttccaaatggtagtgatctccctttgcatctccaaggcactcttcttagcaatgacagggctaccaggaggaacaaggtcattgtcatcctgagtcacagccatcttggcagtgagaagcttcgatggaagagcatcaagctcgttaagaactttctggatatcgttcaccagacgctcggccaaggtgcgggagaagtcctctcttatcacaacgcgcagcacagtgatgtgctgggcatcaggaggcatggtgtaggccgggacaatccacccgaatcgcctcagcatgtccgaaacctcaaactcgttgtgtgcatggttatctttcaatgagaaggccaccaatggtactccttggtctttagagattatgttgaaccgacctgttttttccaaaccttctttcagtaccatcatgttctccgtacaattctccatcacattcctgtacccctcgtaacccaaccttattagttggtagtactgagcaatgacttggctagaacctgtaaattatatttacatatagttaatcacaaacttattattaaaatggg

SEQ ID NO: 680 - DNA, 1910 bp, Cannabis sativa
attatagtgtctttcactgaaggtgacttgatttggtatataagactaccattttttaaggttagtgtttttttatttttagaagcccattatcactcatttcaggttgatttctaatccatatattgttttgttgtaacaattttataaatgtatctgctaagttttgtatttatgaattagcttagtgtaacaatatttccgcatgtttgttaatgtacttaacagttttttttttttttgaaatggattagaataatgtacttaacagttaacaaatgactcaatgagcattcatcttttgtctaacaataaaataaaattaatggtcagattataaattaatctatttattaaatgtggaaaaggtttctctaaaaataaatttatatatacgaaagaagataaacggcgcgaacgggaatgccgaaatatgtacgacaacataaccctagaaaacttcatcacatcgaaaatcgaattgggtttagattgaatttgatttcgtatttcttatttgggccactgagagttattgatccctcgtaattttctatgttttgttcgaaaatttggttccaagttgcgattcatttccgtctaatgtgatcggtttcatctgttttctatccgaggagtgatttaaaaaggtgggttttgcttagaatgtgagtttgaattgtatagcattgatcgatttctttgtttttctttgttgaattcctattacattggccattgatagcgtttggaaacttaaatttgtgtgatttcggaactgggtctgattcagttgatatattttgcttggttgcagattgagttgacgctttttctatggatttatttgggttattagcaaggataaattctgggttgtggatcatttggagttagaagactttgggattttttaattttttttttttatatatattttccgatatacattttgaatgaaagacccttcttctacgagaagaaggagatgaaaggtgggtttgtcgttttgaaggtataatgactggagggccattaggtttgcgtactgggagttatggatcactgcaacaacaaaatggtttttcgaattatcagtcaacaccagttcttgtgcgcaagtcctcaaagctgctcctttcgagttcaagagagaaggaaaagcttcggcctttgctttgtcgcttctttggtcgaaggaaggttgccatgctccttttggtcttccttgctcttcttgtgtttgtatttggttcctttacagttaataaaggtgcgttttttcttcgtcatatgtatgtaaatatctatatatattatatatggaatagcccctgtgatgtgagaatgattataattggtaattagtcactgtgatatattcagagcagtttttaactactaatgttttttctttgagagattttaactactaatgttgaaccttcagacttatgtttcatttttgactcagcaaccgaggtgttggttggggattgtgattgactatgtatgttgaagatatccatgttttattttaagaagaattcatgttttaactacttcacaatattaaataattaccatctgatggagttcaactctttgtatcggctgtttgcctttgtggggcaccatttaatctgatttttttgtttggattttgctttttcttttcccggaggccggagagaaatagtataacagcatatttctcatgctttgttttctgtaatgatggaacagaaaacgtcaatttgagcatcacacaccatatcgaaaattttatagctgtgggtgaggaaacatcatttaattctagaactttcccgggaatgaaaaaaaattcctcaagaagtgatacaagtagtgacttgtttcttcgtcatcaccaacgccacttccatcca

SEQ ID NO: 681 - DNA, 2841 bp, Cannabis sativa
  modified_base (2330)..(2338): a, c, t, g, unknown or other
gcaacaggttcgttacaatttcatttcttaagagtaaagattgcttctttgacgctaactaagttagtggctgttgatgagtgaaaattgcgtttgaagtgtttgatgaatgtcctagctgacataaatgaagaacaatggagtgaatttgactttagtgcctttcttcatgttaatgaattagactgtatctttactttatatgcttagtagtttcttttcaaagcctaatttgatcaaacttaagtatttgttgccttgtttaacttacttctcatcttgctcaggcatcaaaggatcaggctagttttggttcagatggaacagtaacaaaggtgagtttatagaagaagaacatttagattaatttaaataagtagttttctgttaggccttaatattagtcttacttgcatagctcattagaattatgaaggctgtaagttttcaagtccttagtgtttctaaatttgtgtttggttggctagttaggattatctgttagtctagcctatcatgcaatcttgaatggaatgaataattgttagattagtgtctgttggatgtcatttgcagatccactgttagtggccttgaaactggagaatgctacataactgcatcattacaagaacatgattaggtggtttctattcactaaggttggaacctctaatttcctatgtaaatctcagtccggatttagttatcagcagaagtttagtttggtaaatgtaaagttgaaatgggtgaaagatgctacacttgatgatgttgtgacttttgataaggatctcaaagcagcttctactcttgttacccttatatcctcttcacctcagcgtaaacttcctatttatcacctcgtctgtcatcgtggacaactcggtctccccattgatctcaagctctcaaccttcattaggagatacccttccatttttcttgagtcacatgttctcgacactggtggaactcgagtcccttgcttcagcttaactcgggaagctcaagagctacgtgatgaagaactacatgtattcgagctgaatcagagtgatcttctctctaggctacgcaaactcttcatgcttacaagaaacttgagccttcctttacaaaccatagaccagttgagatgggactttggcttgccatatgattaccgccttactttcattcctcgtcaccttgacatgttctcttttgttaagcttcctgataaacgagatggcttgaagcataagatatgggacgatgaactcgctgtgtctgaactggttaggaattctgcttcacaacaaatagaagaagacatgaagagtggctgcttagcctttccaattggattcactagaggttttgggctcaagagaaaatgcatggaatggttaaaagagtggcagagtttgccatacacttccccatacatcgacgcatcccatttggatccacgaactgatgtgtccgagaaaagggttgttggagtctttcacgagcttctccacctcaccctgcaaaagaagaccgaacgcaagaatgtgagcaaccttcgaaagccactagccttaccccaaaagtttactagagcttttgagcgccatccgggcatattttacatatcaaagaagtgtgacactcaaactgtgattctcagggaagcttatgatggtggcaagctcttgcatagacatagacaccccttactcgaaatcagggaaaaatttgcaggcatgcttagagaagggctactagatagaagtaagggtttgtacaagaaaagtagaagagttgttgtggaagaagatgacccaacaaaacatggatcaaggttggagtttgacattgacactcatgagtactattcatcaaagttgttagatgacaaaattggtaagatgacaattagataattgcaaaatcttgtgctacggaatcaatgtttaacgaactctgtttgtagtagtaattgagttgagtagatttatgttaatgatgataaattgcagcagaatttgctttgattagattagtttttcactgccaaataactctaatattgttttgtttgtttccatccacttctccactcccaatcaatatgatattacatacaaacttaactctgaactcttaaatatcctttttaccaatttctcttgtatgcatataagtgttttcttctagtgctgcaaatatacggattgaaaaaaataaatttaagtacgacacgacatgataaatctaaaggcacagcatataaacacaaataaactaagtcaaaaacatgatatattacaaattcctataatttaataataataataatnnnnnnnnnaataataataataataatagtacacttgtatttattaataaatattcaaaatctaattaattttttatataattatgggtaaaatattattgaagaattatataaaaataattgaaactatagaaataatatataatttaatgatacttattattattaattataaaaaaaataataaaaaatacctaaatttgagctcatataagaaaatgagctaacctatttatgaaaaatgggtcagagcgagtaaagtatgacacgaaatcgagcatagcacgaaaatataggtttacaggtcatgttggatctatcctttaaaatattggcacaacacgacacgatctatattattgcggacttttcaaaatatggaccgagttaacccgacacgtgtatatttatagctatatttttgttagtgtaatgttatgtcaagcattcccttttgacataataaggtgtttgacattatactgacgtcatgttttataatttacttaaca

SEQ ID NO: 682 - DNA, 1553 bp, Cannabis sativa
aaaaaaaaagttaaaatataatatatctcaatatagggtaattcccaatattttaattaaaaaattaatttattttaaatttataattaatttgagtctaaaaataattttttttacccattaataacctgttatcgtaagtcatagaaaagttacatttttaatataactattgaataatcccccaggacctcaagatatcagcatagtaaaagactttttatcttctgtagataatagaagtttgacattgcataccactacctaccagtggtaccaaccccaaccttggggcaaggaaagaatacaaataagatcatggaattctaaactaccaatttggtaacaaaattaacatttcactcctctgtaacgtttcacagggttacaagctctgttagacttcaggaccagatgcaaacaagctcacaagaccctgaaatacttgagctgataattggtgcgcttgaaggcgctcgccatccaaattccacacactctcattgccgaaagaagtaaatgtaaatgcaggagtctgtagccaacatgatgaaatatttaaccaaaaagaaatgacctgagaacacaagaaaatcaaagccgggagagaagacataccttgtgatgctcgacaaacttaaaattgagcggttttccaccttttcttgcgagctgggtcagatgcctgcatatgcgtaagtcaaacatggtatcaaaatccatgagtaaaaggatatttcagtaaggaatgtggtaattaatcagtcatttactgacataggcagtagtcagtgttctacattatagtagttgaaaatggagtctttatcttaccagagataataagcatgaggacagtctttaatcaatatgagatgtaagaaaccatctgaaaggtgtgcatcagccaccagaccatctggtgctctttcatttcgatttgaaattatggcagcaccgacactaatataacgccccttggatttcagccatcgtgtttcgcctggatgtgagtagggcgttgagtggcagccagccctgttcccacgatttgattttgatttacagactttgcagtttacacggcagatcactctttcggatacacttgggctaccagattcttcacttttgacttccagatatgctatttcagcctgatatgacctgaaccatatggaatagattagtaagaaaatgttataaatcttaaatgatatttttgaatcacaatagtcacaaatcaccatgtatcttttaataaagaatcctggaccaaatacatgtatgaaatccttacgattgagttgtatatcttccggagaattgacaaggaagttcatatagtcacagtaccatgtcataaacattttagctaaattctggtaagttaagcaaaataaaccagcacatacctatgccttagaaacaccttcgttccagcataatcataacgtttagggcccatccagcgaagcttttcactctctgtaatgacatctccataaaacccatacctaacacaatgtgaacaagaatttagggggggcggg

SEQ ID NO: 683 - DNA, 2748 bp, Cannabis sativa
tgtatatccatttacaacttacaagcttctgattttttggttataacaccaaaatccaagtgtcattcttcttcaaagaatccatctcctcatccatatcttgctgccatttttgaccttgttgctctctatagcttcttggtttaacactcttagaaccattcataacagctaaaacatataatgtctgcttcagcatgtattataggagaagatatgggacatttgttcttggagtgcatttttattcgactatcatggattaatctgctggaggaatttgaactaatttgggttatactgatcagcaaacaaaaacaaaattatggagaattgcgattttggcaacaatttcggttgtgtggttggaaagaaatgctagaatctttgaaggggccaaaagttctgtgtcaaatgtgtgcaagaaagttaagttttggacagctacttggatcttaaaaaccaatcactttgaggaattgtctttttcagatttaagtagaaaatggaaatcattgacttagtggaattgaatatgttattgcatgttggatgttacaggatttgtttgattttggctataattttgtaaccatggttttcctctgccacaagtgaggattatcaatacattacgagtaggggctagtctaagacaatggcccctttcacttttgaaaaaaaaaagattatcatccaaatccttttcctgagactcttcatatttgatctgcgtgttcgtcaaattgatcaacctggtcaaagttttcttgtgatatttccacccgattcagtcatcaaacatctaactttgtttagcaaaatacaattcatgcacaacttgtcaaattcattattaacaaactcaagaccattattggttctaaggtttttaattttcaaattagtttggttcaatgttctccaaactttaaattttcaagacagttagatttatttttgagtaagtaaacccaaactttccactaaagtcatcaagattacctcattgagttggtgttctacttgctccctacaaatctatctcactaaacaataaacaacaaaataaaccagaaacaagataaaaacacagccagatttatactagttggcctaatcaatagcctacttcagttcctccaagaggttccactatgagcaaaataatatgctatagacttgtctcagatcaatagaaatcgatctcgaaacacaacgtgtatatgacttagatgagaaactagagaacccttttacacccaaaaacttgaacaatcactcaaacctcccaactctcttctaacatcacatacaaatctctttcccaaaccccttctctcagtgctctctttagaatcttaattactctcactctctctcttgtttgtgaaaaatccaacacgcaagtatacgtatcattttcaagtaataaactcatgtgagtgaggtcgatcctacaaggattgtagctaattactaattaattgaatctttgactttatttggcaaacaaaatttggttgtaataaaataataaataaacaagaatagaaaataacaatgatttagaaaattagggaatttaatttcaattgcttctaatttttactttactgatgcaactaatcttcttgttctacctagtgtgatggcagattataaattgttctctattctgattaagacataaagaacctaaattatgacactatcctacatttctgaagtataacacacatataatcagcaataatctaaacggtacacaagctacataaatcaattatgatataatcaattatatcataactaatactgacttttcagattttatattgaaagtgtaaatcatacaaaagatggccaatcaactatatgtaataagcacaaaaacaatccgttcacataatcacatagaagaaaagaagactaaaattgcattaatcaataaaaagtataagacaatctccattaaaaaccttaaatatgagtttagctcataattgtcattctaaacaattgcaaataacaaattggaaacataaaataaaagatagatgagaagagttgatgaagaacaatggtgtgcttgaaaatcctatttttctctctagttttcgtgcctccaaaagcttctcttcccattaggtttaataactggctgtcctaaaaagctctatgcgggccgcaacatagtatggaccatgcagtggcctctgtcttcaactgacagagatcctagcgtgaataacagcgatgggccgcgatatggtgtagaccatgtcgtgacccttgtgtgcaatttctgggcagcaagctttctatgccttggcatcgtatctccaatgccaaggcatgtgtccaacctccaaaacttcaactttctgccattttttcccgaaggagcgccttggcattgaatatctatgccatgaggctacttcaactttttcaattctttaactttagaggctttaactgcatcaaaatttctcaaatcttccaaggactccacttttgccatgccaacatgaggatagttttcagaatatatatatttgtattagtctgcaacaccaaatatcaagagagctcttaactgagtctgtcaaaaaacttaacaacccaggccatctggcaagttgttatttgaaactattaggttatgagaattacacaccgcagagtttataaaagaaaaaagagaataaaaaaatcacccccctaatagttattgtatgagtc

SEQ ID NO: 684 - DNA, 2225 bp, Cannabis sativa
ctctctctctctctctaacttgttttttttttcttcaaatgagtaatttggctttctctaattgatgtgtagaaaagttggtacgttgctatgtaatttatttctacccattgttattatatacaaagtgatttgtggatattttcttttttaaacattttgataagtatctaatgctttcaagaattttgacagcttactgataaggtctctgattgctcctctctttcatctgaatgtgagctacatgatagtatatggtctgtggattgtggttgcaggtagcttatttatctaatttttttttactttttttttgtattcttctccattttgtgatagtgtgttaaccagcatgatatgtgttccaaatcataggtattaagggtttccctttatcatgaaaaatagaatggatgataattttattataaatactagaaatccatctcatttaatcaagatcaatttcaatctcagtttcctatagctgtggtctttagaattgagaacaatattttcttgactgtaggaggaactataaggatgttcttgctagctctgatagtcattctcctgctaacaaaaggagtactgaatcaggtctctctcagagcgtgttggattctttgtttaatatctccaagagtcctacatatcaaccgcaactaatgaattggagaaatgttgcaaagaaattgcagctgctgggaccccaatttgatgtttgtccgtctagtgattcaactgcacagcaggatatttatggtattcaactttaataatttgatttattttataagctactattctcaatcccactttccctaatttatcataattaaaatgccataactgttctttttgtttctgctacacttgcaaatttctgaagttttgattaagagattgtatcatttttgtaagctattgtttatcttaaaaccaacttagtacattattgtttaataataccattttaaaaccaacttagtatattattcccttgaattaatgtttcttatcttttaactacggtggtagattctgtgtgtgtgttttttttttttttggtgatggaaagattctgtgtggttttagtacaagatactagtgatcaactactgtcttctttagtatcattaattttagttgtagatgttttgtctgagcggattaaaagggtacatgtattatacttactgctgttgtttgggcgtgagtacactactgagtgttatttttctttctcaactgccaatatgaaaatagatcagtaatttaaaatagaaataaacactcgtaacagagtgcaatacagcacggaacaccttgtctggttggacttatgtatgcttttatattttgtattttcattattggcaatagttcttggacccaaaaattttacttaattggaaggtgttatttattccttttaaaaatcgtcctctacttgtttttcagttattttaaatgattaaaattgcacccattaatgtttggtcaccagttattgtaaagttttcttgtccttgtagctaaaggagatgaatatcatgcttttagaaaaactgcaaatcaacaatggagctcagtaaggtcctgctatgagaaagtaagatggttctttgcaattttatttatttggcgagtagttatttatagttattgaccagcagattggttttgcaggcagcaacagcatattcaaacggggcgaaggaatatgctgcatacctttctgagaaggtattaatacttgagaaagaatgctctatattttcagcatggttgagtaattgcatttatgttagtaataatatctacaaataattaaaactgatacctgattttcttttgggcaggggcaggaacaaactaaattggcacagaaagctagtgaaagggccagcaaggacatttttaaagctaggttagttaattgttaaaagagaaaaatgaaaagcttcagcattttcttttactggttccatctttcttgttgatgaactaacgcattgctgctaatctgcagaaacaagagtatacaaaatgtgataactattgatttgcatgggcaacatgttagtccagcaatgaggctcttaaaaatgcatctcatatttgtttcttatgcacaaagtaagaacctattgattatttaattttttcccgtgctgtcttctgctctttctattaggctggtatttgacattatgtca

SEQ ID NO: 685 - DNA, 1277 bp, Cannabis sativa
ttgagaagaaaagctggttggatcaaccactagtcaatgtacagtgtttgtagcaagaggaaccatgctatgagatacacagttttattgtagaaatttttttttgctaacaatttaaaattatggaataaggatagcctagaacattgagggttttgttttggtttctgtcaactttgttaacaattttcacacggcaccgactcctctcattgctggacctattagtgaattcagaatagtacactgacttcagcaaaatgaaagatagggaagtgaatgggagttcagtatcattctattctgctctcgtaaattagtaattattatagttatatattttaaaaaattattgttctgtttactttccttgattggataaatcataatcgattgattttcgtttgcaggatatcagaggcagaaggcacatgcccaatatgtcgccggaagatgaagaaggtgaggaagatttttactgtctaaagcattacaccgacactgctatctttgaaggtgacgtgcttacatgtctagtactacttaccttctttcctgacaaattatgacatcattggaaggaattttagctgagttttgaagtatagaactagaaagtgcattgagtattgcctttttgtttcttcaaaaaaggctttccatgttttcccattctttctcttggtatagatagaatcatcaaaattgactcatataaaattgtctataatttctcccactttggacttgagtgggtcttctaaatgaaaaggcctggcctagagaagtagtttttgttttgatattcagacatacttgaatctgtggtcaagatttggtttattcactttccaagttgaaactttagatcacttaccaaaaagcttctgcattcaccaacacacctaaattgtttggtattatgaccaccaactttctcatgatagctataccatcatcaacagtaatttgtggacacttaaatgtgttttttttactctaaaatgaaacaaactttggagatctgtttttggatagaattatagagatcttagattgtatctgcaatgcatttttcaaactaaacaaaaatgttgcgcattccctttcatggaggtttattaagagtggacaaaatggagattaatatttattagtcccatgcatttgggttgatatacactcaaattacactttatagataattttaaatagtaatcgcatcactctaaattgtgtatttaaaattaagtgttggagtttattattagaattta

SEQ ID NO: 686 - DNA, 5230 bp, Cannabis sativa
agaattaatggcagaaaaatcggtctttttttttttacattctcgaattaaagggtatttttatggagtgatacagtaccaatgatttatacagtgcgaactgtttgatgaacaggttcatacaccttatttactctattatttgaattaaaagctgccacacacacaactttttttttttttttttacataaaacacttcttttatatctgagattttctcattcacatgccatgcatctatatttgtgctacattggtactataagacaaaatagccttctctttctagagtagctatccttgtgtgtatgtgcatttttcttctctagatctccaatatttaaaaatgaaaataatagtatattaggtcacatggtgagatgaagaaatatatgcactatgtgatgtaaagtgcaacatgtactgtgctgcaaattttctgaacactgaataagtcggtcatattaatttggaatagaatcttcctaattattcaatttctcattctgatctccaatctccatcttttcatttttcattttttttttattttatttatttttattcattttggggtttgggggagattggctaaggcccttattagaggactcatggtagtcaccaacacaaagattccttcaaaaccaaaaggtttcctattgagaggaccaaccaatcattgtgcaacacatacatgtacgtagaagagtgtacgtgtttgcatatgtaccataaaaactcataattgaggaacttgcatttttgttagatttttataatgattcctaatcttataaaagaaaatctagcaactattattaacggcctcctccacaataaatgtactaaaaagaaagtacattatgcttatttcttacgttgatttgatacgaaaacttaagtaataaatatcaatttttaagccacgctaataagagaagtcttagtgtaggttttaaatggatgtgtgaataagttgatatatatttttttttaaaaaaaaaaaacaaaaaatttagcttctatgatcaatttctctgtttatgtcactctgttaagtgatgaggtaataatggtggacgacgaggctaagggtccacagggacaggattggggttgggatgagtatatttgtacaattggggtattaatttcttgatgttttgcagtgcaaatggtggtggtggtggtggctagctctggatgtgtataggcttaggcattatatgatttggcattgtataaacatttgatatgaaacggtactataattaattagttggtgctggcaaaagggaatctagttgtacccgcacttttttgcaaactgcaccggaaaaaataacttttgccagtgtgctttattgtccacgaaaattggtggtagtagtataactcaacatttttatccgcatttttggttaacgttggcaaaagtcatttttttggcccaattttgaaaggaccgggagaattcatgtttcttgtaatgtattttacactgtattaactggaattaattagttacactgtattaactgtaattaattagttatgcattgttatatgtataaatttttgacgacggtgtcaacgttgttagtatctgtgttagtgtttattagaaactctcatataccgtatataaaagagcattgctattaggcaccactggtgcctagcaccactggtgcctagcaccactggtgcctagcaccttctcgacatgtcgcattgcgattggctagcgatattccctaaaaattattatattaaattatatgagactcgatacttggttgaaccaatagcgatattgacacataggagagtgttaagcaccactggtgccctttagcatttctcgtatataaaatattgtatgaacgaattacttctttaatacgtcaattaatgttgatataaaaatttcattaatcttacttacaactaggtcggtcttacggtgggctaagtcagtacttaggacacttacatttttcgagagtccaaagtgaaaaataaaaaaaaaattattaaggttttatttaaataaaatttaatgtattgtaaataataaatattcatattatgagtttgaattacataacactctttttcaatattttttttatatatttttaagggcccaaaatgtaattagtgtttgctttgtctacaacaaactcttattctactttttgcaccacacatccacattcttaattaatcttaatctctacttaaaattattggtaatcatatcatcaacaattgtgtcatgatttcaaaatttaccctaatgccattagtttgggtccaaaaccaacactttatcaaacttttcttgtagtggataagatcaaaacttataaaaagagagaagaaaaaaaaaataatcttatagccaatattagaagtatcattccaaagttgcagcagtactgttttaaatgttaccctacaaatgtaaaagttatcatgaaatccaattactctttcctcaagttccttgcaactctaaaaggcatcataatagtgtcaaagagatccccacaatagaaaattgtacagtgaaatcactgtgttgtacacatttaatatatttatatacatatatatggttgaatttgttacaggagaaaaagtatagtacatgcataagactggttcaacatgtactaaaatttaaagctcactctatacttagacacatatatatgccaaaaatatcgagagcttgcatatgtaaaagtaccatacaacatgtgttgagactttaataatatacttatagtcataaagcaaatagcaatttgtcgttgaaatgtagctgatttttaatataagtatattcgtatatgcaagaatgtatttgtaaaaaggaaataaacacaatagggaatttttattattttttaccagtgtgtgtgtctcatctaaaggtcgaataatgatgaaacttcacatggtatggatctgagcctactttatatattccacaaaagtaaaatggatttgcatcttggatttttacatcattacgtctcatgcatttgtctctctacagtgttcaataaagaattaaaagatcattctgaaattatgttagttactatagtacccacttttaatcatagaaacatgcactacatctcttcactcctctaataacctctctctctctctctctctctcaattagtggtatattctagcaaatcttctgttattttttttttgttttatttcaattccaaaagtgagtttcaacaagtgcttgagaatattagaatactggtcagaagctgcaataatgttatatttatgtgagggctcttagttccttaatatatatattatatattgaaaaatataaaagtgaaaagatactctttggtgatgggtggcttgaaagacaaaaaatgctttagacttagaaagaggaggataggaacatttgatctactttccatctaggaaagacaacaatatgggtcaagctctgcaaaggaagtattgaaagatgtgtccataaaaaatatagtttggaaaaagctctctctatagtctataccattttaaaagattaaaatagaaccaaaacactatctcaatatgaaataattaatacaaaaaagaaatttattagaatatatatacatacgtatagcattcttgtatggctttcctttttcttttccttatattttatttggaagcgttcgtgtatgtttggttgcctaagaaaaataaaggtttgttacagaagaaaatacagagtaaatgaagaggcattatggtcagagctatgtgtgtttaagtttgttagagattttggtaatcctcatagaatcaattagttgtcctttttcattctattattgcattgttattagcatattttcttttttttgtaatgattgcttgtaccacgtgtaaggctgtgattgttttcatctttttcatttgtacctctgtattgattgtataatggagatgttactattagcatcatttgagctaatcaaattcatttattgaatctttagaaacttcacttggtatcagagcacaccggtcaacgtcatgtctacctctcaagaacagactagctcccctgaaccaggaaaccaaggtgatcagactccaattggtataaccagtgtaccagtagcaggcataggtcaagcaccagttgcatcaagcaatgctttggctggtagtccttttagcaacacattgacccaacccttctcactaaaactcgatcgcaacatttttgcactgtggaaaactatggtcaatacaatcatcagaggccatagacttgaaggcttcatcaatggcactcgacctccaccaccacaatttattcccacaggcaactctgcagttgacactctaggatctgttgtggaggtgaatatcgaatatatgagaactggcttgtcttcgatcgactcctcatggggtggttgtatggatccatgattgaaggaatagcttctgaagtcatgggttgttaatcagcctatgctttagaatgcacttgaagagctctatggagctcactctcgagccaacatggatgacatcaggaccaagatccaaactactcgtaagggatctcagtcaatggctgaatatctaaaaatgaagaggatgtgggcagattctttggctcttgcaggtaaaccctacccaaaaaaacacttaatatctaatgttttatctggccttgatgcagaatatctgtctattattgcgcttattgaatctcaaccccatacttcctggtaatcacttcaaagtaccttgctaagctttgatggcagacttgagagactcaatgtcatatctgccaacaacaagcttgtgggaaatgcgtctgtaaatctttcacacaagccatcaggatcaagaaacactcacaacccagggagctataaaaggcaaaaccctcatcgaaacagtggcaggggaaatcagaaccatactgtggtggatacagaggaagaggtcgaggtggaagaggaaatgggtctaaactcacatgccaagtttgtggcaaatatggccactcagcagatgtatgttacaataggtatgatgagagttacatgggccatcaactcaacacagagactgctgaagacaaacaatactcagccctaattactacacctaagatgtgtcggtctttataccctaaataaaactcat

SEQ ID NO: 687 - DNA, 4506 bp, Cannabis sativa
tgcaagaagatgacctgtgtagcctccgctatggggaaacagatgattccacatctcacagtttgcacagtgttaatgcaattctggagcatgtagaagatgcagtaggaaaaagtgagcctcttgccaaggagaaggtattgcgattttgtttctctgatctgtccctggcatgtacattctttacatgatggaactaaaattgtgagaacttttaattggctttcagataaatttggacagagtggtgaagacaaccttatcaacatctattccagctattgaaaatgcttctacccaaaataaaaatgctgagaaggttttctctccaactgtatgatctgaatactttttcagtcattatgaaacatttgaagagctttcagcctttgcaagctcttccaaagaacacacgccttcatggcttactatgacgaattactagaaaaacactaagacactgaaacttttttgaggtttagaatgagatgaaatgtttgtatatccaatatcaagcagatctaaatgcttataactatgaagagtcaatttccatttgcaaaagagcagtcaagagaatgaactcttcagaattaaaatcctatatacaatcttaagtctcaattggattcaaagaaatcttatagagagaaaattatagagttcatgtagctcttagttagtgaagaattttttatcctgtgtaaagcttggtagattaaagattgtatggattcaagataatattttcttgttgttattgttcttgtcctagttgcaaagaaaattttaaaactagtttgtcttgtttcattatttcttttgttaggaatattttgtgcacctaatgtatatgacttgtcttttacattgttgttttcacttctcctgtctctgcatggtattgctatgcttatatttataaatattacatatatgtacattctctacaggtgactagacagaagaagctatttaaatctcgtaaaaagtcggatgtcaagagtgagggtaaacagttacaagaattatatggtgcctggccttcaccaagaaaccattctggtcaactagaaaatcgtatacaacaccctgcaattcaaccatctccctctacagttcagcagatgcagcttcaatgtcctgaaatttttcatttccagcatattccaaatcaatttgtggtgcatcctatgtatggaaacctggcaaatacatttcctgccatgcctgtgctatcgcgtattcagcctgggaagtataagcagcagcctttgctttctagccgtgatgtttcaccagctaacagcaatcttgtaaacaattcggcagaagctcctgtgaaaactacaatcatgacgcctcaggaaaaaatcgagaagttaaggcgacgacaacaatttcaggcgatgcttgctattcagaaacagcagcaacaacttagccaacaagtctcttcttccaaccattccaccactcaaacttgtcctcaacaatttgggggaagtgatgttcgacttgaagatttgagcactttctcttctttggaacctatctctcctatggaagaagatgattcaagttctacatctgcagctatcgatgattactctgtcaatgaatctatacttcacagacttcaagatgtgatatcaaaggtattgctagtctgctattgaattttactgttatgaagtaaaatggatttagttacaatcctattcttgctgcagttggacatgacagtgagaatctgtatacgagatagcttgttccgtctggctcaaagtgcaagagaaaggcagaatctcagtagtacaaacaaaggtagcaaggacgaacgtgaaacacttgcagtagatgtaaccaatacctctaacaggtttacacacttccttttcattttagctgccttacataactagttgtgattgttctgctgcattcattccttaaatggctgctcttccaattcttcttagtgcaattttcacttccaagatgagttgataggagaaaataattatgataggtggataattttaattttctaatacataaatttggaaagaatgggtgggttcaattcacattttttttaaagaaaaggaatacttaacaacaatgaattacttcttttctattattcttcatttgataccaggtttaaaatcaaatacaacagttgacctgatgattgaaaacaaatagagaaacttgcctatttacaattatgacttctagttgtaaatataagattctccacagttgtatgaagatgtgtatgaagatgtaattgtttgaaacttactaagatatgaaaggaaaatatttcttgccaaatctttggtcaaagcatctgctaattgttttccaattatgacaaaagttgttcaagaggcctctttaatgaggcatatggtgtaagccttcatctttcttgaaaagcactatattgttaattacccaactattattaatgtgaatggtgataggagaatgtgtattctacctttattctgcgcttgcttcctatcagcttactcaccatcgtttctgaaacaaaataaggcaaaacctattaatattagtattagtctcattagtataattgattaggattttagaggttgagttgtcaaattcttagtggctttaagtgaactatcctttagtcctaaggtgttaaaatagttaagggatacatagtataaatagagggttgatcaattgtaaaagataggggaatcgttttgtaacaaagtgagtaagagatttcttgacttcattaagaaggcgcttcagccgcattccttcacacatgtgctaaggcgcgaaattctgcttcagcactgctctgagcaattacttgttgcttcttgctacaataggatacaagatttccccaaatataggaacaatacccagaagtggatctccggttagtgagggaactgatccattctgcatttgtatagattttaagatatctgtgcaatgtttttctaaacattagccctttttctgttgttcccttgaggtacttaagaattcggtagacaacatccatgtgttcctctaagggattattaaggaattggctaacaactcttacagtaaagtttatatcaggttgagtgtgagtcaagtaaattagttttcccacaaggtgttggtaccttcctctatcaactttttattccatctgtgtgtgctccaagtttagtattggggtccattgatttgtcaacaagtttgcatccaatcatctctctttcctttaagagtttaaggacatatttttgctgattcactaagattccttggctggatcttactactcccatccctaggacatatcttaattgccctagatccttgatatcaaattcattggaaacgagttgcttgagatgagtaatttcctccataaaatttcctgtaaccacaattcatcgacacaaactattaacactgttaacttttgactagttgagtgctttataaacaaagtgtgattagattggcattgagtgtagccatcgcccttgagaaccttagtaaacctgtcaaaccaagctcgaggggattgcttgagaccgtagagagattttttgagtttgcacacctttccttttggatatctattctcaaatcctcgaggaatgtccatgtcaacttcttccacaaggtcgccattaagaaatgcgttctttacatcaagttggagagaggccattcctcatttacaacaatagacaagagaacctggttagtgtttaacttagcaacaagagtaaatgtctcttgataatcaatgccaaaggattgggtgaatcctttggcatctaagcaggccttaaatcgttcaattgttccatcagccttaaatctttcaattgttccatcaaccttaaatcgttcaattgttccatcaaccttaaatcgttcaattgttccattaaccttatgtttgactgaaaagatccattttcacccaactgtgcgttttccaagaggaagatccgtgaagatccatgtttcattcttttcaagtgcttgaagctcctccattgaggcatccttccattgaagaatctgaagggcttcttggatcaaaccaaggaatctgaacttagtccaaagaggtgataaaagctctatatgtaagagataagcttaagtaacttagatagttgcaaagggggtgttgggtgcaagagcgaaccccttttccatgagcaatgagaattctaagatcgtctgacacattttcttccataataggctcaggtctaacatcattctgtgtttgttcaaggatgaatgggatcagattagattcttgaccttgctgagttcgcgtagtgacttgtgcaatggttgctagttgcttctttcttcttgagtaaaaatagatctttttgcttggattatggacatgacttgaagggattgagtcaaagttccttatttgactcgattgaatggtgaggttggacctct

SEQ ID NO: 688 - DNA, 1759 bp, Cannabis sativa
aagaactagctttaaccagaaaaggattaaactttctcagatctatgttaccaaatcaacagtttccttcagaacagcctccaatacttcaggtttttcccccatcttcccttctttctcagcaacactctctcacactctttttttaaacttaaacactctgacaaaacgttcaaagatcacaagcccatgaaaccaaccaccaaggtacaaccttggaagcctgctaaaaccgatacacagaaaaaaatagaagaaaaaaaaaaagaattaatataagtataaagaagcaaaacccagttcaaaaacttaattttggcctcaaaattctggttggaggaactaaaatgaggcaggacaaagcctacacctaatccacaagacaagagccaagaagacaaaccgctaaagagagctcctactaatagagagagtagtggtttaactccagtaacagtcgccaaccttttctaaatacaaaatcaaaatttccaaaaagcccctgtgacaatttttctcatttgtaaaaaatcagttcaagcccgttacacaacaatattaccactttgtatatatatacactgctacattgcttaaggcaccataccgcagctcaaataatcagttcaagcccgttacacaacaattttacttttttattatatatgctcctatgcttaaggaacccattacagcttaaatagttattggtataattaaataaaatatttataaattatatattttaatttaataattattttttaaaaaaaaacctataactatttataaagtatcattttgtaataatcatcatttgtgcttatgttcataagcaaataatattgtaattctcccacaattcattttatactgtataattacgcattaagtctagtatttatgaaagggtattaaatcctatatattttgatttaatagttattataaaaaaaatagataactcttcataaaatgtcatttcataatggtattaaatattattggtaccaaatattaatgttcctaatgattaattattaataaatttgtgtttcaactttcaatatgcaaagagatggtaatgttataattctctactttttattttatttatttatttatttgcagaattctctactttatttcttagctatcagctactactttttttattttttgtctttatgctaaaaattaccttatgcaaaaatgtcattttcctatatactttttttccttacctatttattcctttacctttccttttcgtgaaaaatagttttttctctatcacagagataccaatcttagcaaatgaatgataaaccgcacatgcacacatacacctgtttttttttttttttttggctttttcttttttggtgcaatttcacttattttatactagcctgaaaaaactattcactttgtttgatttaaaaaattatttatcttaaatggttgttcaagtaatgaaaggccatgcaatcaaaattttgtttagtggaactgttgatattgacattgtcactctttttgtctaattctcagattttttttaaaaaaagaaattctcagacatatatctacgtggacaatgaattaagaaatataaaagtaatttcttaagaaaaagtatttagaaagaagaaatatatatttgcatttagaccctttgagatttcaatttgtcatatagggttgctacttctatattgtatttttgggtttatactttggatgcttcttggcttcc

SEQ ID NO: 689 - DNA, 2576 bp, Cannabis sativa
tttcaagaacttattgcaaggtgaattctatttcagattttttagtatcgagattctagtttacatacttagttgaatgctctgacttgttacttgtagtcttactatagtctatatcttaatttaaaattttgaattcactttttgcatagcttgtatagtctgtgctgcagtgttagtctatgttctcttaattccttagccacacgcactgagtgaacacacccatgctccatgagaaggctcaccgattttctcagcaactttcattatcttcagcagcttcccaatgctggagagcccaagttcagagaaaccaactagcttccaaggtctcatctattcttctacagagacacaactgggttcaactcctccaaaacctcaaactcaccccatcacttttcctccaaattctacacaggactcagaacaacccacaaatatcgttggatttctttgattgggccaaatcccatcttgggttcgaaccagacctcaaatcccaatgtcatatcatccaaatctcgcttgggtctggcttttctcaatctgtgaagccccttttggattctctggttcatagctaccctgcaccagttcttgtagagcacttgagtctgtcatgtaaaggtagaaattctctgttccaatctttgagctttgttcttgaaacttatggacggaagggtttgtttagagaaggtttagaagtttatgacaaaatgagagttcatggttataccccgtcaattagtgtctgtaatgctcttcttgatgctattcaacgagggaatgagattagactggcttggtcattttatggtgccattcttcgaaatggggtctctccaaatctatttacatggtccctagtagcccgaatttttggtaaaaatggggagcatgaaagaatctctagaattatagaattgggtgtttatagttctgaaatatataacactcttgttgattgtcttagcaaaagtgggaactttgaagcttcatttgattgcttaagtgagatgcatgacaggaaaatcaaccctggttttagtactttgagcttgattctagatggggcttgtaaacatgaaaattctcaagcgattgctagaataataagtattatggttgaaaaagaactcatttctatgagtcctttatgtgaatatgataagttgatacaaaagctttgtggcttgaaccgaacatatgctgctgagatgatttttaggaaagcttttaatgaaaatattggattgcaggaagctacttacggctacatgctaagggtattgtctaaagaagagagaacagatatagcaatttgggtatacaaactgatttctgaaaagggtgttgtattgaatgaggctacctataatgcatttggtggtgttcttctcaggaaagagcaatctgaagaggtatgtgagttgttaatgaaacttataagaagaggatttagtccttgctcttcagatttgtctggattcttggcgattttatgtagaaaaggcagatggagagaagcagaggagatgttgaatgtgatattggacaaagaacttttaccagattcattatcttgttgctcattggtggagcattactgttttagcaaacagatagagtcagctatcaaattgcatgataagatggaaaaattgaaccttagtttggatgtaaccacatacaatgtacttcttaatggtttggttgtgttaaggagaatggaagaagcagttagagtgtttgattacatgagaagacaccaaaagctaagtagtgccagttttacagtcatgattcagggactttctcgtttaaatgaacttaagaaagccatgaaacttcatgatgagatgttgaagatgggacttaagccagatgaagcaacatataagagtttgattttggtgtttaagtaaaatacatttttgtaatagattggggtgcgatttttgtattcagtctttgtcacatgtagtgatttttgtcaatggaaatgtagtggaaacaaaaggaaaggcgctccatgaaattagcacttattacagagtaaattgttatatgctatttttgttttctttgagtaattttttttttctgaattagttttcttcgagtagtttgtgattgtgagttcatttatgtgtagtgtaaaaccaaaaaaacgatgacaatactttttcttttgctcaagcaaaaacgacaatattttctttttcttcgacaatagcaaaaatgacgagaatattattagtaaacaagaaacgaaattcataattcgattattatattaaaaaaacgacattaattttttttttaaaacacaaaaaaagcaaaaataatgtaaaagcgatatgaaatctggaaaacggccggaaaaaacaataatcaatgaaacgacaacatttgaaaataacgacaaaatgtttttaggaccgacattaatttttgaaaacgacgataataatgaaaaacgacaatttcataaataaacgacaacatatgaataaaacgacaatcgcatgactgcatgaacatttctttagtgaactcaaagttac

SEQ ID NO: 690 - DNA, 913 bp, Cannabis sativa
atgccattccctgcactaaagctctgtcccgggttgtacagctgcagcaacccggggggaacgccggccaccgctgccacggaggacaagttatcttccgaccgaagagggtacgtggcaaacagcccgtaatcctttgacacgtgtctatcaccgcatgtgcagttgacggttacattgattggagagccagctggtatcctagttggtttaaacatgttcactctgtgcacccaatcctcagtggtgagattagcaaaagcaatttcagcaactttgtcatatgtgtccccaaactgtgtcttgtatgtgaaagtatgacccaaaaaatcagtatttaagcactcacaagagaagggcacattgattctggtgcctgtaatgatgctgtctttgttgggtacctgaggattgtatctaagtatctcagtgaaattttgaccaaatatggtgctgatataactcaaattagaaccttcccaaacaaaatatgaggccaaagcaaggttgcaaccagttttacacttggctttggctttaaaagataacaagagaaaaacttgaaaggctaataagatcaaaaatgatgctcttacaaccattttgggaagagaaagaaaaagggtctaacaattgtgagattgtggaagatttggagggtgtaaaagggttaaagactagctagctggttttgaacaacttggtaaagaaatattatataacacttacaattgttggttagtacatagtatacttgtatttgtttgttttttaatataattagagctgtgcctgatgtttttgtctttggcatcactctaatagaaatatatgattcgttcaactattatgagtgactcttaatcattttgctctcataagatgacgatttcacatttttattttcttcttt

SEQ ID NO: 691 - DNA, 2310 bp, Cannabis sativa
atgaattactactagtgtgtaaaaattttcagaaaaaatggattagagaaatctaagtacacactttttactaaaattttaaacggttgaatagtttgacgatgttttcgattcaaattatatttatggatttcactattttacaacttcgaaatattaattgctcttcttgttggtttgtatgtacccttataggattttctaaataaaaaaagagacaaaggtcaatcaataattgtcctcccccaaatttattagtgagtctggcaaaataatctttatgaaaatttttattagtaaaatgacttttcaaatatttttatcagcaaaatgatcttgtatggtcgcagaaacgataatgaattacatcgtgttaccatacacaatcattatggttgcatagagtaaattaagtgacctttacttgttagtttgacataatttattagggatctttacttgtggtggaggaaaatcgttgtaacataacaaaaaatgtaacatttagatagaaaagtaaaacaaaatcaataaaacagagtaaatgtcttaactaaggagaagtcctaggacagtatacatccccattctctaagtagatcttgaaacgaaaggttatcaaaagcttttgttctataaacccatgttgcaacctaaaatttaatcctaataggattttctcttagtttgttgcataaaggctcttacttatttatttgaatattgttaacatagctatatattgatataaataatctcattgcttttgcagtcagacttaaatcaggccatttccatggtttcttattatgcttcatcttcggagcctgcacaagttcgaggtaaaactgtatatatccagtactctaataggcatgaaattgtcaacaacaagagtcctggagatgttcccggaaatgttctgttggtaaccattgaaggtgtagaagccggcgatgtgagcattgatgttattcacttggtaagtggttgccgtactaagtttacgtacatgtctttagcttttgttgtatttaattgatacaatactgtaacaactaactgattcatatccactttggggtacatcccgaagtagctataatgtatgactatatattgctctatattaatctctgtaaataccatattttctaaccgtcttccttaaaagtatatatagatgatatttattatcatgattctgccaacaattttcaagtgaaacgtatataaaaagttgtttgaccctttttccttgcaagtataaacctcatttcagagatgaatattttctataaaatttgtgtatttgatgcgtaatctattttaaacaatgtttgaatatggcacgagtaaaagataaaataataaatgcttctcctggttttaaatttttaatacactcaagaatcaacatactacactgcttggccttttggtctcttctcagtaaatcaaacaaattagtttcttctcacctttattatgctaagtaaattaagttccaattttactttaattgaaattggttgaatcacagatggtgttgtatcttatttaaattgttttgttggaaacagtttggaattattatcatgttcgtcatacccctttctaaggtcacgcatttatgtacaggtgtcattctgcacttattactcatctgtttggaatttttcataaccccataataaattcacattgaaggtggttcttaatttttgttcctaacatcaatttgatctgctcacaatcacaagtcatttttaacttctattgtaggtgttctctgcttttggatttgtgcacaagattgccacttttgaaaaggctgcgggttttcaggtttgttatcagttatgttggtgttttcttgtagtgcattttcaatatggcatcctcaatttggttggatttgcaggcattgattcagttcagtgatgcggagactgcatcttccgcaaggaatgcgttggatggaaggagcataccgaggtacgctctataacatacccttcttattatggaatttattgagatttgggagctgtttgaatttgacattactgcatatccattaacttgagtaataatatgtgctttgctattttattttaggtatctccttcctgagcatgttggttcatgccacttacgcatttcatattccgcccacactgatctaaatataaaatttcagtctcatcgtagcaggtaagactgcaacaagaagatctcttctctcttcttcgtcttttgtgtctaaaatagtgattttctttttctccttttgtatttgtttgttag

SEQ ID NO: 692 - DNA, 4563 bp, Cannabis sativa
tatgaactatcaatttggaagtttcttattgaaataattgaacattaaaatcaagctatgccactaaaaacatacccatccatttcgggcatttgaatatccataaagcaagcatcgaaaccgtgaggtagttgaagcaattctagtgcctttttaccactgtctgcacactccacacgagctccatatttctttatcgcacctgcagcaactcttcggttaacaatattgtcatcaaccaccaaaatgttcttgccacatagcatgttcttaagggcacaagactcatcgggcgtgtcctttccctcctgcctcttcttgcctatacccacttgctgaagacacgcagccaccatacttgctctcagcggtttcataatcacagtgtctagaaaaccagtagccttcgccttctcgaattcagtactgctaatatgagttgcaaggagaatcatcttaggaaacttgaatacatttccattctgtttccagtccaaaaatcttatgttaatgccaccgtcttcagcagatatccacgattccttctcaactaggattaaatcagcctgctttacatttctgcaacattcgaaaaagacacaactttgtgaaattaatgatagtgtactcaagccttaaagccttaaagtttcaaaaaattgttaaaaatggcttctttaaggtatctgattaattacaatacatataacagcagaaagaagcttacttagttatgacagaaccatttttcgtagataaagaaaccgctatttttatgctactagcaacttcaaccagtataccaagtctcttcaaatggtaacttgttacagcagctctaacaggtttctcatcgactattattgctttcagtcctctaaaatcagaaggcaattcttcagtaataggccttttcacttcattgaaagcgtttttcttgtacctctcgaaagtagcagtgaatgaaaatgtacttccaacctgaggtcgacttacgaagctaattttaccacccattcgttcaaccaaacacttactgatgctcaagcctataccggttcctccatagtgtctggaagttgagctgtctgcctgcatgaacggtgtgaaaattcgatcctgtgctgataaagggatccctattcctgtatcctcaacggataaggtcaaagtgacgtggtcagaaatttcgtaggtggttgctccttcttcagtaattagatgtctaaaggtctcccagcagttctgttcatcggctgcttcgagaccacttaatgtgttaaattgacgaccgccaggtgttagtgcaatattttctaaccctccattcaaacaagaatcgtttatcaaagtctttgcaggttcagctagatgaattttgacaaatatatgcccccgttcggtgaactgtaagtgatgaatctaattagtatttagaatcaataagtacccgaaaaataactaagaaaaccactgacttaccttaacagagttccccacaagattagtaacaatctgtctgaatcttcctggatcccccataacaagatctggaactttatcggagacgaacacagccagctttatttgcatgaaaagacattataaacaccgtcgtggtcaacatcattaccccaaaatagctaaagaaacatatggttgagcatgccaataaatctaatctataatataagaacatgtttttgcaaaacatatcatacacttaatttaagaatcttcactaccatatattgtttctaaagagtaagctcgatcttacctctacgcctttatttctagacgtttcagagaacaaggaaagaacatcatctaaaatggaacgaagactaaatggcaccgcttcaagttctaacttccctgcttcaattttcgcacgatcaagcacttcatttatcaatgctatcagtgcccgtccacaaacttgagcagtttgagcgaaatccctctgagttgagcttaaatctgtgtctaaaagcagcccaagcatgcctgcaattacatgtagacgtaaatacataattacatgtacttaatgtttgaaaagaaagatgtcaaaagtggaatctataacataccaagaacaccattcatgggtgtcctgatctcatgggaaacagtagcaagaaactgtaatcaagaaaacaagacatacttggatcacaatactgtaggatgagcatattcatataacgatgaacataatttcggaaatgttgcatgcaacagtacctgggattttgcaacatcagcagcttcagctcggactttcagttcttgcatttcatggaaatcatcctcaacttttacaatgtgagttacagcagcatataagatatgaccagctaagtaccagataatggaaaatataattacagtgaaaattgccgaacatggcaccggggccttctgatgatatctattcacaattcaatacatagcatcattgatcaaaataggcaactaaaaaacttctttactttgaaaatgctagccaacaaggcggtgtggtgtgaccttacctgcaaatcatcttatgttttctgaatggatctccaaaatcgagtttgctttcatgcaaaagagacatgtcttcgtcttgattttggcgaccatacatgattagtttatcagacgaatttgttatatcgtatacatagaccaaaatctcttcattcccagcaagttgcccaagcaacttctccacaagagattcaacatcaaaggctccaccaaggtatctgcattcagtgttgaatttcattttcttttcatacacaaaaaccttctacgatcccacattcactaatcacaaaattaaaaatgtggaaaccgctatttattgttattacaaaacaaattgttaaagcttagtagtgtgattaaaatagtgatttcgaactctcagtgttatcttacactaaatcatttctactcaaacaaaaactcattcatttgaccagaacttaccctgcagttgcttcaattcgctcctttacagttgggtgcggagggagtttggatttgtaaacaggaaatgtcaacaccacgccaagatgatgagaaccgagcagcctaaagggacttgtaagaacagctttaccagtggccctagacctcaagatgttctccctatcttcctgcacaatcatgttcaaaaccaatggtcaaacgaaaacaaaacacaaaactacaaaaggtttgaacaagaacacaaacctcgcccgacatcatgtcaagagactcaatgtaagatactgtctcctgtgaaaagatcacaggcgcatactcatcccggagcggtgacggctccttctccattgtctttatagtccaaccatgttgcctctcaaaactctctctttcagaatgaattactctctctgcatatgccactccactcagtaaaggtctttcaaatgaggtacatgctgtataatcagcaaaagtttcctgcatttataaatacagacataacagcaatgccacactcaatcaataacccaccacacaaagagtctaatcaatccaaaaatagaaaattcaagcacaaacctgatcaattgcagatgggttcttgtagtaatgaaaagttgaaacaaggagagcaagggcatgaacatggttaacactaacactaaactgatcttgcaacatcctagccctctgatcacacatactggtcagcacttcttgccttctttctatgtttttagtatccattctgttgtagagaacccaaccaaatatgaccataagaattaaccagaatataaacatctttctaaaccaagttctgtaagcctgaacccaagtgtaacctgttttggttcccatctgttcattcaacctaacaaccacagaatggtggttgtgctgcatcttcagacccattattattattatttcataaaaacacccaaaaaacactcttttcttcttcctcctctttctcttcaactttcacccactgcataactatgctcaaagagaaaaacccacctcagcaaatcagaacattttcattcacagcaactctcttaaaaagtactgactaattttcaggacaccagttttttcatcattacagtatttatttcttggattcaatagaaaccagcttaagaaccaagcaaaatataattgaatttttctggaacagaaagaaaaaaagacacctcctttatattctttgaagaagagagagagagacccagaactcaaaaaggtggaaaaaaaataaaaacttcaaatttgagaaacaagcatggctctcaaaagatgcaaaaccccaaaagaaaaataaaaaagagctcaaattcccaaaacaagctttctcatttctctttccaaacaaagaaaaataaagaaattgtggtgtctcaggctgtgaatgtagagaaaggaagaaacttggattaaaaaaatggagagagaactctaatcatgtccctccaaacccaaagcgtgatgtttagttgagcttttgaggcatctagacaaagaagaagcacgttcactgtttttcttacatataataatact

SEQ ID NO: 693 - DNA, 2582 bp, Cannabis sativa
  modified_base (1080)..(1091): a, c, t, g, unknown or other
acctccagattacactactatcatgcccattattggaccattatcataccctatcgtaccatatacaaaaaaattacaaaaaatacaaatttcaccaaaactcaattttttaccagataataaacaaaaatacaaataaaccacatattctttgtcagtccgttcgaagggggtggttgtgggtcttcggccacgcactagagagaaccagcaagagagggagggttgtaggtcttggtcacgcaatagagagagctagggaaagatggagggtcgtgggtggtggtcaccaaagttcgatagtgatttcggtggtggagtttggtgagaaccagagagaggaatagagaacgagctagtgggaaagagagaagagatgagaaattttgggtagtttttcgaaataggaaggataatttggggtatacaataaaatatgcctatactaccaatattgagcaacttgtgtctaagtttttatttttaacctacaatatgaataaaaatcaaattttctttttaaaaaatagtttatagttgaattcatcacgtgtgcatcaaagagaagactatatgagcccttaactttggagtacgggacaaaagtggaattggatgtagagaaatggcaacaaatggccttacttctcatttaacaaagttaatgtctttttttagaataacaaagaaaatgacatttttaactttttgctacctaaaaggaaaatttgattttatatgcatgcattaggatgaaaataaaacactaaactaaagtgctttaaaattagaaggataggctaatttttcattatactccaaaataaccctcacaattaaaacactcagtctcgtctctcctctttcctctctctttccctctcgctcgctcactgtcttgcgcggtcccaacctaaaccaccatcctaacctaagcaaccgtcccaacccaaactgaaaagttgttcaaagaggagagcaatttgttaggatttatgccctgaaaagcctgtaaagacatttctaattataaataagagtagaacattttgatatatgcatgaatgttaaattattaannnnnnnnnnnnaataatttatatataaatattgaacatgaggctatgacttgtagttgtacggagaattaaaatcacttagccatgaataaaacagtcagcatcatattaaagtttaggaatctttaatcaatggttgctagtgtgatttactgatgcccgttattcagtttaagtaatctcgatttagattactgatgtagtatgacatctaagtgaaggtattgtagataatagagattatatatgacaaggaccgatatgaatgaagttgtatttatcaagcttaccatttattacctaatttatatcataacaatgatcaatagtagattagcctaaatcctaagtaatcatgaactcctgttcatgttattagtttcattgattcactcgttaaagtttctcaaagaagacgattcttacaacttctgtcttgagaatctaataatgtagatgattagggacaggatctacaataatggaattttaattttcctaatagatcgaatgttggttccctttatgtgttaagtctggaactggaaagttacgcgcaaaatttagatgggatctaaattatacttccactggtgaattaatagtactaaagaacaaataagtaattagaaagtgttatccgcgtttccagtaagggacacgtggactccaagtcaacatctaaagcccgctagtgggcccaaagaagataacttgggccaagtccaagtcatacaagaccttccaggaaggaatcttagctccatgcttaagtgagcttttgccaaggacagcccatatccggagggagtttcagtaccatgatcccagagggccaaacaacgtgttcttggagactagcccagtttcctttttatctgagtgcacacaacaaggaattaactctccttaaatctcgaatagaagatcgtattaagctaaaaagagaaactacctaaaatagagattaagcaattaattcataatttattgcccataattataagaaacggtaatgacagcctaatcgtgtctaattttcttagtcagcatgcttgacccttgaccaaatttttggccacaaggttgttaaactttgcagtagtgagtgttgatgggggagacacccaagtagccttcaactcccctctttgaggcaaaggctctagagctgccagttcctccttagcacgattgatcccctactgggatagcaacccaacctcattcagtggctcccttacctcattataacccccaaggggttatctatgcgaacgtcacagtccctgacccccatcttgttgagttgattggctcgtgcagctcaccccttgccatcagctcaacaagatgggggtcaattgaaggggctacacggtaggtctgctttgttcgtgctagatttggatcctgaatggtatacagtgcaattgtaacaacaacttttagctcagatggttttttcgcgaaagatgacctacatgttggaaatattttacc

SEQ ID NO: 694 - DNA, 3086 bp, Cannabis sativa
ttgggtagttgggttggtgaggaatgaaaatgggttggtgtaagttcaaggtgtttgactcttttttgggattgagcttcagttatggtttttggtttgtttgaaatcaatggcttagatttatcaaccctttgagtaaagattgaatcttgatttggttctccatgttataaccttgaattgatactcatttcttctttttgttattgtatatttttcaatgaaatagcaaactagtgtccataattagaatttatataagcaaattttcttatggaattagttagttttgggagatgttagaagtagcaattggttctggtttaaattaccatatgagagggaagtacaatctgaagtccctaaatgattttccctttgaattaattatatattggtttaaagtgataaggaggaacataattgttgtaactcgattagtgtctgttgtgataaggttgcctctatccttatcttcatgatgttctgctttttctcacaactcattcagcctcaacatgtcacttgatgttgtttgataatttggtattttaaggttgagaattttgtagtatattgtgcaggtttgacatttcctgatgcacattaatacgaacacatacccaacgagtggagttttcgaagtttcatacttgaataggagaaaacatagctcaatatatgaaatttcatggagggcaactgcttccctaagtttagataatctcaaagggtgttgtagtaagttcattatagaaactcaaactattgttaatattgataactcactagtaatgtttatatcaataaggagagcttgctaatcgttattcgtttatgtcattgtttaggtgttagatatcgaaaggtatcaactcaagttatggaaaaaattgatagcaatggcattaccaaagagcatgttgatgatttgcaacttccatcttcttatgagtctgctatggaagcactttcttctctcatttctggtcataaacgaggacagaaaccgcttatacctagtaaatatgataaattggaacgaatgagaatgtatctaaaggtaatagcagttttttttctccataatttttatctacatccacatctgtttcttgcttccttgatatttaaatgtgtaaattcgttttgtttgtagatacttggcttggaagaacatatagcgggactcaaaattattcatgtggcgggaacaaaggggaaggtattctgcttattatatttatataaacatatttgttttgagaattctatttgaacattcaaatagttattagccatccctttgacttaaatgagaattcattcttgttgttgatatctctaatgacttcattttccttcatttgatgctgtggatacttaaaatagtcaaagatgattgtgttctgtcctaatttgtatttgtttcgttttgtaatgaacattttagggttcaacctgcacattctgtgaagccattctacgcgaatgtggtgtacgaactggactcttcacttctcctcacctaattgatgtgagggaaagattccgaataaatgggtaatttttttgtcaattatgttttgttttagacctttatctcaacatgttttagactctattttttttaatatgttgaaagtggcccataataggatatggtgttcttaagtattattaaaccatcttaattgttcatgtaagggagaccaatctaccgaaatgcccgatgcattgatattcaaaactgttgttgcaatgcaacacaaaaaatttagcatccatcatgtaagggatgcaagatgtaatgttaaagagtgaaaaacaagaaaagaagaaccttattgctactaaatctacataggaaactatatagctccaatttttgtctttcctcattttagttctgatttcttaacttgtatttttaggttggagatcacagaagataggtttctacagcatttttgggaatgctggcacaagctggaggtaataggctttattttgttagcacacagcatatgattatcatcacgacgaagctcgcttgttcgtttctcaagttaaaacagctaaagaaatatttaatgttttagtgctcttttatgtctcccataacaattaatttatcaactctaaaattgaatttgcaggaaaatataacagaggacctaccaatgcctccattatttcagttcctcactgtattggctttcaaaatctttacttctgaacaggtatgatgtgtattgaggcgtttacatattcgttctttacagttttccatgtcatgctttctatctcaccttgtttttcacccatattttacatagagtatcatggcttaaaacagtttgttttataggttgatgttgctattgtcgaagttggtattggcggaaaaaatgattctacaaatgtggtatgtatctaattacattactatgtaaattccttaaaagtttcaaattttaaaacagttatctttctttgacaagatgataccatgaagtatatttgattaaaatctaattatgagatagaaatgatgatgatggtgatggaatttttaaaccatgcagatcaaagaacctgttgtgtgtggcattacttctttgggaatggatcatacagagactttaggtgtgtgtttcatcagtttgctcggatgaggacttagcgaatgaatgatcttaatttgtacatttttatttgtatgctgcttaaccaacatactttgataattttcaggaaatacccttttggagatagcatcccacaaagctggaatttttaaggtataagtgtcctatgtaagctactcaactagcatgaataagaatttcatttgaaaatgagttatttattgcattatttctgttttgattactcaaattggcagttttcattttcaagtagtttctgaattggattgatgtcttccctgctcatgaagcctaaaattccagcgttcacggtatcccaactttcagaagcaatggaggtcattcaagaaagagcaaacgagctcgaggtaattaaatcacctttgtctttagaggtttttgcttatagaaatt

SEQ ID NO: 695 - DNA, 3813 bp, Cannabis sativa
aaaaaaaaaaaaaacaagaataactaatatttctactcctcaaactttttacattatcccctgcaatataagactcgttaataatattattgcttaaatgatcccttttcaacttctatcatattattattatatttaattttattgtgaaacgagtaacacgataaatgatagttaataaatagatgtaaattaaacacttttccctattttactttaatgattaaaaaattaaaaataataatttaaattattataattttttttattctattatttattaacttaaaaaggtgaaagatatttaatttacatctatttatcaattatcatccaccacttcactcatttcaagataaaattaaataaaatgagatagaaagactaaatactgtaaaagttatatttcaataagtattattaacaagtcatacaatataaggacataatttagtagtgtaaaaaattcaagactcaaaaatactaattattcttaaaacaaatacccatgtcacaagatgtatgattttagtattttttagattttgttttgaaaatttgtaaaaaaaaacccctataactatactatatagtaatgatatatgcttacgaaaacatgtaacataaaactcattaaatttatttgagatggaactaattgtgttaaaagtatctgccacactattttgtgtaatgtattggtgcatattttgttgtgtgcacatatcataactctcctggtaaatatacatattatgacaatgatagtactagtaataaagaaacggtccaaaatccacgtggaaatcacatggtcaccatcaacaatgggtgggcttatccacaaaaacaactcctctccaaccaagtacgtgtgttgttctaattcagtttctacaaaagaggggtagtaatagtagtagtagtagtattctccaaaagtggtgtatacactctcttgttctatagttgcttgtttttttgctaataagaattgatgatgccttaacacctcattcaactctcctattggtcttaactttgacagattggtatggaaggcaagacccaaaactatgcctgaaaaaagttattagaggtgggacaccttcatttcatctctcttactcaacttatttccacagttaaaggagatattaagatgtctattatttttccttaccaatcctatccaatgcataaaaaggaaaaaagaaaagtgctatatagtcaaatcataattctcgatccatctacatagtacatgcacagaaatgtagtgtaagcacaaggcagagacataccatattctctcttcctaagactgacaggttcaccatccgtgcatggccccgccatctcggttattttccagaagccataggtagaactagaaagccaccaagccacttgtaaggaaaaagggtcattttggaattagaaaaaagatgtatttttcaagtggcattttgtctcaaagctaatgtcttcatcttcatcttcatcgaaaccagctcagtttaactccaaaatacgccttgtcttggtgtctcatgcatccagaagatacttgtgctatcacaggagtattgttgaaaaagaacacacgagagtaaattacataacaaagatactaaataaagtatatgataaggtttctacggcgaaaccatgaccaattattgaaatatgtaacggaagaaatggatacttctagtcttgtctctcctatatgtaagaactgcaccaattataagtttataaatgcaacagtgacaagtaatcatcagtctaaatcaaaaattgcagcatgagcaaaattattgccgtaaatataattagaaatgtttcgtgacgattccacattcaattataaatctaatataccaatggcattgtagacaaacagatagcatgcttgctgcaagatctaaaaatgtcacttaaaaatttaagtgccataaaaggcttaacaaaaagcacatagacaaaagctaacttagcaaaaaaagaaaaagaaaaagtgggtgtgtatgataaaacagtttaattattgtgctgttcacacttgaaagaatattagagcagagataattcagtgaagccaatcaaagtggggttggtgaacctaaaataaacataacttattcctgtattaacatactggaagcataccctacaaaacatcagaaaccacaccatcccaattagggaccttagtgtatatttcttttaagaaattaatcatctagtgagcaacctacatgaactacagatttaaatccggtacagcatagtcattaccatgtaccttgtaaaataattgcatattaagagagatatttatgatcatttgctaatgttataatttgaatcagaaagtaaactttgatactccaaatagtcccttaaaaatttaggtgtgtcttcacttattgatgcacaagtgtaatcacttgagttgtgagacaaaatgcaatctacgcgtataatatcaatcattagcaatgagtacgtaattactacgaatttataacatacttataccacctaatatacacaagatcaacaactagcaagtctttgaaccactctcaagtttgctcccacgatttgatattgaaaagaacagccaaccacagtcttgtatctttctatatgtttttctcttcttaaaacatgtgagatccttccagcaaccagtgacacccaacttagtaacagtcacaatgaaaagatcctcattcttttaagaattctcatatctcattttcatactgctatatctctcagcacttctaaaactacctcaagtttgtgactttgtgcctccttcatccaagaatctgataactgagactccaagatcgatagatcaaaatgaaggtgagttcaatctcttattaaattcaggatacatatagaatgttttcaaggctgtaacttttatatttgcatgccatttaacaggtgctagactgggtgcaccaaaagtttcggcacaatagcatcaagcctttcaaggaactgaccatcggtatcaatgccatacacttttactatccacccttttaaatgatcctgaaggaatattgcatgcatcacttaaatagaaaattcttacattataaagtaaacaacaaccttattagcttatatctgtgtttaactctaagctaatcacttgtgtctattttaatcagctggttctactaacataatttatgacaaactatccccccctagcaaaaataaagaattatgagcgcgtgaaatcaagaaagataaggtggcttcacatgacgagggaatagtttgtatataaatcatcaaaactctacagacaaagtagagctactagtagctttcctaggagaaaattgttgggtccaccacatactacaaattatagagtcttcaacatcacgaatcataacaagatggctgctccagaatggtgcaaccaatgcattagttaatttttttttttttttttgtggattagaaacaccctccctcctttcccagccataaaagaaaatatttattcatatatattctattaaaaataatttacatgaaaataattttacctggtgtcttcttctttctgcaaccaatcacagggaatccttgcattcgtctttctgcacagacttcccttgatgaccaagactcctatacaaagcaaaattttggctccaaagatggattcgcttccttaaagcggcctaaacaggaggaagaaagctatttttctcaatataaagcctcaacagaagaagaaacatctaccacaatctctgaactctt

SEQ ID NO: 696 - DNA, 6409 bp, Cannabis sativa
aaaaaaaaaaaaaaagaaaagtggggtggtgttatggaaaattgagaaatacaaggatgttttagcaaattatgaataatatgtgtagtaattgtggtggctttgtccattggcaccataagataaaaactagaatatcctaaaaagaacccatttttctcttcattgcatacactactcattactcaaagctcacctcaccaacactggtgacctctgcggccatggctgttttctcaacattaccaaaatacccttcttccccactaccctctttcaccatcttctcctctttccgctgttgcgccactacccaatctcaagtggccgtcgtcaatggaagaccagacaccaaaatctctgaccggaatgagattcgtcttggacttcctagtaagggtcgaatggctgctgatactctcgatcttctcaaggtaactttaaacccccaaaaaacccaatttcatgaatgtataaaaaaaattaaagaacggattttgattcggtttctgtgttgaattaggattgtcaattgtcagtgaagcaaactaatcctcgtcagtatgttgcggaaatccctcaggtgagtatggaaacctcaattcgcgtcatttctgattctaaactcacaaaaattgctcttcatttgataaaaatgtgtgctttatttttttatgctttgtttgtagctatccaatttggaagtgtggtttcagcgcccaaaagacattgtacggaaattgatatctggagatttagaccttggcattgtgggtcttgacactttcactgaatatggccaggtaaccaaaatccctttcaattttactaaaagaaatgtctttgttaatagaatgaggaggcttataatcttactgtactgtttcagggtaatgaggatcttatcattgtccatgatgctcttgagtatggtgattgtcgtttatcctttgcagtgagttcatttctatcatgctaaattgtcaattcaagaactttgagttgtgagtttttttagttacttgtgatattcattttggtgtgttggttctctttttcagattcccaaatatgggatttttgagaatataaactctatggaggggcttgctcaaatgcctcaatggacagaagagaaacctcttcgtgttgctactggtttcacctatgtatggcaccccgaaaccatcttcaccagagtcctttttttacttgtttttcagctaactatcttttgcacttcattgtaaggttgttctaactgtattgagctttgttttctctttcttttcttgcagttgggtcctaaattcatgaaagaaaagggagtcaagcatgtcaccttttcgactgctgacggggctttggaggcagctcctgcggtaagataaactgttacattaatttctgtaatatcattcctttattatgttggagctgtaagttttttcttatacaatgttaatttcaagcaatagctgactggtaataatgctaactaacattctttttgtgtttcttgtcaaattaagatggggatagctgatgctattttggaccttgtgagtagtgggacaactttgaaagaaaataacttgaaagaaatcgaaggtggaacagtattagaaagccaagtaagattcctcttcttcatggcctatctttttaatgcctagtagtaaaaggtttttcaattcatgcagctcgttctgcagcgtgcttttattcttgttttactatggaaatgcaatatctttcaggctgttcttgtcgcgaccagaagatcattgatacagaggaaaggtttacttgacacaactcatgagattctcgaaagactggaagcacatctgagggctgtaggtcaattcacggtgcgcattttgtgtcttgtgtaatttgtttgacctttggtgttcgggttgtgttgttttttaactctttctgtggcaggtaactgcaaacatgagaggaagtagtgcagaggaggttgccgagaggatcctaagtcagacatcgttgtctggattgcaggtgagatttcagcataagtaatatggtcaaatttcatgattatactagagtgatttttctttctttattcgaaagtttctaaataactttgtatccagggtccaactataagtcctgtttttggtaaacgcgatggaagagtttcagctgactactatgccattgtcatatgtgtacccaaaaaggaactctacaagtctgtgcaacaattaagagcggtgagtctcttaatgataacgaaactaattcctatagttttcccttaaatgccatgagaataagattgtgaatatatggaccaccatggtaatcatgttctttcttgtgcattaagattagattagttaacctttcttttcgtcttcttattaacattatgaacgtgttggaaaaatgattaatgattcttttggtgtagattggaggaagtggggttttgatttctcctttaacatacattttcgatgaagaaacaccaaggtggagagagcttctatcaaaactcggcctctgaatgcaccttggccgatgccttagcgattttatcgcatttctgtagctgtaacaagaccgaattgtttgtcatgtcaatcccctcacatccctattctggcaaatggctataaggtgggtgggatcaaaatgcttggagaatcaaactactgaaaattttgtaccatattcttgtttgaattgtcatcttgggaggtgtatgttaaatttttggtgccctctagccttttgtattttcagcaagtttgttatagattttgttactactcaataagtggtaataataacttcaataaattaacgtcttttcacttactttcttgcctttctgattagcctattcacaaatgatggtattgaacaagcaagcacacttgtgatctatatatagtgacaaatgatattttatgttatgagtaatgatactaactatatttagtcttgaaaatgaaactaactgaaggagataagacacccttacattaccattccaaatgacattagtaaaaatggatagttaaatacttagctatgcacttgggttggatttacaagagaattgagttcaggtgcaaaattaacaagagaatgaaaaatttcaatgcctgcacatactattacttacatttctcttagaaaaggttagtaactcaacgaggttacaaatgtgcaattccaacagcaaccaggttgaacaatacacaataaaaatatttgtgggggtgtgtagctgttgttataaattttatatcacaaattagaaagctttttggtccttttaacagtagactttgcaagcgcatcacatatctctcttcttcgtttcgagttattctttttgttgtcgtccttattattattcgtgacattgttgttactagcattatttccctgaactttgagtgcttccttcacaaacacttttaacctccataacgtgtattcactctgcaaatagaacgaaatggaagagctgttatgaaatagtaatactttattaagatgaatgatgcctctgcaacataatttcaaagacctattatatacctgggcatcaatgtcaagatctacttcttgggcagttgcttggaagcttgggttgttctcagctactatctccagtgccttgctgatatcctcgggagacaaacgcgtaagagcagatccaagttttcgtttctcctcagtggacattctcctaaataaaccccagttaacattttcttcttttaaaacaagagcaaatcgataagtatagtacagacaatttgaccagtgcatacatgaacactcataaaagatatagggatgtgtgaaatgagatgactaatggagggaatgcccttctaaaatatgacagccttaccattctaaaatgtacatcatatcatagacgaggaaagtacaatcgagcggaactttaagcaaataagtatcggtgttaagtactaacctgcacttctgcactaccctttctttcagctccctcagttggatgtctatctcgtaaagctaatgaaagtaaagaaaatcaagtatgtcaaacaaaagaacttcggaaaagaaaaccttttatgaatgtaaaaattcttctagttttgttctctagtctacaaactggttttgctaatgtgactaaccttagtacttgtatccttagccatgttcgcatacttaacctcccgagtaatcctcatttccaatagtgccttggcttcctcttcttctcgtttcttttcctgaatgtactcaggttttcagtaaaatacaaacaccgaaaagctagactcttcattcaaaactatctttcacaaaaaccatttaatcaacatctatggagaaatgattcacatttacctcttcggcaactttaggcaaaagctgcaaccatttctcttcgaatttctccaacaaagttttagccatcacatgaacatcatctttttcatcattgtatttcattgcattcttaaaaaccaacctcacatccgcatatatctctcggacattcttatatccattaccatccttagcctccattttagttttaattgtaccaaagtccataggcttctcaataacctacaaaggaaaacataatctacattgaataaaaggctcaataaaatcatataccctttcatgagttcttaagcaacatgatctatgcactcataaaattcaaaatccaaatgaaaataatcaacataaatgatcaaacccacaaagacaataacaattaaaacaatcttctgattggtcaaagaagaccatagtatctcaaaggttaatggctaatgttacctcatagtaatcaagtaaattcagaccttcaacatctacaggttccaaaaagggccatgcccatttgtgctgagtaatctgataaaaccacataacaagtaacaaacaaatcagacaaaagtttgaggttgaaacaaacatgaacaagaaaaagatggtatttttatttgcctgacggaaaattgaagcaaagtgacgcataagctcttgcattctcttagaagcaatttgttccttttgagatgaatcatgaagaggagtattcaacaagagtttgtctctatccttttccttcaaaattgagctacttcctttattagcagcagtagtagctggagttgaatagaactgttcaacctctttcacagttttctcaagctgggcatcatttgaatttgaatttaaacataaatgaagtgagaaattaacagattgaaattaggaggagtttaaggaggtacctataccttatcaacctctgtgtatatttcatctacacaactcttaaattcatccacatccgaattgatgggttccatttctcttgggaactcgtctcgactctcaattcagaaactaaaggtccaatctttaatgtaatgaataaatacagaaaagagaaagtcaaagagaatcgaaaaatcaaaatcaaaataaaaaatcgaaactttagggcataagaagaaaagaacatacgaagaaattagagggtgccaccgtctccgatcgggattgggattttggattggggttcgtctgagaagagcagagaaccaccaccaccgctaccacttcgattgggctctctctctctctctcactttacatttaatattatttttttatttttttattattaaactaacaattattttattgttaagtagttgaaaataattgacttttgatttgtgggatgtttggattttttattttattattataaaaaataataaattcccttcaaaaatggtgattaaatttttggaaaagaatataatttaaatgattttcatgtaaaattttgaatgattattagtagggatgaacattttaatcgtggggatggtttttactggtctttaatggaacaatgattctctatttaaatgtaaaatgccgtaaacaaaaattattttttatctttgcggaaagaggatgatactccttgccctgacataactaattattatacaaaatataatttataaattagtaaagggtaaatactattttagactcttttgttctgttttattaaataactaaatagactatgtattttctaaaatggtaaaaataatttatagaaataatttaataatttcatacatttctttaaaaaagaaaaaaaaaatattatgctcaatgtcagattcatgaacatataaatattagccaaatgtattataattaatttactttggttaaaaatgggtgaaattggtacattattatgtgtatgtgaagaatagatcttagtgggattatattccacagtgaaaagcagttgatattggagacaagtgtggaaagtgaaagaaaagattaagcagat

SEQ ID NO: 697 - DNA, 1745 bp, Cannabis sativa
aacgacaacaatgtcgctgtcgtgcggcgtggaatgcgtgctgattttgggctgtatgcgttgggcctggaaacgctgcacctacgtcggctccgacgacagcgccacctggcccaacgccactgccgacgatttcgaacccgttccccgcatctgccgtcttatcctggcggtcaacgagcccgatcttcgaaatccccaattcattaccccacgctccggccaccgcctcaacccagactgccgcatcaagcgagtcacatacgagcagacccaaggccgatcaccgccctacatcatctacatcgatcacgaacaccgcgagatcgtccttgccattcgtggtctcaatctggtgaaggagagcgactacaagcttctgttggacaatcgaatcggtatgcagatgttcgatgggggttacgtccaccatgggctcctcaagtcggccatttggctcctgaacgaggagtctgaaacgctaaagcgtctgtgggtggagaatggttcggagtaccggatggtgttcgcaggccactccttggggtccggcgtggcggcgcttttgacggtgattgtggtgaaccacagggaccgattgggtgggattccgaggagtaaggttcagtgttatgcgattgctcctgctcggtgtatgtcccttaacttggccgttaagtatgctgatgttatccaatccattatcttacaggtgcttcaactctttctttctctttctctctctctctcggtcggctatggccatcaattatttacgctaatttaaataaatatgagatgtttttgtttataattgaaggaagtatttaattaaacgaaaggagttaaggaaattcgcaaatcacacacaattataagaatgatgtgttattaattttattgtctttattgctttcatattttcatgttggattcttgtcatttttaaaataattacgccaaaagaattaagactgagagacgcttattttggaagtggaaaattagaaagagaaaaagaacaggaaaaatgtgacaaaaataactgaatgaagtatatgattgattggtggtagcctgtttattatcgttgaaaatatcattagttttcctcttgtacttggtttaaggttttttgaccctagaaagagggaagacagtttccaaacaatgctccctcccataattacttttattttactttttaataaataaacgaacttgtattaaagaccttccacatggccttattctcttatttctccccagcaggcaaccatatacatagacgagtagatagccataacagctaccgcccaaagagattgaatcttcttgatagaaataaaatcaaatctcaggcccagcactactttacagttttttgaaataatgtgatcaagagactaatctctcaaaactcgaatccttaaacataagagaaatttctttacagaaacaaatgatcaactgatagtctcaccattcttttagcataaaacacaccaaccaaatggccaaaagaaacaaaaattgtcatgaacgttgagaccacccttcacacataaactccttagctatagtggagctgaagatttctcataatcttctttgtaatagagcactgctgagtggattccttagcagcaattgagctaataaatgagtactagcttccatttacctcttgacttgattttgatattaattttgattttagcttttgagataattcattttctctg

SEQ ID NO: 698 - DNA, 3488 bp, Cannabis sativa
ataagagtgccaccttctcgtgaagttgtactgggcctatcttcaactatttcacctcctatgaaaatgtctaagaataggagcaaggccaacacggccaagattttctctccatctagagatttacgcaaggaaaaagagaaggttgttattatccatgaagaccctccatcttctcccgtcacagcctctcaggaggagacggacaatgcggggtcgagtgctcaagcttatgctaactcgagattgtagttgacttaaatgttgttggctcccaagcgtttgattacttctaatgttggggaagttcgtgacaaccaataaacatcctcatttatatgttttacattgaatagatgtatatgttaagtaaataatcgtgaaaataaacatataaagaatacatttaattaaataaatatatttctatttgtcttattgataaataataacatataagaaacatgaggttttatatgagcattaaatcttaacacctaaactctattcactgacttggactcagacctgaatctgaactcggaccctggccccagtcccgaagacaaacctcaaacacaaaacccaactcccaagaccccagacccgactttaataaaaatataaaaaataaaatctatagaaacacacttttgttttttgattttaaaattttaaaaaaaaaaatatttagcacggaaattatttttgtttttcaaaaataacatttaaaaaacaaaatttctatttttatttttatgattaaaaattaaaaaaaaataaaatttttaaatttttgttactaaatctcacctaaaagtttgacaaaaagggcccggattgtttatagaaaatgtacttaattagttattaaactagtggtcacatagtgatctagccttattaattaggcagccttggaatatgctaaagctgatcacgagcaaactagcctgcaggaattaagtaattaattagattagttgacaatattattatcattatccacatccatggcactcaaactcaagaatatgatcatatgctttgtatacaaatatatataattatacacattatcacaatgttcgacaaatggcgcacatggaacaccagcatgcagctgcaatttttaggtaccatcatatattataactctgagctgccttgtttcattccctcagacatggttaacccaattaattaacctaaaaaattaaatatcattttaattatggctgcaaaggcgaggttctttgtatatataccgctgcgataatttattactaaatagtaactgtacggatgatgtaactttattttttttaatttatattgtttttgttattttaagatatctaagttttactgatcactattcactagtaaattaattacactatgtattaaatacgtgataaagagttatcctagctcgagtataatcacatctatatcttggattcttttggtctgcattttgagctcattattagctgtagtttgtccctgtgttggattttaaaaacatatataataatatgttctatatatataaatttattatttaatgcatgtagtttagtacgcaacgtaacatgaaaaagttttctttgtttattgagttcgtgtgtgaaagctgtacacatgactcatgagccatgacacatatatattttatatgtattctctcttgtattattttcagaaaaaaaaatatacatcttaaaaaatatgtaatgctatttcaaaagagatttgatgaaatcttaattgtgtatataggaaaatgtttacaaagataaggtcaactttatttttctaaggaagggtaatattgtaaattctctcgagtggatatactattataattgagaaaatgataaagagattataagatgttaaacactcaaaaaaaaaaaaaatgataaaatatttttgatgcattttaatattggatcttaattacacatctgagaatcactaatctccgctgctcggccttccccagccactagccccttcgcatcccaccttcgatgaaggccccaacccaatcgattaaagtacatttttttttatctccctctccatcttctttgagggtttaaaatctatttctcttcatttctaatctctttttaagcaagtggaataatcgggagacgtcccatgattaatctctctgaatgtattttttttttatgttcacatgtatttcttttatgtaaataattaatttatgattgtatttttttttgggtttggatatgtgaaataatttttaattttgtttatgaatatgtgaaaatggcatagtgagtttttgtttctcaagtaatttatggaaatggtatcttagatttgggctcgtgtaacaaactgacgacaaaagtggtggaaattatttttatattgattcccgtcgtttgagaatagtctcaagttgtgatgtcaagaaacaacgctataactatatgatcatttaacgtcagtaataatggcatcagttcctagctaatattaaaaccgactcgctaatgcctttttagtagtgtggggactcattatatactcatgttgattaaaaaaatatatataacgtaattcaaaatgaaaataaaaaagagtttttgaatttaaaataaattgtttatttaacatatattatttatactttatattccataaattattgtagtcaaataaaccagatacataacggaccacatatgttctgtttgtgaacaaatttctaagagtcatcaacacgtgtagtttctctcaacaggtggtgcggggagtgcatacttgacttggttgcacttcgtggccttttaagtttaattactcgtttttctggattggttctctcaagcaaagcgttcactcatgtttgttttggtctatggctgcaacaatttactatttgtggataaataggaatacttgtatatgtgataaaatgtttttgttagtgaatattgttgtgaggttgattaaaaatgctgaattgaatccagtctcattatctttttcgatattttttttttattttttctacaaaataactttttgaaaaaaaaccatatttataaacaaattatataaaaactaataaaatatatactttttaccaaatattatattgctctagctattgagtattaattattatatatatagtgtgtatattaatttaaatatatttgatcccgtttattaaaaaattgtattaattagattatcttctcatgaagatgatgttcttataagtcccctcggatgctaccagcttcgaattagagggcgatgttttggtgtacctaaacagtcagaaactttgtctattaatattgaaccaaaaaataataaagaatttgtctttcttttttcttctactaactccattttagatacacaattcatgaacctagctaattcacccttttagcagtgaagttgtaagtgttacatttattattatt

SEQ ID NO: 699 - DNA, 12305 bp, Cannabis sativa
gctgcttcatgcgtcgctgtcgctgagagaatgatcgctctcggaactcaaggcggcaccgttcatattctcgattttctcggtaaccaggtcggtcaatcttttgattgtctattataggatttagttaatgtgaaatgtgtgttgtggtttgattttcgtgaattttcgagcttgtttgggattattggagtttgtttatttgtgatcgtttaggtaaagtgttaatgcttattgatttcgattgttagttattgaaatgtatgaatgttttcggtttggtaaaatttcgagcttgttggatcgaattgagttcccgtggcttttaagctttggagattgagtgataggttgtcccattcgagctttggaagtagtgcatagagttatgaagtcttcactatcatctcgtatggaaatcagaaagaattatagttctaactattggagtagtattgggttgatagtgtcctcatccgaacaatgtcattcttgttaaatttaatattattttcttttattttcctgttcttttcaagttgaacaatgaatttattattcgagtaggattaggaatatcttgctaaactaatctaatctcacatgaaacatgcttgaataatgaaactattagtgcaatttgattctgtagttgccaagatgatttacgtcatcgtcatctcatctttaatatacttatgaccaaaaagaaagaaggccttttcttttgataaataaaaagggatcgaaaaggaacttttctcatcttgcatgtggattcgatgtatggttttgtgggaataaagtgagtattttgacatggtggagtcaatccttccacttatcttgttgacatgtgttagttgatatattcaacgtcacttggttttgttccaagcttgctccctagtgcttcttgtatactttggttgagcactattgcatttcctatgtgtgacaagtcattcttgttgttcacatttagtgcttcttacttttgataccatgtccatgttttttgttatattgtctagggtttaagcatagagtttaaggtgcagatgtttttccttatagatcaatcacaattctaggcttggaaagtctagacactctccttacacagtagctattcataaggcttgaaaaacacaacacctgacctgagtctttttgtgaatttctaagctcttcaagcatctgatctcctttttttcacttagaacaaagtcaaacaattgtactacatggtctgtcaacataaaaaaatgtgaacatatagaatgcatgtgaatatagatgctagtctttttccttattctgttctcaaggatgatacacaattgcatttagttgctgcctttaatgaagaaatatattgttctttgactgcctgatttacaggttaaggaatttactgctcatactgctgcagtaaacgatctcagctttgacatagaaggtgaatatataggaagctgttcagatgatggatctgttgtaatcaatagtcttttttgtgatgaaaagatgaagtttgagtaccatcgcccaatgaaggctattgctttagacccagattacgccaaaaaggcatctaaacgatttgtagctggtggtttagctggtcatttatattttaattataaaaaatggctgggctttcgagaccaggtttgtgcttgactattgacttgcattcaaatatcgcttccagtgcatcttagtgctctcaaactgaggggtttgtctattaggttttgcactctggtgaaggtccaattcatgcagtgaaatggagagcaagtctcattgcttgggctaatgatgctggggtgaaagtatatgatgctgctaatgatcagcgaattacatttattgaaagaccaagaggaagcccacgacctgaggttttactaccccacttagtttggcaggtaagtcaaatggaacatgggataagtttcaaatgcaaaatttaacccattaattggattcgaataatgtttgtgtcacatatgtaagggtttatatcatccattcattctgtttaggatgatacacatttggtgattggctggggaacatctgtgaaagttgcatccataaagacaaatcagccaagagcagcaaatgggacattttcgatgtctagtagcattaatcaagttgatattgtggcatctttcaataccaattattacatctctggaattgcaccctttggtgattctctcgttgtactagcctacattcctggcgaggaagatagggagaaggaatttagcagcgctatcccatcacggcaggtaacaagagatccattagtgaattctttgttttgttttttctttttgggtgacaactttacaacttatttgtgtttaaatggtagctcaattttaaggaactcctgctaaagtgtgaacattcattgaaggagttcatgttgtgaatgaagaaacatatggtgccaagtgttttcaaatagctaatataattaaattttattggagttgtgtaggattctagaggcatatttttctcttcttgcatattgtaaaactagaagttgcatgctttcattcttggcgtgttcttgggaaattgttttgtctaacttgttgtttttgacgaagtcattcaatcacatatcaatgcaccatttttttagttcaaatttaggattttctatattatgacagatattttgtcaattgcttgatagtttttggtttattgaattaaaatagtcttggtgtagcagctttaacttttatccagtggttattttataatacagttattatattgtcatcattggttgttttccaatcataaattttttagtcataacgtgattgtgatctttgtacttagaaattaatttttgcccttgttaacatgtgatatatttcaagtagggaaatgcacagagacctgaagtacgtattgtatcatggattaatgatgagctgtctacagatgcactacctgttcttggctttgagcattacaaggcaaaggattattctcttgctcatgctcctttctcaggttaaaatgttttttgtggatgttatggcgtatggatttaaagtaatattcatctgaatagctctaaaaaatttcatgtgactgtaggtagcagctatgctggtgggcagtgggctgcaggtgatgaaccactgtactatattgtatccccaaaggatgtagtcattgcaaaacccaggtcagtttccactcccttatttgtattgcatttttatatgctgagtgatgtttgtgcattgttgtctctgtaattaatgtactaatatggtggtcgttgttatactctcgtacactttaggcacataggttctttttgtcctaccctcacactcttctaggcacataaattcttttatttttatgtaatttgttttccttatagccaaaagagagactgagaggaaaagagaagaagaatttttaggagggggcactatgacttagaagtcccagaatttttcatttactcatactaaagcttttttgtttatttgtactttgataaatccttgccctttcaagttgagggctaactattttaactaatgatgttgattaaaacaagctgttaaaaagaggcattgaagtctcaaatttgttttatttagatttgcaaggatgagactgtaatatgatttgaagcacaattaaactcagatattatctatcttttctttgttctactattttccaaattcgagagagctctttgactgcagttccttgttttttatactttttgagttttaaaggtatgctctttccaaaataattattgtgcaactggaaaatctgtttggtgataagacagactataatcaaatttgcaactgttataagttttatcgtcatatagaccttctatacaaaactttttttatccccccattccgtcttatagtatgtatttgatttcaaatgaaaagggatgctgaagatcatatagcttggctgcttgaacatgggtggcatgaaaaagctttggctgcagttgaagcaggagagggacgtagtgagctccttgatgaggtattttagaatcattcaacgtgacattcatattataatttacaacttaactttttctcttctttttattcatttagtttttagcaacagcagttaattcataatgcatctactattctttaggttggatctagataccttgatcatttgatcgtggaaagaaaatatgccgaagctgcatctttgtgtcccaaattgttacgaggatctgcttcagcatgggagaggtattttttgctattgtttttattaagatattttgcaattcttgcaagtaattttgtatttggaattataattatttgtgaccaattttgcagatgggtttttcattttgctcaactccgtcagcttcctgtattagtaccatatataccgactgaaaacccaagactgcgggatacagcttatgaggtgtgctggggaatcattttttattaactgcataactttctgacaagtcaaatggaaaatcacactattttgttttccgaggcacaggttgctcttgtggctctggctacaaatccatcttttcataaggatctcttgtctactgttaaatcttggccatctgtgatatattctgcattgcctgtaatatcagccatagaacctcagctaaatacttcatccatgacagatgcgctcaaagaggtccaagaatatgctttgttaacttacatgttggatcttctaatggctgcaatcttattatcattacatatcttacatttcaggcactagctgagttgtatgtaataaatgggcaatacgagaaagcattttcattctatgccgatgtaagtcttaaactggatttactgcaatgaaaacgagtgatcaagatgtcgaacataccttgttttcttattattgttgtttgaattttgcagctcttgatgccaggcatatttgacttcattgaaaaacataacttgcacgattctataagagaaaaggtaagtaagttgctagaacagctaatgcttcttgggttttatggttttatacagtggcaaatatagctcttctagcctgatctctttttctttagagttttcaaaaccttgaatagtctttacaagctatgtttaaggatattatgcatagggatgatggtctttcatctgctgattgcaattgcaatcaatttattttatggatgggattttactcactgcacagttgtttttaagttctttccctactgctgttctttgtgcttctgtattttaaaaaggacgaaaagattccacttgagttacaacgatagcttcccattcctcataaaatcagtaaacaataaatgtttactatattttctaaccaagatctataaatcaacttaaattttgtcattatcccaaagtgactcagcattccaattacactaatcagagagaccaacactggtttctgagttccactacatacacacacacacacacacatatatttattgctatttcatttattaaatatctattttttttgcttgacctcgtaaatttttgtttaacctatgattttaggttgtccaactgatgatgctagattgcaagcgagcagttcctttatttattcaaaatagggatttgattcctccatcggaagttgttacgcaacttctaagagcaagcaaaaagtgcgactctcgttactttttgcatctatatctgcattcattattcgaagtaaaccctcatgctggaaaggattatcatgatatgcaggtattggccctatagatcatggatgaaattattgatttttaatggtacttgtaacctatgctaacctgtgtagtgtgtacagcgtaaatctatcccgaagatattttattttcttacatcccctctgtatggagatgcgactcattgatattcatctaatttcatccatgccttgtttcctcttcttctttttttgttaggttgagctttatgcagactatgatccaaagatgctgcttccctttcttcgtagtagtcaacattataagcttgagaaggttcggatggttaattaatgaactgttcagatgattttgtaacattgactatgcactaactcctgccatcatgtaccaggcttatgatatttgtgtcaaacgagatcttttgagagagcaagtgttcattctcgggagaatgggaaatacgaaacaagctcttgctgtacttattaatcaattaggggatatggaagaggtaattcatgtctttcttatctcgggaaagattgatagtttatgttttgtgttttatttgtgtttttgatgtacattcatgtttgtaactatgtagttgattgtacacaggctgtggagtttgtaacgatgcaacacgatgacgacctatgggaagaattgattaaacaatgtcttcacaaacccgaaatggtatatatagggaaaaatgaatttgtgcaagcatggaagctgtatgaacataacagattttgctataattgtctatatttgtcttgagtttctcaaatcgttttttccctaaatttgcaggtcggcatgttgttggaacacacggttggcaatcttgatcctctctatatcgtgaatatggttcccactggcttggagatacctaggttagtgtatctataggctagttatgctgcaatatgtatagaggacattagttaaacatgttttgaatcttttctttcaggcttagggatcgactcgtcaaaatcattaccgattacagaacagaaacttcccttagacacggttgcaatgacattctcaaggtaatccttctcttcgcaacacatgtttcggttataatttgaatacaaaacagagaaacaggcctttaaacatttgacctgttatttccaaacaggccgattgtgtcaacctcttagttaagtactacaaagaggcaagacatggactatacttaagcaacgaagaagacgaatcacgagcaaaacgaaacgacaacaacatgtcttcatctcaagcaatcgagagatctccgagcgtgagaagcatggaactcaagtcaaaaacaagaggaggtggaagatgttgcatatgtttcgatcctttctctatacaaactgtctcagtcattgttttcttctgttgtcatgcatatcacactaactgtctcatggattccacctatacaaacgccaataaaacaaacggaaccacttctcgagaagagtacggcgagtacagtaatggttatgttgatgaagacgacgatgatgacaatgacaacaacgctgaatcgggtaacccccgaatgcgttgcatattgtgtactaccgctgcaagttgagtttgtttcggtgaagtatgggttcaaattttatttatttttaaccaaatatatattcttaattgtgaatagagttgcctcatcatccatcactatattggccagcttgagttgtcgatttctttgtattatatgaacaaagtaagcccggcttttcatttattcttttcctttttatttaattttttttgggttttgagctttgcatgttagctaaattgggtcttttgagatcccttttttgggttcattgagttgctaataatttttttttacatgtaaaaaatgtcatctgtatgtgttatttgctacattacagagaagaggatgggtttatgatattggtaatatttttttttactacatatagtaaataaccctttatttttaaattgacaaaatgtataatcatgtaaaaaatgtatactttttatatatttatctgacatttttttacacataagtctggttttataataactaattaagtaatttgtttttacaaatatttaatttaattttcaattgtaaataagtattttaagttctagaaatataatttaaatattattaatttagttattttcagtatgttttgtctcactcgtacgctctttgtgaactcttgaaattattcttaattaagaatgcttaatttagtatgttttgttctcactcgcacgctttataaaaaaacttttcaagagatcatccatcctaaaattatctttggtcaaatatgcttaacttttgagtttttttgtgatgggctatcagaaaataaaatacacattgttgatataatactaatcaatctatttaagccataaatatttataaccttaattataattgtatgttaactattttaaattattaattaataaaaaaaattcataaatattataaaacatatatcgtataactcattaaatatattagagagttcttgtatgggaccattaaaaatgaccctaatattgaaaatgaaataatatatagtgtatttttttttatagagattcaaaaataagtatataagttaaataaggcatatacataaataataatataatataaattaatagattattgatatattggcaatatttttcacttattattttttatttaatttttattaatattgtgagtaaaaaatttaaacagctatttgcaaagcttgatttgttttctagttgatttataacaaacggaaaatattattctcgttaattaaatttaaaaggcttatatttatggtgtctatttagctaagaattttatgaatggagaatagtttttgagactgttttaaaccactagaaaatataatattattgtagtgtatatatgatcattctccatttattttggaccaccaaataacataaatgcaacacttaagtgttttgaagatttcaaattggaattattaatcaaataattattaccgatatattatatggttgaatgtcattatctattaaatagatatttatatattgcttccttctcccaattaggactgatttgagaatatatgggtctaaggatatataaaaatattttttaaaaaaagtattataggactccaatttatactattgtgtgacgtgatatatactccaattaatccaattaatcaagttgtaaacatttattatttataatatatttaattttacttctaatgaagccttttattttttattttaggtttcaaaaaatgtgagctctaggtacgagcctaacttgcatatattggttatgcttccaattatatatatattttcttctaatatactaaataatcatgttaaaaaataaaacgatacaatataatctttgtaacttgtttataaacttgaatagtacaactcattcataaacgagttagactaatcaactcaaaaataatctaaaacttatttaaactaaacttaatctcgttagttttgtgcagatttcaagtcgcgtataatccattcaagaattagtaatttagtatgattgtttttctttgagaaagtagtacattgtaagcgtgagaattttgacaggaaaacaaagtttccttctttaaaagagaaaaaagaaaatgaagttattattacaatatttatgtgtggctatagcgcattattagaatgccaagatagtggactagtaataattattgttatgtgtatttttcttaggaaattatataatgtatttttggggtgtagtgatgtatttttttttagcaagtagtgatgtatttttatttgttttgataattaaaaagaatttagtctgaatttatttttatgattatatatattatagttatttaaaatattttgtaaaattttaagaaatattcaaaaaaaaaaataaaaaattatacatcaaaaatagtgtttaaagaatcgtaacttttttagtttatgtgtgtgaaatagatagtttgaatattgaattctaaattattttaaatttctcaaaattttgcgaaatatcttaaataattatagcatacacgattataaaaaaaattaaaccaaaaagtttttttagatgccgaaaccgttaaagattgcactaatacatccattttaatgaggtgcattgtagaatcactcttctatcttatatatatatattataattatttatttatttatctatgaatattattctacaacattccatttccacaactttctttcatatcgtcctcatttttttttttgagatgtctatttaaaatgtggattgctgaccaataactaatcacataatttatatctacaaaacaatatattattcatttcatatatatataagaaataatatttttattttccatgcatgaaaagtacttatcttttttctacaaatttcttctcataactagtaatataaaattattatctaaaaattaaatggccggcaagagaattattcctacctttcttcccaatataaattatatatataaactattattactgtaccaaaatatcaataccaaaaatcatatcatgaagttctccaacatttcaaggtctaaaatactattactattactctcttataatatacttaccattaataatattattgcttcttcttcttcaaattcttctccaaaaaacaataatttcttcacaaaaattccgagactaagtcccaccggagataggttgttcctccacaaccccgaaaccctaatttcgggggcttcaattttcgatgattttgaaacgtttttctacaaccaaacattggatcatttcaattataggccagaaagttactcaacttttgaacaaaggtatttggtgaattccaaatattggaataacaataataaattaggtccaatatttgcttatcttggagctgaagagcctattgatcaagatatcccaactattggcttcctcactgataatgctccttcctttaaagctctcatagttttcattgaggtaacaattaattaatttttaatttttaattttctatatatttgttttatttttatatatttagcaatttttatgttattatatatatatgttgatccaacaaattaaattattgtagaaatctttaaatcattaattaagactgtgttgatcattctttagtttattctaattgttcaaaaattattaagaagaatataatgattaattaaagagtttttttttctttgtatatttaactgtaatttcattgttcacgtgtgagtttatacattaaatatatatagtatgatctatatatacatatacttttcaatcttgtgttaacttttttaatttttattattaaaattaccataaagaacgaaagtcacaagtttacatgcatatttgcatgtgtatggttttaattactatatatatcttacatgatatatatatcatatttgtataataacacatagatatataataactttaaactaataataataataataataataataatatcttatatatacattaaaatttgacaattaattaataattaattttgtatattaataattaacagcatagatattatgggaaatcaataccatttggatcaagagaagaggcagtactaagcaatgcaagcacattgggttactttaactcagctcaagccctaactgattatgctaatattcttcttcatatcaaatcaacatatcaagctcctaattctccaatcattgtcattggtggatcatatggtggaagttagtattttttcttttttttatatatttatttttttttataattaatctgataataatattgatttatgcagtgttagcatcatggtttagattgaagtatccacacatagcacttggagcattggcatcatcagctccaatactttactttgatgatatcacaccacaaaatggatactactcaattgtcactaaagatttcagagtaataataataataattaattatatatactttttctttattatattatatatatatatatatttatatgtaattatgtatgtaggaagctagtgagaattgctatgaaaccatactaaagtcatggtcccaaattgataaagttgcagctttgcctaatggcctttcaatacttaccaacaaattcaaaacttgcaggtaataattaataatcaaatatatattactaatatttattaatttaaataataatatcatcttaattaactatatatatttttttcaataagaataatttcatttgacatgtaaaattcctttaattaattaccacattattattcaacttaaactatatattaattataattattagtttaagaaatttgttaattccctataaatatctattatatatatctaaggacatgctaataataatgtttacttc

SEQ ID NO: 700 - DNA, 5741 bp, Cannabis sativa
taaattagaagtagcccaagctgataagtcatgagcaatacaatgagagcaagaaaatgggtacggtcaaccccccaatccaccaaaatttacgaatctccttgtctaactcatcacacaacaaataactatgttagttgtacatattaactagcatatgtaataactaagttagctgtacatattaaaagattttaatcttaaagttggttgcactcgtaatattgttgtttctttctaaaagattactctttttatggaaattaacaactctaaaacaagtttaggaagttatgattggaacatatatttggtacaaatagtattttgaactcattttcaataataattcaattaatgatgttataactagtgattacattttttttttgcattaatttgatgataaaaattaatttcaagttggttagattaaaaaatattgtcaaaaaatgagttcaagttctatttggtaccattttagacaaaacaagatttaatctatcatttaacaaaaaaaaaaaattataatgagtaacttttacaaaaaaaaagctccaaaaaataatgttaccgaagaccaaagtgtccaacaccacgatcgatgaggtgaaacattataattaattaactattttctataatttttattaaaataaaataaatatgactgaatattaattacactaatagtgatattacaattcacgtctaaacactatagtgctctttagcatttctcggcaattctcagtccaaataatattaacccataatatttttccaattataaattaggggatatattattgtagatatcactaatcattttctttaacactaacaactttaacagaaaaaatgacatgggatattctattcgtacacaatattctaaattgtgtttcttttttgtaatcaatcacacataaaaaagcaacagtttgatagaactaaaacagaacaaaggccttgtaattttgagattcatgcttgtaaaactcattcacctagttgagcttatcagataaagttaatacaaaaaccagaagcaaaggccttatgtttttggctctcacttttattaaatgctaacatctcaaagtaacaaaaagcattccttaacgcctacttttatatttttacaaactctatatagtttttaaggaaatcaacctcattccaaatcatggtctttctcattagcatcattaccaccattaacacttgaagcaagctctgtttcgaacgctttcgaacttgaaggcagcctctcgtatattctcgatgcagatggaagaagtctgaaccgtccgaaagtaagacactgactgagcttttcgtaactcaacttctgctgaacataaaccaaaattgcaagaacaaccgcggtcacaggaatggcaatgtctccaaacttcgagtagaaatccatgtttggatcaacaaactcgtactcttcggggaagtaaggaatgttaggagctctaatgtaatcatagagatgtggaagaagtctaacaagagtgattccaaagtagtagagctttccaagtgattggcaatcaatttgccatatcaagtttccaattacttgtgggagaaggaaaaagtcttggacaagaccaacatactcttcaagctcagcttcccattcactcataatatgagagttttctcttatatattcatagtttctcgtcctttgatcacctctcttactatgcatcatcagaacaagtagatagccaactacatgtatcgccactgtactcagaagcaccttcttgtcactagggacacgatggggttcgagaggagctcgtgttagcaatctcactcgagatttccacactttttgacaaagccttagagtcagtatcaacgagaccataacaagaagcttcacagtgtagtcaagtacgtggaaccatcgactgctttcgagatcatatgatgattggtaagattcagaactagccttcttgaagagagcttcagcacctgtgacaagaggaatgctgtatccaattgcttggacgccaagcataacaagagacatgtatggaacagagtctgtattcttctgagtgtgaaacaattgtgctgtaatacaagcaatcgcgaatgaaagggtcagaatcctgaggattccctcgattcccctacgagatagaaggtcttccctctgcttcctgtaagttattgggaaagtttggaacttgacttgactgaaacgaagagggtcatcgtcgtttctttggctggctatggatattttggcaagtggatcaactaaccaacgagctgtagttggaggatacgatacaatcacatcaataaaacagtccaacccggcttcaagatcttggctgtcatgtaatatttcccaagaggcccgcacatccctgcagccaactaagtacattttaccaacgcgttggtcatagataccctccaagaagagcaccgaaatatttttgtattcctctccagcgacagagagctgagctgatacattcaaaaggagctggttctcagtgtactcagccttagtgtggaatggaatctcagtccccccttcaacagagacgaaattggaatcatttcgcgaaaagtagcgcccaaatagggggccaaccgagagaatatccatctgaatatttgttctttgaagccgagatttaggagtattcgaatctagggtagcaggggtatggaatgtgagatcttctgagagaagagaaagactaacttgatagtcttcagcatcctcaagtttcgggtatttcagcaatgatttcttgatcatagttcgaagactgaactcctcatttctttccaagattgcatcagctctagtaatttttgagtaactgtaagttggatgtgagcctctgaagtagttccagagatctgaagggtggtttataagcttttcaaatgaaaggggaaagtatgatggagtgtttgtactaatgcttgataaagtcccatacataatgcttctttgctttacagtaaatgaggtagggatgtacaaacagatccgggaatcgcagccactcccttcgtgatcaacgattccaggacaaccaatcatgcaaagctgtccactggtagacttccaaattccctcagcagcaacagtaaggtttcccatccctgatctcctggtggcagtatatcgattctctgatggaggagaagctctaaactcaactgaaagtcttgctgaactggtattgctacggccatttgattgatcacatttaacaacttttacataaagactaacacctttgaaaccaccatctgttttgttgatctctttgtttatcccaaatggacccaacttgctacaaaattcatctttcccactacacttccagttaggcagaacagtgaaaggttgattcgaggtgatctcttcgaaaatttcacaaaactgattccctttgtacacacttattcctggtaccaacaacgatccatcagttttgttataagggtatggatcacacgctttcgaaaccagcttatcagaggtgaattcatacattgctgaactttgtttccccaactgtgacactatgtgaacatcatcaaagtacttttggttcgatttcgcgttcaaactcctcatttcgccctggattgctctgctagtcaaactaaacttctttgggaaacgaagaacaagcaaaatcctatcatcctgggccaaaggagggcgctcgttgctataaggtaaagaagcattcacccattcccatggattagaagactccgaatctcgagatggcaacattgcattccccaacatacaaaccactctttccccaccattcttttcagattcagtgtaaaccccttcgaattcaataacaagataagaagtcccaggccaaattcgaaattcgggattcccaccatacccataggaatcacctcctgtagtaatggctaagttgagagtaccactaatactaacagacttctttgatctatgagcaaggctcacatccctaacctggaatgaaaccaagttcatgggatcaccctcctggtttgaaagggagttgaacagagttgagtccttctcaattcgatatctaacatcaaaaggcattattggggcttcacccttgacctgaacccaatcccctttctcaaaaaataggtctctttgtatactataaactctactatcatcttgtttcaattcagatgcagaagatagtacagatttacactcttttttcacttcatcaactcgatcatagttatatgtaattgaagatacagcttcaaaatcagcttctaaaccctcaatcgccggtgctaaagaaaaccccaaacccagaaacccaaacagagcccaagccacaacaacaaaaaaagctgaaggcttcatgcttttgttacaatagtgtattaatccacatgaacaatcatactataaaagccttttctagttctagtgagtgctaaaaagggtaaattgcagaagaaatgctaacctgaaatggagcttttttgttatgaatcagaaaccccagaaagaagtgagaaaacccagttgcacaagtttggatcttggtttgaagacttagacaaaaagaaaaagtctttctttttgggtttctagaagaagagagagaggtaaagagagcactggacttggactactgatgttgaaatggtgggagtggaattggtttattaccaccgatgccagccttgtacactaagttatgatatagaaaaaagaaaagttaatctctgtttaaatatcaaatacttatttggtccaattttctaaatttgtgctttttttctctgtctccatagaaaatttgggtcaaacataaatcaactggtctataatttgtatcaccatgagaaattggttattggttggaatggatctatcacctatctaatctgatcaagacttttatgagtcatttaagtttctagagctgacgttgacttcaaacccacctttcttcaagtttttatttttttattttttcctttggtttcagaaaatatggattagaagaagaagaagaattcaagggcataagcgtgaaaagttaatagctattcattgcagtgtttttgtacttaactagaaataaagaaggtttttaaggaaaaaagaaagcaaaattaaatgagaggcattttgtaatcttgaacctaacttctagttaaatattctaaatttgtattcttgagattcgtagtccatgttatgttacaacaagtacaactgcttctttagtttaaaaatgtctattaataattaattggtttttctatatgaaaactaagaatcgttacttgttctttgatatattaattgattccctattcaaagaatctttagtcaaatggaacatgtgaaaaaattattgtttttaggcaaaggttttgtgacaaggataaacttacattaatttggtgactggattgtaggattataacttttgctttttccaaataagaattttttttatttatttttattattttaatccaaatgttattgaaaaattttatggtaaaaaggtgttggagctatttaagaaactctcttaaatgtcaaaataaataagaaaacctacggaatttttttttaagagtactatgaacatacccaatgttgtggagaatggctagagctattcatcgaacgtttgcggtgtatttgtaaaagtcgcttatttcaa

SEQ ID NO: 701 - DNA, 4471 bp, Cannabis sativa
tatgcttttaggacaacaaaaagaccagttcctttggaacactgcatatttcactctggagaactttacaagatatgcgaaaaagaaatttttatgcctgagggactgaaagctgctaaagatacattgaagagaaaaaatatgattagcagcagtactggacctactggatcacacagtggaggtgcagcagcttttgctcagaaacgtgaaagtgttactcggggaaaacagaataaacattttggttcacacagttctggaaactactatggaagtggcggcgggagtcaaaataatggcaatggctacaacagttggggtttaaggagatcagatgcttctttgtgtttgtcacttatcaataagctctcaaagaagtctctgttacctgtaagtcgaagcataattttcttgaacatgtcttgcagctttgtttggagctcatattattctcattaattctaatttagatatgataagtagaagagttcatagattatgctagcaaaagaattttaagataacttaaaccgaacatagaagcgtggccagaaaataagggattttcttaagtatttacgtgatattatttagttttgtcatcgtgaaacacttttgctttctccaacctaaagattggccttgcattttttatttaaacatgatttaatgtgctgttaatattcaagcaaaagactaaaattaagtccactgttgaaatttggtcctacctgatgttttgcatgtaacttttaaattagtgcttattattatgtaagtataaatttatttgttgaaaggtgttagtttattacacacagggacagggacagcaattcttattattttgtcccctttaataaattgaaactttttttcttttagaaattagaaattcatattgtttgacttctaaacatctgttcttaacttgttcctaggtggttatattttgtttctcaaaaaacagatgtgataaatcagctgatagtatgaccggaactgatctcaccagtagttctgagaaaagcgagattcgtattttctgtgacaaagcattttcacgtctcaagggatcagacaggactttgccacaggtgtactaatttgtagcatacttgcaatttttttttttccttttgggtacagttctcgggcttaagatgtagacgtattatttattgtcatgcaggttgtcagagttcaaaatcttcttcatagaggcattggtgtgcatcatgcaggattgctgccaattgtcaaggaagttgttgaaatgcttttctgccgtggtgtgatcaaggtaaatttattacttaaaatatacttcttcagtgctgtgattatatatgtatatgtttttaaaaggactagaggatgatcgataagttttatgtaaacatgagctgaactttgtttttagggatgttattgtcacttgtttttaagcctttttagctgttgataattttatttgtgcttttcgtaggttttattttcgaccgagacatttgcaatgggggttaatgctccagcaagaacagtaagtgttatcctgatttgttgtgtgcattggaatataaaatgtaattattgttttgtgtactacgttgcatctattcttgcaattgttattattaaagtggtgcaagattataacagatgcaatgcggccatcagcagtttctactacgttttattgaggatttttaactattgatatagttgcatacttgaaattctcattttggatttaaataattttcaggttgtttttgatacattaaggaaatttgatggcaaagcattcagaacattactacctggagagtacactcaaatggcaggccgtgcagggagaagaggtcttgataaaattggtactgttgctgtattatgtcgtgatgaaatcccagaagagggggatttaaaacatgttatagttggaagtgcaactaagctggaatctcagtttcggctgacctatattatgatcctacatctccttcgtgttgaagaattgaaggtagtgtgatattcttacttcttgttattttcgagatgcgagaaataaaagaaaaatggataaaaagaacttgacaattaaaaaaaaaaaggaagaaaagaaaagaaaagaaattggattaagaatttaagataaaagcaggtagtcatccttaaaatctagttatctatttgaatttatttgagcgtaagagtaataagtaggttaaaaccttaaatttattaagtaacttttattttagaaaaggagaaaaatatgatagcagaatttgagaattttttcgagaagtaattggctagtagcttatcaagatcaaaaactcaattataaaacaaaagattttgtagatttttcttttatgattttatctgctgggaatctagacgtgtagagactgggaaaacctactgcactagctctcttttttatgtttttatctgtgctagtagagttttgattgttgtagtaggtctttccctatgttaccaaggttttcctccgccattagtgaggactctcaataaattttggaggaggtaaaagatgttttagctgctgtctctttttcaaaagaaaaaaaaaagaaaaagaaaatgaaaagaaaacttaaatggtgtcagaaaatattaatgaagctagttagtaaaaattcattatcctctagtgattttgcatttttctaaaaagaaatttaaactgaagtttcataacctattgattaccattatgaaggaaaaaaattagatgtttctatgtgtgttgttaaagtaaattgtggtacttttttgtattcatctcagcagaagtctttcctgacttgcttattattattattatctaccaaaacatccacaaagatatccactgggttttagtgaaaaaatgcagtttattttatcctctcattttcctaagtgacaaaagaccccttagaaatagaacagtgcataattatattaacttttcccccccacaataaaatttctccccgatccattggaaaaactaagaaagaaattcttataaatggatcaagacatgtttacccaactatcagttaacccaaaaaagggacttaaataaataaacaaactatgtattaagacctttactaattaatctagttatcttctctattttttcctctcttttactccctactgttttttccctttatttttggttgcaagtataaagtagagactagagcaaattagatagaggattgataatttcgtttatttactatgttgaaaatttcatggccatgtcttagtccaagattgtctcaatttttttggtggtccatcactgcaggtagaagacatgttaaaaagaagttttgctgaatttcacgctcaaaagaaactaccagaacagcaacaacttctaatgcgaaagcttgctcagcctaccaaagcaatagagtaagtcaaatacagtagttattgctatgtgtgttgaataattaacggattaggtgtcatttgcaactctagagttattagtcctatctgcaacttttattagggttgtgcgtctcaaatgcaaacattatagttgatttcttatatggtgatttggaaaaaaatgtttttgagtcatttattgctgactttatgccatacctacaagtgatttgtgaagataaagtgatttattatgttttagaactactctatgtttatggtattattatatacaagttatgcaagcaattcatctgaggttgggagtaatgagtacaaatgaataaaaataggaacagaaatataatataaaaattaatatgagctatgcattgaaatggcctttttattcattttgggcagaatagccattttacgaaaatgatagaaaagtcataaaaaagaaataatttagtctctaatcatagaaaagatagaaatgaattaattccattcctttccctcaatgaaatgcttcattttggactttcaagtgccattttaatgtggaccatgtactaaattattaggtcaattatacattatcatactggcaagattataatttgtgcaaaatgggcaaattttattttgttgatgggttgtgaaccatggttgtttgactgtagatgcataaaatgtgaatcggccattgaggaatattatgagatgtactcagaagctgagagttacgaccaaaaaatatcagatgctgtcatgcaaaataccaatgcccaacaatttcttactcctggaagagtggtagtcgtgaaatcccaatcagtgagtccctttacatgttttccctctattctggtcgtattctgtagtgttgcaataaagtgagaggcaccactattattttttacattaaatgttgaacaattccacgtcctccctgccagggatagctgaagcaaattggtgtaaatttataccgccatcattgttgatgcttttttttttttttttt

SEQ ID NO: 702 - DNA, 1897 bp, Cannabis sativa
aaaaacaagaattacctcttttgtttgcttgtgagaatttagttccttcacatttgaaaggaatgcaccaaactgttcataagacaatcggctcctgatggcaacaaagtaaaaaatttaattagcatagaaacaaagtgaaaatttgtgaagcgaattcaattagcggttatttaccaacctgacttggcgaaaaaattccttcccatcaacccgggttcttgctgaaacagtttaagttcgataaaagttttaaggaatgcttatgctgatttactattgtttataagttgtgtaaagtaggttttgaaactaaccggtatgtgaagctggatcggttccataatgacctgaggttgcagaaccaaacctatcttcaaacatccctcttgaagttgagaatgagattgcatgacgccttggggacacgggcttagatgtttttgttggggagaccgatgcagagacaattggaggcgatccaggaggtgttagacgaggcgtactagtctgggatgctaagaggagaccaggtgatacgcgaggccttgaggttgccattgtaactaggagaagcaggtatagcaagtttattttcaagttcagaatcagctcaagagttttgcatcatctagtaaagtaataattgagacacaaaatttgtatttaactagtaccatgttcatgtcaaaatgggagtaaattaagtgtttctagcctcactattatcatcattttccttttctttttcacagcttgagagtgtagttttacactatgatccataacatgaagttctgaacatattaagggttcattcataccttctgtgtcacgatcttcagaaactgaatttcctacttcagagaattgactccgcattgaagatgttctagatatacctgaggcatcatcttctgcaacaaattggacaagaaaagttaatatgaattactttgtgtgcctattcaaatgtctaaaagatggattttggggtcaacttgtgatttgataggaatcataaagaatggattaggcaaaagatctctaatcaccaatttgagcaaaatttcaattccttcaagataaaacatctcttttatttcctctttacattgcattgtcataccaaacaagataaaaaggtttctatcctttctttcatatctacaatttaccatcatttaggtgacatttgatttcaaggaaacataaaaatatgaataaaaatcgaaatagaaataagaataagaatggaataaaatttaaaatacgtaaaaaaaaaattattaaattatcttttctttcatttcaaaatgaaataatcattctattaaaatggtagaaatactttttcattaaaatttcattccaatacttaaatatacactaaaaaaaattagaacgaaggtgttttatttccatttcattacctccaaccaaacttaactatgaaagtgtatgcattagaagcaaattaacaaagattatgcaattcattttctttttcttattattaattgaaaaaaagtgaaacagaggaagcccaattaagaaagtagcataaataacctccaatttgtgaggaagaagataaactgggatggttttttatcttagccacaatatcaggagctccaccctgtgaatagaattacagaagctaaattatcatacccaaaaatcaatccaattcgtaaattaaatctatagaaacttacagaactatcatcatcttcttggagtgatcgcataagcgtctttctaaacacctccaactatcataatcaatcatataacacaaaaattaattatatatatacataagaataatattaacactacaaaattctctgtaaaacatttcacctttgatacatctttgttgagcttctta

SEQ ID NO: 703 - DNA, 1274 bp, Cannabis sativa
tgctgggatcgtgtggctgcgcagtgaaggtacttataataaggcatcggcgccaaagagtgtccaatatttcagaccaaactattattaatacaacaacaacaagtactcatgtttactttggttttaccaaggaatcttcatcggttggaaacataacaacacaagctgctaataatattaatgctgcctcgtcactttcacttggtctacctattaaaagagtttccatgagagttaagaattccccaatataatataatatatatgtttatatgcaaaggttataaggaaatttcatttcccattttcatatatttaacttttaagataagaagctacgtggatataattatgacctatatatgtagctacacttaattgtctttgttgtcaattgttacattaaataaattattttcatctatttctgggcagttgcttatttacgtaccagcactttcgactatatataaatcgcatgttataataaaatacaaaaccaaatgacttgtctttctccttttcttttttaatcttttattgctttggcatcttaaaagtgctcaatataatatcaatatgatagtttaataatattttttggtcttttgtatttttatttttataaatgaactttttactattcttggtaaataattttttgtactattatatatatacatgacactttaatgtacttaatattatactgacgtgatacataataattgattaagaattttatgagaactgatattgaaatacaccaataataatatgatacattttataatacttgacaccttaatattctcattaacatttttgttattgaataagtacatatctatattagtgtcaattgtgttttttttttatttctttttatgaatgatatttgtacttttgtactacatttttagtaaatgattttattattattgctatgtaacactttaaggtgcttaatactatatgcatattaatataaaatctaataattggttaatagttttctaaatcatttattaaattaaaatttatggaaattgatatggaaatataccaataatataatatgctatcttttttggtgtttgacaaatgtgtccaccttaatatgtgtcctttattaatatttttgttattaatatatatgttaatatctttattaataatttatattaaaaaaatttaatatttttaattatatataagtttttgcaagaacatttttaatgagatgagtaaaaattgtactatatttagca

SEQ ID NO: 704 - DNA, 3902 bp, Cannabis sativa
ggattagtctctattatatagagttgtgttcgtttgttcactgtttcatgggattagtctctattatatagagtcgtgttcttttgttcactgtttcattacttcttttcattatggcgtccgatcatcaactggtttggagcagcagtggaaagacatttgtctagaagaagaagaagaaaatgaagtggcttacgaggaggaggacattaaagagattgaatttgatgaccgttggtgtctcgttggccgattattaactgggaaagtttctgattttcagatattccaaaacatgatagcggatctatggaaatcggggaaaggcatgtatgttaagattctcgaacaaaaccggtttttatttcagttttaccatgaaattgatattcagcgtgttattacgggcagtccgtggacttatgatcgcaagcaacttatcattgaacgactcaaacaaagagaaaacccgagaactatttctttaaataaacttgatatatgggtgaaagtccatgatctacaaattggattcaaaacagaaagggttgttcgtcaagcaagtaactacattggaatgtttctcgaatcagatcctaacaattttcaaggtatttggcgtgaatatttacgtgttcgtgttcaattgaatgttgaaaaaacactaaagagacgaatgaagttcaagaagaagaatggagaagtgttctatgccaacttcaaatatgagagagttcccaccttctgtttcatctgcggcatcatgggacattcggaaagattctgcagcatgggacattcagaaagattctgcagcatgggacattcagaaagattctgcagcaagctgtttgacacacccccagaggcgatcacgaaaccgtacaataatgatatgcatgctccttcaaaacgttagagtttcctcacagcatccccttggcttcgcaccggaaaacctgatcctccttctgccggtagccttaatttgccacaatcttctgccttcaatgccatgcctcaatcccaggcgaaaatcgtgagtcccaccagacaaagcaatcacacacctataacaaaagtaattttccaacaatctctccttgattttaggcacacgagccaatcaaaattgaaaaatattgatgagccaacattgactattcatgagaatgagttcacatttatgtctgaagatgatgtatgtctttatgatttgaagaggaaaagagttgatattctctctaataaagaggcgcctatattagtggaagatgatttagataatatctctgagccaaataattttcatagtattgatgttattgggcttccaaaaaacggggaataggtgggtcctggtgtccaggcccaccaatcaataaaatactattagttggaattgccgcgggcttgggaacccacgggccattcaattcctagttgatatatgcagtcaaaagaagcccaattttatattcttttgtgaaactttatgcaacaatgatattgtggataggcttaaagttcggttgggctttgaaaattgttttactgtgccagcccaaggtagaaaaggaggactagcttttttatggaagacatcttctgatgctcatttactcaagtactcggcccaccatattgatttggaagtccatattcctggatatgatcgatggcaccttactggattttatggcgaaccgaatcgcactctacgccatacaacttgggcgcttctgcgtgacctggccgatgactcgaagttgccatggtgtatcattggtgacttcaacaacatcacttctcacgaagataagaaagggggtcggctctatcctgaatctctaattaatggcttcaacgtggtgcttcaagactgccggctgtgtgagcttcaattatgtgggcacaaatatacatgggaacgtggcaaagggactcaaaatcacattgaaataaggttagacaaagcttttgctactcaatcttgactatctatttttaatgaggctcgtttgtcaaattttgatttttcgtcctccgatcatacacccattattcttgaaactgcccctgctgttatgggtaaattggtcactgtttttttctatgaaaatgcttggtctcgtgagcctttatgtggtcaaatagtccgaaattattgggagactaatgtccacctttctcttgctgataaaacaaaactctgccttgcaaccttgattgattggggttataaccttactgggcattttaaaaagaggctgtcaactagtaaaaaaagattagcaagactaaaaataagtgacaatccgggttaaactgatgattttttgagtgaacaatgtaactattttgagattttagctcagcaagaaatctattggaagcaacggtccaaacagttttggttaaacggaggggacgagaatggcaaatactttcatgccaccgcaagctctcgaaaacgaaataataaaattgtgcagctccaagataatgatggaggctggaattctgggttagatcaggttattgttgattatttctcagctctttatgctactgatcgtgctatttgcggctctgtagtcaatggtatccgtcgctcggttacagttgaacaaaatgacaacctactctgtccaattacagccgaagaaatcaagcaagccctcttccaaatgcatctcgacaaagctcccggacctgatggtatgaaccccaatttctatcaaaaacattgggatacggttggttctgacattattcaacttgtcactgattttttcaataataagtacatgccgactggactcaatgacactcatctagtgttgataccaaagaagaagaatttctccactatgggtgatttgcgacctattactctttgcaacgtatcctacaaggttctttctaaagttcttgccaatagaatgagaggtttaattgatcttgttatctctcccactcaaagttcgtttataccaggcaggcttatctcggataacataatgattgcctttgagattatgcattatctcaagcggaaaactaagggcaagaaaggcttcatggctatgaaactagatatgagcaaagcttatgatcgagttgaatgggactacttgtatgtggtcatgcaccgtatgggctttgctggaaaatggatcaatcttattatgaaatgtgttacttctgttcgatattctatttttcatgatggccatatgttggggccgataactccttcccgtggaatccgccaaggtgatcctttatcaacttatttgttcattatttgtgctgaaggcttttcttccttgatcaaaaagtttgaagctgaccatgtcattcaagggtgtcgtgttgctaaaggagccccttccataacacacatgttgtttgctgatgatagttacctcttttgtcaagcaaatcctaatacggctgtcaacatcaagcaaatgcttcattcttttgaattagcatctggtcagaaagtgaatgtatcaaagtcctctatttacttcagctccaacaatgaagcaaatgtctgaaaccaaatatgcaatgttcttggcatgacagaagctactgatggctctctttatttgggattaccaaacattattggtagaaagaaaactgttattcttggttttctcaaaaataagataatcaatcgtcttaacagttggaatggcaaatttctatcctgtgctggaaaggaagttcttcttaaatctgtcattcaatctctacctacttatgctatgagcgtctttcttattcccttggaaacttgccaagagattgagaagattatggctaatttctggtggaaaacatctagtgcgaaagtgttgcaaaaattattaaatactacgcaa

SEQ ID NO: 705 - DNA, 1837 bp, Cannabis sativa
tcaccttcaccttcaccttcattttgaccatcacttacttcaatatcttcaatgtcattcccattttcggtgtcatcttcaccaactttttcttctgaactgccttgttcatcatcagattccatagttcgctgccctcttgcagctcccctcaaacgacgaggccgtaatccttcccgtcgaggcattgatttattttccatagtatttatattcttcgggaatgataactcatcttggctaacattattatcaatctggttcctcgaagatcgatatgagggtctctgaaaaagaaaaaaaaaaatatacaaaaatcaccttaggtcacaaacagaataaccattatctactttattgtaccaattttacgcatataaacaatcaaaccttgtcaaatacaaggtcttcaacataaaaccttaccatcatgtcctcatcctcggaacctgaactgtccgtatagtccctacgatctaccatcttccgctttctagttgaccgccggaggttagtttcgtcttcctggaaacgaaagtaagtcatttatgcatccactattttttattttcctaaatgtttgtttaaataggcaaagaaacagaaagtccgacaatatttctatatcgctctctctaattttttttttggtaacgcacaacaaaaccattttctgagtaacaaaaaaggaatgtttcttcaattcgaagatataaatggcaggttccattaatgcaaaagatttaacgtcaaaacaccattgatattatccttcatagaagaatatcgtttgacttaacgagccatgattgacagtcacattcctatattcgacctcaaatctaattcaaatctccgacattaaattccatttaaaagctttggtttactccatgcgtatttttcaatccaaaaccatatatatacatccatctctaatctcaacggtacaatcaaaaccctaacacaaaacaacaaaacctcaaagcaaaagaaaactcgataagaggtgaggaataacagttgctcacgttgttgttattagaggcgtgatgggtccggcgagagcgatttccaggagagagcatcttggcaatgcgagaagcagcggtgcgggtcttggtcttgcccttcctcttccgaatgatattggcggggccgtagaagtagtaagcgcgcccataagccttaggtgtcctcctgagccggtcgctggacctaatcggcctcgaatccggctcatcactctgccccgatcgctttgaatgcatctacaaacacccaaccaaatttcttcccgactaggctccgctttggcgtctgctccgaatcattatcaactgccgggaaagaaggaagaaaaaagaaaaactaaagaagagaaggaaatgaattacatgagaaacacggaagaaataatggaaaaccctaaatcagtgagcctcgaggtcgagtcagaagaagccatgcaagttctggagggagctagggttttgtacagggtcagagagagagaggaagtgatacaatacaacccctaattttgttgcagaggagacgtatttaccaaaacgcccttaaccctccctttgaaagtttacccataggaaacgaggtaggggaggaataaattggtatttggtactcagtcccacttgtattttctgtttctttcttttttttgtccaatagaaagtgtatttttgaaaggctgaagaagccataacacccttagaaaagaaggcatagcaattaccacattaagccaccaacacacacttaaggctataattcatgcctccaaactttggctgttaattttagtcgtgtttttttt

SEQ ID NO: 706 - DNA, 2707 bp, Cannabis sativa
tttttttttttttttttgtcaatgggtcagtcgaaggagaagctcgaagggtttttcaacaacagatggctcgtttttgtggccgcaatgtggttgcaatcgacggctgggattggatatttattcggcagcatatctccggtcataaagagctctttgaattacaatcagagacagctcgcaaggttaggtgtggctaaggatcttggagactcggttgggttctttgctgggagcttgagtgagattctgcccatgtgggctgctctactcgttggggctttcaagaatttatttgggtatggttgggtttggctgattgttactgggaaagctccagttttgcctttgtgggctgtgagtatttactttcctatttagctcttttcacttatttccatgtgtttggttttatgtttagttaaaataatcacatttgacacacattacatcaaatatgcagatatgcatacttatatttattgggacaaatggtgagacctatttcaatacagcttcactggtttcctgtgttcaaaactttccaaaaagtaggggccctgtggttggtattttgaagggatttgcaggcttaagtggtgcaattttgactcaaatatacacaatgatccactcaccagacaaagcatctattgttttcatggttgcagttgctccaaccatggtgactattgctttaatgtttattgttagacctgttggaggtcataaacaggttagagcatcggatggcaccagctttacattaatctacagtgtgtgcatactattggctgcttatttgttaggggtcatgctagtacaagatttagttgatgttagtcatactattataataatttttacagcaatcttgttcatgattctcttagtccctattgttattcctgtgtcattgagtttgtcttcggaaaaagatcccgaagaagaggcattcctagctcagccacagaaagaggaacctgaagcaggttctactagtgatagtgaggtgatattgagtgaacttgaagatgagaagcctaaggaagttgacttgcttccaagatcagaaagacaaaagagaatagcgcaattgcaaacgaaattactacaagcagccgctgaaggagcggtgaggatcaagaggagagggccgcgcagaggggaaaatttcaccttgatgcaggctttgattaaagctgacttttggcttatttttgtgtcacttatgttaggttctggaactggtttgacagtaattgacaacttgggtcagctgagtcaatctcttagctatgacaatacacatatttttgtttccatgatcagtatttggaacttcttaggccgagttgcaggtggttacttctctgagattgtagtcaggtaaaactaaaaaactgatagattgcttctctttaaatgctcaatgaatattattataaaattcatatattattttaacattgctatgatctcatcttctcagggattatgcttatccaaggccagtggtaatggctatagctcaacttgtcatgtcaattggttatctttatgttgcttttgcattacctggtgcactatatgttggaacagtgttgattggtactggttatggttttcactgggcaattgtaccggctactgcctctgaattgtttggcctgaagaactttggtgctttgtacaactttctcacaatggcaaaccctgctggttgtttagtcttctctggccttattgctggccctttatacgatcgcgaggcagagaagcaagctcgtggacaacacttgcagcaacacattgcaggctcaatcctctcgagctttctcggtgtggacgaggcacaagcatgtgtaggctccatatgcttcttcctgactttggtcatattgtgttgcttctctgtgcttggatttgtcttaagcatgattcttgtgcatagaacaaaggctgtttactcccaactctatggaaactttcgatcagggcagccagtctcataatcgaaatatccaatttttaatgaggcttgtcaagattatgattcccaagtttctgttagattatgttcaaaatagtgaattttataataaagaataaaactttctattgtttatttatttatttttgaaaaagaataaaactttctattgaaactaacacagtcacacttttagataactctttttattttttatttttttggtcaattttgaatcgaactatgtaacaaatataataaatatttggattaactcttttaataagacttttgtgaccgaattatacttgttaattgttcattactataataatggccacccactaacaaaataaatatattttaatatgatccatggtgttttcatgcctcaggccctcagccacacttgtgattaatataattatttattatatttataatattctgttacagtatttattgatgcattctgacaaagagagagagacatatttcatgttttagatgaaaaaaatcctatgtaagttgttattgttttctctattaatagagacatgtgggtgatgatgtagaaggccactagtgcatgaatggccaatttttgaggtaaattattgcaacaaggctaaagctatgacttgttttttctttttctctttttctttcccagaatatatatatttttaaatataaaagatttttttatttatt

SEQ ID NO: 707 - DNA, 962 bp, Cannabis sativa
attacctcagcaatttattacttataaagctaatttccagtgcaggtcatttgaacgagcatataaagaaacaaaaatctcatcgacaaatttattcccataagctcaggcgtctagtaagtatttactcttcacgagtttaaaagaaacaacaacgaaactgattgaattgaatccttatctaatttagttatctaattggtctaggtgaaatgctgcaaatcaacatgcaaggttacagacatcaacgagcttttagtttgccactattgtttcgataaagcctttgacaagttctacgacatgtacactgcaacttggtatgatatgggatacattttaagagttgttattaacttcataattgatcaacattttcacttcataattgacataaatcccaactgtatttcaggaaaggttctgggttgtcgatgatttggggttctatatgctgcgaagaccactttgaatggtgagttgttgtaggattttggtgcagttaggcataaacaagagattattaactatgtttgatgattgtttgtgacggtaaaacaggcacaggatgaattgcttgaacgcaggcattgaagacaatgcttatattgtgaatcggaacactcaaaggaaacatgaatctactcagcttagtgacttcatcttctaatctaaggttcctataaactcaaagaagcgaaatacggtatggttgttcagacagcttctctattagtttaattcatgtgtttcggttgtttgtttcaacatgtatattgttacaatggaaagacaccaaatcttgtcatatttgctcacttataaatttatgatttctttttacacaaaaaaaacttgtaagccttgtgttgtgttctcaggctatttaggaccctgaatgtagtttcgaccaggggaacaatttagtagcggtaatagttcggggaataaaaattctaaat

SEQ ID NO: 708 - DNA, 1370 bp, Cannabis sativa
tatttgggggttgaaagtgacctgggaccatacttttttattgaattactctctttgctatgcacactcacacaaccaacatccaatatttaagcactatttttatgcttagccactcatttcacattccaattttaacaaattctatcaatgttttctcagggtcacttatgtgtatgtgtttttggactaagtaatagtttagggactcctcacttatgtgttggtgtctttggacaccccattggcattcccataaaatagtttttttcataggactagaaatagtttaataatatacactgtaaaaatctctggtctgttggaaagtcgtaccaaaaaggaaaaggcataacaaattatctgaagtctgattttatatcttatataatttataattttcaattttctaaaaactaacaggatattctgaataactgccaaaatagaaaggtaggcattgataatcatttttaggaatttaataaaagaaaattgaaatgtacaattttcataaatcttgaaaaaaaattcattacaatagaatgtaattcagaagacaaatcaccctcttaaattacacagtctgaagagtaacaagagccacgcgccaaacgatgagtggctttatcagcagactacttgacaaaacaaatagaaacattacaaagattaaataattgcatttcacaatccttattaaaaagactgaattcagaaaacatgtacaaattattgttaatagcttgaacaagcacaaggctatccgactccaagatgacattggaccattgatgttcaaaaattcagctaaaaggcttcctttatatccactatctgaccaatttcacgaaggacaacaccttgtctacccttgttaaaaacttccttaaccctcccatatggcctctagccaaacagcccatgccaaatttacccactttagcaaaaataattctatcaacattcactttgatcatgttaacatccggtgcagaccaatgctcagatcaacatctaccagttcttattaataacaaagactcacaagtcattgaccgagcgaataaatactgataaaaaaagtgtgttctgatataacaattgtcgttgttgtagtagttttctgcttccatattgactggtgtctggctctccatatcccccaagcaactatagaagcttcttctgatacacttgtatgtgatcaacttgctaactcctgaaaccaattgaagaaactaacctcaaaccagctgccaacaactacaccagatctgttccagcaagcacgcacaaaagagcagccaactaactcgtgaaaaatagtttctttttacaaattacataattgacaaactggattcact

SEQ ID NO: 709 - DNA, 1231 bp, Cannabis sativa
aaccagataatggagcgagtcagccacatgatagacgtgagcggtttctggaccaagctgagacaatgcaagactaggaatttgcgagaaggtgcaaggagtgcccgagtttgggcttcttcgcttacttccgtctctttgggtgaggcttcgtctgcgagaacatctcaataaagcgggacataaatcttgtacacgaaatttgagggtaggaaggaagaaaagagcttgtttggtctggtccttgagtctccggaaaggtagtagtctctctctctctgtctctctctctttctctctttctttctttctctcaaattattatattggtagtgatgatagctgaagctgttgtccttgtttgagttgggatttttggtaaaaggcaaacaagcatgtaaatttgcgaacagctttctctttttcttttcttttgtaaattatttgctcatctgactaacatctttacttaaccaaaagtggaatgtaatcaaattaacctctctctctctctatatatatatatataatatcataaacacaccaaaataggagaaaagaggtgacaagaaaaaagtacttgtgttgtgtttttaaaggtgtgacgagaaaagggtgttgcgtttgctagtttcgtcgacctcggtctcgacttagtgatgcactcatcataaaacaccctatggccgcaccacataatgtgtatgtgggcatttttgcacgcgtagcggtgcggccatggagtattttagggtgtttggtagctttgtctatcttccacatttaaattaggtgaaaaaaatgtgtgatttttattctaaaacttgtttattttgtattttagtcttttactctttaatggagtttattgcgtagacactgcaaataaattggaaaatgaagcactttaaattggattgaatttgtaacaatgtttatttattatcaataaaaataacaacattacttttttaaatagtacttaattgtctttgaaatgagaacaagaaaacgacaagtaactaatttaggcctatcttgaggaattaatatactatttttgggtccattttttgaataatttaaaattagttattgctaaattaaaaaatacctgtattctatttgattcagccaaatggttgggcaaaatgaaattacatttattgtattaactatagcttcgagcttatatactctaaattgatttgttttctatttatttatttat

SEQ ID NO: 710 - DNA, 10282 bp, Cannabis sativa
aaaaaaataaaataaaagggataatgaagtaggatatttaggaaatgggctggctattaagtctatcgatttggtttcgttatccagctcctgcaaactatatcagtacaattttgtatgccttgagcgacagactctgtgtgtggttctcgcagttgcagccttttcctcttcttcacccaatcacttcctccgctccctccggtggtttgcctatccaaaacccaagttcaactacttcactccacactccactttggaatgagtttcgttgtttgtagtattcggttatgaaagttgtgaacaaacactgttcttccttttctgagtctgcattgttaggctgttgttgagcttggatttgcctgaatgagctcccatgcatttacttggtactctcttctctcttctctttacgcttttattgggtagaattatttgtttcttcttagttttgagctgaaatcttactatgcttatcttaattgtttgcaccttttttacttgaacttcctggtcactatgttgctggtaacatgtcccttaatttggttatttgcaaagcggaaaatttagtttaaaattcaagattttagtttaggaattgctctctctgagaaaaaagcaccaaaattttatgttgttaattggagataagttgcagcataagctatcataaagtttgaaatctgtaaatggtttaggtttttatatttaagggtaaatttaaattcccgttgtgatgttttctaagggtgttcctttacgttcttccaattgttagcagagcttgcggctacacagcctgccttccaaaacagtttggggatactcatttctcaaacctctgttcatgataaagttttatcaagtccattcatttctggaaatgggaagaggttatcctctgcttggaaattcttgggtgtaactaagattcgaaattttaactgggggcggccccatgagatgcctagtggcactggtagactcctgattaaggcagttgccacacttgaaccaaagtgcactctcagtaatgatgataagcatcggagcaatacacgattgagtgtagataaaagttctcttacaattcagactcgatcttccagtgaggattcagaagatttggatgagaaagagaagctgcggcgaatgcgaatttctaaagctaataagggaaacacgccatggaacaaaggcagaaagcatagtcctggtaagaaagataattgaagctggatttttttttgggtgccaatctagttccataatctagaatgttaacgtcaatctttaattaatttgcagaaacccttcagcggataagagagagaacaagaattgcaatgcaggatcctaaggtgatgtcatgtaagaataattttacatgttctagtagagtcatcttaaggtgtgcagagtcaaaggaaaagcgaaacacagatgtgaattaaacatgtttttttcactttggagtgcttttctcccacattcactatcatgtcatgcatgtaggtgatttgacagtgtgccattgagtttgtgcatcctaccaaagcaaaaccttaaattagtaacttatatatgaatatttaggcactgcagatgaagctccaggaaagttcttccatacctttagtacaataagttgcacatctgtatgaacttactttgaacagtctagttgttgcagcacatctagtaagttttacatttctaatagattcctggaaaaaaaaaacataacaaaattttactttattctttgtgttctttctgtttttgcataatactttgacaggactcaatttaattttagaactttgttttcatagtactgtgtgcaaacctaatttgattacatggatattgttcattctattcacaaagattggctctgcaggtcaaaatgaagttgattaaccttggacatgctcaaaggtctgttttgggttattccacatcactttttatgtcttattactaaggcttcttttcatccaattttctaatattaagtcttgaattggcttgaggtgcattattaccaaatccaatggattttttgtttattcatccttccttgtacagttttaagatattttgttctccgttatttgttgtacagcgaagagaccagggtcaagattggggttggagtccgaatgggttgggaaaggcgacgacagacgctatttttgcaggaaatgtgccactttgaatggcagaacttgattgcagaagcttctaggcaagggtatgatggtgaagaggagctagaatggaattcctacgaaattatgaatgaacagcttaagagggaatggtcggagcaggttgagaaacgaaaatcaatgcctaggcctaaaggaagcaagagagcacccaagtctcctgagcagaggaggaaaatttcagaagcaatatatcgcaaatgggctgatcctgtaagtgaatacaattgtgttacgtgaaacaaatattacccttggctttcagataataatattaataaaaaaataccttggctcctttaacgaactctcaaaataaagaaaatatacttcatatactgatcccttgaatcttcgtttatatttgtttgcaagatacccacaatcctaataaagctctggtttgcatccttctttgcttggcctcaatctgactttgactctttcttactcctaaattgtctggcaaatgtaatattgatgaagtatggcatataataagataccttatgctatattgctattgccaattaacttttctccattgtattttcatttgttaatcaggtgtaccgcgaccgggttgtttctgccttggctcaatatcatggtatagaacctggaactgaaagaaagccaagaagaaagccaagcgacggttcacagtctcccagacgaagccctgcaaagaaaagagcatttgaagagaaccagcctttcaggggcgagatgaaaatccagtctcctcgaccaaagtcaaggaaacgtaatgcaccattgtataaagatcctttagcaagctcgaaactaaagatgattaaaaacattagagcacagcgagccactgcaggaaccaagaaaactgaagctattgaacgagctaggtaagttcatatgtatgtgtttcagctcttatattggactgaattacaagtactgatatcaaagtaattttcagccactcatccattatcctgtccaaccagttttagaagttctttaacttttaacttgtgcggaacaggcttttggtttaacttcctatgttgactgccatttcacctgttactggtgaaaatatctatatgaagtctgttctttgttatttttgttcttcagattattgattgctgaagctgaaaaggctgccaaggcccttgaggttgcagctacaaaaagccctattgctcaagcatctctcttggagactaggaagctcatagctgaagcaattcgatcactggaatctattgaagtagaccaaagctcatcccaggtgaatggtgagaacccatctattgtaggagatgaactaggcagccaggttgagaatggaacagagggtgtaggcaatgttccagtagaagcagatggaaaaaaagtgaatggaactcgaaccttagtatcaagcaaagaagaagacttgagttttggaaatttaaatatgcatgagatactgaatggtgaagagggacatcttcaattaaactccagcgcctatggtttatctccgtttagttatgagactttaatgaagcaatcggatcttataaatgaaaatggtcatttggaaccaagcacagacagtgaacagaaagagaaacctctagtaaacggagcaaaagctgaaactcacaaagaggaaacgcctgcggctgaaactcaggatgagcaaacgcccgcggccaattcagttaccgttactaaaagatggatacgcgggaggctggttgaagtagcagaaggtgcatcttagtataagaagataattagtttttaagtgaaaatcatagcatcatcccatgtaagatttttgaaattactatgttacatatgtcttgaccacatatgtgaactctattaaagagctctgctgccttacttagtgtacaaggttggctcatgttgagcttgaatttatgtcgatttatgtaactactttcatgaccataattagagttcctttctgttttcttatctgtcatttgcatttggtacaagtatatatatatatatatatttatgtatatatacagctgaatacaacatattgacagttgagcctgtcattatatctgggctcagtcgagaggtgtgtagtaagtgaacttagattggttgagttgggagtccacagccttctccacctcattccttctgttctgtttttcttcctttcctttactgatctccttctccacttcttccttcttcaatacccaacaagaaagtaacacaaaatttagtaaatattcagaaaagtgaatatgtgtgagtgtgtataaagaaagagagtaagaggtaagtagtatgtatggacacacattgagatggtgaagaacaggtagcctagcaccatgaacggctgaacgattgggcggtttagataccatgaggcggagttggtgatgccgtctaactctagaccaccaatcacaaagtagtattcttccctgcattttcacacctatctggcctgttgttcttccagttctttttattattcagtaccttgtacttatctgttatgtaatattatatatgaagagagaggacgttaaagggacgttggagaatcggtgcttgttcctcacacacatgacgatgacacatgtttgtgtgaagactaggaaaaatgtgtcctctccaagtgtccttccttctcctatcttcttttactttgttttgctttatcatcccttttttacgttatggttttcaatgttttttttttcccatggtggggatggccgatggggtcatcacttttagaagatcgaaatttgttcttaaagacagtggaaatatatagagcaaaataatttttcaacacttgaaatttattcttttaaattagaatatatggttataaatgaattattattattattataaaaagctacttattattattattattattattattattattataaatgaataaaaaataattataaaagtataaataaaaaaggcatttgtttgttattattatttgcattttgcagcataaaagtcttcaatttgacgatttattcctacaccttttgtacaaaattattgttaataactagaacttaatcaatctagcgaaaaaaatattatataatttatattaaattatattaaatctgatatttaattatatcaatagtaatataatacttgagaggtgtctaacataattagtttttgcataaattttcaataactataatatactatgattaaactattatttccttctaaaaaatatccaaaaataaaataaataccaaaacataaaatcaatacggtacaatttaaaaaaaatatatatttaaactacgagctcacttgcgaagcacattagaccgcaactagtatatcttatcacattaatatttaatgtttgtcatatcatttagggataatagcggagcgagaacgaaattcaatcaaagcctatacatgtaaaattgtataaaattattttattttatttttaaaaatatttttacatataattttttaaaaaaataaaaaatttggggcatgacaccctccagcccttaactctattactgtttagaggtgctcatccaattcaatccacactatcttatttatagtgcattcgatccgcactaaatgcagatatcaaattttagatcgaatcaatccacacaataactcaaatttaatccaatccaatccaaacaaaaatgtgaatttaattagttattttggatgagttaattttcaaaattaaattatttaatatttaataaaaatatatttttttcacataattattaacaaaataaaataaattattgttattttatgtctccaataataaataaaaaaaattgtatgtagaaataaatttttaattttgtttgaattgtatctagaaatatatgtataaagaatgaaacatatatataatctattattttttaaaatatatttatgttatatgtattaaatttttaaataattattttttatattaaactagtaatgatatataaattaaaatttttaattaaatatagatggattaaattaattatttttacatgtcaatctaattttaaaatttccaatctaatccaattgcactttccctgtcaattttaaaattttcaatctaatccaattacactttaccaattataagaaactaataatatcataaatttattttagttatataatgaaacctatcattttgagagttataagaaactaataataattatttacttagtttgtaattaataataatatactaaattataaaaatttctaaattttcaaaaactaatgcactgtttttaatgaaaattatccaatttccctcaaaaataaaattatgcaaaacatatttcagttgattttgaggagatggaattgggctagatctgtaacaactactagttgacacgtcattagggctttgtgtggtgggccggtaaagggtcattttcaggcaccgacaactggtttcttcttcgttgggctttctcgtttgttcaaaccactcatcaactgagtacagtccacacccaacgactatcatcatcatcatcatcaattcactactctcttctcttctatacaacacaattcaatccagatctttaattcttctcttacacatttcaccaacattgacaggttgttttctttctcgggaaccaaacacttccgagaaaatttcacatttcgcttcttaattggtacttgcactcgtttaccactggagacgaagcaaatggagagacctgattccttatcgtcctccgacgaggaagacgatcaccacaccctgattgagcagaacgacaggaagctcccaaattctactcgatccacttttcacattggtgacgacgatgtcgaccgccggaacaacgagttccgatcccgaatacgtcctcgtttcagctcttttaattcgcttaacaagaggtacgtcttcgccattttcttacctctcgtcattgtcgttttgtatttctccgtcgacgtccgcaacctcttctccaccagctccggtattcgattcgactccttttccgatcggttgcgcgagtcggagttacgcgctctttacttgctcaggaaacaacaattaggtctttttactctttggaatcagacatttcatgattcttccccaatttcttctaattcttcgtcttcttcaaataactctacaattgaaactcagcaaaatttattactccaagacttgaaattttcggtgcttaggcaaatttcactgaataaagagattcaacaagtcttgttatctcctcatcggtcgggcaacacgagctccacagggttggaaagtgattctgacgatcccaatcttggtgggtttggtatcaataggtgtgggaaggtggaccagaagttttcccaaagaaaaacgattgaatggaaacccaattcgaataagtttctgttcgccatttgcttatcgggccaaatgtccaaccacttgatttgcttggagaagcatatgttctttgcagctcttcttaatagagttttagttattcctagttccaaagtggattaccaatacaatagagtgttggatattgaacacattaataagtgcctgggaagaaaagctgtcattacctttgaagaatttgctgagactaagaagaaccacatacacattaataggtttatctgttatttttcgcttcctcagccttgttatgtggatgatgaacatatgaagaagctcaaaggattggggatcacaatgggtaaagttgagtctgcatgggtggaagatgttaaaaagcccagcaagagaacagttcaagattttcagtctaaattttcttctaatgatgatgttattgccatcggcgatgttttctttgccgatgtggagaaagaatgggtgcttcagcctggtggtccccttgctcacaagtgcaacgctctaatcgaacccagtcgtctcataatgcttacagcacagcgctttatacaaacattcttgggaaggaactttgttgctcttcatttccggcggcatggctttttgaagttttggtgagcttttactttccctggttctcttatctgtactgaagttgtgatctgtgtttttttcccctggtatattggtacattaaacatttatagaaacactttttggtgtggtcagattaaagtttgacaatttcacctgtgtctcattgtgaacgttaactgttaatctttctttttgtgctgcttagagcacgaagtcagaatcttaacggctttccgccaaagttgcctattctattgttgagtttaatcaatggaacaattggtttatgattaatttggaacacccctgccacaatattagaaagtttattgtttttggtagccatgatggttctaacaattcttgcttatttccagcaatgccaagcaaccgagttgcttttttcccattccccaagctgccgattgcattactcgggtagttgaaagggccagtgcgccagtcatatatctctccacagatgctgctgaaagtgaaaccggtttgctacaatcactagttatgctcaatggaaagactgtaccactagttaaacgcccttcccgtaattccgctgaaaaatgggatgctctgttatataggcatggccttgagggggactctcaagtaagattgctttttattattatttcttttttgcagatacagggtaaaaaaaaaagttcttttcatagaaaaatcaagcatgtgcttgggtttcagtgacattgttgttaccattgaaaattcttgaaaaattgatgtgcgtgggttactaatggtggtattgatggtagtggttgaagtgtggtataaagaatggtagtttgattttgtctattgctgggatcagtaaataacataatagatagtttgctgatattaatagtagcttaataatagggagttcataatggtgtgagtgtaacactgcttgcagtctcagtggtgagttgcagcagtaataatagtagttatgggattgctggctaaggcattagtagttggtggtagcagaatgtagtagagacaccaatgctaccaattagtgtcaatcgttaagatttggtggcaaagtaatacttcctgccggactcttctcttgagtaaattacatttaaccttttttttctactccaaattaagtcataaatcactgagaagagagattggtttgaccctcaggcagtttattgttgtgattttatttactacatggtttaacataagctatagcatcacacgttttcttacaattccattactgtataggtggaggctatgctagataagacaatctgtgccatgtctagtgtgttcatcggagcccctggatccacatttacagaagacatacttcgacttcgcaaggattggggatcagcatcttcatgtgacgagtatctctgccaaggtgaggagcctaacttcatagccgacaatgaatgaagaaagaaagctcgataaactgggtcatgctttcattcttcctatggcttaatcaggcatagtgcaactttgatcagtgatctgccatgaaaggttttgatgtgtacatttagtgtattatagcagcctcagccatttacaactttgcgcacctcctcttgatgaaatgatatattttttctccctcgataataaaataacttgggacttcccaatttgttaattcatttttactttccagcattggattgaagaaagttttgtagagacataaattccaaactattagcatgagagattatataacataacactagacattcttactactatttcaatggaaaatactaatttgtatatcctatgtgagattatataataaatgttcaaagatgagtatacaatgtctctgaatatgcttatattttgagaaatgttgtctggtcagcttgaactcagatcccataatgtcattttatgattttgtcaattttgtaatgatcctatgtgagttagagcatctccaaggagctca

SEQ ID NO: 711 - DNA, 2518 bp, Cannabis sativa
  modified_base (1077)..(1080): a, c, t, g, unknown or other
ttgctattctcaaatgtgagaatgctcaagtacttctggcaaggttgataaactaaaaaaagcctgatggagggtgtttttgggtttttctgagaatgaaagcctcataatttagtactcttgaaatatgttttctgttctcaaattcggcaatcctacaatggctcagatggtaattctgttaagttgaaaggttacttattaacctgtgaatcaaaaattagtaatttgaatatgaagtcactctaggctcaacagtcaactttattgagaaccatctccctatctcaaactaatatggtttcatgtgtcaggtgttctggttgcttatgttgcatttgctgatgaaaacatcaaagttagagctgaaagatttttgagcagtataacaaattcaatagaaatggttctgaggtgcaacatagaagttagaattatccatttgcaaggtgtagaggttgctttaaatgctgcaagtccatcggtaagttacagagaaaggaaggaagctgatgctaatggaacctaccattctacatctgggtcttcagaaatactggccgaaggtgatgcacaaacaagtgacaagggtgagccaagacaggagattccaatacaaagaatagagtcaattatccgtgatcaaagattagaaactgcctggctacaggctgcagaaaaaggcacccctggatcattgagtcgtttgaaacctgagaagaatcagattcttcctcaagaaggcagcgaagatcaaacagagttggctaattcaatcggattgtccacacgtcaatgggaggatgagctgaaccatgaactcaaagctttgaaggttaacaatggaaaggtccttcaaaaggagcagtcaggtagaagggtggatcgttgtcctatgtccccaagtttattgcacgataagagcatcttgggcaattccatgaaagagaacctgtgagtcttaatttgatttgtgttgtgtgacttttaatttttgtataatttacacttcaaattgatctttttttttttttccattttttcctacttttcaaattgattaaatgattaggcacnnnnagttggttatgccttacaaaaaaatagttttattaaactttggtaaccacttagctggccagtagttactaattatatacaatattagcccttttagaattgcttttcacattgaacttacatacaggtttacaggcatttattgatattatagctttagaattgaaggttttttttgttatgaatggtcatcatgttcttaccatcttttctgggtacttgtggatggaaaattttagttcaacagaatgttatatctagatctttatgttttgtctaacaaatttccattcatgaattctcttcaggggttatgaatcagggtctggaaaaagaggctgcagcagatttttctgttggaataatcaaaaaccccagagtaagggaagggtaagatcatctcttctatatcgctagttacctatttgtgttgtagttgtttttgaaataagtcttaaacttctcacttatttgtcgctctgaacaggttagaggagcccccattcggccaccccacaaaagtggagggttttcattgtttggtgagtgtggaaagccaaagaaaatagagagcagattcaaaagataaagagaggaataccaatttggaagggtttgggtgatacagtttctttcttatttttcttttatttattgcatattcttctgtatttagtttacatttgagccatttttcaggggatttgggagaaggaaattgtaaattgggtggtgggtagggctgcacttcaatcataatcatgtctttagctccttccatttttcatgggataaataaaaaaggaaaaggtagtgtttgttagacctgattctaattatattattatggattaaccatcagtttctatttttaaaatgattttcagaagcaccaaaattaaagttggttcttgaaaattttgtttcttctagaatgatggtgtttttaaaaaaaaatatatatgattattataaaaaccacatctttgttttctttaatcttaaaaacaatgtaaagctctaccttagcctcatgtatctcccgtttttccttttcagaggggaagttgtttattaaaaataaaaataggctcttaggcagtgcatatttaagaacaaaaacaaccataacaaaatgaaggagcggaaaatggtggaagcggatcatattattaggcaaattaaaactaggaacaactcatgagagattaaattgatcttggaatcggttgtgctttatattgttgctttgaatactgagttttatgttatgcctcctgcacctatctttaccttcagtcttgagagtgttaaagcctcttaaatgtcgagactgtttatctagtacttgtgtcatcacatgtaaaacatgttgtcaaacaaggtgggtgtgagtgttggaggttctaggtttgaatcccaggtaaaatatgttgta

SEQ ID NO: 712 - DNA, 2894 bp, Cannabis sativa
ctacatttgattcaccttgctcgcatcagcttaaaacttgctctaactagtatgtgtcttcacttattatcaaaatgatagtaggaaaaaactttctagcaagcaacaacctcaatgagcagaatataagaaccctcctggtatctaatactatcctatactaatttttttggagttttaatagtcatctcatgaaaactaatagggggcaatgttgaaaaagtacacttcataacgttaagaatagaaaggaggaaaataaagcacatgaaaagcaaaatcaaaagcaggtcatgcacataatgcaagtgccagtacagcaaataattatttaaaaaaaatgaagaggaaggaaagaaaataaatttccaaactaatatgagttaactaattctaaggtttctaagggaaaaatcattgattcatacttgataatgatgcagtgggacatttctagcaagtctggtaaaatcccaatttttatctttaaggcctataggtattatgtgcctgcaggaacaaataatccagtcagatagaatacacatttatccttgtatcactgccttaacttatgctaaactcaaaaaataaggttgttgaaaatatacagagtcccactaagctctaaaaagattaggatttcgggggtgaacaagagttgaagaaagagtctttacttatatatatacgtgcttgaacacacctagaattggaactaactactacccaagtttacgacccaaataccctcttttcttctttaatttcaagcataaatgaattgtttttcatatttttattataacatatacttgcttcactaaagatactatctttagaattggaattaatacccaatttcaggcataaaagactttttttttcttcaattctaaacataaatgaagggttttgaataagttgattgtaacataattttttaaaagaaaagggttgaaaaacaagttaaaggaataatgtttagaaggaacaaaacaaggatatgcatagggcaagtgtgtatgtgtattgtattcactcacaattttaaaagaaagaaaaatgtgatattagaggccgggataggtgcagcagagtgtaccctgtgagagcgcacggcagctccgtgagtttgtgctgagacatgccgtcaatctggccgccgcgacggcgctgtggaatggcaaaagtgactgcacgcatcccagttgcggcggaggcctattgggaggacaggacaatgaaattgattaacaaagtgagaaaatagagaagcaaagaagcataatttgatacaaagtcaaaggaagaaagacctggacagagagaagcggttgagaggagttgaggtagggagcgaagaagaaggaggtttgcggttgataggagttgatcttatggcggatttaattgaggaaaaggatgctctgttggcaaatcggttgcaggctgaggccattactgtctgaaacaagaacacgaagacgaagacgaaaggagcagccgagatctcaattctgagtctcaaaggaaagagatgagttcaaagggttttgggtttttggtagctttgcctttaccatcttcccacccacttaattgggcccatttattgggcttcctgctagggtgggctgggcagtgggctccacttttacatttgacataactcagtttggataataatagctgtgtaattcccagaaaaagaaaaaaaaaacaatacttgtgtaatttaatttggcatatttcttggtacaaattactaggatagtgcacaacaaaataaatgaaaccccattatcttaaaaagcagtaacattttattacgtgtaatattttgataggtattttatgtgcatatcttttttatgtgcgtatcattactcttgtaaatgataaaatcatttttaattaaaatttttgctttttaaagtttcacatgtattaaatagtgtttccaaaatttatgtcatgcttttattaataaaattagaaaaaaaaaaaaacttaaattcaataatttaggagaatctataacgatataaaaagtttaaaaaaatacaattttatacatattaaaatttaagatactattacatataaaatttgagaattaaaaattttaattagctataataataataataaagactaagagatgtggagtggcatttcaaaaaaaaaaaaaaagagatgtggagtgggggattcatttaccccactaactttttccacacctcatctttgtaaacataaagctaatcattacaaaaagtattgtaaatcgaaagttgtacgattcatgtcataacaatatgtaaaaactatagtctatattgacttcatcaaactttgcatagtaagtaattaattaagtttattattattattatcattataaaatttttggggaagatacataaaagagttgggatcccatgaggaattaacactagtactattagaattagaattggaattggtaatagaattattagaataacctccaaagaaggtagctgatgctgagtctataatttgttgttgttgataatgattatcaacatcgtttttgttataagtaactgcaggaggagaagggtactgatcaaccatcatcatcatcatttcctctgtttctatacacaaattactattatttatgctaagtactgatggtgatgatgatgaagatgacgaattattattgttgctatggttggtgattatggtcgatggctgcagtttattgctgctgcttgaccactcaccctgcacctcaccgtgcccaagtaccccatcattatattgattttgatgatgaggtagtggaacagggaagagtatggcagcggctgcggcggccttggtggtgggcttggcatcgc

SEQ ID NO: 713 - DNA, 1938 bp, Cannabis sativa
ccgccaccgccgttgaagactcaaaattcaggaaacgctggctcagcaccgcctcctcctcctccgcctgagcaagaacatttgccttgtcctcgttgtgactcgaccaacactaagttttgttactacaacaactacaatttctctcagcctcgtcatttctgtaagtcttgccggagatattggactcacggtggtacccttcgagatattccggtaggtggtggtagtcgtaaaaatgctaagcgctctcgtaccactgctattaactcctctcctggtctctccgatcaccaccaccttcatcaccacgctttatctgctacgccggttttgcttcctctctcggcgaatcatcaaggcggcggtggtggtggtgggtcggggttgcattttggtgatgttaagcccaacattggtgggctttgtggtgggagttttacttctcttttaaacactcaaagcccaggttttcttgctcttggtggatttgggcttgggcttggtggtgggcttgatgatttgggctttggtattgggagaggtatttggccttttcctggtgtaggagatggtggtggagctggtgttggtgttggtaatggcaatggtggtagtgcacttagaggaattggtaacacgtggcagtttgagaatggtgataatcatggtggagctgcctttgttggtggagatttctgttcttgggctgaaccacctatttcaacccctggaaatggtctcaaatgaatctttttccttttgttaatttcttttcctggtttttaaaaaatggaaattaaggtgtttttttttagttgaggtttacttaaaatcttaggtaagaaatcagaatattaattaagaagagagtacttactatggtttttttcttttttttctttttaacttcttttgtcctttttcttttctttcttcatcttttgtaatcattgtgctatataatatgacctttgttaattagtttcagacacatacatgtttgcctttaaatttctcttaaattaagacttggtgacaattaattacttgattaaattgaatttgtcatgttaattatatattaatatttttctttgggtatcataaacaatgtatatatccatgcatgtgtgtcagtagcaagagtaatgaatgaatctttgtagagttaaagctaataagattgggtatggccaagaatataagaaggaatatgatatttgcatggaatgtattatttcgaggttaatttgttcaacagcttattcaaaaaaaatatattaattaatctctcgacctgtgagcctccctctatattaactttctcgttacccaataaaccacacaagaagaatgctatgtatatatatgtatgttgcattattaatcaagtctcttctaaatagctagaatgaaaaaaaaggttttctctctttgcaaaatcgatcttacaatatgtaaatgagtagttcaatattaatttgattatataatataagggtagggtctccaacttcagcttatgttatataatgtaatgtgtgtgtgtgaatattgtggaaatgaaaggagaattatttgaattattgtaatatataggtgtacgtacgtacgtacgtacgtagttggtagcccatgcttgttttgccccatattattaatttattaaaaaacttatattggaaaccaacacaaaaatattggaggctttccaagtttcgaaaattattagtgtggtgtggggttgagtaattgagttggtatggtcatcactcatgactagtctactcatcatcatacatcatcatcaccatgcaccatatgtgtatatatacatatacttatagagttatacgtacctacgtacgaaaatgataccatctatctataaatagattgctttttaaaacccttcattttggctttttttttttt

SEQ ID NO: 714 - DNA, 8930 bp, Cannabis sativa
accatgttaaatagaaggccaaaaacattaaaccacctcatagtatatctccacttgtttctcttatttttctaacaagaggggaaaaataataattatcctacatactatttaattttttttaaaaaaattatggcttggttattccaataatttttatgtgagttgctatacggattttagttgcggtttatgttgctctattaattgttataaaggtttttgtgtagaacttcttaaaaaaatttgttttgaagtttaaaatttttttttgttttgtttttaattacagctgtaactcaaaaaaattaatgattaagtgattaacaatgagtagagaaatgtgtgtacttatttgtgaattctctccaattggaaactttcgtatggattgaaggttgagggcatttttcccgtttcgagattcacaaattctatttcactggacaccttaattacgatcaacatatgtaaaaagaagcataatcaatgtagaacaatgtactaacacaccacaaattcaattcttcgtgatattagttgttgatatatttatatcatccccttcttcattgagaaaagaaattgcatatgctaaagatgttctaacagactaaacaccacaagtaatatattatttttggtgccataatactgagtcataggtcccatcccatctcttcccaattggaatactcaaagaaaaacgacgtgaaaccaaagtggcaatgaacgtggccatttgccaacaatcaacgacatagaaaaaattaatgttgaaagcactagcactaggcaccatagttcgtgtaattaagtattataatttgatgtgataattattatagaatattgctaataattttctataataattattattttgttgataaccatgctcaacaaacaaaagccaaatattaacaagagagtgggttggtatatggtggtgcaaacttgtgtgtggtctattgggttttgggaaagcggtaataaatgagccaaaccatttctcaatacgaatagactcttcagatcaaaaatagactctgtaatgaattctaggctttcttacatctctagaagaaaaaaaatatttatatagaagaggcttggtctgcctaagtaagagtaagagaccaaccaatgattctgacaacttccgtaaggatattgtcttgcaaagctaataatttagaaacatattaatttaaacctttcttctctctgctgagataaaggacaagccaaaattaaccccttaactacttttccggaaacaaacagaaaaagcttataacattcaaatagttaaatagatgcaccaaaatatttattttcattcggccatttttaatatattttaaaagaaaacgttcataaaatcattaacaatagccttgtcctgttttgatacaacacctgtttaggacgtacattcttgtttgttttaagagttaagggttttctgaatattcaagtttgaataccaaagtcttttatattttcatatacgaacagacatataattcattatcacctttaagcaaaagtaagagtacttgagaaaagttatttacctattcatagagagtgctgtaaaagtatgcattactatttttttttttagccaacaaattaaattttactttttctattggagatagtcttatatacaatcatgtttttatatttttactcaactcttttacattaatcttgggataatgattctaaatgcggctcaactcaatctcaaaatagtaactaaaagagtctagtactttcaaacaaacaaaaaaagaagatatatattgtatgattgaatggtatttctcaaggctcaaattacaccaactctagtcttattgaccaataatttcattgattcagtcaagactttgccaagagagatttttctatttcctggagattttatagtgggagctggagctggaactggtgatggagctggtgaattaatagctggggctattggtgttctaaccggatgtttctctgccatgattcttctggccttaatttcttcatttttctcatctgtcaaagtttgaataaagaattaattaatatttcatttatttatgtcacaacaacaagaaaaagaaaattgttactttattttgtttgtatagaaagacagaatcgctcttaccatttaactgctgagcctgagacttggcagtctcggacaactgaactagtgtaggcgtgataatagtgagaaaggcccagaaaaagaatatcacaacaaaggttcttccactcatttgtggtggggtttttgagggtagagagaggaataaaagggagaggcctttagggatagccaaaaatgttaaagtgggttttaaatggtgagtttaggacaagttgttaatattgggtgggggggaggttgagagaaagagagacagagataggagcggacctagaaatgaaacattagctggccatgtttcatgatcattggcttggctattataaaattcgaatcctctgtttcatgccaattatttaatattcaaagtcaagtattttaaacaaataaaacttgtgcattttcattgctaagttgttggagggttgttataccaattggatgtttgattggacaactacctggcatctcaactcaaaccccaggtcagactatgcactgcttcacctcgactacttggagtgctttcccacgtactcactctcagattatattttgtcaacggtgaattttgtatttgaactgagtcaataagtttattgaatgggaaatttgagcatcttaactccctataattaaaataatcatgccaaaatatatcatagaacaaaaatgatcaagtagtagtcccctgaaaatgagaccatcctcccaatatgtgcccgaggcgtagatggttataatattaagttttctattattttgggttgtgtacattatttatatgattgaagcattttattgtatctttttttttcttttcttcatttgtttgtaattttgatttcaatactgtaaattatttataacttttattaagatgttttgtataattatgtgtacatagttatataaaaaattaaaattataactatttatataaactaaaaacttaaatggttatatggtggtaacactcaagaactattctaattaataattgctaaataaatatccttataaacttaagtatacaagaaggacaattgaaaacagttacaaatcaagaattagctcaagcacaagttgctttcaatgcattacactctaatagaaattacaacaaccattaaaattcagctacaactgatccaactcaactgtacagtcactgaccaaaccctagggctataaaaccataagaaaaaaatcaaaaattatgcatgctataataaccatcttctgcgagctgagagtaagtgagagagaatccactttgtagagaatgaaggcgatcgtcgccattgttgtaacaagaggaagaaaagaaaagaaaagagagttagtactataaacaaagttgtaaaagagtgagagaaacaaagattatcagccaatacttatatgtggctagaaatcttgagaatgaagattgcacctaatgtttgatgatagtgaaatcgagtttcactaaggcgagctcgaacaaggacatagtcgtagcaattttgggtgaacgttgccaaaaatctctgtctgcactctatttgcatctcttactcaatctctttcatttttcttgtattaaaatctcatattgtgtttgtgtgtgcgattacatatgtaaccctaatttttctctctggtttttctcgtgtgtgaatgagagaggcaaagtctcgaatgttttgatcaaacattcaagtttcgcctagggttttcttaggttaacttggtattgggttggggtttgggtttttgtactatttcttttagtggacacattaaaagagccaagatttgaaaaataccataataactaattgggcccattgtctttgtgttgagtggtttggtgtaggaatttgtaaaattccaacaatggtatcagagctagtttccgcaataatttagatcacaagagacacaaaaagttagcaatactagaataattcaatcaaaaagaacaagaggagggtgttccccaagaacaggagaacattcctcaagaacaggaagatgttcctcaagaacatgaatcataaagtggagagctagaggacattcctttgaatgatcctattgaaatctctaaccctaattctgatttgatttcaagcaactttaacataagtagtattaaaacttatattgacaagtctgatggtttaggtgactatcggttctggagaaggataagatcattgccggtagaacaaaagcttctaagagttcttgaagaacctattgaatggctagaatgaacctctcagcaagaagaattccttgagacagaaattgggatcattatcttcaacctcatagatgccattatcagattggtggataaagaagaaactccaacaagaatctagaagaagttggaagaacagttccaacagaaatctttgaccaacaagatctttctcaaggaaaggatctttggatttaagatgaataggtcaaagattctagaatggaatctatatgaatttttaaggatgcacatagagcttgtaaatttaggtgaaaatgaagctctaagtcatgagaatcaagccattatcatcctcaactcactgccagaatcttataaagaagtgaaaacaactattaagtatgggagaacttcttactttagaggaagtcatctctacactcaagtctatggatcttaagatgaaaaatgacaaactaggaaattctaattagaaattgaatttacgtcgtggaagatctaatcaaagaaaactttggagcaatagagaatgagacatagtaaaggccctaacaaagtaggacatggcaaaggaaggtcacattctagaggaagaggacctaaagacccaaatgggtgctaccattgtgggaaacctaggcactatagaaaggacttctatttctggaggaatgaaatagctacaaaccatgggcaaaatcatttcacaaaatagaaaaacaagcaacaagaagctaacctaagtgatggatacaagagtggagaagtctacacagtcgctttaaacttcaagatgaatggatcctagattctagttttatatttcacatgactaacaataaaactttcctttttgattacatggaatctaaggaaggaaatctaattctgggaaataatcagacctgccacatagaaggatctggaatagtaagctttaaaatgtttgatggtgtggtaagaaccctaacaggggtgaggtttatgcctaacttagctagaatttaatatttattagtgtgcttgatgatcttggtgttgtaagtaagattgaagcaggtaccataaaacttagcaaaggtgttatgacaaccatgaaagggttcaaggaaggtggactatattacttacaaggagaaccagtatctaattgccacaacatttcagttaagacacatgaagacactaaggatatcctatggcatagaaggttgccacataagtgaaagaggattgaaaatcatgagtgatcgatcaagatttattgtgcaaggacaaagtaagtaaaattggttatgtgaacattgcatcctagataagcatcacaagttgaaatttaaagttggcactcataaatctacatgtatcctagaatataaacattctgatttgtgaggtcttgagaaaacccctactcatagtggctgctattattttctttctatagtagatgactactctatgaacgtgtggtgttggtttttctattaaaatataagaatgatgcatttcctaagtttcaagagtgaagagtcttaatttaaaatctgactaacaaaagaattaagactctaatgatagataatggccaagagttctgcaatgatttgtttgattcttattacataaagatagatattcaaaggcacaaaactgtatggctaacaccacaatagaatggtgtggcagagaggatgaacagaaacatcctaaacaaagctaggtgcatgctatttcaggcaggtttagcaactggattttggggagaaattatgctcacttcagcatatctaataaacagatgtccatccagtgcagtggagttcaaaactctagaagaaagatggagtggtaaaccaccagatctatctcatctaaaggtatttggttgtacaacttatgcacacaaaagtgttggtaagctagaacctaaagctctaaagtgtttttctaggataccctgatggtactaaagggtacaaactttgggttagagaaaaaccaggtttaaaaactattaaaagtagagatattatttttaatgaaacatttttcctttatgttactaacaactctactgttgcaagaaatagttctaaaactgacattacaggtaacactattagttttaacttagggactagaacaccaaaaacaactcctaatccagaagtgaccaaaggcactgatttgaaccaagatactattcagatggagcatggagaagaggaagaagatattgttcaggtggaacctcaagaaccaagggagaattcgaaaactaatctagacaattatcaactagcaagagacagacagcggagagctcctaagcctaaccctaaatacaactgcaacatttggaatgaagacattgcttattccttattgagcatgttagatggcaacaagctggaaccataatcttatgagaaagcagtgaattgcaaggactctaagaagtggggaaatgttatggatgaggaaatgacttctctaatcaagaacaagacatggaaagtggtacctagatctaaagggaaacacatagcttcatgtaagtggttgttcaggcagaaagagggaaggaataaaggtgatctagtaaggtacaaggccagactagtggctaaagggtttacacaaaaagaaggcattgacattcactacgctgagaatttctctcatgtagtcaagtacaaaaccataagaattattttatcactggctattcaatataacatggaagtggatcaaatggatgttactaatgcttttctacatggagaactagaagaggacatctacatggaacaacctaaaggttatgaaatcaagggcaagggtgacctagtatgcaatctaataatgtaacgccctaattaaagggacaccacgtgtcgtgattacattatgttaatcacgttaatcagggtctagtaactagatgattagaaaaatcttaaattaaataataaaacaacttgtaataatagtaaaatcttaaattcaaaataaaataatatagttacatatttgggatcccgtaaaattatttttaaaatattacaagttgtttttatatacaagtcgacctaagcagcaaatctaagatttctatataatttccctattggacgtaacccacgtagtctagcttggtcggaacatgtacaattcaccgtcaaaactcttgaactcatggctaactagacactgctttaccattaactacacaatagagcacctgtgagccaagacccagcaagaaagcataatcaaccaaatataatatatagcatacatactacacataatacaccactatgtagataactgtgccactgtactaatataacacaccattgcatttataatgatgccaccacaccctaagtctatattgtatagacactacgcgttacgctcacacacctatttataatataaggccttattgggatttttcttagttttgatcactgagtctaacctagttacgccttgatcgcataacccttaccatctaatccactagttatgccttactcgaataaccctttttagatactcaattatttcatgaattgcatgcataaatatcgaaattttagggtaataatgtaacttatatttctaactaagaaattcacattaacatacaagtgctccaccgtgctatactctatgtacaaggtttgatttcttacctaaaatccaatgtatgaggagtagtccacaggtgatcccgaacaagtgcggtattcttagtcacaattccaagtttatacaaaaataggttaagcttaaaattaccttaataattattcacatataggactccagctttggaccaactaatagagctcatcacgagctttctaacgatattaaaaacgtctaaaataaagttcagagtcaaaagttatggccaaaataaatttacaaaaatccagggccaaaagggcattagcatcgcgagggcgctgcggcacgccacttatagggaagaaatcccctggttttgggctcatgagcaccgcggtacccaagaacagggccgcaacacctgagtttaaaaacccaaaaaacctagattttaccatttcaaaaatgcccaacttcaattcaaaatccacctctaaaatcaaattggctaacaagcccaatataaaacataattagataaaattcacatcaaaatacacatgtctaaacacacatgatattaagctcaaaatcacaaagttcaagctatcaaactcaaagaaaaatcaagtaagatctcatgctcaaactcgtcaaattgacagcaaaacaccaaacgatttgacttaagaactcaaaatatgcaaactcaaactagcataaaaattctagcttagcatccaaggcaataacacctcaaatgtttcctcaaggtcaaacaccaaaaacccaacaagctagctccaaattcttcttcaaagattaagattacaaattttttgtagagagagagagagagag

SEQ ID NO: 715 - DNA, 2459 bp, Cannabis sativa
aatttgagatggttatagttcatatattcttccatgtgattaattttcacatcaattgcaggatactaaggaagaacaaactcaatggtacattggatattggtacatcccatggctcacacctgaacctcattgatttgaagaacaatgaaattactgagtttcgcaatagtgatgaagtgaatggcattgatataatgtaaccaatatccttcaatcttctaaagtttttaagtgattacattaaggcaggcctaaataacttttttttttcccttcttatctttctcctgcagacttgtggataacctgatttgtcaggaaacaacagaaagcaaagcaaattactgtaatacttctgtagtttctcagttaactaattcttcatatgttacacctaaaaagggctgtgttcctagtccttgcagttcagatatgatttccagccccaactgccaatgtgcttatccatacacaggatcattaaacttccgagctccttctttctcagacttggagaacacaacttactaccaaatacttgagaattctctcatgaccttctttcagaagtttgaagttcgtgttgattctattgctttgagtaatcccaacaaggatgtctctgaatatcttaatataaagctagaagtattcccatctggccgtgatagtttcgatcgacaagaaatttcagatataggttttgcacttagcaaccaaacctacaagaccccaaaaacttttggtcccttcttttttattgctgaccagtatgaaagctatgcaggtgattctttgaacatgagtaaagcaatctgtttcagtttatttatgaacttttgaaaactcttcatgtttctctttgtaaatagactctatagaagttccttcagacaaaagcaagtcatccaagacgagtactggcatcatcattggagcagcagttggtggtttggctgctgtgctgttattacttcttgcagggctgtatgctttccaccagaagaagagagcagaaagagccactgagctgagccacccttttggtaaagtatttacttctctttttctgcaagaactaaatttaagcaacattttcttagaacgttgttagaccttagtttatttaatacagggagttgggatccaaattcgagtagtggagcagttccacagttaaagggagcaaggtggttctcttttgaagagctcaagaaatacaccaacaatttttcagctgcaaatgatgttggatctgggggttatgggaaggttggttttcattgtcttaaatttgtgtataattcttagtttcaaaaaccaaactatgattgtataccattatcatttcaattggtgaatgaactcttaaccccaagtagattttgtaatgtcgacaactcatctgtttgaatgctattcttttttggaactctagtgtattgtttatgctatttatttgtgttgtttcctgcacttacagttatatacattaaaactttctcaatattaaccatgtggtaatattttaaaggtttaccgtggaactcttcccactggagaattggttgctgtcaaaagatctctaaaagagtcaatgcagggtggagttgagttcaaaactgagatcgaacttctttcaagggttcatcacaagaatcttgtcacccttgttggattttgttttgagcaaggtgaacaaatattgatctacgaatatataccaaatggttccttgaaggatagtctttcaggtatttccatctagttcttcaccctccatatgttcttttcacatatagttaatacttactagcacttttcagaagatcaatcactcaatgtttctttgtgatataacttaatagtagatgcatgttatatgcaggtaagtctggaattagattggactggatgaaaagactccgagtagctcttggtactgcaagaggcctttcctatcttcatgaacttgccaatcctacaataatacacagagatattaaatcaaccaatgtccttttggacgatcgcttaaatgcaaaagttgctgattttggtctctccaagcttatgatgagggatagtgataaggatcatgtcactactcaagttaaaggcacaatggtgagtattcaacccctcaaagctctaggcatcagttggtgcattcttatttatactgaatgaaaatctatgttttcctaagacagttaaaatctgctcttttaaactatatatgtcccatgattttttgtttggataatggatatggaaaattttattcataattcgaaagtatagctgatcacgaaaaccccagatgatgatgattctgatagaaaattaagtgagagattgagattcagaggaaaactctctgggcaagcagctcagagcttcagaaacatattaagagacacaaacatggaaagctcactttcttaattgagttt

SEQ ID NO: 716 - DNA, 2097 bp, Cannabis sativa
ctgcttggcctttcaacgtggggaatatgaccacactccggtatttgtcgtaggatagcatttggcatttcacagtgtaatctctgcattataaattgaaagaattgacaattgtcatatatttccatttttgctctttctgtttaacttctttcacttttcatataaatgagcagttacttaccactgcaagcttgttgctgataatttgatcgtcttcaccccatataattagtgtcttctgctttacctgtcaaagaagataaagtagataactatgttaacacaatttcaaagaatctttttgtcatgcactatcatcttaaaccgaatcactcttgaacgataccttgtgaaatgcacaagaaatattcatgtaaaattcaacggaaagtaggtgtttcaatagtgggtgtcccttggcaaaatgacctctttctcgaagtgattttgcactttgacctagtttcagtaattttttgcaaaatgtcatccgacagatattttatttatatattgtatgacagaaaaatacctaacaagtactaagttgtgcttacttttgagtaataagacacacattcatgtggcaagtcactcttaacaagttgaatccatcataaataaaaatgattggtttaaatttcttgctacatagaggtgtagaaataaaagttgattgtgacatgtgggacttcgccctccattttttagctcaaaaggttgtgttcacaatgtttatagactgcaaatttatggtttgcttgctgaagctgattgtgacatattgatcctcgagctcataatgtttatattttggtagaaggattttctttgtcatcattgtcaaaaaggaaatgattttcaggtgatcgtgtttatggctttaattattttgttatggacattgatgaaggtgggatttataattatatatattttttttcttttgggacattgatgaaggatttccttggcttttacagtgaatgtgggtgttcttgttcagatcttcacaagctgccattatggaggtaaggagcctatgtgtcgatatcccgattgtctatatatataatatatatatatatatattttgtattgtcctgatgtgttgtttctgtagttcgtatgtgaatcaacaacttatatttgttgcctgagatgtttctaaaattgtaagggttagctgaagatgcaaacactttttttcctatataggattagagagagtcagctgtgtaatacagaagcttctaaatatgctatttttcagagactatatcaatctgatttgagaacattgaataatagaataattaagaaggatgcagagtaccatattttgagaaaagtgttttagagaaactgtacggtgataacatacccaatcagatgtacccagataataaattaagtgataatctatcaagaagagttgactgatcttgagtatcgagtgaagagctcttgcagtgagttagagtgagaggatcttgaggattttgaattgactttctctgtataatgaattttacttggtaaacacctatgtttgttagaaaagaaaaaaaagaggtgtatgtcaacactaaaaagaattgttagctataatcagtgacagttaatataggtactttaggggttagttgtccttcctggtcatttcatgttatgaccaataagcctttagttttttggtttgttctgttaagacctattgtctataaataagtcatttgtccatttgtaataaaacttgttcattccattgtcagaagccataagatcataatgatcagattaaattcattcattgtgttctatagtttatttctagtttcaagtagagtttgatccgtgtgagtgtgtgttgtgctgatgtgtttgattgaagtggctagcattgacaagaatgtccaaaagactaatgatccaaggtgtaaaggaaacaaagtggttttattggtgttaagtattagtgtgttaagcgatattgttgtattccctaacaaatttaattactgcaatgttgtatgtgaaggaaaaagttttcttgcagacctttcattttgctagttccagcagatatgttgg

SEQ ID NO: 717 - DNA, 2426 bp, Cannabis sativa
ccaaagtgaacatgattctaatggtacatggcttaataacagggctgtaagtttcaaaatagtcaatacctaccgtttgttgaaacccctttgcaacaagacgggctttaagtctttcaacagtgccatcaggattgaatttaatccggtaaacccatttattttgaacaatgatcatatctgaagttcttggaataagaatccacgttttcttgttcttgagggcagtgatttcatgttgcatagcagcgttccatttggcacttgcaagagcatctttaatggttgtaggttcaacttcattatttatttgagcaacataaagctttggtttgtaaataccatgtttggatctggtcatcattggatgttggttctgaactaggggagaaacagtggtagttgtatgagaggaactggtaggagaagtaggagtggggatattggtaacattatgggaagaggtagtacttgtggttgggtttagaggtacaacagtatgttgctggtgtgagggtgaatgcgagggtactggtgtatgttgctggtgtgagggtaatggggcagggttgggattatgcatatgtgatggattgtttggaacaagaaaagcatttggatttaggacaggtgtagagctttgtgatgtgataactgtaggtgtaaacaaggactgatatgggaattctagctcgttaaatgtgacattccgagacacatatacacggccagaggggtgtagacatcgaaagcctttggaagtgatgctatatcctataaagacacattgagatgatcgaaaggcaactttgtgttgattatattgtttgagaagtgggaagcatgaacatccaaacactttgaacatattataatctggtggttgatgaaataaagtttcaaatggtgaaacatgattgagaattggggtagggagcctattgatgagataggcagctgaagcaaaagcttcccaccagaaatttaagggcatattggcttgtgcaagtaaagttaggccaatatcaacaacatgcctatgttttctctcaattttacattgttgttgatgggtgtgagggcatgagtttctttggacaattcccaagtttttgtacaatttatacaaaggttcaaactctttaccaagatcggattggacagatttgatttgagtatggaattgcctttcaacaagagtattaaattgagagaagatgctgcacacttcagatttgttttccataggaaagatccaaacaaatttggtaaaatcatccataaaactgacatagtatctaaatccatcactagaaggataaaaagatggaccccatacatctgttaaaactaattgaaaaggctgaacagatttattcttggtagctttaaagctaaactgatgcaatttgccaatttggcaggcattacaaaaagcaagttgattacatttagcacggggaacaacttgagacaagactttattaagaatgaagggagaaggatgaccaagtcgacagtgccatatgttggcaatttgagacttgtcttgaatagggttgctggtagttgtatgattgtaagcttggggctgagaaacactgagtttcttgatggtttcttgagttgtaggtggggagactttgagtttgtagagaccgtcactgagatggccctgcagaagaactcggctggttttcttgtccttaataagacatgaaagatcatcaaattcaatagttacattgttatctttagtaaatttagaaatgctaagcaaattctttgtgacatttggaacatggagaatgtcttgtaacaaaagggactgatttgggagaatggtagggacagaacctgtgcctaaatgatgaatagataaagaagaaccattacctacaaccaccttggctttacccttgtaatcagtagctgtggtgagattttcagcatcattggtcatatggtgagtagctccactgtccaaataccaagctgtggaaatgtcagtgttcgagttggattcaaagagaagagcttggggattttcactattattggaggaagtagatgctgcccctgtaaatgtgatgtcaaaacgatgatagcatttcgttgcaatatgaccagcacggccacaaagctgacacacaggtctgttgccacagtctcctctgttggaattgtaagatctgccaccatgataaccacctctggatcctcgatttgaatatgaaccccttgtgctgctggtgttggtattggctatatttgcttgaacattgtgaagagagtctgtagtatgttgttggatatgcatctcttgactttgcaacataaattggacttcggagagggaaagagattcagatcgagaggtaagattgactattactgcttcatattcagatcctaagccaccaaga

SEQ ID NO: 718 - DNA, 3553 bp, Cannabis sativa
tccgcttcttccgatgagcccaacgccgtcgcatctccttcccctatacctgaccccgagaaggatcagatcaaagccctaatcgtctctctcatgctttccgctaaccccaaaatccagagccagctcagcgaagccctcgccgtcattggcaagcacgattttccgaaatcgtggcctgctttactcccggagctaatttcaagcctccagaaagcgtcgcaggcttcggattatgcttccatcaatggtattctaggtacagctaactctatatttaagaaatttcgataccagtataagaccaatgatcttttgcttgatttaaagtattgtttggacaattttgctgcaccgttattggagatttttcttaaaactgctgcattgattgactctaccgctaattcgggtggtgggtctgtggccactcttcgaccccttttcgaatcccaaagattgtgctgtagaatattttattcattaaacttccaagagttgcccgagttttttgaggatcatatgaaagagtggatgactgagtttaggaaatatttaactactagttatcctgcacttgagaacagtggtgctgatgggcttgcactcgtagacgaacttagggctgcagtgtgtgagaatattaatctctatatggaaaagaatgaggaagaatttcaaggttacttgaatgattttgcgcttgccgtgtggagcttgcttggaaatgtgtctcaagcttctagccgcgatcagcttgccgttacagctattaagtttctgacaacagttagcacgagtgtgcatcacaagttgtttgagggcgagggtgtgataccacagatatgtcagagcattgtgatccccaatgtgaggttgagggacgaggatgaagaattgtttgagatgaactatgttgaattcattaggagggatatggagggtagtgatcttgatacaagaaggaggattgcctgtgaacttcttaaagggattgccaccaattacaagaagcaggttacggatttggtgtcagtacagatacagaatttgctgacctcatttgcagcgaacacagttgcaaactggaaggacaaagattgtgctatatacttggttgtctcccttgcaactaagaaagccggtggtacttctgtctcaactgatcttgttgatgttcatagtttctttggttctgtcattgttccagaactgcagagtcaggatgtgaatgtgtttccaatgcttaaggctggagccctgaagttcttcacaatgtttcgatatcatatatcaaagcaatatgctttgcaatgctttccagatttgattcgattccttggtgcggagtcaaatgtggttcattcttatgcagcaagttgtattgaaaaacttttgctggtaaaggatgcggggcaggcaagatacaactcagctgatatttctccgattttaggagctttgatgactaacctatttaatgccttaaagcttccagaatccgaggaaaatcaatacataatgaaatgtatcatgcgtgttcttggtgttgccgaaataactcctgacattgctggaccttgcataactgggttgacatctgtacttggtgaggtttgcaaaaacccaagaaatcctgtatttaaccactatctatttgaggcagtggctattcttgtaaagcgagcctgtgagaaagatccttctcttacatcagcttttgaagcaaatcttttccctagtatcgaaattatattgtccaatgatgtaagtgagttctttccttatgcatttcagttgcttgctcagcttttggagttgaatagaccacccattcctccaagctacagggccatttttgagattcttttgtcacctgattcatggaagagagcttccaatgtcccagcacttgtgcgtttgcttcaggcctttcttcagaaggctcctcatgagctcaatcaagaaggtagattaagccaggttcttgggatattcaagaagcttttgtcatcaccaagctcatatgagcagggtttctttgtgctaaatactgtaattgagaatcttgaatatggtgttattgcaccctatgtgacacacatttgggctgcccttttcactgagctcttgagtaggagaaccataaagcttatcaagtccttgttgatctttatgtcgctctttctggtcaagcatggttccacaaaccttgtggagacaatgaatgctgttcaacccaacatattcaaagaaattttggctcagttctgggtacctaatcttaaacatataacagggcctattgagaccaaattgactgctgttgcatcaaccagacttttatgtgaatcaccaatccttttggatgctatggctactgagctgtggggaaagatgctggatagtgtagttacccttgtctcacggcctgaggaggatagggttgaggaagaaccagaaatgcctgatcttgcagagaatgtcggatatactgcttcttttgtccgtcttttcaatgctggaaagaaagaggaggaccctctgaaagaaataaaggatccaaaggaatttttggttgcttctttggcaacgctttctgcctctaatcctgggaggttccctcaagtcatcagccagtatcttgatccagccaatcagactgcattgcttcatctctgcagtacttataactgcccaattgcttgaatgagtaagttaccgttacaatttttttcttcatgaaatagagattcttgttgctatttattatttatatagagatgactacctggaatacatacgcagaggatgtcaaacaccagaatgtatttatatctcattatcatattgtcttgtatgtattattttgatgtacttcagttttcgtgcatgttgtattgttgtgaggtttacctatgtgttattttgggtataatagcatcttattagaagtttcaacgatatatattatatatgtgcaagtttaattttttcgtggataatattgagttcttgaattgagttttattgctggaggatggagcttagccttctgcaatgcaatcttggcccaaaatttaaatttcattgttgaattttacctcatgcaatcatgaacttgaagttattcctataatgtcgttcaaattattgtcattattgttggtttcatcattttacagctcccctaggatattatgttattttaagtttaaactgccgactacttgaacttctcatatatatgctttatgctattaagtattagtaatagtgctattatttcagaacaagacatctaatcattgattttctgattctttccagaatctgattttgtatttgaagatgtggcttcttctacaatcaaagtttgaactagtctccgatctgaaagtgattatgaactagcagtagttttgcgaaaacctgccaacacagctgggttaccaggttatcatacatgtattccatttccaatatcttattttgtgttgatgtgagattgttggccacaagttctccaacttaatctagccaagtggctggg

SEQ ID NO: 719 - DNA, 4956 bp, Cannabis sativa
aaaaaaaaaaaacacttaaaaacacaaaacccagatggataggaagggagggaaaaagaatcaaagaaatggaaataaaatcaaataataataataatgaataaacccaaaaaaagaacaaacctttccaccgagatagatcttctccatatcaacagaaacgaaatcgttagattcagccatggccgtagctctcgtgtctctcaaagtcccgaagccaaacagccctcagcctctatttttctcccttctctctctctctctagaacttgttgtgttttctctctatctctttctctctccccaagaaaagtaagcctagcttcaatggcttatatactaagcgattctctctctaatccgagaatataaccagcggttaaccaccaccgacgctgttacaccctcctaaaccaacttttaaccgccgtctttctaccctctaattaactaaaacgacttgtcgttttatctaaaacgtcgtcgtttttctcggttaagtttttaacagcacaaatctcggattaaccataaatagtgaattttttttggggcgtacgtgtaagtttattgggattcgaatttttgaccagagagaatgatgagtgacacggccacctatcatttgagtttgactaaaagtgtttgttttgttggtgttgttctgtaaaatatgtacacctgtcattggatgctctttattgggtcccaaatttaccctcgtgggccattgtcttcctttgttttttattttaattaaaattatattttgagggtcttagaagtaacaaaattatagggttgcttgcctttcatttgactcaatgattaatcatattccacacactaatcatgattttcttattatatttttatcatcatataccacttttgtttgtttatttatttatttatttattattaagcatattttgggattttgtttgtccttgctgtactcccttcaatcttcattcacctaactaatttacttaccaccatttttggtttaattatgaaaaagttcacatttccttttttgtcacttatgctctactgtcgactaatttgcaatttttcactctatgaatgagaatattatgatatttctcctttacgatataaaaagaagagtgtaagggaatgaataattgatttaaaatcaagcattttgatgggttaaaaatggtatgagattcaatgttttaccaaatttaccacattattttatatatatacataaactccaaaaatccttatttcatgcaatcaagactttgatttcaatcaagtgttatgaaaacgacaaaaatcaattcttccaatatttaaaatatgcatttttgttgaaacatctaatctttggagagatctattgctttgctgtcctttcaactcaacaaatataaacatgtatacatgactaccatatatacacacattttttattgaaaatacgtccaaaccccacaaatgacaaacacccatttcaccacatttaatattaggctctttttaaaaaaaggaacctttaaagtcattcatgcccttcatgataatcacttgtatttctcagcttattgtattgccacattaagtgtatgcgttatcaaagaattattttatcaattcattaaactaatgcaaaagaagtttaaccaacaattcgatacatccgaccaaaaaagagtccatgaacttgtactcccaacgactagattccatgtcttattttaatgttaccaccaaaccctttccttttgtcatcactattaaatgtttaaacaaaaacttatataattaggctcttaattaaaataaagccttgtgctcttgtgaccctaattcatttgtatcataaatcataactcattgtcttgcaatattatgttcccaaagatctacattacacatgtgaaatgctcctaacatgtcttctcaaatcaaattgcccccaaacccttttcctcttttgaggcaatgaaatcaactacatagattacagaagatagtatatagaaattaggtaacataaaaggctggctagctgtctaatcaaaaatgggatatttttccaatatatgtgtctcattctctgtctctattcaaatcaaccccatatattttgtcagatcgattcaattatttttgctggacccctcatgagagaagaaaaagaaaaggttgtatttatgggtggtgcgagacatgtttgtgtagacttatattagccctaagagtgaactggttttggaagtgtctcaaaacctaaagtcagtatcagcattattgggaagctaagtatgataagaagagagatatgggcaatgggcaatgaataagtatctgttctgcttattattatttggcaatttaattaggctatatttttgcacctatatggcatatcctaacttggactttggatatgctattcatattggagattatagtgtgaagtttttggaatctttagttgatgggaatcaataaaaagggattattcccattgttcatgactagttgtacaaaaacctattccaactacactcaaacactattagttacacctcatgagttgaataaaaatatattttggaaattaaatcattttattatattccctactttattgtttacctaactcaagaatgataatattatcattaattataaatcattaatcatcatctcttattatccttttcattcttaaaatgtgaagtaagtgaagcgatcattttcattcctggctctagtagctattatttaatgttataaacctatccaattctttgttgttattataaatgaattatgtgttcttatttttttatttctaaattttgaaaaaaatttgaatagtttacaatattaaaaataaaatttaaatattttattgcatgcactggcggttttttatactttcggtaagtaattgtttgaactttatttttgtcattgtaaattattcagaatttcctaaaaaattttaagtaattctaaataactacactatacacaatcgtaaaaaaaaataaactataataaattagaagaatgacgaaacaaatagaaagatctaccgtaacactttttttatatataaaatattagtatattaatataaaacatcataatacaataaacattagaggaggtaacaattcctccaaccataaacaagacaaataagtaatgttggaatattgaagtgtgtcgtttaaaaagtatgattaggtgagtgtatggtaaaaggtttcatttcaaaaccaattgacaataagaggaataactcatgcattttatgtatagtatttagcttccacatattattaatgtgttcgactctctaacattctctcaagattgtggttatttttatgcttgccaatcttgcaccatttgattataagtggtctttttagctcacattggctttttttagcttactattagtaaatcacaaggagttttttttggctcgtcttttagaatctttttatttttaatttgaatcagttactcgttagagtttagtttgactctgatactatattataatatttaagcatgtagtttagtataattagatgaatgtatagtataattaaaaaaaaaaaaaatttatacatcttatatatattatttaatttttatatatacgggacactgttacaatcaacttatgacaaatctataacatcactatatagtgaattggtaactaatacgagcacacccttaaagtagtgtaaaggctaaagggtgtcctacatattttctcaataaaattaataagaatccactcaagtcaagtatgccatcgcattctcactcacactacttgctagtcttgtcttaattaaggaatccaacggctgtaaatcattcaggtttacagaaccaagtctattccatgttccaccagataactacttctctaccgaaccaaactacctctcttttcactcgacacgagccctcgaacatctctcctattcttctctcgccacattcacgacttcgtatccggaaactgctttctggctcgccgagaaaccgatcatcgatcgccgggaaatatctccggcggtcgtaatggcggaggcagtggtggtttttgactttgaccggacaataatcgatggggatagtgatcgctgggttgtcacacaaatgggtctgacccagctgttcgaagagcttcgccctactttgtcttggaactcgttgatggtttgtactaattcattattgtgttttctattttctctttatgctatctaatcgatttactttattgaaatttctacatgttttgatgttggtctacgacaaagggaaattcatgatttttttcgtttgttccttcttttcacgtcaaatatatagagagaatctcttttaagcttggccaagctgtgtgatttctttatctattaaaacccttttttttttctttctttatcgtttattgttttcttttgggtcctaggctcctaattatgaaaagggatcgtcccaaaatttagttactttctaaatagtaattgagtgaacaaaatcatgagatttggatccttgcaaacgtatgtgaattcttatagaaatcatcagggttttagagagaactttttcatgttgagcattgttattaagcaccatgtggctcctctataaatagttaacagtttttcataatcattattaggtgtgggtctttcttacttgatcacatattcatcttatttgatactttgaaccctataggacaggatgatgttggagcttcattcacaaggaaagactccctcagatattgctgagtgcctgcacaaagctccaatacatccacgtattgttgcagccatcaagtctgcccatactctggggtaaaaaatttgcacttacttatggtccatttcgtcttagtttatgttataagtggcaagt

SEQ ID NO: 720 - DNA, 1808 bp, Cannabis sativa
ttttttttttttttgaaaagcaattttgagatgacttttaagtggttaaggcacaactaacaattctaccttgctttgatcacttgaaagtaaaacagcaaaaacatgaattatcccactacacctctaatagttttttcttgataatttataaatcattagttttagttcacaaaaaagggaagaaacaatgttgtagtgttggcatttgcgtgttgtacttgtggtccaaaatttagcataaagcgccaacaagaagttgggcggagtcatctactgcccattttgttgcatttaaaatgctgttcgcatacaatatatacgaggaaagtgattaacaatttcttctactttttaattagtgattttcatagagtgaacttgaatcagcattgtcaatggactattcttacgcctgatcacacattgaaaagcctcacaccataccatgtaaatgagtagtttcatattattttgatgaaaaataagacattgttatggaacttaaaagaaaatacagttcttaaatttaactatataagatgcccttaactacacaagacaccaaagatgaatagagtacagtcaattgcagccctcaaactcaaatttaccaaacagggagttattcgttttaccaatacgcttaactaactaactaaccaaacattcatctttgcatattgtcatcccatcccataaatatcccaacttgaagcaatcattcactcgcagaaggcgcgtcctcagatttaagcgctggcttttctggaccatcctcagattttactgctggcttttctgggccgtcctcggtaggcttatcatcgtggcttgctatggtggcttccgcttccccagaaggagaggcatcagtcactggaactgtcttcttaatggttccaaccttaacatacttgctcatgaacttgtattcccaatcttgcaatgcatcaagctcaaatggaccgagcccagaaatgtcaccggtgagatctttgtcttcaaatgacatctttgcaagagctctgctagcatctttacctgcaaacaatgcataaggtcccccaggtccatagaacatcctgcaagttcagacataaacaacttaatagcttatagcagattgtaagctaggctaagacagaggaagattaactatatacatatatataaataataaatagaatctaagcacgtaagacaattttccaagttagaatatattcaagcacgataatactagaaattataatttgctgtatttgttcaaacacaatcactgataaaactatatcttaatctagatatttatagcctagaagttatagcgtttcatattttcaacaaataacattgtaaaaaacaaaaaacttacattaatatccagagagtagaaaaagtctcagaaatcaaagcaacagattcccatataaaattcaggctctaaaattaatatatataaaatagattcccatataaaattcactagagaatttagaacttgtgtatatgaggtcaataaaaagatgcagagaatacatgtacagatttagctgcttagattgaaagtgatcaatttatcatgctataaaagttcattaaaaaaattgccactcggaggattgaactaaacgaatgattcatattccaaaaagctaagctctttctcaagagtcgctaaccataaaaaaacaaaaacaatataatcgcgaattcgataattaaaatgcttttacagtatttcaaaaaaaccccaaatgcaaattcaataatagagttgatcaaataacaaaaaaaaaaaaaaa

SEQ ID NO: 721 - DNA, 6939 bp, Cannabis sativa
cctcgttccgccgaccagaaagccgccgccgactctgccatccgttcaattggtttgggttatgatctcacccttgacttgcgtctcaagtcttgtaaagcttcatcttcctcccctgactctcgtctcatcgccatacctgatcgtttcctgagggatatttcgattcccggcggtgtttgtatacccaacgttcctaaatcaattaactgcgataaaggcgagcgcatgaggtttggctctgatgttctctcttttcaacaggtccgtttcatttcctttcctttccaattattactttactaattcataccagacaagagtgttattgattgtgattgtggggtttgtagatgtcagagctgtttaaccaggaattatcactttctggtaaaatcccaagtggtcatttcaacagcgcttttgaattcaccggaggttggcagaaagacgctgccaacaccaaagctcttgcctttgatggagtttccataactctttacactattgccctcgacaaatcccacctccttttgcgtgatcatgtcaaacaagctgtcccttcttcatgggatcctgctgcattggcaaggttcgttgattcattctttctttctatttttgttcaatcaagtgttcaaaaactttgttcatagctcaaactgtcaggtatgtactttgttctgacattcaagtccctccagggcattttccatggcaattgctataatttactggtctccatatcttgttgtagagttaggcgtgggaagcttagtttcagagaaatgaaaaattgttatttttcattcaaaagtcaagataaaagctttggtttttagagtgtttcaatgtttttgatttacaggtttattgaaaagtatggtacgcacgtaattgttggagtgaaaatgggaggaaaggatacaatctatgtgaagcagcaacattcatcaccgctccaaccagctgatttacagaaaaaacttaaggacatggctgataaattgttcgtggatgtgcacaataggaactctgataaatccaatatgagagataaggtttgaaccatctaataagctgtcctcgcctgcctccattgataatcactttttccttccttttataatagaaatcattttcaagactgggattgcttaagcaaaactagttcattcatgttattgtcatgtgttgtatttttgtttctgtttaggtttggtgcattttcttaaaaatgaagttctgtattttctcttacttcttcttttggtagaattcaacatgaaactcctctgagcaattttaaaattacggaaaagtttcccggacttgatttgtttagcaaatttacgtacttgcatggaagagataatgttatatgtattgcttaaccaacttattttactacctttttcttttttcagttctccatggaccgtggcctaaatatcatggactcacttccttccagttcttattcttctactgaggtacacatcaggaagagcctactgattcattatgcttttcaatttaagataggatataaaatattattataaaatttatgaagttcacttgtgttgcattctttgtattatcttcatttgtgttgcattctcaaacttgaattttgaggtatctcttcgatcgtttggtgtagacagcttatgtttttgtatacatttcagatgcaagatactaaattcacttgcaagaggaaaggggggaacttgaaaagaaatctatcccacgatgagtggtgtcagactgtttatttcgatccggatgtaatttccatgtctttagttcccatcacatcattgctgagtggcattaatgggagtggatttctaagccatgccattaatctttaccttcgatgtaagaatggctctttcatggcgcccggtttgcttatctattaagatgctagtatgatttatgagtactgttttgaatcttatatttcctttttctggattttgcagataaaccaccaatcgaagaactgcaccagtttttggatttccaacttccaaggcagtgggcaccagtattcggtgagcttgcccttggtcctcagaagaagccacaaggtggtgcatctttgcagtttagtttcatgggccctaagctttatgttaatacaactccggtaattctactgctccctttttgtttgttagaaaaacaataatattgatatttttgtaatcttgaacacatgtagtttctcctcccctggttctcttttgtcttgtcttttttcgtatcttcatattcttaggttgattgttgtaggttgatgtgggtaagaaaccagtgactggtcttcgattgtatctagaaggcaaaagaagcaactgcttagcaatccacttgcagcatctttcatcgctgccaaagagcttccaactcaaggacgaagtaaatgggaacatgccacacccgtcctctgaccgcaggtacgtggagaaggttcagtggaagagcttctctcatgtctacacagcccctgttgaggctaatgatgatctgtctgttgtcactggggctcactttgaagttggagactccagcttgaagaaagttctattcttgagactgcatttcgctaaagttgtaggtgcaacaattgtgaaacagcctgagtgggatggttcccctggattaggacagagatctggaatcatttcaacattgattagcactcatttctcgactgcacaaaaacctcctccaaaaccttctgattttaacataaactccgctgtttaccctggaggccctccggttccatctcaggcacctaagcttctgaagtttgttgacactgcagaaatgacaagaggaccgcaggactctcccgggtattgggctgtttctggggcaagacttgttgttgaaaagggtaaaatttctctccgggttaagtattctcttctgaccatgatcttacctgatgaagaggcactagaagatttctgacaacaccgaattatttaaagggggagagagtgaaactaagaaggaacgacataggcatgtatgtgtattagaaagagaactcgaatgatttcttcgatttgtcaaatgtttctatattagaaaaaaaaatgttttatttgtatataaattcttcacatgtttctgtgtaaaattcacttgatttcttttgtagatgtttcttctgtggtgccaatatttgaatgtttagtttgtaagagtaaattttttgaaaggaaaaagaaaatgtcaaggagctagttccttattcagcatttatttatttattttgctatagttgctagtttttacaaacaaaacaacaatagaaaaagaatctgaaatagcagatacaactagttatatatatgaatgaaaaaggagaaaaaaatagagaagaaacagatcaaaaataaccataggcaaacacattaactagactagagcaacagttagctgcatgtatatatataacaaggctgtaagacttatatatgcagattacagacttaaaagtttcctttctttctcatttcattcatttagttttccctatctcacatagtcagttatgtttttttttctttctctctatgaatttacatactaatgaaaagcctctatcttggtttggacaactggatagcctcttgatcatgtgtggtttcatccaaccaaggaaattggtgaggatgaagtgggaattcttgatttcttacatgctcaagttgttcccactcagcccatttttcagccaaccctactccctgcatcattttcacaactttagacattgttggacgatcctcgggcgatgtctgggtgcagagcaaagccacttgaatgattgtctcaacttcttttaagtcataacttttcaagtttccatccactatatcatgcagcctattctctctttgcaacttcttgatctgtcaaaaaccagaaccagagccagagtgttaattaatagtctgcagccatatgagattaaatctaaaagaacttacatggtcaaggagaagaacatcctcttcctcttcaagcctcgagaaatctatggcgcgctgaccagtgacaagctcgagaagagttatgccataaccaaaaacatctgtcttctctgatgattttccagtggacagatattctggagcaatatgacccattgtgcctcggacctgagtggtggcatgagtcatctttatatcaaccaacttggccagaccaaagtctccaagaacaggttcaaaatcatcatcaagcaagatgtttgcagcctttaagtctctatgtatgatccttggattgcagtgctcatgcagatattccaaaccattggctgtaccaaacgcaatacgcttccttgttggccaatccaagcctttctcacccggtttcaaatctacatagctgtaagttagtaactaaaacaaagttgagaacatgaagggtatggtaagaaagaacaatacctctcaaacggtatgcaacactgagattttgcataaaaggataaacaagaattttctcaattgaggttgtacaaaacccaatcaaatgcaagagattgcggtgacatgccacactaatgagctcaacttctctgaggaatgcagcctccccaccgggactataacaatctgcaaggcgtttcactgcaaccttagtgttgtctagaagaagacctctatacactttcccaaatcctccttgtccaattacattgctctcgctgaagttgtctgtagcgagctgaatttcccgaaaagaaaatcttctcaactggcctaacgagatcttgcagtcatgttcacctaaaatttttacaagaaaaacaagactattgggttaagacacaaatgacaagtggttctacacaaatgactgtaatcacatcttgtttaccatttacatcaacaaacacatcttgtttgagtttgctctgatgaaggtggtatcgatatgcaatcaaagctccaatgaaaagaagtataaaagcaacacaacttgcagaagttagaatagctccaacttttcccttcttggttgaaactgttgtcaacatttacaacaaccaaagttcaactcaaactagatcatgatacataagaaagtagactcaaaaagagagttgaaagagataaaaaccttgagtatgatcacttgaaacacaaggctgctccaaactagagccacaagcaagatgtgttcctgtaaaactgcagccaaaattcttatactttaaacatcaatagtgtaatcaacatcattaattatgtgatgagaataaaaaaatttgattacttgaaagtgggaatggaatagagttgcatgggaatgcttcctgttaagtcattagatgaaaggtccctacaattgaaacatgtatacacttattaacaaacaagataagaaatgattgagcaaagtgggaaaatatatacatatatataaagcttacaaatgttctaaatttgaaagttgagcccatgtgacaggtatagagccactgaagtcattgttggcaagattaagagtctttagttgagtcaagttggcaaggtaatcaggtaaaccacctctcaaactgttgttctgaaggtctctgcatgcattaagtattttatttatttttctttttcttttttcattttttgggggccaaaatgattagaagtttacttacaaggaaactaaagatttgagtgtagtaattgctggtgaaagagttcctgtaaatccaattgaaggcaagctcctgcaaagttaacataattttcattttcacatactgaatctaatgatccaaaaagtccaagtgggggtgtgtgtgaaagggttgaacttacaaggatacaacatttgcacctatgcaagtgacatgagaccaactgaaacatggactcacaaggttgagactccaatctgttattctaccattggaatcattcagtgactttagcaaatcagacaaagctaaacctgaacacaaaagaacaacatcagttattcaattatgatcttagtaataataaagaaatttagaagaagggtgttacttaccttccacatcaggatctgttgattgagaagtggtttttaataacaggattagcataagccattttaagttgagctttattgaaagtagtagtccagtacccccagccatgttgtttaattagtaccctttacaaaatattatgtcatgatcaacttctgttgcattgtgagaaagaaagaaaagagttgataaatgaaacttacttgtttgtgttgaatccaaaaggagaaaggggaatcatatcatatcatatcaatatggatggatattggagttagaagaagaagaagaagaagaggaaataaagaaagaaaaaggcaataattactcttaatatatatcatatctttcatgactcatgagtttgtgtgtgtgtgtgatacatcaaataaaaatgaaatgatgggtcaatgaaaagggtcccacaaagcaaagagaaaaagaaaaagttgtgaagaaatgaaaaatctaaatgggaagagaaataggtggtaatggtaatgtagtagtttttgtagtagtaatattattaatatactatgctatgtttgttgtagttgatgtgtttggttggtggtggtgggaataagaatgagaatcccactaaaaatatacatatatatcactttggccactatatataataatatttaagcatatatagtatagtatactctcttgtgtgtatgatggtatagtagaatttgatgctgatttagatgatacacaaagctccacctccattattattattataatatcatattattctctttggcatttcattattatctaacacataataatttcttcagctctctctttcttcctcttgggaatatatatatgatgatgatgat

SEQ ID NO: 722 - DNA, 2654 bp, Cannabis sativa
ggggggggacaaaatctcagtttgtactgatagagttattgttacaagaaaaattaggaaaaactccacattaaatcatgcaaatacaaataaattacaaaattacataaaaaactcttatctgtttcttaaaaaaaataaataataaagcctattaaacttgaatataatctgcagcacatataagcatttcattgcagtttattttttaaataataatctagaggaccaagataattacatttacctccacaaaaggattactttagaatccaaatctctctcaatatctctgatttcggcagtattaatattgggtaaatgttgcaacgaaccagcatatagttgaatgtaacgtcgacgtagctgacaaagatgcctaatgcggtcccacgagaatctataactgaatcaaggaagcttatttagattcaatgaaacttaatatttccctttttttgtaaggaatgaaacttaatattgtttacataccaacttgcaacgtaaacttcagaacaatataatgagaaagttaaccaatttcttatgaaaaacaaaattaccatgaaccagatccagaaacacatttcctttttaagtagaaaaaccgcatacttgtattaacacatttacgtaagtttctaatgataaataacttataaatatttccatagtaacatctacattaccacatttttctctgttgcaggccagcttgagcagcataacgccaccacaaacatggattctgagacactggcaccataggcctcaaatgggatacttcgacatgtgtcctgtatctggaaacaacttccagcagttttatccaatcatgatattgcgcctaataagaaaaagtaaagaaaattatgccatcaacccagtttttactcgatgcttttttttatttctgaaaatatatacatacatatatagatgtatgtatgaacttgtattaataaataaagtccacgtatagtagcaaatcggaaagtaaaaattttacagcataaaacaccaatctcttgctatcagcaatatctaaattattctgaatctttctcaactatttgaaatattatattgaaaaagtaaaaattaactcataaataaaatcaaggagaatcagaacctctgacattgttacagacacatcacttaggaccagagatgccttttcaaatggaacatcaggatcatttctctcttgctttccaaggcggtgatattttaggtttccataaataggtgacaccacgtaattgcgattcacagcccatttggacaccattccactttcaggtacaggctcatttataccatcttcaaaaatctgggtttaagcaaatagaagagagaaaaagagaaagaaaagggaaaatatataattaaaataatgtcaataagtaagatttcggcaaaatgttttcatcattactaacagtaacagaaagtgtatagaaaactaaacgatgcctaatgatataaaaacataaaaacaaacctcaacccattcttttggactgagatcttcccattctttttctatcttccaaggaagactatctgaatcatggtacacagcaagcctctccagttgcaacgactgcaacatgaacagaaaatgaagcctaaagaagtttagttgtaaataaaatacaggtaaatatttccttatggttgcatggtgataagaacttcatcacttataattcatgtatctttttcatttttattttttggttttcatgtgttctgtttcaaaaaaaaaaatacaagagaaaaaattaaaattctttttcatgatggcaatgtttactctgatttatttagagaatgggcatctttgaaatttttcttctcttaaaagaatcatgtaattcttcatttcaaaatcttatttagaaaaaagctaccttccgcagcttatcaagagcaccacttgtatcgaaggtctcattcccttgttcatccattgtaacagcagcaagcttagctaaagtaatgcccgaagaaaaagaatgcccaatgttactacaaaacacaaatttgttctttaggaggacataaaattcaagcatttagagatccaacggttgaataacaaattaacaaaaattaacttcagatagtaagagacactgcaagaagaatattcgactaacctgaaagaatcctcatatctgatatgtacattgctaattgttatcttaaggttcccgataatagtagcaatgagagaacctagccatgaattcccaggaagtgactgcaaaacaccatcatcacacaataatgtataaaatgccatgtttagtgaaagagccagccaaagaagataaaaaaaattgaggtataaactacgggaaaataactactaataaaatcaatgaagccttgtgggttaaactagtggcgtattatatttaaatccatacacttccttgctttgactttgattttgcttcaagggttgctgattctgcttcctgcatgcataaaataaaatcttaattttaaagaaaaagtgaaaaacaaaaaaacatcattgccataattgaaattttaaaaatgaagaaacaattgattgataacatcattttaatgtgggcaagtcaaaaactagtgtctaaggaaatctgaaatacata

SEQ ID NO: 723 - DNA, 3392 bp, Cannabis sativa
tcagtcatatttttggggaatatctggctcggggagaaaaaatgatgacatatctaagcaaaattgaagacctcccagctcaatttaaaggatacaccatcagacgtctaagagaggaaaatacaactgcggatgctttatcactattggcaagcaaaattgtaactgacaacaaaaattggtctcaattcaatttttgaaagacccaagcatcatttgcatggaagaaattaaaatgctagatgatactcctacctggatgaccccaatagtagcttatctcgaaattggaaagcttgcaagtgacagaaatgaagctcggaaaataatgaaaaaggctgcacaatatctaatattagacggagtaatatacagacagagtttctctctacctttgttgagatgtgtaacaaaggaagaagctgcgcgacttcttactgaagttcatgaggagttctacgacaaccatgcttggggaaagtttgtttaagaaaattctctgatccaaaccaagtatatcctaaaaaattgtaaaaaaattttaagggatgggaataagataatgaggaaattacacttaatatgattttttaaaattttcttacaaaaatatggtacttttaggtttgatcactttttatgacatatttaatttttagaatatttgatgatattttctatgtcatatatgtgtaaacttaatatttaaagctcatatttgatatttagataaattatttaaaaaaaataaaaaatctcaaagttattttccctcttccattcaagtaccctacctgcatcacccctcagcaatccacctagctactgacttccgttcaccaacgacacatttaacgattagcaaacgacaactcaaagaccctggatatgaaatctccaccattaaaaccccaaagaatcgaacatattctgtcgcaattggagatttagaaaccaatttcttaagctaaaaaactagtttcataataagcaaactttatatgagttttggtatttgtaaatggtttcttcattaagaaactaattttaattacataaaagtaactagtttcttaattcattgctttaacaaaattattttttataagtttcttcattaagaaaataattttttcataattactatatcaaaaaacttgttttgattatataaaagtatatatatatatatacgaaattttaagttttttatcatattctttttaatctataataatttatctcatatttttaaattatttttaaaattatatttaatacaattaaatttgcatgctatatatataaaaaaataattgttttctatatttgtgtaaatagcctaaaataattaaaattaagtaaaaaaaattgaaacataaaaacaaataaagaaaaagaaaaagagttgattggagagagtggggagagaaagaagagtatattaatgggggagagacaggaggacacactccaagtgcgctagtcacgcagctgtcattcggaattacaaagcccacacccactctttcctcacatccagcaaatcatcgtttgcagctgtcggatcccctctctctctctctcttatatattgttccatttatttttatttctcttttaaccaaccaataccaagctctatatttctaacagctaaccccatcaaacaaaataaaacaccaacacaataacatcgttaactatagatatcccatatattatttttggtttctctacctcttacatggatcgtattcgaagatagatagaaaagataggtggtacatagcttattatcattaaacacaaaaatcacatatatggaggagaagcacaagccaaaaaaagcagtagtagccgatggaatattattattattattattagtgttaataataaacgacagtactatcatcacagcttaggcaacaaagcaacagcagcagcagcacaaaagttttgatctttattattatcgaatcgcctaaagcccaagttctcagtcatctatggcacacccacattttcggtcacagttcggagacacgactttcacaaaagtcttcgttggtggtcttgcttgggagactcccactgatgaaatgcatagatatttcgagcagtttggggatattctagaggctgttatcattactgataagaataccggaaaatctaaaggatacggtttcgtaagtaaatatattctctctttaaaaaaaaaaaacaaaatttaataacttgatttgagttgttgatcgattgttatacatacatatatatatatatgaaaaagtaggtgactttccgggaccctgaatcggcgagaagagcatgtgcgaacccaaatccggtgattgacggaagaagagccaattgtaacatcgcttcattggggaggccccgaccttcgcccccacgaggtccttcctttatttatttattttattattattattgtctttctttatttctaacttttattattatggctgatatgataggatcaatttgcaactttttgagatattttacaacttttacggatatcgaaaataatcttaattaatttattaaatatttgttagagatattagaatatcccttcctaattgtaaccgttatatttaattatatgttaatatatatatttatatttgtaatggagcaggaagaaatagtcaaggtgggagtccctttcaaggagggtcaccacaaaatgctataccaacctatagtggagttccaccaacattaccgccaccaccaccaccacctccaccttctctagtttatcaaccatacgggtaagtaagcctcaataagtacctaaataaattgttaattcaatattatataataataaataaaattaattattagtaatagtgacgtggcctcaattggtcttcagctgactcagctccctgtttggctaggccaacgcacgtgacctcatgctaaattttgtttattaatttcaacaggttaaactcatccatttaaaatactaatgattaactaaaaccagagttaaaatatatgggaaattagactttgatcaatcaatgtcatttcctatataggttgcataatttttcctttttttttttttttcaaagtacacagttggtatgtagctttattaaggtagcaattataaatcacaagaaattgacatggggtaatagagagaggtggggtttgcttatggtgtcctaattattggatagagtcatacatgtgtgctatatatgttggtacagctctgtgtacattcgatggacccgcttaattgtggatatatatatattatatgtacacacgtatatatatatatccaatattaattcttagctatagctaatatgtagataaaacttctctaa

SEQ ID NO: 724 - DNA, 3853 bp, Cannabis sativa
aaaaaaaaaaaaaaaagaaacgtttattcataaaataataagaacattagacctcatgatccttataacaaatattcgtgaaaataataacaacatcaagggacccataaaagttttgagtattatagtatcaaaattatagactaaagaaaattagttctcttttcttacatataattatacttgtttctcttatgataaatatataatattaaatttatagaataaaagttgaattaaactaacctttcttggaattgatctttgtttgataactaccattattattatgagaaaacttcttcttctctgtaaaatgatccataacataagtagtactagagaatgaagaagacgacgaagacgacgatgatgatgacataaactccatagaagaattagaattagaagaagaagaatataattggactccaaagagcctaataagggcatgatgatgagtagtagtagttttacaagtccttgaattatgacctgttttcccacaatgtgaacattttctaactattcttctcatcatatcattaaaacaaagtaaccctttatttctttcttttttggtacccccaaacaaggccttatataatacacaaaaacaacactctcaatatgaataaaccacactctatctataataatgagtagtagtaatataatattctatgtggagaagctatatatatagcttcagcttcagcttcttagctagagagaggtatataatataatataaaaatgtgagcaaacataaataatataatattaggatttaaagtgagggaaggtaattttttttaaaagtaagggcaaaagtaagattaatattatcttggtgggatttaaaattttaacatttatcatatatatgcattattatatttataaatattatattttattacaaatatatgtcataattaattaaaatgtatatacattttttttcgattttttttcaaagggtaactacccctcgattttatgtaggtctgtctctaattatatgtatgaaatacttttcaatgggtattacctattaataggtattaaacaaatttaaatataaatattaattttaaaaatattaaaccattaaattttagtccgataacgaataataaaaaaaaaattactttctatacttaatttagttacttaattaaaaaaatatcaaaaaatacatctttttacactatatcaaaaatatatttatatgaaaaatatttaagtcaaaataaactcttttaacactttttttgtcgaaaaacttttttttatattatttttttcagctgatgaaccaatctcagcccatataatataaaaatgagaaaattttctaattaaatagaaaaattaatcataaaaactcaaatttttctaatgttatctattcatgggtaatacctattaaaagtgcacctatatatatatgcatttaaatattcatcagtattaatgttagatactaatctcattctttttatagatggtttggtggtggaatgataatatgagtttggaattttcatttcatatactaaaatttaatttattgtctaatttcttgggcatctattttgttgtgtgctttcaagatatacagatgatagttttaatggatgaaagaaaattctcttctttttctaagaagaaaatatatatagacgaaaacgtgatgttatttttattaaatactagattgatcataatttaaataaaaataattggttgaaaaaattcacttataattagttaaaatggtaagagacacaataaagtgtcaaatactataaaaatataacataatattattggtataatttaatatagagtctttcaattttaatttaataaataatataaaaattcgataatcacttctgatatactaataacgagtatcttaaagcgtttaataacaatactcattaattaattaatataaaaaaaatgttagatgacagaggtgattgggttggattttacattatagccaactcaactctctcataatccatctatcattgtcactctccataattacttcctcttttaaaaaaacaaataaaaaaggagttgaaaaaaataaaaaagaagtgcttcttaaaattataaaagattatcacaaaaaattgttatcctacatatttttattttatagttaatataataaattattaatttaaaaatattttttttaaaagtaatttaagcataaatatttaaatttaattctcagttataaataaatacataagtttaatttttggcggtaataatacttaaattatatttttacaactctataagtacatgaccattaaatattaaatcattatccacgtgttattttttattactacatttaaactatttttaaaaaaataaaaatttaataacttggatcaatcaaagattatcatatgacaatttacttaataatttaacagtcaaatataccgaagtctaagaattataacttatgtattattactgctcaaaaataaacttaagtattataattaagaattaaacttaagtatgtatattgcaaattactcatttttttttttttatactttttaatatttctctataacaatggccatacacataaatatagtgtgttttagtatgtgggggacctctttctctcttctttattatggatacatgttcatgcagatacaattactatatgcatgtgatgtccttatatataaatatattacgaatctttaaaaaaaaaattgaaatttcaattaaaattattaaaaaaaaaattgattgatatattggttggaaaaagaattgttatttttatatgcaaaatcaaaagtgaacttcgacattaattaatcattgaatccatacccttttgttttcaaatttaattaagattattttgtagattagatagctagctaaattgctccccttggttcttattaaaaaaacatatataattacaattatatatttacatattatgtgaaggacaatttccaaccatattaaaaataagattatggaaagcaaactaaacccacttcttttttcttttgtttgaaaatgaggtaattgggaagttatctataatcaagtacaataaaatagtttagttttaaaaacgtgattttataacattatcataaaattaattgaataatgcacaatatgccaagtgtcatgaaaatacattatttcaagtatactagtcaacacccactaaatcaaattctaaatcataatttcatctttggttaaataattgattagggttgttatcaaccaaagtaaactaataattcccacttattgtaattatattaaaattaccacatacaatccacattatattaaaatttgattgatatatacatatagttagtgggatgtccatttcatacaaattaatgcccactttaatttttaaccattcattcaccaattgaatatgcaaaataaaaataactcaatgcaaatttatatcaattaatattaagaattttttctaccacatattgaaatttttaatttgttttcttttttattgtaagacggagttttttttcaaaatactgtgtattttttatattgtgtattgtgttaagttttactgttattcacggttattttttagttgttttaattgttctgttttcttattttatgattgttttattaaaaaataatatttttgtaaaaaaaattctgtgtagcagtaaaatggtaaactttgacctaaaattcagtgtttttttttttttttttgtaaaaaccccttaatattaagcatacatcaaaattatttataaaaaaaaaaaaa

SEQ ID NO: 725 - DNA, 3383 bp, Cannabis sativa
gcataaaacccaacaataacaccttgagtcatcttttcaaagaagcagtgcaagtatccacttcagacctcacgttcagactggatccagaagaagtggataatcaagaacctcaaggtaaaattctactgggaaaacttgtctgtaaaggaaaactcggcagaactgccattgcgaacactttgaagagagcatgggcttccttcaaaggttggagctggaaagaagatgaggatgggattctccacttctcttttgcgacaaaagaagatgcttggaatgttctgtagagacgaccgtggatcatttgtggttccctcctggtaatcatgccctggccatcatggcttgccctttcggaggtcatctttgataaatcaccattttgggtaagactaagtggaatccccccattctactggaataaaaccaaccttgaggagttggccagtaaagtttccccaaactacaaactcccaagatacattgatttcgagagagggtcatttggaatgggaatagtgcgttttcgagcaactattgacatcgacaaacctttattctcaggtttctacatgaaaagggaagccattaaagatttatggattcagtataaatatgaaaaactacctaaactctgcctcaaatgtggagtcatctcacatgatcaaaaattctgctttaaacctccaacggtcacaaaagactccactggcgccttttttcctctgtttgggaattggatgaaacatgaagaacctgctagacggccattctccaccgatttgcccaaatggtttcaagaatggattattcaaaagcgacttacagtggacaatcaattcaagaaacaatgaaagttgaatcaatcgatggtgattactgattcctgggaggctagagaatcccgtcgacaacttcccggtaagcgaagactagttgagcagcttgtggaggaacttccagccacggaggaggaaagagtttgtcgatttccgatggtcacgctgcccagaattggagaggtttgcccctttgatgatactgcaaacctggtggttccgaaagtccctgcactccctcctcatttggattcatcagttgccgtcaatgacagtgatatctcttcacccacgcagaccagcagtgatagtaccctggtctcctctacagcaccagacttttccaaagaaggacaaacacctactgaagcctcttccatgactcctgctatttgcctttcttcgtcggactgtattggagggaactcagagaggggtaaaatcaatttcaaagatcgtatggggtcttattcagccctgctgggctctcaagcccaacccattcagtggccctcgaatgacttatggaatctgggcttcaaaactcttacgggccttggtactgtggacaaattcatgacggagccctctctcttcaaccctatcttgggcattgaggattttaggtccctagagtctgactttgggcctaaaaaacgtaaagcccttgagggtgttttcattgacccgaataacataaacaagcctgcattgggcccaatgattagccctaatacacagtctccatcgccatctttgaatgaaacgcaagccctctctccctctcagtcaaacgaccctaaggtggatcctacgacatctcgagcggttagctcttattccccaggctcctcagacactattattcagagaaggaaaagaggaagaccagctctcaaagattcaggaaagtcaattcttgattcagctaacctgagtccccagtctggaataaaacgtagaggaagaccaagaaaatcggagggcatcctcgaccctaaaactcaatctctcaaaagaaaatcgtccattgcttcaaggaagagacatgcttcaattgtttcatgctgggataaaaacactttcgatttaaaggtagacctaaacaatcattttgtcattgttgattgtagttcgaaaccaagctcttcgtgtgtaattgaagaagtgaaagaacagaatgacgacgagggactcaaaccaagccaggttttttgttttggggctgtggagacttgcccagaaaagtcccccgaagcattatgaaagcaatcgcttggaactgtcgtggtctcgggaatgcagcgatagttcgacaactgaaggatttaatccggaagtcgaatcccgaattacttgtgttatcagaagtcagattacaggaagggaagctaaaaacttttatgtcaaagattcatttcgaaattttttctatgtccctccagttggtaccgctggaggccttgtcatgtgttggatgaaaggtgttgattgcaaaattgaaagtgcggataagtttagaataactgcgtgtatttcttcggaccccccgagtaaaccttggatcttcatgggaatttatggaccgcctgtctacgcggataaagaagccttctggactgatgtgggagactatgttagtaattgtcacctccgggttgtgctgatgggtgatcttagcggtactcttaaggatagtgattgcctcaactactccaggacgtgtaatattgcaagatactcgtttgatcttagaagggcggtgcaaagttcagggcttatcgacccttgcttccttgggactaaattcacatggttcaaaaagggttcgagttcgacagggggcagcagcttaaagagagccagacttgacagggctttggcaaatgttgagtggagactcgccaggcctaatgctattgtgagccaccttacagcgtcaagttcggatcactctcccattcttttggacacttgcggtggaagacattgcaccaaacctcaatttaaatacgaattgatgtgggatcgtgaccctagaatcttctgggtcgtcaaaaatgcgtggatgttgcaccctcatgaaaaccctatggttaacatgtatcacaaactcaaagctactaaagatcatttacggaagtggaacttttctcactttcgaaaactttccactcagatttcagaggctcgtactagacttttggagttagaaagcactaatctagttgatgaagcaactcactctgaagcccgggcgactctaaatgaggctttagcaagagaagaaacgttttggcgccaaaaatcgagagtgtcttggttgaaggagggagaccgtgcaactaaattctttatggcaagtacggtaactcggaggaggcgtaactatatccaatcattgaaaaatgaacagggtgattcatttgaagaaccaaaagatatagccacggtttttataaacaaattcagtaagatcttctcgaaaactcagaaccgttcatgtttgggagactttgagtggcattttgctggattgaa

SEQ ID NO: 726 - DNA, 1141 bp, Cannabis sativa
tatatataatatgtatgtacatttttttataaaaagatattattaatttcattaatgaataatttaataattttacatagtttacaatatataagtattttttttttgaaaatgacaaatataaaactctcataaaataataaaaaataaattaaaaactctagtttcattttatttattaatatacattttattttcttataaaatatcaattaaaattgagtagttacccttatgattattattattataattaaatgagtcaaaattaagcactaaatctcaatatatattatcaaatattccaaaatttgagaattatgaattagtaccaaatatttatgaatagccaaacatgaattgtgtcatttcaggaaaattcatttttttttaattttccgcttcataaatccttattatcctagatctcgagttgagaagaagacgaagatgatgcattatttttttgttgagataaaagatgatgcattattatacaaagggaaattttcatatataaaaatctttccttaccaaataaggaaattatttgaatttgtgtcctataagccgaccactaacaacttgccacgtaaggagttcctctatctgcctgatgctaagtaagacgtatatatactctttcccgccgatgaacacttcatccacatctttccatcaagatagggacgcaaactattcttttcttctgtttgtttcttgataaaactctttccatttccccaaaatgtccaaattccaattgatttgacctaagaaagagcccaatgttctggaacaacttctcgcaacggagactagcgtctctgctactgccatggctccgagaccaaccggaattggaggtaaaattgggtatgatcaattcgcaggctatcgcgaagaatctccgcttcaatacttcggttttcaatgatctcatcgaagatttaagtggattttcctttactgatgtcaccattgatcagttaactgttcgattctcgaactggtccgtccctgccatctcgttcgaagttcatggcttccatgtcacactttcagctgagtgagtcacctattttttccatttctggtttactgttgcagtaatttttgtccttgttgtactaaatgatcg

SEQ ID NO: 727 - DNA, 1955 bp, Cannabis sativa
atgatcttccaagatagttttcacctcttctttgatgacaacattctcatcttcatgatcatgatgatcatccttaatagtctccaaaaccacaagtacttcttttgttggtgatgatgatgatgatgacatcaaatgagattgatcatcatgatgatgagaataaacattatgattattcttggaataataacaagattgatgatcatcatgatcttgaggattattattgttattagacaaagacaaagtcttgatcaagccagaatattttgcaagaaaaaccaagagtccattgcatagtagaaagatgcaatttttatcaatggtatgagtgaaaagttggtaaggaaatgttgaaaggtagaaattgagagagtgaagaaaagagaagaaagatgatttagaaaagaaaaaagagaagagtaaagagagtgagataatattaaccatctttattagagattgaacatctcttaactttgccaagctatgcatcttattttggcccttattaataatattagtactaattctctccatttttttggctcttaagtgaagaaaaaagggtatgaaatagaaaagagttttaagagagctttgaagggttgtttaacttgtttgttgagcatatattaaactatatgaagagcttcacacacttatatagtacaccaaattgaaagacatgtaatgatgtgtattggggtttggttgtttttaccaaactatccttgaccaacatgcaataatataatatatatgtataataaatattaaaaaaggagaaaagggtatctattaaatatacttaataaatggtgttccattgatatacgtagtgggcttttgggaatctttgtgataaagtcaagtttgcccatttgagtagaattaatagaagagaagtatagtaatagtatgacattgccttattgactatgttgtactttagagctttatttttatttttttttgaaatattaggtaatagttatcttaatgtgtgtgttatatcaatttgaggttgattgttcttcttttggctttatatgtataattgatacgtggcaatttctaatgacattgctctaaagaagagggactttaaagggtatatagtagtagagaagttccataattgaccaataatatatagactttatagtataaatatgtgagtttcaatggatatatatatacatacatatctaccatatataatttggtcttaagatctcataattaggatttatgttctttttaagtgatgagctgtgaccccttttaagttttaagaactacatatgtttttacatgtaaagtttttgttatttgtactttagtccttataaatttaaatatttttcaatgatctttatttttgcctcccctttgtcccttgttgctggctctttcatattttaaaaaatatgttaagattacacaatttttatgggtaggtaaaagatatgccatatctcatatgtatgtgaagattttgtgtataaaagcatgtgtttttattatataataaaattcttaatttttcatattatataataatgacttctctaattgatcacataaataaaaattcaaaatttaaaaccggccatgtgatttttgtcaaacactatatatttccccacaagttaaattatttatacatagtaattaatcatagtaggcataaaatggtgttagattaagtgatataatggtttggtgtgttatcatataattggttgtagttattataggtagccgactaattttgtgttaagcactccatgtggcaaaatccaaaccacaaaattgactacttaataataagactacttaacaataacctatcatatgaaacataatttgaatttagtgaagagcattatatagttttggactaaaacataacaaaaaaagaaaaattaaaggagaaagtcaataat

SEQ ID NO: 728 - DNA, 993 bp, Cannabis sativa
tcacaaagagtactcggactcaaattcaaggaagcattgattcaattacaattgattctcacttgtggctatagtgattagtacatactatgccattataaccctccatctctttctctttcaaaatagctcactaattctctatctaaaattggttcctaagattacaaaatggatagctatatatatagctatgtgtaggtgtattggttataattgtccataacaatatgctaggtaatcaagttagcttaggaaaccaatcacaacagttatccaccttggtcattaagtgaggacttaaccatggagacttgggactgaactggacttgattccttaactagcactcgaggatatttagcaagtttaaactcacatatttggtcatcatgtctgttggattctcctttgttccaatcttcttcacaaacaccttctattctgctatgatatctctcataaagtgtagctttatatctatgtgtttagacctattataaaaaattagatttctcattaagtataatgcactttgattgtcacaatgcactgttatgtcatctgatttgaacctcgattccttggtaaaacccatgagctagatagtttcttttatggtctctatagtagtcatatatcgtgcctaaattgatgatagtgcaaccaccttctgaaggttggatatccagctaacacattcacctaagactgtaaatgcataccctattgatatcatttgtgtctatgtttccttcatagtcagaatcaacaaatctatttacttcaattttttttcagcttattgttatagacaagaccaacatctattgtaccctttaggtacctcgacacccatttaactacaaatcaatgttctttccctgggtcagatatgaatctgctaaccatgctcaaggcataagctaaatttagcctagtacacaccataaggtactgaatccatgtagttcttttcttcttctattttag

SEQ ID NO: 729 - DNA, 2053 bp, Cannabis sativa
gatgtgccttggataatacaatcttcccagatgaagatgacaatgaggatgagaatgagaatgactcacaaaagcaaaaagatgatgatgctaagaattacaatggcccccaggtaggtactacttaaatttagaatcatgaaagtgagataggatcaagtcaattacagattgtgtttttgcaggaaacaagtagcagaagaatcagagacaatcttgaaagaattgttggaaaagatgattcaggctttagtgggattgacttggccactcttattagaaacaagtatggaaggtcttatgatgttcaactcataaagaaggtaacaaacacatacatacatatatacttctaaaatggagttgtttgagttgaacaatgtatgcatgtatgtaggagtttatgggaagaaatctgcttgctatgaatgtcatgtggaagtacatggagcaggtatgttaagacttaaatcaatgggaagaagttgtgtagcctctctttctttttgtttgtttactaagaacaatttctaatgtattagagatcatttccactgactgaagaagagtatatactgaggcttgacgatgtggcaaacacattgaagtgttggggagctgtgtcacatataagaaacagcctccaaaagtccaaggaaagacctcgtataggaaaggtgcgtattctatgtatgtatgtatgagtatggatgtatgtatgtacaaaatattaaagatgaatatatatatatatatattgagatgcaggcagtcagcatttttatagacatggacgaaactggagggcgagccaatgaatggatctacaagtagatagatagtgatgatgattcattattatataacactggaagaaacttcaatcttcaaatttaattacaaataataccattcaattcatagtcatacaatgtttgtaatgttcttcaaatattactagtatatcaatatggtttccccttacaatataaataaacttcaaaaaggaggttactgttggaacaaaatagaggattagtgatctaatcaaaagggttttgccatattctttcttctgtcaaaagtcaagactgtatatacatattaaagaaggagaagccccagccgcaacacttgctcttctattatatcaaagctgccaatcaatggggtcaattcccatcttctctagcagttgattagtgcgagaaaaatgcctgttcaagtcatttaaaaccaaaccaaatatacaattactttacgttattggttggcttggcttggcttgcccatgcaagttaccaattatgtatcaactactatctgatctaacacgcaacaaagttttttgttcacaagaggctaaacaaaacaaggaattgaccgaacataattatctgatgcacatactaaaggaatttgctctaattattctttaaaagctataccacttcattctaattattcttcaaaagctataccattttaatattatatatatcattatcttctagtgatacactcacctgcaaccaaagaagcctctgtgtgcagacaaaccagatggatgtgctgctttcagaatgtgatgcttagactcatcaattaacctgtgtacaaatttcacaatacatcaataatcctactaaactcgatacggcaaaagaatgaccttgtatacatcaattataggagaatgaatgttttagtgttttcattcaggtagtgtatgtgtatgaaaatttattttctttctgctccacttgctctaccattgggatatgccttagaattttccctcttaggtaagttagcacattttaaaactaaataaaaattacttaggccaaacattgagcaagcaaacaataaaatatgaccacactctgacaacagagacgcagcaataaattataatagagattagagattcaatgactttctctatgtgctcatcttttctatatgttttctaatctagatttggtatcaatgcatgtctaaaagagtatgcaagtaagtacctccgtttctcttgggcagagtttcccca

SEQ ID NO: 730 - DNA, 837 bp, Cannabis sativa
ccgcaaaatcatctcagcgccgcaattgttttgctcttctcgacgcctctcggagcgtgatccaggtatccaaaattcatgctaatttgattactttaggtcgttttgactccttttgggccaggaagattctcaagctatactgggattttggccatcttgattatactatattgattttcaagttcatagattttccgggaactttttgtattaacacagttttaaaggcttattctttgggtttgagtcccagccaagctttaattttctattttgaatggttgggggaagggttctgtcccaatggccatacttttgtaccgcttattgggtcttgtgcgaagatgggttgtattgaaactggggggaagtgccatgggcaagtggttaagaatggggttgatactgtactgcaagttagaaactctttgattcatatgtatggttgctgtgagagagttgaacttgcatataaggtgtttgatgaaatgaccacgagagatttggtgtcttggaattctcttgttgatgggtatgcgagacatggttatatggatgttgctcataaattatttgatgctatgccagagagaaatgtggcatcttggaatgtgatcactagtgggtatttgaagagtggtattcctggttgtgtgttgaagctatatagacaactggttaaaactggaatgagaggtaacaatactaccatggtgaatgtgcttactgcttgtggtcgatcagctagactgaaagaaggaagatctgttcatggatttctaatcaggactgcctttttgaaatcaagcatattcatcgatacagccttaattg

SEQ ID NO: 731 - DNA, 734 bp, Cannabis sativa
ttttttttttttttttggattgtgtgtgtttgtgaaataattaagtttaatgtaatatcctaaagtggtgggtgatttataatatagtttgttattaaatgtatgtaaaatgtcgatggaatccttgagcctttttgtttttttttggccttgatcagcttttctcagaatttgatttgaaaaaatgtgatcccaaaaaaagtacgtacgaatgagataatgggcgcgagaaagaatagagtacattactcattaatactatagcagtggtagtaataataaataataaataataataacaataataataattttaataataataatgaggatgatgataatggggcctgatcaataaatatcgtggtcgttgcaaatttgtaaaagtgatcaatgtctcaatggtatagtgttatattgtttgtttaaagatgtatgtggaatttatgtgcatggattttagtgcacgtgctatatattcctatccccaattctctctgatcagttaactagctaggttttgaatttgagaagattttgtgttgatgctagatctgcactttaattaattaatagattaattattaatcccctactaataattaatataagtttgcttattttaatatatgagctagctaggtcatcttccttaagtatttctaggtctactatatattttcttggaagcttgctacgagcacctttatcatgggtggttatgcttggcttta

SEQ ID NO: 732 - DNA, 898 bp, Cannabis sativa
aaaaaaatggaaaatgaccgacatgaccattcattattgtattagcgtggcccatcgatacaaagcgtcctattatctatcggatttcgatagaatacagatactgacacgtcaatagaaagctataaccaataagaaaacgccacgtatataggtgacaatccttttcttacagaaactcgtacacccgatcacagcacctataaataaacccaaaagccatgagtccattctctcattcccaaactttgcttattcagattctgtctcttctgcttccgctgaagaaagaaaagataactcttcgccttcgccggagaaaaacgtcgttttgggtgttcttacaccgtcgaaaaggaactaagcgccgtcgttttaaccatgtcttcatcagccaagaagatcatcctcaagagctcagacggtgaatcgtttgaggtggaagaggcggttgcgctccagtctcagacgatcaagcacatgattgaggacgattgcgctgataatggcattcctttgcctaacgttaccagcaagattcttgctaaggtcatcgagtactgcaggaagcatgttgattccccaaaccctgatgagcgcgtcgctgatgacgatctcaaatcctgggacgccgagttcgtcaaggttgatcaggccacgcttttcgacctgattctggtattgtattcttttaccgacatccccgcttgatttgttattttctggtcagcagatttagggttatctttctagggttttttcgttatttattttcttgttgggtgatttttagggttaagtgttcttgaaaatcgtatgatttgtagacggatttcgcatatgatttcgctatttgggtgacttttagggttaaatgtttttgaaaattgtgttgtgc

SEQ ID NO: 733 - DNA, 788 bp, Cannabis sativa
ttgtactctacgctattcaggtatctatgcttatatgcttcaaaaaccttttatttaatagttttgttttttttttttgtttaatttggtgccaaaaaaaaaaatgttattttgcagtggatatacgggttcgtgacattcttctaccctggagggtccagtgggcttaggagtgagtctctaccatggcatgtgttctttgggctttttgtatacatattggctttgggcactgctgcattgggctttttagaaaagctgacattccttgagtctggtggagttgaaaaatatgggtctgaggccttcttagtcaacttcactgctattgtcactgttttatttggagcttttgttatattatctgtttcttctcaaggtccaccacaagaagatgagtatagctattcagctatataaataaatatattatccttattattatgctcattttcttgttaatgtagcactactagctaagacagttgtcatatccttctttctctcaaagtacataaatgttgattatttatttttaattatatttgtttaaagactgtaatcaaacttcaaatgagtaactcacttgaatatgatcatatatgtattatataattttatatttttatagattagtggatgatgaatattgttaaatgttttcagatatatcatatcattaatcattaaacattgaaaacttagctgtaatgtaataataacattattttctttaattgtagttaaattaatagacaaagccatgtgaaaacaattctttaaaaaca

SEQ ID NO: 734 - DNA, 4000 bp, Cannabis sativa
cattttggaaagggaaaagaaaaaatattattaatgcaaaaacctatttctacaacaaagacgaaggggaaaacaatatgaggcattacacacacaaacatatacaatatatgcacaaaggaaaagagggcattgatgcaaagaaacaaaatttaacttgctttggttttattcacaggaaggaacttgctgccctctttcctcagccataatgtagaacgagttttcttgacatgatttgtgaatagcttgtacctgtcataatcaatgtgcaaattgtttaataatattgcaaaaaacaactgcagatagtataaaagccctatttttttcatctaagaagtcaaatgtctttaatgtaataacaaacctttcatactccaacttctgagtaacaattccgttcagtaacagctctgaactgtaaattgttgctcctgtgagtatatgacaacattgtattactatgctggctttttattttattttggttttcaaatcggtaaaaatgaaatatatggatattattccaaacctttttcaaggaaaggcacacaaattgcatagtcttcttcacaagatagaactaacagatcatctggaaaggcaccatctttcagtgcagacctgccgatcctctcaactgcctgttaggagcatacaaccaaagactctaaaattatgtgatattcgatcgaaaacgggagcaaagtataaccaatctaacaaagttttaataaggctgcatgactagagaaaacacagacactacaaacctggccctgaactgccttcaccagatttgaaattatttctactccaggctttgtgtttggggtaaccaagactctcaagccctgcagaaaaccttttctggtgaataaaataaatatttgataaaaaagaaaaaagaaattagaaaaagaataaacctgtaatattggatgctgagatgcacatgctaacgaagccggcatgctaaagccaatttccttttcttttttcgaatctctaagaatgtattttttctcatctaagaaacacttggcttgaccgcagttgtcaatccataacgatgtcaccactggtttaccagaagcaatagcctctaacatattccttgtgcgcgcaaactgatcggcaatgaagtgtgttgcatctgtaatagaggatgctatggacactccaagacgggctaatatctgatagacatgcaaaacagatattgctcaaattcatttgcatattgctaacttaaattgatgaatgagaaaacaattaccttcttttgatgtttaattatatcatcatccaagtgatgactgtataggactcgaatatccgttacttctctcctttttcgtagcacttttgacacactagtagcttgaggtccggcatcacttaaactgcggatttctttcaaaaaaaatgatgttgagaagcttctcttacttgatttgtcaacgtattcattacctatacagatgggtgacacatcactgataggtatcttacagttaattggagtagtacatgatgagtcagatggtttagatttctcccctggtgtttcagccaacctggcacctctttccccactttcggcttttctggaaaacattccatcttttatttcctccggatattttccttccaaatgatgctctacagaagacgtaactggatgatcacataacgatgatcgcatttgtctgcatgaccttgtatgcccactcccagtgacttctggctgagcagatggcacaggcgcatcagcaacattatcagagttattaacctgacgggaagagattcgaacagatcttctcgctttgggaaaacttaatgtaccaatcttgttgctgctattattaatagctgctacatttgcaaattcattaagtgttgtgtgcccactcccattgctactctgtaagacttctggctgtaccgatggcacagatagatcatcaacattatcaatgttattactctggcgcgacaaaattctactagatcttcttgctttgggaaagcttaatgcaccattcatgttgccattggcaaaagatgtcatatctgcaaatttttcatgtaggtttcgtttgctactttcatttttactgcactgagcatctcttgaactcaaccctttagaagtctggaagcctcccgctttattacttttctcattggcagcaacaaccttcatcttccctcttctctcaaaggactctttctcagtgttttcatgattacttgctcccattgaacgtctagttcgacgtgcaatgggagttataaccttttcttgaatatttgaacattcttccttccttttccaagtactttcgcaaggtatattcttgaaggttccactttcgttattgttaaggtgttcttcattttctttggctctctctgatttttttatacctgggtctgccctgctctgttttctcacattcttagactgcttggcacgtgaaagtaatgacacatcatttatgtcagcgccaatactcttagttttcttcgactgctttgtagcaaaccctgcatcaatgacacaagatctttttcttgacgaccgtctctgagctttgtgactaatatcatttttgacaccttgacaatcatcattaatatcaaactttgcattgtcctcaccacaaaataaggcttccatggcttcggcagccatttgagtatcaacacccacatcaaacatatctggcacatatgtcttagtagcattattttccaccttttcatccttaaagccaagatcggattgttcatccaactcattgatgagattccttttaaaggtcctttcagaatcaaacaacaacttatcattggaattaagattgtgtgagattaatttcgaatcagaattaaacccatccatctttttattattgccatttaacaattttttagaatccttctgctcttctgatctgataactccagattttgacggtctccttcccagccttccaccaccaaagaaatcttcctttcttcggcggagaatgtcaccccctccttcatcttcacgattatcatcccaatcataaatgttaaattcaccaatcatgcttttaaagttaactttcttcgccaacatttgtggaccttttacacttgaaacaagttttgattttccccaagtactatttccatggtaaacttctttatcaaactcttcagtattctctttaagaaatctatccacaaaattaagagcattggcttgtgatagttctccaggttcctgagactcaacatagctcaaacctgcctgatcacaagctgacatctgtatcaatttttctccgtcggctctactcgtatcataaggaagattctcattttcataatctacattctcagtaaaaagttttcttgctgtcaaattaccaactctgggcatgcttgatccatttaccattacactgttttcaagatcttcctcctgacaaccatcctttccagattccattgttaaaattgcattatcacgaacatcattcttcgaggatggatcaatatttgaaatagaaggcaagaaactgtggggaccctttaaagaattgcgagcagccattccagaggcccgcaaagatgctgcaccaactgaggtaaatcgcatagactgagaccctgagaatgaaagggacaccagaaaacaaattgagatgagattaaaataactatttaacagaaataccattccagaaatgtagtcataaaaggtaaatgaagttgatttataaaaaaacttagcacagatcaaaatattaactaaaagaacctactaaagactaatgattacttcactttgcaaatgttttaactacatattctttgctgtaattcaaaaatgctacttagtatataacacaacctagcataattttttcctgttctactcaaatgccaacgcctagtagcatacaagtaatgagaaataataatataagtaatg

SEQ ID NO: 735 - DNA, 1429 bp, Cannabis sativa
aagggttcagtattcaaagtttcaagagagacagacataggaggttcatcatccaaatatgggaaagtgtcttcataaaaacgaacatccctagaggcaaaaacactcttgttgtccaaatcatataacaaccaaccctttttcccaaaaggataaccaacaaaaacacactttctactgcgactcgcaaacttatcaccttttgccttttgattatgagcaaagcacaaacaaccaaatacacgcaagtcatcatacgagggtggagaaccaaacaaaatatcatagggagttttattacgaagcacactagagggggttctattaataagctgcgctgcagctaagacacactccccccgaaatgaaattggtaaattcccttgaaaacgcaaagcacgagcaacatttaaaatatgttgatgttttctctctactcgcccattttgttgaggtgtgccaacacaagatgtgtggaataaaataccattagccaaaaaatagtccttcatacaattaaattcagtaccattatcactccgcactatattgatattttgtgaaaattggcgctcaatcatagaaatataggacataaaacatctaaaaacttctgttttatcaaccaataaatagacccatacagcccgagaaaaatcatcaactaaagtcaaaaaatagtgtgctccacaggatgatgaagtgttataaggaccccataaatcacaatgtattaattcaaaaattcttgatgctttgttggtacttaaagaaaaagactctctagactgcttagcacgatgacaaatttcacatgctttattcaaatgttccttacaattactaataaagggtagtaattttacgattttctcagaaggatgtcccaaatgcttatgccatagatttatcgaagatgatcccgaaaccaatgccgcttgaacgcttgacacccgttgaagataataaagtccatcccttctttcacccgttccaatcagctccctcgaatgtaggtcctgcatagcacacatatgagatgaaaattggaagcatttcatgtcatcattgagttgcgaaaccgaaattaaattgcaatgtagtttgggaacataaagaacattattaagatacattttgttcgtcaatttcacattgccttgcttagtggctaaaacactttgtccatctggaaggcccacgggacaagcactcacatcttgtatattagtcaaaaaagaaatatttcccgtgacatgattagatgcaccggtatcaattatccaagatatattatcaaactcaccattcagccaatttattgaagtttgagaattaccaaaagccgcaaccaacgcttgccattgtgcggcactaaaaccaggaagagcctcatttgtagcagaggaaggtgatgcattgattagat

SEQ ID NO: 736 - DNA, 2413 bp, Cannabis sativa
taatgttaatggaatgacagtgagcgagtaattttggagagagagagagagaaggaatcatatctagaaattgggtttgtcatgtctcaaatggaaggttgttaaatggccgttggggagtttaggaatatttgtgtgtaaaaattgggcctcacttctcacaaattcacttttgtctctgtaagtgtgaggtctctttcacgcggcctatgccactcactcacactcacattcacctcagcagcatgctctgctgcagcatgcacccacacttgaccctcctaccctctcacttataataatatatacaaattgtacaaactcactaaccctttttcttaatacatactatatatataatattacatttagacagtacatatgtgtgtgtatatatacatagacatatacacacgcatatataaacaaacatataggcaaaaaagtatggtgctttgggcaatgcctatcaacacaaagcttgttaataataaaagtaatgtaacaaccggtgcaggatggggcatgtggcatgtgcactccacaatattataatactatctctttggccttggccttgacctttctatttcttaggcttattgctaggtggatgttatattgttatatttattttttttttaatttttttagaaaactagaaaagaaaaagcacctcttttggtgtaaaggtccgcatggggaaagaagagaaagacattgataacatattctttgaaaggtgattttgactctaattccctttctgtgggtatcactcaactcaactcctgcatatatatgacctcaattgaaactattagaaccataattatgccctcctcctgtactatacaaatttcttatcactggcaagcatattaaatcaaaagaccttgagaaagaaagacatatatttcaaattatatgatatgataagatattcaaaggaggattaccccttgttccatttaggcacttaaaccctttttatctcactctctttcttttttggggtcctcatttgtaattattacattgaaatcatgacagtagtggattatgttttgggctgtatctctttctcttattctagattaatatgccttacttactttatctacatttttcaaagtcccttgtgggagttagttgagatggaccactcaaaaagacaaaaaggcaaaaggttttaaaataagaagagaagaaggtttccaagatgaaattcaagtgtgaaattaagattgattttgatataggttttgccttttgtctcggcaaaatggttggtcatagaatagaaaatgaaaaaaaaagaaaaagaagaaaaatgtgtcacaatggcatgtttttagctacacatgatgatgagtggaaaatgttttctccagcatgctcaagtgcaaatcatttccctcttgaccccatcattttgtagaagagttttcttttttcttgctttatatatcctcattataatttaatcaatttttttttacttgtcatttcacacagaacagtcccagccatcacccacaagtaaattgatttggttaaaatatgtgtaaaacagttgaatagttaaaagagatatttgagctcaagctctctcaatagtaaaagaaactcaatcatacatacatgaataaataaatctactttcactcttgtttgtccatatgcagacactactggatttgaactggaggccaactacttctgattattttagtgtcacattcatgtactagagggaagcatttgtggggttctaacatccatgcttattagcataaacagaattaaaaaaagaaagaaaaaaaaaggttatatatactatttttttatttaagaaagtcaccaaactttttacctgcattacactaaaaatataatcataagcaaaagataattaataaattttcataaagagaagatgaagccttcggttccattccatgtcaagataagaattatgctcatgccattttttttgagcacctttcccaattaaggtgaccacaaaaacttttcagttcccacctttcaaagtgacccaaatcatatatactacaaaacaagtatttttgtttttgttacaatagtatatgtatgtatgcaaatcttagcagtggattaagtagcaaatatgggaaagaaacagacataatgacatgtgcattatgcaatctgaatatttatatgtgtaggattatagtatgtactgtatatgcttttcatgtattttggcactatccccttacgtcttggaaactaaatactatagtgaccttacatagctgtgaagagaaccaattcaattcaaacatggaatattagagcgtaatgacctactatggatctatatatttctatcaaataacaagaaccaaaatagtttattatccat

SEQ ID NO: 737 - DNA, 1894 bp, Cannabis sativa
tcgatacgcacctccacccacttgtcggtccctctaccacgctcccaagtgaaagggtaaccttccaagcacaaatcttgaagtcttccaacagaaagagcatcattgaaaccttgaataagcgaagcaggatacggacgcccaccacgtttatctttaacattgcaaacattgttcacatcacccataatacaccaagggccctcaatagaagcagccaaatcacaaatttgcgaccaagttttatgtcttaaattccggtttggctccccatacaagcctgtaaaaagccaagcaccccctctttccaacttgacagtaacattaatatggttatttgagaaatcaaccaaagaaacctcctcattatccttccataacatagctattcctcccccccttccttgagattccacaacaaaacagccatcaaagtgacactgtcttttaagtctctcaactctatccctcttacatagcacttcacacaagaaaacaatattgggcttcttttggataattaaatccaaaatgaactgaaaagcccgagggttcccaagcccacggcagttccaacttagtatactcattgctgatggtgggccataacatcgaggcccacagactgcaagttttttggaggcccttgcttaacttggcccattgtgacgttaatctcagcgttatcaatttccccatttggacgtcttctttttgtatccataaataatacttcctcatgatgagcatccaccctctctccctctccaatcgctggtttgtgtaattggctgccatccttaaaacctccagctgtattcaaattaggatctctattagttgcactattaaagtcaatcccctgattcgatccactaattcctccataaacttttccttgattgcctatcacagctatctcattcaaatccgccattacatcatcttcattctgatctaccgtatctccgttctccacctccggtgatcctgccccgcctggccgaagccatttcgcacctatggaatagtggtttgactttatcgggttagcacgcatccactccccatacggtttaacaatatcagcaatcggtttcacgaatagctcttcacaaaatctttccgagtgaccaataatcccacagatgaagcaaaaaagagggactctttcatatttgaaattgacccaaaaccactccttacccacagttctgactttcatccttctcttcagcggtttttcaacatcgatagtgactcgtgccttcaaataaccccgccaattgcctttaaagtttttcttatcagcttcaatgaatctgcccacgtaattacttgcatctctcaccaacctatcagtgcgaaaacctgatttaacatcatgaagctgaacccagatgtccaactctttcagaacgatttcacgaggaatatccccttccttgagcctctggaagatcagaacaaccctattgaaggtccatggacttccctcaatcaccctaacaatatctatttcatggaagaactgaaaaagaaaacgattagaatctaggagtttcacatacaaacctctcttaggtctccatagggctgccaatttattttgcattgcatcaaaatcaattgtctgatctgtaataaacctcccctccaaggcccaacgcgcatcaaaagtatcctcatcatccctatcctccccttcataattgatacctccctcatcctcctcttcaagttgaatatccgcatattgacgttccaggtcttctatgttatgactagaagaagccattcaatccaaagacttaacaggaaaaaaatggagaaagagacaaaaattcacttaaccagaaaagacaaaaagacaaaaacaacttaactttgtcaa

SEQ ID NO: 738 - DNA, 1940 bp, Cannabis sativa
tgaatatgctagcaagcctatttaaacaaagtatgatttcccaacagacccgttgggatagtaatcatatttccatagtatttcaattacaacaaccacaaatccaaaaatttagttcgttgaacaacataggatactactactagaactgtagagcattatgtaaagactaagaaaatgtagaaaatatgaataataaatttgtatcagatattcttacccaaaaaaagtatcagatataaactcttaccttttacccatatagggggagcaccagttgcatttgctacaagaaaagacatagcaatatcctcacagttcctggtgaatagaatacgtttatgaattataacaccacgtaccattagattaaaagaaataatgtgtaaagatggaaaaaaaaaaaacaaagttaaccaaagaatgacctgtttttggttatatactctctgattgaagctggcatttcatttgtataaagacttagatactttttgtggaagaaagcagccttagagagtaccatgctgtaagagcccgtccaccaaacagaccaccatccaccataaatgtaactacccaaattgtttttctgcatttaaaattaaaattaataaaaatgatggcaagttggggtatttgaatcatattgcacagaaatatttacaagtagctgaactcttatgaaagaatgtagttgatcacataatggagctactataatcatattgcagacacagagcaaaagttaaatgaagcttaaatccaagtttagctgagaaaaagatacatgtatagctgtcatatccagctatgctatgagatgcaaaatatgagtaagctagatagttccatcagtggcataggcaaaaagccaagcttacattttcacgtgtatctataaaacattaacttataacaagtatttgctcatgtttccacgaggacggaaaatatcacaacataaaaattaagacctttgaaggcaattttcttaagacagaactagatcagtgagcataaaggtgcatgtggagcttctaacaatgagaatgcagctaaaaaatcaattcaaatcattgtactcggttcatgatttttgactaagttttaagttacaggacaatgttgccaacatggagattgcgttcttttacaaaacagagagcaacaacaagccaagtcatacataagaccaacaacaaacctgcacctcatattatatttcacaagttattactttttatgcatatggcttggaaaatgaatagcagaaacaaatagtgccatatggagaaaaaaaaaatacatggaattaaaccataccgttgagtcaacccaatgaatgcgaggtacatatcccaccattgtatctggtgcactttgccaaacgctaaaagcaaactcaactgaagagcaaggaaatataacatcatcgtcaatcgaaaaaatagcatctgttttcaaatcagtaatttctttgaatctattgttcaaactgtcttccttattgatatcaaatttcaattcaacaagtcgcccatctttagcattggattctacaatgtgatttaaaaactttttaagagaatctgatggagggtcaggctcactccatacgatatgtattgaatcgagcccagaacaggttgtgtaatgagaaattgactgcttcaaaagatcatatcttttccatgtattcattacaatggaatatcctttcctgtcaacaaattataacgttaagtaggagtgcttaagaactacaactttcaaattaatataaataactttaactaaagtaattaagtacacccatcttaggtaagaaccaagaataatacattagaagttaatccctaagttatgttgtagaccttggagataagaccactgtaatcttatgtttctcttgctttcctcccccagatcggaagagc

SEQ ID NO: 739 - DNA, 3694 bp, Cannabis sativa
actctttcccttggtttcattctcttttgccttccctactttcattctcaagtgtgccataagctcattttgctcttttcccatgaacaaaactggtgcttttgtcttcctattcatatgcacttaattaagccctgcagatacaacatgacatatacatgcttgatgattttatgtacttcgttgactctacaaatatttttgtttttcctcgctcaaaattttgatactgagcattttcatacatttgacaggcagaggtaattgctaatgcgcaagtggtgagaagtggaaggaatttgactgtaatatcaattgattttaaattgaagaaaacccagaagctggtctatacagctcgcgcgaccttctataacatgcctgtttctaaattatgacattccttcgtccaggaatttaggaacttatgtttatgtaacaagcaaatgtgtctgtaagtcgtataagatttctccctgtgatgattctcattgttgaaaaccatataatgcattatcttcattgatgcctgcacataatttggaattctttttcccaatttttatactacatattatacccctacaatttcttgatgatattaatccatgtagatcatttggtacaagtgtggttcaataatttgttttaagtgaatccaacatgccagcaacaagcttttacaaagcaaaacagaagtctagatcaaaggacattactccaattagttcaaacaataaattacaaaatcaatagaaaaaatgattgcaatttaaaacttggtacagctcttggcaactgaaatgtacttataacagaacagcaaacgcattgatcatctggagatagtcttgcaactcactcggcaacatcaagttagtcagcaataatgagcgaaacaaggctctcaataacaaaaacttgcttaacagtcccaggcttcgtaattacaagcaagcataacaatatcgcaggtagaatcatgcttctatgaaatatcaattttcaacttccagcttccactgttttctttagctattctgttgagagaatacaccctgccaaaatgtctcaaatttcaaaatgagcaaaggttaacgaccatcaggaaaagaagcaatgaaataatcagtatcactatcataagaatttgtcattaccttcaaataagttgcactaacaaccacttttaaggcctaaggaaatatagcattaacaaaggcttctgcatcaaatggttggaggtcttcaacaccttcaccaacaccaacgaacttcactggtatgccaagctcatctactacacttaccacacagccacctcttgcagaaccatcaagttttgttaatatcaaacctgtgattccaacaacctgtcgagtgacataaaagtataaacaatctatagtttgcactgtagttgaatcaaagtacatggagtctgaatatgaaaaggtaaatataaatagtgatttacgattctgaacctactggctctattagaaatcttaaagaaaatggaccgtagcacatgatagcattgtcaaaaaattatactaaacttttagcatggaataatcattatattgcaaaatttcttagtagcctaaagcaaacggtacaaaagagtacactaagtttgctagttggggataaattttggaaccgtttgcctccttataaacatgtgaaaaatatggaaaagatagtaatatactatcaagccagttaatttataaggctgagaactgggatgttacatcgttgaattctcttgcttgtggaagcatgtttaaaccagttgttccatccagaacttgaagaatctcctgtatatatttcagaaatatttagcactacaatgtatcacaaaacaaagcatcaaaaataaattttctttctcacaaaaataataagtacaacaaaggcatataaggaaaaatctattcaagccacaagtgcaatactgcataaactggcatacttgttatcttgtattttcatataaaggaaacagaactgatattctaaattgccagaagtcattcgaattttaaattgtaacctatccaatgtaatgaaagaagcaatttacagaactagaatgagagaaagacatttactatcatgccaaactattgtgcccctctgtgagccaatgtctcagcgaatattctattgaacaattcataatagcggatgttataacttgatcatggaaaaggaggagagagggaaggccgaagagttaaactcacattaggagccccagggagaacttttccaacagctttcttacatgatatcaactcttccatgagactgtaattagtgtgaagacctgggaaaaatcaatacaagagttcctgaaaacaatgggggcagaagaaaataaccaaccaggaaaaaatgtcctgtaagcttacgtcctgaggtgtcacacaagacaatatcataatcctctagtttccctctcttcacggcctgagaaagaactattaacaaagcactataaaattaaacatcagtcattgtactaggcatttgaaaaatcataaagacggtataatgcttcaaaagagatgtaacactaaacacacaagttaattgaattggcaacctgatgatgctttggccttttctccttcagccacaactatttcacagccagtcctctcggcccatatctccagctgatcactagcagctgctcgaaatgtatcccctgctgccatcagtacctgtaacaagctcaaatcagtaggctattcagagtcaaaaacaactatcagactcaaaaacaacaatatacaattgtttctaaacaataacgatttagtacataaacagactcaaaaacaacatggtgttgaagccccatctccgctgcaagaaatataaatagatgacataatttagaaagaaaaaaacccccacttaagtttctgaacactagtttccctcatcctttcccaaggtttaggtcaaaaacaccagcctcccacataagtctcaacacatcatttttatcttgacttttagaatccacaaccacaaagcttaatttaatgtgataaattatagagctccaattcgctattgtagtagtggcccaaaattaaaacactcccaactaaaaacagtgaaaataagattgtgcaactagtaaatttgaggttgaacaaaaaacaatacccattcaaatttttaaaatttattttctgtatatgaacattcatgatcagtaaaaggtcattagactatactgagcttgtgaagaagcaaataaagagcttaacatctccttatttacacgcttttattaaattttctagtagaaccagctcatctaacttttaaatagtgtgaacaaacccgaaagttcaattgataaaggtgatgtaacacaggatccattaggtcaaaacattcaaatgataatttttttcattataccattgtttataattgccaacattacaaaaaattaaacactaaagtattttataggtaactaagtttatgtcataccagatcctagagcagatatcagtttccactctttctttactccctaaaatatattcttttaattggaagaaaaggtaaaaagattcacctttgccccttctttcttcaatctatgagccaacttccctgtaaaaagttagttgataagtaaaatgttttaatg

SEQ ID NO: 740 - DNA, 4530 bp, Cannabis sativa
tgggccgagtccacctctctaacattccccccatcatcaaaaataaccttgtcctcaaggttagagaggttgtaagcatcacagaatgtagcaaaatcttcccatgtagcatcttcaggagaactaagagtccattgtacaagaacctgtctgactggagaatggttcttctcaaccgtgcgtgttgccaaaatagccataggcaacatcaaagggcgattagcgatgctcaactccggtaatgggtggcacggaatggagctattgccataataaggtttcagcagagacacatgaaacgttggatggatgcggctatctgatggtaaggcaagcttatacgccaccgtccctactcgtgctatgattgcaaacggcccaaaataacgtcgacacagcttcgaattcaagcgtttagctactgttgtttgtcggtacggttggagcttgaccaagactaaatcacccactccaaactcaatatctactctctttttgtttacttgctgctgcattctgttctgggctgcttgtaaatgagtctttaagtgttgtaatatttcatccctggataacaagtcctcttctactgcctgtatggtagttgagcctctaacataggttggtattgttggtggagtacgcccataaacagcctgaaatggagtcatcccgatggcggaatgatgacttgtgttataatggtactctgcccaagacaaaaaccgagcccattgtttcgggttgtctgcagaaaaagctcgcaagtattgctccaaatagcggtttgtaacttctgtttgtccatccgattgggggtgataggctgagctcatgtgaagtttagttcccataaactcgaaaagcttctgccaaaaagcgctagtgaatattggatcacggtctgaaactattgttcgtggcactccatgtaacttaatgaccatgttggtaaacacttcagcaactcgagaggctgaataatggttggatagcgctccaaagtgggcatattttgttaatctgtcaacaacaaccaagatatttgtggcgccattcgaattgggtagtcccactatgaagtcaagagctacatcttcccaaacacgctccgggatcggcaatggctgtaataaaccataaggtgctgtggtcgaatacttgaccgtctgacaaatagcacacgaacgaacaaattccttcacatccttacgcatcccatgccaaaaaaaatttgcccccaatctcagaaaagtacgttcaaccccagcatggcctcctacccgagatgagtggaactcagctagtaattgggattttagattcgagaacttactaatcatcagcttgtggcggtagtacagtaagtcatcattcaccgaatatagcaaagagtccagttcgccttgtttaaattggtcgtgcaacactcgtaagtcggggcaagttgtgttctccagtttgagctcatccaagaaatcaaaagaccctgtactgattgcaagatagagagtagattgttggtcctcagactttcgcgaaagggcatccgccgctgtattaatttttcctgccttatactcgatagagaattgataccccaagagtttgtgtaaaaatttctgttgttccggagtttgtatgacctgagttagcaactcctttagactccggtgatctgtccgaataataaagtggcggcccagcaaatattgacgccatttatttactgcttcaacaatggctctcatctccttggagtaagttgagactgtagcaaattttggacccattttcttgctgaaaaacgctaaaggatgaccctcctgcattaaaacacctccaatacccacattagacgcatcagtttctacaataaacgtctttgtaaaatcgggtaaatgtagaaccggagtggtagtcatggctgtctttaattgattaaaagcttcggcagcctcttgagtccaatgaaacccgtccttctttaataaagctgtgagaggtgctgctattgtggcatatcgagctacaaatcgacgataataacctgttaatccgaggaatccgcgaagttgtttagtggtgcgagggactggccaatccaccattgccgccgttttactaggatctgcttgcactccttggccagagacaatatggctcaagtattcgaccgtgtcctggaagaattgacacttactgagcttagcaaagaacccattactccgtaaaatgttcaagaccgacttgaggtgatccacatgttcctcctgcgtacggctgtaaattaaaatatcatcaaagaaaaccgttacaaatcggcgtaagaaaggtcgaaaaatatggttcatggcagcttgaaaggttgatggtgcattggtcaacccgaagggcatgaccacaaattcatagtggccctcatgagtgcgaaaagccgttttatgaatgtccttgtgatccatacgaatttgatgataacctgcacggagatccaatttggagaagacccgagcatgccccaattcatccaagagttcatcgatcgttgggattggaaaacggtctttgattgtaatgccattgagtgcgcgataatcaacacagaatctccatgtgccatccttcttcttaactagcaaaaccggtgatgaatatggactcgtactagctcgaataaacccgcattctttcatctcttgtactaatttctcaatgatgtccttctgaaagtaaggatatcgatatgggcgcacattgatgggtattgatcctggctgtaaaaaaattctgtgatccatacttctgtggggtgggagttgttttggttcagcgaaaacatcctgaaagtcagccaatactttttgtccttccgtgggtaatgttgctgagcttaggttcgattgtgtgaggtcttcaaccacttccgcctttgctgcactaactcgataacaatcccgaacatcaccttcacgaaccatagtgtgcagttgtgaaaaggaaagttgatgggctgctacatctttcaagcctgctagtttcaccacacttcccgcccctgaaaattccatagtcaactccttatgatcatgtacacaaggacccaaagtttgtaaccattgcatccccaagacaatatctaagccacaaattggtagaatatacaagtccaccacaaacttatgcccctgcagtaataactccactcctcgacacagctttgaacacagaaggaagtgcccactacccatatacactttgaaccttttagtttcctcccaaggcaattttaattgagtagctaatgattcttgaatgaaattattattactcccagtatcaatgagtacctctactgcggctgctccgtgatgtgccataatgcgaaatattcttggattcagcgggtttgatagtgaattcaggctcacctcttcctctgtaacatcctccaagtcgctgcctacagtttctgaaagtggctctgtctcctcatcctccgatgcacacaaaatgagcatacggttcttgcacttgtgcccataaacgaacttctcctcgcaagtgaaacacagtcccttatctcggcgttcttttagttctgctggtgtgagcttcttaatggctagaggtggcttattgttagtctgattctgcataggacctcccgacaacacactagtgactccccctttgtaaggcatcaatgaagtagactggcccggagttgacgatgatgctggtttgctgtaccaagaagaacgttgtgtctccatccgttttcgacccgccaagtcttcgtttcgatcctcaaacagttgtgccttcgccattgcatcgcccaaatccactggtttcgacaacagcaactcccttcgaatgtccattttcagaccccaaacaaagaagttcatgaacattgcctccgaaactcctgtaattcttggcatcaactcctcaaattcagctctgtaatccgcaacacgcccagattgagttagcttggaaatcctacccaacggatcatcatagattgaagttccaaatcgttgctgaagtgccttaagaaaagacaaccaatccgtaatcgacccacccttttccatccattgaaaccaagccgatggagcgccatcaaggtgaaacgcaaccattgccaatctcaaatcatcatctaccttgtgcaggtcaaagaacttattaattttatagatccaatcgtccacattcgacccatcgaaccgcggcaccttcactcgcaaggttttcagcaaagcattcaattccctgtcatccgcgatcgcatccgttctcctgtgttcggatcgactactctctcggtctgcacttgatcgaccatccgactttcccggactgtgtgagctcatgtgagccaatcgttcttccgtcttcagcgtgtgttgttccaacatggctgaaaacttctgaagttggtcctccgaatgttgtttgaaattgagttccatcgcttgcaaaagcccagcaatctcttcgttcttcatggtgagt

SEQ ID NO: 741 - DNA, 2103 bp, Cannabis sativa
gtttgagaaggtgagtgaggactatcagattcaaatacagaagcatcttccatttcttcttcactatcatcttgttgagaaaaattgactaaaattctgtgaactgtatcaacatcaaatagagtatcccctgcgtgtttaaaagatgggattaggagatcatcaagtgtagcaatatctaactgtgatccaatccttctctccaaatcaagcctgcaagcaatggtacaatcaagcatgacagcactacgcaaaagcccgaaaaggaaagttatcggtacagctagtttttcgaccggtaagaggccaacaattgtctcaaccacaagcttttcttgcccatttgagcctgaaacaagatcaactttagtttggctagaagggttccaaaggcttgattttttagtcaactctttctgagcataattcactagtgaaacacctatgctctcaggcctaaccccacgacacttcatggctgttatgactctttgaaacaaatctattctcaaaacagaaagatcttcaatccaccaatcaccttcacatttagtttgtctgttcatatgaagcctccctgagctgctgtactcaagtctagagaagctagaagcgatttgctcggcgcaagctttcgaggctatggcgtctatacaacgacatactatctttaattcatctgctaaaggaagcaaactctcacattgttgaagaacttcaacacacatttcaagattcttgcatactatgctgtctagatattcttcagctcttgagcctagattgtctttagcatactcttcagtcatttcgaggtaatcagaaacacaacagagctgagcaacatttgtggacatgatttcaaagttgatgccataacaaaacttggctgctaactcaaatgtttcagctcctcctggtaaattaagaagctcaacctttgatatgtctgtgtctctgtgttcagctactagttttcgaattcgaccacttcgggatacaagagggaacttcattcatcatcaaacaaaaaccataatcacatcagacacagagcttgataaaagggttgaattaagatagctcaaagctcaaattaaagcagagaagaaaaagttagttaccttgtgtaatgaaaatgttattccattaacttctaatgtaatatcacttggaacatcacggaagatcctaagaacaaacaacaattaaaaatcaatcaaatgtatgaatatgaaagtgtacataaaaacacttgggaaagaaagaaagactcaacaacaaaccattcactacaacgatgccttgagctcttggccagagagagttgttgttgttgcttttccatggatgaaagagtgtagagaagaaacccaatagagaaaacccaagaatggaaaggagaaaagagaaaggaagattggtttgagtgatgaatattgaagtggaagagagagaaagagaaagagacccagttgaagaaattgttgttgaacttctttggccattgtcatcaaacagatggtgttcattgttgaaagcatagattgcaattagccaaatcaatgggccactttggtgggtcatacccttacttcttttctaatatatattgcaaatattgtaataatgtcattatcaaagttcaaatctttcaaaatctcttgactattcttcttcctactaattaataattgatcttatgttaaaacaaaccaaatcaatgaactcaacttttctttgaagggaagaccttttactctaattttttgtttctctttccaaaaaataagccagaaagaaaggaagtggtgctcttctaactttgtttggagaaaaagtcaaaaaaccaatcaagaacatagccaaaaagtgagaacaaaagtagttactttagtttgacaactttgacacttttaatttttttttttaccttttccaccgtataacggtaaagagaagcagagtatttgagtatctaaatttgtctttctttcggttcattatataactgcgccggtatattacgccgcatgcgtgcgtagcataattgaagcgttttaattttggtaattttgggagaatttttttaatttaattttt

SEQ ID NO: 742 - DNA, 1851 bp, Cannabis sativa
aaccatgtacggcattattaatgttagtaccattgtatataaattatgcttatgtttatataatagaactcccacattaacaaattgtaaaaatatatataatgatataaactcttttcatttgtcaatacattttacatggcaaacctcatacatttcactatacaccttatcttatatctaatatgtaaggaataaattatctcaaaaaaaaaaatatgtaaggataaaaatgcatttctggccatacttttaaactaagacgtaattatatatatacattggctttaggagagttaggaggaggatgaggagtgagtgaatccgagccgagagagagagagagagagaggttaattccatggcaaggaaagaaaggcacatgggtgcaacaaaacagctttatgacgtgtcaaaaccccatttaactaaaatgggaccactcactacctctatccatccacgtgtacggttttggttgatgctgacagtttattgaccagtccaccaatcagggctctctcactctcttttctaaaataaagtctaaaaacatttagagtatagtcatcacactcagacttacactcaaccaatataaatatcccatatatatacataagatcaacagtagtagtttctgtagtagataaaagataaaaaaaagcatagtaacggtagccgccataagttttgggcacgtaattcatttttggtttagctccacagccttggataacctcttgctttcgtcggttacacttgttttggtaacaataatattatatgtattattattaataataagctctccaaacaaatgtgaataatatttggataatattaatgtgtacatatacatgcacattacctaaaatagtctctgcaattcactctttcttaagttgaaagactttgccaagtgtttttttgggtaattcaatgaatcaaatttactcatcaatacattattactgcttctctgaaaaataaattactttgcttttggatttgggtatgtagccaatttggacttttgaataattaattaattagtaatactatatatatatatatatagctagggtagtcatcatgagaatatataagcaatgtactatatctatctatatatagttgttgaatgtgatgataatgtttttatgcagctggtccataaaaatgttaacatataacataaatatttaggatagctcacagggcgacacgtgtctgcatttccaataacggcttctagaccctattacaaatatatagagagagaaagaagaaagatgtgacctttgagaaagttactcatgtctaagatgaggttttggcagagggatatgtgaatgtgatagtgtgagagatggggttgtcagatttttgtgtgatagataaaattgtattggctaatgcttcagtactttgagtcaattattattatttgttatttatttttagcttcaaaaatataaatatatatatatatatatagttgtagagcattattattagttattgtgttcgtgttgttgtggtactagtactagtaaaagtaatggttagtactgagattgtggattattatttccattggtggggtttgaaattgagacatttttagttttcgttcttgtgaaatatcattgtatagagacgtgacgtctttggactttcttttatatcctagctaagagattaatattattaataataaaaattcattgatcatttctttacttctaattattcaacttattggtttatatgtgaacacgtgatctagtctaaattctagttaaggcttattagattaaaacaatatatatatcctaattcccacat

SEQ ID NO: 743 - DNA, 2330 bp, Cannabis sativa
taactttcataaaaataaattcaacattacatatatgtctatattaacatgcttgactttttttccattttttttttaagatcatgacctagatgaattttcggtctacaaattttaggcactttctcaatagtttactagatttacttattttgtttttattattattatgagatttgtatttacctttatataaatttagaaaggaaagaagaaagaacataacataacataacatattattaatgagaaaagtatcttgagaatttatttttttgtgacagagtaaaaggaaaagggtaagaagaaaaaacaaaaaaacgaaagaaccgtgagagagaataaagggagatgtgtatatatagatatatagccctagccttatagttatatagctatatagcttaccttatctttcaaaggattggaaactgaaaacttggtttcacttccaataatttcatatctggtctcttcattgtaagcaaatgaaaatgagcctttggggattagataatgacatttcatatttcccaacccaaccacatcaaaatagaaactctcctttttttggtacaaatttcacttccaagtttccaaattaaactaacttacacatgcgtagagtgtatacacatctcactatattagttaaccaaattatttaagtataattagagtcccatacactattaattatttatatatatattattgacctttgtctcctcctttgtctttggagtacctagttgcatttttaattttaaatatttatttaataatttagcaaatttgtgcacaaaggaatcttttagtaacaaagttgaaaaagaaaaagaaaaattatatatattgattgcttttcactacttgttccagctcttaaagttaaaccaaagctataggaaatgccaaaaagagaatttgaaaaaatgttctttattttcaactataaattaagctttttccatgcctagctaagattttttttctttaatgtatttaattaattatatatatactagcatgcatatgattataatcacttaattaattatttattaatgcatgcttttagaggctggaaaaattttaataaggtttgcaaaaagtgtataggttgagaattttgaatttttttttgaccccttttcaataaatattaaaaatatatatatacaaaaaaacaaaaaacaatttagctggaatgatgaactttgcatgtgaggatggaatctcaagcagaacaagttttggaaaggtttgtgtagagagtatagtagtagtagtactaacccaataaatacatataacattaatcatatatattatatacatattatttttttttttttgaaagaaaaatttgaatttatttatgtattaatgttaatgccaaaaaaacattaatatgctatagttataaacagtgttggcacaacactcgacatgttactttcaaatatatgaaacaaaccaccataagggcattgcatgtgctaaataatatatatttatatataaatatttcatataggctactattacattgggttgttgttatgataaaaaaaaaacactatttttcacattattatatctttatttattatgttcaatatcctataatgtgtcctacttcatgacctaacaccactttcaccaacaaacttgttctcacaaccaatcgaatatatagctagttttcagtgtagtagatataatttatatatatatatatatatatatatatcatcaaaagggcatgtatttgtatggttataataattaaaaacttgaaatttttatttaataaagttttggaaaagatataagccagttttaattaattaacttctgtggttttgtgtattacatgaccagaaaagaccattcacggattactaaattgtctcctccacaaaaatgaaaagttaaatatttatttagggtttatatagaacaaaacaatagagaataataatgtcaacactttttgggggagaaaaaaataaaatgcttctatttataaactattcaatacagaacaaatatttcaaataaataaatatatattttgaagaaaattttgaataataagaagaagaggtataatttgttgaatcccacaagaacaatcatttcccaaattatttatatattttgcatttgttttgaatatgattattcagattattattattggtgtgtagttactagttagtagtttatactttgttagtggttacccaatataggaaaaataatagaatccaaagattatgtgacagaaagttaccaagacctaggaagccaccatttttttt

SEQ ID NO: 744 - DNA, 2028 bp, Cannabis sativa
tttttttttttttttttgtttagatgcaaaatattgttaaaaaattatataataataaaagttataatatatatatattagtaattaactcattaattataaaaacaaacaaacacgagtaaaataaagtacgaatttgaagcccaactcctttaagaaaaatagacaaacacgagtaaacacatggtatgcattcgagcacgacacgaaaacactaggctatgctctgctaagcctaccctttaaaaatgttagtatgacaagatatgattcatatttttttatggcacgcacaatagacttatactttaaaaagtatagtgtaatatggactggaccagttagacacacataaatttacaacacttctcatgaccataattttttaaaaaataactgtggaacaaccgtaaaaacttaaaacagtacacaatatttttttaaaaaaacataatatttaaaaaaaaatctactctatagtaaaaaagaaaaagtaaaaaatgttaaaaattgtgtaaaaaccccattttttcatataagaaaaaaaaaagaagaaaaaggtctcctcatgtggtttttcattaaattattatgctatattacatggaccatggcccaaacccagtttggcccaaaccgaaaaaggtacaacgtctatttgcaggagcgtattcgaatgccgccagatccagaattcaaatttattttcctgcttctctctttctctctctctatctttcaaaccctaacttccaaaatccaccccagtgtctcgtttgatttcactcgaaaccagttggatcgaaactcgggcgttcttgtcttctcttctcttctttttgcttctcagattatgcgataagcgtacccgcatcaataaccctctggaaagcttcggtgtgcggtttaataatggcctcacgcaaccagaatcgggctcctcgaagcccctctactgtaagccataacttttgtttttgaagttggttgtttctttccctatttaagagaactgaaagaagttttgggacattagaatttgtggtacttcttggtcattgagtgtaagaaaattaagaaagtgagaaatttggttgcttgatggttttaaatttcgcaatttgttcgtgcattactcgtagaattaagttattggagaatattattgcaatttctttgttcttacatgtaagttttgacactatcccaccgcaattttagatagtaaaaacacatgcctttttgtatgaatagaatgcattttagtaatttctgcatctggttgctacttagagaataactggaacgtgggtatattaatcatgctactaagtcagttcttgagaatttgaaagttttaacttttaatattcatttatttgcgtagaaaaaggaagccgtcgatgaagctccatatgacaagcgcaggagacttgcggcatcaagaatgacaggtgcacagcctggcaatagcaccaggaggctgcccttttcatcagtcaacaatagacaagatgcttctgctgctgcggatgtaaagagtgtcgagggatcagataatgcaagtgttgagttcacaaaagatgaagttgaggccttgctaaatgagaagttgaaatcaagcaagtttgataccaaggtttgtatcttgcttaaagctttcatattggttcactgttttccacctttgaaactccatgcagactgtattatatataaaattttaactttccctgtattgattgagcagaagagattggaacagttgactgatcacaacaagaggctcaaaatatgtatcaaatggttccaacgagctgaggagaacagccttgttgagcaggaaaagcttcgaactgcattggaatgcagtgaaaaaaagtgcaatgatactggtaagattctatgtttggagttgaatccagtattttaattgaaaattgtcaactccggaagatttttttttttgtgaatctgtctattccattctgtacattgctgttttgcctttttcttctataatagatt

SEQ ID NO: 745 - DNA, 3926 bp, Cannabis sativa
tgagcaaatattcaaattacatactatatttgatttaaggtttcatcatcatcatcatactagaaagacttttcaatactccttacccttaacaatagtacttgatcgtgacaactcacatttacatcttttcaatttttaaatctcaataattggaagaaatgcactatcttaattatctcactttcacttgaattgaacctataaaagaccactgcccactttgaaagttgctcagtgccaactccaatgaagaaaagtatgatataaataatatgaatattataatttggttactcaataattgcactcataaataataataatacttgtccattaattcacgtgacctcttttgggtcgagaaagaaacagtggtacaattacgaaacctatttactaaaactaaactaacataagccatgttacttgactaccgatcttgcacttacaatatatcaactatagagaagcaaaaagagcaagaatacaaaatatgatatttaacccaattccaaaaacaaacaaaaaagaaatgactttagtagtcaaaataatcctagcaatttacatgacgttgcaactttcagtattctcatcactgaaaacgtgagtgtagttatcggagaccggatgcgaagcgtaattcactgccggctgcggccgcgcatacatcatcggttggaacatgtcatttcccacgttgcccctttgttgattcatcatcatagccatgtactgttgctgtgttgttgctgctgtaattgttgtagttgctgctgttgattgtatgggtttatgggcccaggcccgggcccatatccaggccccattccttgcccttgataatatccaccgttcatcatggcttgggcgggtagaccttgtactgcaggcataccattaccgttcatcattggaaagctaccacccattgggcccatacccatctgacttctacccccaccattttgacccactgggccggacggacccattcggcccataacacctccacccccgccccggcccatttcacccatttgacccattttcccaccaccgccaccgccagcaccactacctttgccgccttttccaccacctttgccgtgattagcggtggcgaagtcaatatcaaaatcatcaaaatcattcttcattttcttcttctcttgcttccctcccccacctttgccattattgctttttttatcaccaccgccattattgctgcctcccttcttaaaaacacttccctctttagtactacttttcttgccaaaaccaaataaggcacgcaacccaccacttttctttttttctccatttttatcaccacttggttttgatttccctcctttgctgttcccactcccaccttttccatttcccccactttttttccctccattgccgtttttcccttcatgatttccattccctttacccttcatcatctcaattgggaaatcaacagtcccacctttcttaaccgaaccactactttttttgtcgttcatggcatgaacatcaatcatccctttgggcccataaggaggcccattaacgttacccatcatcggcaccatcttcccataaggcccttgtggcccattaccatttacatgcatcaccttgttcggcatcaccatcggcatagctttgttaggcacattattataaccaccatgaggaggcccatgactattgccatgtccatggcctaacccctcatcatcatcgtcatcatagtcttcatcatcatcatactcgtcatcatcgtcaaactcatcatcaaaatcttcatcgtcaaactcatgatcactcatgtcaaactcatcatgaccgttcatattgaacttgacagatttctggtccttgggcgggaacttcatatccttagcagaccctttaaccatctgctgtaaatgctgtaactgctgctgctgaagctgcgcgtgttgtccgccccccttaagctgctctttcccaccaccagcaccgccgcctccgcctttctgagacttgctcctgtctaattttcccactttgccaccgtcaagctgcaagttcttgaactggttttggagattttggaattggttttggttttgagctggacccttttgaaatccccacaactctgcatgctttccatttttttcaagcttcttgatgagtgtgtccgggtcagcagagcctgaaacggtcacctttccttgatctgaatctatggccacactaaacacacctgtaggcaaatacagcaaaacactgtaattagtcaaagtgtgacaagtatttcaaatctcgagtaataaaataagctttcgtagtcgaaaaaagaaagaaaacaaaaacttaccatcaattttctgtaacagtttcttcactttctgcttacacccatcacagtgaatattaactctgagaacacaagtctgcaagaagataaaaatttaaaatattaattaaatttctacacaaacataagcaatgagaaaaagggtactcataactctggtttttataacgttataattgaaaataaacagtaacaaggtgtgtacctgaaccttcatgaactcttgtttactcatctttttttgagagagaaagataaagctcagtaagagaggactgaaccagggagcaaagaataaaggaggaaaataaagagagaagaggtttaagtgagatgtagagttgaaagtcggttgttgaacattaaacgctttaagcttttcttttaaatatatattttcttttccatttatttatttctcttgtctgtgtttcgaattgagggttgggttgggttttaatgttttaggatattattatttattattataataatgaaacaagaagagagagaagaagcggttagtctgtatgaacagctgggagtatagatgtatagatagatataataatctttggttggcctgggacaagcctttatatatttgaattggctttaaagtttcaaagacaaaggctctgtcattttgagttaatagtgtttgtttagtataattataatttatacttcttttctgtcaattatgtttgtagtgatgaattgattaatcatattaggtgtatgaaaagatcactgactatttatgggccctacatccagaaaacatgggctggaataatgggcttgctatctgatccaattccaagctctgttcacttggcccagcttggtttgaccagaacggtcactgtgtaccgtcgtgtgaggctagtacataaaatatctgcctacggaattttgatacatatcttacaaaaatactggaattctgactcacagtaaaatagaaaaaaattgagagatttgagtatgtggtgtaaaacaatttacaaaataatacataatttataaattttacacttaagattagatttatttcatatttttatagattttttcatatttatatttttaccgatttttacttcctcttttcagataaaaatattatttttatattacttctcgtatcaacaaaatcaaaacaatgttattataaaataataaaaaataacacttcctattttcttaaaaaaatcaagcaataatgtcaaaataataacttttcaaaaataataaaaaacaccaccctatttttttcgtaaaaaaatcttagaaatgtaaataataataataaatctgtaaaaatataaaagaatactttattataaaataatatacattactactttatgaattaatatgaaataattcttacaaaataatagtttattatttttatattattttattatttttaaaattactttttcagttcaaattaaataacaaaatttctattcttaattttactttttttttttggaaatcaactattcttaaattataatcaaaataattttcaataaatatatat

SEQ ID NO: 746 - DNA, 3471 bp, Cannabis sativa
agcagcttctggcatcaaaatttctttgatcacaggtactttatcactattttgttggccaacatataatttcaatgaatagtcgtttctggggtgtcgttgaattttattaccagattgttttagtttgaagatgttatgctatatatatttggaaatgaaaaatttagtattaaacggcttgcatcaactataaaaatattataattaagtatgatattgttaggctcccacatggcaaagtatgatgttggttagtagtatataacttctttgacaccctcttcttttaggctagcttttgagagtgagtttctacccaaataattatcagttatccttgtaagcaatagtggaagttgtgatgaatacggttagtcacttcaaatccattttcttggatgtttatgtgtatattgtcacttttttcctaacttgactaacacaaaagaatattacaattacaatggtaccatatgattttcatctctttttctggtttccctaaattaatttgaagcatccaaatgatggaaactatgatgaaacttattattcattttactctttttcaaaaatcaccttcatgaagtttcttttccaatcaacttataacgtgttgattgcaaacttctggttgtcgtttattcaaggcaaagataatattttgcaattaccatgtacatataatgttctttgattgtacatctggcatatggtgcacccagtgtgcattgtggcgacacacaatacgtcgctggtgcatgctgtatgtgaccgtggtcacacatagcatgcaactggtgtacactctgaggagtttggctgcactcatgcatctaatgcttgcggggtgccatgtttggtagcttacactgtgttccccgtacacaagccatgtgtggccaagtgcatactgagtagcatgtgcagcatttgtgtagagcatgctgagtgcagcaacctcttcaatacaggtgcatttgatgtgcaaccaaccacatccacttctggggtgtcgagtactgttgcgtgtgtgtggcatgcaactgctttcaagagtagcgtgaagctactgtatattttgaaagctcattataacatagagatcgacgacaagtcatggaaagcattatctttaaggaatacaatttggtttctcaactgtttttagaaagctaatacatataaatgctgcaagattctccttaaaaaagaatgactttaatgtttacttttaaaattgtgccatgatgagtatccaatgatgttaaaagttgtagaattagaaagtttgttgtgtacagcatgtggatctaaaaccctttagaattttccctgcaaaaccgaaaatgtttaaatggaaggaacggaagtcttgtctccttatgggtctagctatcatcatattatatatgcatcttttattccttatttctgcaaattcaacactaaagtttagtttcatgcactgaaaagcaatcacaagagttgtgcccactccgtcagctaactatttcatagttcgtccattatttcttcatttcttgcagtcataaaagatacagaacgcaaccccttaacgtagtttttttatttctgttttctttttattagtgcaatcacatgttaattcatattggctttctgcagttggaggttggtttgctacactttgtgttgcaggatttacagctatagctgtaagaaaactggtaaaaacagaaatggttgatgctgagcccatggcaaaaccctctcctttttcttctattgaaatctggtcttggagtgggattctgctcatatcatttgtcagtgcattactataccctacagcgctgggcacaggtgctcgaacatgccttccattccttcttgcatccactgttctaggctacattgttggttcagggtaaaatttcagtttttacttttacatcacaagtaataatttcatcaaagttttcccccttcctacataagacaagtagttcctttatattccaagtttcatgtgatttagattttcacatttttctttccttttaacgttataaattatatttccaggttgccatcaggtgtgaagaaagtgttccatccaattatatgttgtgcactatccgcagatctcgcagcattggcttttgggtacttttctcggtctggacttgatcctgttctaggtacagtaaaaccttttagtttttgctatttactttctctggttgcagatccagatgtagtgctacttacatacaaacaaacaaattatgattatagttcgtctggtggtgctatttacatgactttattagcctttttagtacttcattttactttgtggctactgccttattatacttttcttcgctttctctgtccccttcctgagggtcatgttttttttcctctctttccttttacggcaacatgtccatttatgttggcattctaatagaactacacataaggaagaacgagaaacaccaccattgagccaaaagatgtatgtaagagtaaaatttcacaattataattgtctcacttgacgtactacgatgatgagcacatagatgtggagtgcatgaaaaaatgtcacaatattattagaaaacaggactatagaaaactgtgataggatgggctaatttttttttaggatatttgaataacaaaggatttacgtgatgcgaaaacttagctatttaatgctctctcttttcatgtaagagcaccacatacacagacataaagcaagggtgagatccctcgcctccatagcatgcaaaagtcatatgtttagttttaattcttattacctgttacatatccaagtacatgattccttacctgatacacgcaggcttttacctaacaaaggtttcatctgatcctggagctggggatgtactgatgggatttttgggttctgtaattctctcgtttgctttctcaatgtttaaacaaagaaaggtatttttccatttctcatattggatgttacaagctccccatttcaattttattttattttcttgttggtatctaacgcatgcacagaccactctatactggtttcgaagaccatctcctagcaagcagtgtcttaaatcatgatcaatacaaaaggattactccatcctttcatgcagtttaactaggataattattttcgtcatatagaagccaagtagtacaacatgcatattatgcaatagtaattgagtttctatttcctttttttttcacatggaaatgcaattatcattttccctggaatgtagctgttttgggttttttacttggtgaaattccatttgaaatgcttctttgagcagaagtagtttgatttctcttagctgtattgaaaaacctaaccattcctttggttttgtggtctactaaaacctctaaagactatcgtggaaaaattactacagtgcagatatacccaaatatttattt

SEQ ID NO: 747 - DNA, 7454 bp, Cannabis sativa
  modified_base (4336)..(4339): a, c, t, g, unknown or other
tgtatacacacttagagtggatggtgagctcgttaggatgaataatatttcatcttttctttacgatgtattatacgtttatttttgcaataaaagtttgttcattattcaatttggatcatcacttttgagagatttataattgtatatttaatgagcattatgtgttcaatgttcaaattatatggtgcaacattggccaaccaaataacttgagtattcataagtacattcttagctaatttataagccatagtgttaacgggagaaataccgaaaatgataaataatgagtaactcatgatatcagttaaaagagaacttcactcagaaaatagactatgcccttattaccattgaatgaaatctttactttttattaataaataaatggtgaagcattgtttgttttaataagtttataaaataagttcatatagtaagaaatttttggaaaacaaaacatgtccagtaattggtttttgtttgggcctgtgaatttggaatcaggtttgggtttgggatttcttttgaatatgggttgggttggaagcttactaaggtaggtattagggacctcttgttgggtttgaatttgatggttaccaatgaaggttttgtgttattatgattacaatcttcttcagttgttcacttagtttaaatttggtctagttgcaaatttagtattaatacatttactaaacacaggggctctttttttgctattaaagttattaatagttaaaaccactcatatttagtgatgaccaatagtcctaggttactaagttacgcaacttatcatattgcccatattttcaattcaatataatcccaactacatgatttagaagctattattactactatttttatataaaaaaatggataaatagaaattccattcaatagttacaaggatatagtccattatagattctagcttcgaaaataactgtaatacatgtgtgtcgtactagctccatttatatttttcgtacttttttaaaatataggtcgtgttatgtcgggctataaaaaaaagaatgtgtcctgttatgccataaaaaatatagatcgtgttgtgtcgtgccatataataaaaaatatggattatgctgtgtcgtacaacaatttaattgagcccgatacgacctgcaagtctgataattttgtaccgtgctcagatttatgcagtgttttatgtgggccaacccatttttattaaatagatcaacctattttttttatacgagcttaaattcatactctatattttcacatttttaatataattgatgaactaaatattaaaatatatatttattttataattttagttattttatatctttttttaataatagttacatataattatttgtaaaataattataattattataattctaatactactattattttaattgataaataaatgttattattatcaaattactggacactttcgaaataatctattcgtgtttatgtctcgtgcctaagctcatattttttcgtgttgtgtcgtgtcgtgcctaaatctatatttttttgagtgtaatcgtgcttatgcatctcgtgctcgtgtcaatttagtgttgtgtcaaaaaatccgacctatatttagagattctaaaaacaaacatagacaagtaaaaattaaacttaaccgtactatttttttttttaccttttacttttactcattagttttagacaaacacactaaccaaaatatcctagtgaataatgattgagatacatttcaatcacacacaataatgtatcactaatccaaaccataaatgatggatcacacaaaaatatttgacttcttaagattgatgacacatcataatgtttgatttgagtatgtatttttttttattatgtctagcattgctctatgctagtaagttgttttttttcttctttaaaatgaaatttaaattataagtgatgtatcttgtttggttattaagagatactattttcacatttagctactataaggtatggagtgagtgactatactatcaccttttgttatattatttttttaggtcttgtaatatgatgtgttacctaacaagttaccaatgattttcttaaacttattcataggtcctaatctcacaacccaccatagtgaattatcaacattacttatggtaacttgtcatgtgattcgaaattggttatttttcgatagataactaacataatctaaggttggcctcttaaaacaaccaataccaactaggatgttgtcccattcgaagaatgttctttttacattaataacaacaataataatattctattaaaaaaacaacaataataataatgtctatgtagtttaattgagatgtgaaaattatagtcctatatagtaaacccattaaagtgagttacaatttctatgttttggcatagaagaagattttttggtttttttttttttttcataatcatatacataattttttaagattatttataaattttaaaataaatttaaataatttacagtgtcaaaaataaaatttaactatttaacatacgtagataaaaaaacagttacacggtacaataaatatttaataatttacaaataattttaaataattatatcatatattattcaaaaaaaaatccaaaatactgaaataaataaaaaagtgtatcaaaataatctttttacagagtaaactataaaattatccaaaattataaatatatattatgctatattctaaaagaatcaatgaaaatgaaaattaccatggtacttaccgttggttgttcttattattaaagttaaaagtaaaataaaagtatcaatattagagaagaaaacagaatccccaaactctagaagcttcctttatttatttatatttatgatagtatatcaaatttatatgtaacaaataaaaaggagtttaccttaaaaaataataataaataaataaataaaagggattttttattttttgaattaaagtactcaaattaatcacattttcctaaaagcatattcaattaaacatgttaatataatattctttattttttagtttatatttggctaaatatattaaatagtattatatatatatatatataaggatgtaaatttccaacttgaattcaaagattaaaaaaaaagaattaagtacaaaacaaaaccaaaccaactaattttgtttctttatatgtctttaaaggtataacagataatttgcatcatctttgagtatataatttgtcttttaatgccaaaagaaatttagaggaaacagctaataatgttatgttcaagtaggaaaaaaaattaagaaaaaagaaaaaagtagtaaactgttagtaaaaacttcttatataaagttgtcggggccacaaatgagtaggattatatatagcaataaagaaatttaaattttgatatttaattaaaaaaagatattaagaaatattttttttacactatattaaaaatatatttatataaaaatacttaagtaaaatttatttttttttatatattttatatttgtcgaagaatattttttttcaacaatttcaacctatataatataaaaataaatattttttttaattaaataaaaaattaaggataaaaatttatttttttctcataatacatattcatgtgtaatccttcttaatagtacaccctttttatatgtaataactataaatattaatttcgaaaatattaagctgttgatcttatgatgattgataaaaaagaaaattaaatttttatgcacttttatatttataatagtattaatatttttaaaattatattttttttagtaaaatatgaatgagtaatacctattacaaattgtgacatatatattagcacaaagttttgattgatatactagtactactctagcaaaatcttaggagaatagtttctattttggtaagaatatgatcatttataattaaaacttatttaattttcctaagccagctacaccataaagcaaattaggctcaattattattattatcatttaagaataagactttagttctaagattcttcttaaagatattgaggtcagatgaaaaatgaaaaaaaaaaaaaaaatcaaagattctaataataactttttctttcataatatttctaaaactaaccttctatttaataaagaaaaataataacaattaaaaatctatacttttaatcaacttataaagtaaggagtccaaaatttacaattttactaaatcttaatatttttcaaggtcacatccttatattataattattattattatnnnnattattattattattatttatactagattttatttctatttttatttatattctcatttcacttacttttcattaatttcaactttttttttggaacaaattttcaactaatttgttgaaggcaaattatatttttttaattattattttattaatttttgagtctttgactaggtaatctagcttaatgaagatcaacatgctcctccactcaataaaaatctaacttatgaaccaagatttttcctttagtactttgtgttttagtattcttaaacaattatatgctatgcagttttcctcataaatatttccaatacaaacatgaataagacttacactaccctaatatccaagtatgtgctccccactaagcatgcccaaatgttttattttaatactaaaaaacattgtacattatataattgagttggtaagaagaggggggtccaatcccatactttctaatacttcatgtactcacaattctaacaaagaatcattatgtgtaatggtccatgattggtttgaaaataaggctttatgatagtaatgagggggtgacatgcagggaataatttcttcttgtatataattaatttaaacttaacaaagttttgtgttgcttttgattatataaaaacaactaattgattaattttggaagacaagaatgattacttttgagcttttttagaatgggtctgtcataaagtggccaacatatgggcccattaggcccactcattgcattggtattggaaattagcttgaagcttgtgaggtagccaacctggtactaaccaactaatatttttttttaatgttttattttatttaaaatcagaaaataaataatggaattctttgaaatccttcacacttttgcttttttttttttttttgtcgaatacccaatttctttgattgaatcttggaatgcttgtttgaatcagataaagatattggatttatttttttaatgtaaaaggaaaacattggtacttttttttagggagataatgactgattatgtggggaacaagcttcttactaatcaaaatagaagatactgattattgccaattttttttaataaaaaaagggtctaaattaattctgattctgtcaattttttattttattttttcaaaatttccatcttcatttatacaaaagacagatcctaggaagttcactttgaaagtattaactaaaaaccatatagtatatacatatgattacagttagtgataattaaagtatacctattgaattgtttattggaaaattcaatagaacattatttttttacttgtcgatatgaatgtttttattttgggtaaaaatgtatagttcaaaatgttataacacataatttacttattctttaaaaaaatttaaaatactttattttttttaaaaaaaagaacagagtttattcatttaattatgcccacacacgtattttttttcatatgcatgtaattcattattttaagctttatttgtgatatagatctagatcattatatatgaaaaatttaattataatgtcttcaaaattaattagtatggacaaaagtgagaccttatatttttttttttattataaatgtacattaatatttatttacatttcctgtatgtaatttttttcccattctaccgtgctataattcaactttgaagaaaaacaagaattttttcaaaagataaacagtggggaattctagcattaatttaataataatgatattgtctttttctgatttcattaaattaagggttttaaaatgtgtcctatttgataccatttattttgtacattctatatcaattatttgttgaaaaatttgtagataaaacccacttcccactttaatatacaatgtaataattattaagatgggaattttttttttttgccagctccattgatgcaatacaatgcttaataagataagacatagatgagttatttgatggaccaacctcaaatctttaatatttatatatatgtatggcagagaattgtggaccaactaataataattgaaccataaaaaaaaaaaaaaagagaagaatagaaaggaagtgtattaagttcaactcaatttggtgcaccaatttagaatgattggcacttggcccaacttaaggttcaaaaattgctatcacaatattggcctactctagggacagttaggcttctaattaatgctatcttctaatgttactttcataacatttactaatgtagaagtgtttaagtttgcatgttttccatattattatcatcattattattagtcaattatattcaactacccatttttatatatatgtaatctctatctttacataatcttacttaatttctaagataggttttgaatttcattaattggttaaaatggagccaaatttaattttatacatatctttaaaactcaaaaatggttgtgaatttcttgaaaaaattattaggtaacatggaaattaggtaaatagatacataatgtaataaatctccttcaaaatgttattagttttggtctaatcactaatggtggatggagatgaaaattgagatgagtcttgagactccaatgtgtgtttttggaataattttgagatttagcatatttgttcaaccaagtagtcatacaataattatataattagagataattgatcttagttcttaattattaattacattatataattataaaatattattattttttaaataattaatattattttcttatgtaactattaatttttcccttaaacataaacataaaaaataaaaattcacatgtaattcctatttaacatccacacatatttaatattttaaaataaaatataattattaaaatgtgtgagtagtaattaaaaactcagatttcttggtattgatattctttaaaccaagagaaaatatatcataacaaattgaaatgaaaaactaaagctaagaaaatattgttacttctctaccatgcaagaggaatattgttactaaagtcaaaactttcattatgtcattcccattctttttcaaaaatctacaattttatttgattgatattattattattat

SEQ ID NO: 748 - DNA, 2308 bp, Cannabis sativa
agagagagagagagagattgttatagtctttttgttaaaaatgacattttgatgatggttaattatgttctaatgagcgtatactaagtactaactaccaagtaagaatcataactctttcaaaaataaataaacaaataaataatcataaagtatcaagtttccaatgcatatccttacatatccaatgcacccacacatgcccttcctaaaaatttccttacctatttgggaaactctcaacttgtggaaaaagaaaaagaagatgagctaacataagcatatatatatataatatctaatacacaaatgttgttgtttctaacactcaaatctttgctactattataatattttaatttgattatgtattagacaagaaatggatcgaatacaaatggggttctacttctcatgttgcttccactttcctgctgcatacatacacgtgtatacattttctgaataaatacaaaatattaacaaatagagttttgaccaccaattaccttacaagtaacataagttaattgatgttgtgaatgctatttctgttagttatttctgtttgtggatcattcccccattgcttctgcttatcattttcagatagtgatctctccactttcctcctcttattggagttgtctgatttctcatcaatcaatgatataaatcgcctaagccgccctgatttcatatcacttgaaccacctgtaacagaatctggtgcagaaccgcgccatagtttgttcataatttggaagaagtatatgagaagagcaaggaagcaagcaacaccacatataagaaagaggccccagaaactcttgaggtgaagctgatcagattcaagttcagcactttccatttggcacgcgcttctcatcaaccacttgtcatggattctctgaagatccccgttttcagatagctggagaatcgcggttgacatgtcaatcgctagtggagagtctcttggaaatgcctgtcacaatgagaggaaaaaagagatgtcatgaattcagataaaaggctaaaatcttagctcaaatagtcctcccacaaggtctgagtttcaagtccctttgggtaccaacattagcaattaatatagttttctggtccctaaatatttagattaaaaaaaaataaaatgttttaacagaatgatgactgtaaatcagatcctcacgaaaccccagccgcttttagtgaactcctggccaacaactctaaatttgcattgtgttgagaggaagagttcaatgtaagcgcgttcatcaaccacagctgccacgccgcctttcttaggaccgtcctgaagtgctttagcataggcttccggtgaaccaaggggaacaagcctagacttaggtatgtttagctcctcactaaggtaatgttcagcaaaagatcccacttgatacccaatgggctcatcagtggatttcaagctttcaatccctttaatgggagaagatagttgctgcactgtaaggattgatgtcaaactcgcagtgtaactcgagtttatgatcaaaaccacaaagagccatatgatcagcacaaaacggccaagagtgctcacggtgttctctcctgcaagaaggatagcgcaaaacgaactcaatcagatcaacttttgcttgagcaattacctcattttatgaaactttactgtagacagacatgaacacttactgtgagcaaaaaacatagttgagaggctaaacctgttgagattcacaaacaagagatttatcagaaatgaactaatcattaagaaagttatcagcaacgaactaattgctaagaaatcttaccatttgattctatagcaagctctagactcaaatggtaagattttgcatgaccatacaaaacataagctctatcaatcacatcagcatgtacaagagtaaatgagttatataaaatgtttcatacaaattaggtgtgtctaaatacgtattattcaacttaagaacacaccagagaatggttataagctgccttttaggagggccccggaactcatcgtttattctatgttccaaaatccacacaactattcccacaacaatgaagaaggtggcagtgacagcccacataagtccattaaatggtcgcaggaatgcccacgcaccagtattcagctttttaaatggagctaccacaacaaggccagatgcaacatatggctgagtgaaatctactatccttgtcctgtttgtgacaattgcaatatcaccaacagcagcatcaaagaactgataatcaaaggttaacaaaaaaaaaaaaaaaa

SEQ ID NO: 749 - DNA, 4861 bp, Cannabis sativa
tagccgctgcattcgttatgatcttctcttggtttgcattggatatgttggttttcacttcatgtttccccttggacgcaatcttgcgcccctttattgtattggatatagtggtcttttcagatggcaaggtgggaagagatttacggtgtggcttccttactggtacagttggtcctttggcaggaatttgagctactttttcatcaagacttagctggctggattgattagttgaattgttgtttcctacagactctgtcggtggtaagctctttcttcgtcccagctttggagatttggctcttgttgtcggtatctggcacaaaccaatacaaacactaaggccacaaagaattggaaagcctagtaattttaaaaaaactaagttggaaacaataatgagatatgaagaattggaacatagtacagtaatgagatagcaatagcagttcgtttttttttttaaattaggcagctcaatgaaagctcaactatgtaataaggggaagatttacaatgtaatttatcccgcggactccctaatatgaaattggttagcaccacatatatatagttcttaacatgaaaattacttccatatattgaaacagttggttccattgcacggttcaaattattagactgttaacaactgcttgcatatcaacaaaaattaacacatcttgaaatattctaaatgccaagtgtaggaagtttaaaataacaagtacatcaagggaatcagaaaatctaattttcttcatctaatggaaatatatctcaaggaaggaagtaaaaaaataaaagtacatcatgggaatcagaaagtctaattttcatctagtggaactatatctataggaagtcaaaaaataaaagaacatcatgggaaagatgcctttaaaaatattttgaaaaattgaaaaacttcactaaatcagtacaactaagaaaccagggaacattgaaatgacacttaaggaacctctgattgatcagatcagctattgcaacatctaatcttcggtagtttgtaaactctataactaacatagtatttaatcatcacaattctaccatgttccacgaattcaattccaacatgcaaaacgaaaaaaacgggaaagggtaaacaagtacacaatgatttaaagagaagactgaacacaattttaatcaaatgttcactacaaaataaagaattaccttctttagctctaccttaggaggtggaggctcctggtagaagctaggcattggagttgctttaaaggtcaggctcttcctgagcatcttaatctcagcttccagagtttcctagtataaaagatgatgtcaaaacaaaacaacttttgtaaattctttttttatattaaatacatacattaacagaaacctataacaaataaattgtcaccttagactttgcttgcaagttgttcttctctaactcctttgcatgaatcttctcctcaagtttagtgtagaactaccaaacataacatagcaataagaaaacacaataatcctgaaattgatcttaaatgccagaaagggggaagaaaaaatgaaaaagaagacacaagttagaagcccaaaaattacctctctcctcttttcagctcgttcatcacacttaaaactgaaaccatagttcggaagcatacccatcttgcgagatctagcatcttctgatgtgggacttctgcaaagtagttaagtagactgatggattgaacgcttgattatacgcatacagaaatatatgtcaaaatccagatactagcaacagcaaagaataacaaaaaggatacgaggaggatttagcatctgcttccacttcagcttgattcacaagttcttttttcagaggtttcatcttcggtttatccctgcaacaatcgattctgtcaaatttgccaccaaaccataatagggaaggggaataaagaaagattatatagctagaccactaactataaaaagatttgaagaaaaagattgtattatagtaaagagaaaaagaacaaattatcaatatcaataagctcaagataagaacaattggaaaggacaaatcactactcacgtaaggtcctcgggcatagctacctcagactttccagatagctgatgaaagcataaaaaaaatgtcaacagcatcagatacgacagagtacccattaaataaatgtttgccaccgccacatcaacaaaatgaaagaaacgaagaaaaattcagtgctctcataacaaattttactatggataacagaaccttctgttcagtagatgatccacttctaaatgtctttcttgcttgtgcattagaagcaattgaatcgttgggaacagtaggtactgcctcaacatctttgccagttttgttcttgtacgctgaatttcccgaagcaattttgggtgctgagggtttcccattcttgctcctggcttgacccttttgcaatttggtctgctttgaatgatcagcacctttcgcatctccttcctgtaacaaagtcagttgaaaggcttgaatcggataaatcacaaaaccaataatattacaatatgtaacaaacaaacactcctacctttgcaatagtcagtccattgttttcattatggctaattgattcctcttcagatagaccatcatccaacttaacacgaacccttgcatttccattcagtgatgctgcctcattgttattgacatcgtctacaaccataaaatcctcaccagaggaggaattttgagcataagagccattctgatggaccacctgaagcccatcagtgcccactacctcatctgaatccatttacacacgggaaactgcaaaaataaacatgcagtgcaacaaattagaaaattcagcaaagaaaaacacaccaaccttcaaattgtgcattggggaatcagacaaatctcaaaaccataaactagaacatgaattttcattaattagcaaaagcttttttcctttacttaagcgaacatatgacattttcagcatatgtcaaatacccaatcgaagtctttgcaatcacaaaggttttaacaaatgaaatcatggaaaaccacttaaaaaccatcgacactcgtttcctccagtttcccagcaaccaaacacaaaccaactttcataaagaatgaatcttggcaagaaacttgaatagtaaaaaaaaaaaaaaaagagaaagaactccggcataatcaaatcaatgcacacaaacatggacttatttctcaaaataaaaaaacaagatttatcaaacccataaagagaatcctaaaaaccacaataacaaaatcaaatcttcatagacaaatacttaaacttctcacattgatccacttgtatagagcgcaatgcaacaaataggtacagaaaaatcgatactcctttaattaacgagacagccgcataaacaaaaaataaataatttatttcatttaaaaaaaaaaaacaattttctctggtttttctctctagcagctgaagttggcgccatggccaaaactaagtcgaaataccaaggaaagtcgaagaattcaatttcaaaacagaagaagaaggggcctaactctgtatcttatgttatatgcacacaaccgatggatgttgttgtagggattactcctctggagttatctgaagatgatgaggaacctgctgcgattagagatcggaattctcctgagctttaggatcttttccaagctcctctatcatcgtgggcatccttgagagagatagaacgtgctgaggatgcaagatctaatttcctgcactttgttcaagctaatcactaatgtaacagtaacctgaatcaaggtaagcactcgattccccctattctcagatctgattctgttgttaggaacttagatcaatcgtttaagaaatctgagaagcctacgaaagttaagattgaattggaagacattgaagaggagattacctattggaatccttctattgtttgttatgtattgggttcgaatccccctctgcatattttggaaggctttgctaatagaatttggaaggataaggtagataaggtcaaattgctcacatatggtatatttctcattagatttcactcattggaaaatagggatgaagtattgaatgggagatatatctttcttaataaaaggcctgtaataattaaaccctaggaccctaacacgaatttcagaagagaggatgtaaaataggttcctatttgggtgcagcttgaggagcttgagctcaagtattggggccaaaagtccctctttaagattgttggacaggtatggaagccaatcatggtggatagtgtgacgaaagaaagggagaggctgaactatccaagagtttcaattgaagtgcagatgaatcaagctcttcccgatatgctggaatttgaagatgaatttggaatgaacaatcatgtgcgtataaactatgaatggaagccaataatatgttccaattgcttgggcatggggcatgcaacagcagattgcaggaagtccactaaatctaagcaagagtggattatcaaggaggacaaaaggcaacaaaaacctactgttgttgttgatgtagaaggtttttaggcagttactaatggtaaaaaagattagagagcaggggcagcctttgggtaccaagattattaatggattccaggtcttatctgattgtgctgacatggaaacagcagcagatttacaggatgcaaatgtgcataatgcttgttctgatactggtaatacaagagagggggggaccctctcttggtcatggataagctcattgtttggaatgttgggggagccaacagccagcaaaaacaa

SEQ ID NO: 750 - DNA, 2037 bp, Cannabis sativa
tttttttttttttttttatctcagttggtttatttatatttgtattttatttggctgatttctctgtctctctctctctctttcttactttggagacgacaacagcagagcttgtaagtaaggttattatgaaaacagagcatatttaaatatgattaaaaagatacggtcgtgggttgaaagcgaggcctgaggcggtcaatgcggaggacagtgagccgaggatttagatggatgctctgctctgcccttccctgccttacacatacacattttttttaaaagatattcacttattcacttacacgcacgcaccatcttctatatatctctctcctcacgtggcttcaccttaactatccctcctccatcccttctttctactttcattaaaatactatattttaattttcaaaagaaaaaacaacaaattaaccagagtcttctttaaatttaaaaatatcattaactcctaaaacaataacttcttctatctagctcattacattagggaatagggagtgtgcaatataacttgagtctactctatcccggctttaaattaagttattcttacatgaattgtgtgagggaattgttcgtttcctttgatgattattcaataataaaaaaaaaaagataaatttttttataaccttgtaaaaatcgaagatagtgtttgtaccattttgtattactatattttgatgaataattttaaaaaataatttaatttatactaaatttggatcctacttcaaccacaaatttgaatccagtgagagccaaaattagagttgaaaccagcatatgtgattgattagaagtaggacaaatatggatggatccaagggcgagcaaagtcaagattaatgtcaaagtcagattacgtcgaggaaaaagaattattggtataaaatctggtgatggagaagtaattagagaaaaagtgatatttagaaaaaataataatgtgagaaaaattgatgggcaccaaatattattaacataatcaattatttttccatttcttccactcttgattaatacatttttttttcttctaaattatcttctcattcaatgtttgcataaaaaatggaatttgaactacctactttcttttagctagttacaattgaggtaatagtggtatacatatttatattctattaggaaagatccaaatagtttatacttatattatctttactgttcttagcaataactagtcaatggtactttttttatccttagttttactctatagataaattggaactaattaattccttagttggaaaatagctaggtaggttaaccaaaataacaaaaaaaaagaaaagttgaagtgacctcaatgttagaaataaattatactttcaccagtacaaactttcattataattttccataagttaagcctttttataataaaggagagaactgacaacataataatatcatataaataggatttaaaaatacaattcagatctaatgttgagtctactcttatcacttttgactggtaaagattctgttccttcccaattgtttgatttaaaaaaaaacacttatattgctgtggtgcctgtgatgttatgagatgaaccagctttgttcattgtttctttaaatctaatcaaactttttggtacttagttcaagtttaaaccttgcagtgtttctgggataagaaaagaaagtaaagagtgtagattactagattagataatagaaggttgaaaaaagtataaggagtcttaattctgccaagtgatagagagaaaaaagaagagacagaaggagagatggtgggctcaggagcatcagataggagcaaagaagctgttgggatgatggcccttcatgaggccctaagaagcgtttgtctcagcacagagtggacttattctgtcttctggaccattcgtcctcgcccgtatgtctctaatctttacctctttatctccctctctctctctctctacctttcacaagcttaattagagctgtttccttaaatgggtttct

SEQ ID NO: 751 - DNA, 1039 bp, Cannabis sativa
aaaattgattaggtacaactaaacaacgtgttttttcttcggtcaaccatttcgcaggccactttatataaatatatatatacataaattcctatcttcgtgtgccggccaagcgcttttttttccttctgatctggactttcacacctttcttagcttccgatttcatcaatggcggccgccaccgccaccaatggctttcccacccgctctccgaacgcggttgctgagctctccacttcgaattcctcctcgacttctctttctcagatccgatttggatacactcctctgcggatcaagagattggtctccgatagacggtcttcgtctttgagtttgggtcttagatgttcgatcatcgatgactctgataattcgatgcaaaacagtcgtatggcgatggagtccatgactcttggtgtttcggctctcgagaaactcaagacctccgcggctgagagtgagtcccgattatttgtaggcttgtattttttgtttcattcaaatatatgttttttcttttaatcgttgatttgccgaaattgcttaattagtttgctgaattaattgtcaattgttctcttggctgagagtatctctttcgaaattttttgttaaaacatttatatgtagaatagcaaattccttttgtttttttgattatgaaaattttcatttattaaatattatatgcaatatgaatttggcccaagaacatcaaaaaaagtaaattgtttttgctagtttattatattttggcaaatttatctgttattttgctggtaacatgagttttcagatagtgttaagatttttcagcaaaaaaaaatagtgtcaaggttaattctttaattgtgatattctcttttggagcatagagacatatatgcaaatttaattgttttcaacaaaaaatgaatcaagttcagaatactttttgagtttagacttttgggtctttttctttttaccaaaagttgttcatcaagtgaagtatgtaacctaacctaacttgttcaatttgtccactttattc

SEQ ID NO: 752 - DNA, 1369 bp, Cannabis sativa
atgaaacatgacagtaaaaaaaaaactagtataaaagtaatgtctttgtattttgataaaaaaacataataactgaataaaggaagataaattaacgtaataaaaataatcacctgaatggcctttcgaagtagccacacgttgtagattgtgatcccacacctacaatacaagtagttcagaataacagaatagaaaagaaattaacaaaacttttataataataaaactaatagtagatatttatacgaagttgagaaaagtctgtttccaccataacataaatagactactggatctccatgtttcatggaagataacacaccaacgaatgaaagttggattcgcaggagaagctccaagcttaatatctgaccactcttggtactagcaaacaaagtactgttgacagcagattttcaaccatcaaaagaaatttcataaattaaaagctttaaacatcaataatcctgaaaccaataaaaagtagaagatctaaaagtcattacctttatctttctcttcttcatccataccctttgtccaatacattccttaatctttatctttattttgttcaattggaataaagctcaggcgttaggcttgtgaaagtgaaattaagacattgaagcataggccgaggaaaaatcaaaaaataacaaagaaaaagggaagggcagggaatggatattgaagaagaaggaacagatgagaagaagagggaatgatgtacctgcagacacaaaatacactgctaggaaaagaaacgctcgattttgaaagcaccatatctgtctagtaatttaaatttttcatgttattatgtcaaaaattaagacattgaaagcttacccaaaaatccaaaaaattgaccatgttgagctttgggatccaaagtagaaaatcttgaaacatagcaagaacaataccatagcttgggagcccatagcctctgatcatcgtacccaatgagaaacttgctctcaaaaatcgaaacatctcgtagatgagcttatcagtgtcaaactgtcaatatactagctaggttcacggatttctaatagattcaagccatttcccccaaattctctttcgtaaaaatcttctgagaaagtgtaatattcccaatccaatccaaaatcgaatgttcaagcactgaaaataaactcatataagataaggattgattagaaacctttctagaatctccaatctaaaatttaataccaatcagcaaattataagaaaattttgatcaacagatcagagagagggagcacaaaataaaaatccaaatatattaaagtaacagtcccctgcaaaattgatgacatttccacacacaattttctcaatttgtgtctat

SEQ ID NO: 753 - DNA, 3332 bp, Cannabis sativa
  modified_base (294)..(295): a, c, t, g, unknown or other
  modified_base (448)..(449): a, c, t, g, unknown or other
aaaaaaaaaaaaagagagagatacattatagcgcttatagtctttacaaaagagaatgaaacagtgagagaaatttcttggtgagccgtgagcgtttgctccttgtaagttgtaagttttgcttaggtctggctttgttttgttttgtgtttgtgattaataaagtttttctttcttggtcaaaaaaaatactatcttttgatgtttttatgttatttttatattttactcttattatttcgttgttgtcttgttgatctttgtatattatttttagagtaatttgcggcatanntacctaagtttaactcccagttgcaaataaatacctaagtttgatttttggcgataataatacctaagttatatttttgttactctgtagatacctgggcattaaatgtcaagtcattattcacgtgctattttcttattggtatatttaaannaattttttttaaaaaaaatcatgatgtggatcaatcagggattgtcacgtggcaatttacttaacatttaacaatcaagtacttacagagttccaaaaatataacttaggtattattgctgcaaaaaattaaacttaggtatttatttataaccaaaagttaaacttaggtatttatgtcacattgtttagatgttgtttttctattactttcatgttgttttcgaattgtttttatagaatactgtaaaaatgtaaaaaaaaaaaaaatgtatatttaaatataaaagtataaaaatttttatcaaaatagtactttgtgtaaattttctcaaaaaaaaatattaaattatctaaagtaatattaattttgaaattttaaataaaatcaatcataaataaagtatattatatatatatattctttttaatggaaaatcaataatttgagaataatgctacatactaattccataataatatgcatcttgttaccttatcataaacctcacttcactacacacaaaaaaaaaaaaaaaaaaaatttttagaaaaaataaaaattcctctcaactgacataggtgtgtgtccatacgttacaaattggaccaaaccaaaagatttgagaatacgaaaacgactaaagtatctcattctcaccactatggttcttttcattgatatatcctaatcgtttcgcaactaattatgttctctttcctaacttactaagcacaagtttttttcatttatatattttgaagaaaaagaaaaagagagttcagcttaataaaagagtcttgatttataaccaccaaagcgttgagtctagtgctggtaccctttgctttgtaccaataggtcaagggttcaaactaaactcaaggccaaaaacttcaaaataaattttaatattaaaatattaaattctaaattttaatattttgtttttccgcagagttaaatactaaattttaatcaaagcatcatcttctctacctacagtaatcgatagtaagtggggcaattaaagtttttggaattttgacgaccagcaaacacattttagcatcgtgtgtcatcgttggaggtggttaattaccgacaaagaaccttgaaccccaactagcgcctcgacaacgacaccaaaggccattgaccaagaatagaaacttcaactcccccctagtgaactagatatcgcggcaacactaggaagttgagcagagtttaagagctacgacacaaaagacgcatagatgcttcaacatataggtttgacgtatcctaaggtaatattctaaaatatttttgcactaaaacaacgcacgtagctgtactctcgtgtagcagttaacgcttggtggatcgtatatagtgaaccaaacacgcatgcaacatacgcgcatatgttctacaaaacatgcgtgcaacatataaaaaatagaccagacacgcgtgcaacatacgacaagtcttgttttatatacatagacctgatcaatttaactaaactgacagaatgcatcttctctaatctaaagattgcatgctaatctagctttggtatcaaagtgaaatataataaaagcaagcttgaagatgatgtgatgtattcttttccagactccaattcttcgcatggcatgaaacaagtacatatgaaattgtctcaacttaaattattcaaatgacaaaaggacttaggctgtccccaaaattatagtaaattccaaatatcttaaattcaatctaatcattggatcacccctttttcttttccacgtttttctctacaaagaatgtacattaaaaacccaacacaaaacaatgagcaaaaaaaaggagagcatatgcattgaagatagccaaataatgaaaagtataagacaaaacaaagggagaaaaaaaaaacaaaggtgcagaaccaacatcaatgtcacatgctaccagctctgcccggtgtggttttagtagcaggagacttaaacttggatatgtcaacaagatcaccaaataatttatcctctggcttgttaggcttgctaggtggaacataagatgaggtagaaacctggtacgagtttctcattccattatcatccctaacagatagaccatacattcgctgttcaagatattgtgtcccttgttgttgctgaccgtagccaccataaccagccatctgctgaccatagccaccaccataaccaaccatctgctgaccatagccaccaccaaaaccagctgacatcatctggcccgcttgcattggctgaggatgcatgcccatgtatggccctccatggcctggctgaggttgaaaacccaactgattgtttggtccaacctggctattgattgctgacaaatggttacctgtaatcggctggatatacataccaactacctgatcattccccattggttgaggtcctaggggaagggagccaccctgtggatgtgaggcaactacttgactaacttgtggttgttgggggtattgtgcacttgcgactccatcagcagtagactgagcttcccagggtggtggtgggaatgctccaccgccttgattacctgtccaaccatgcaaaatattaaaccatataagactaatccaatatattttttttataagaaaaacaagtcacatggtaaatcatcacaattgtctagtcatcaacagtccggcacaccaccagcatttagttctgagatattgaagttccactacagaaagagtgatgtgccattctgtaatttttatttgctacactatgattgttagtattatattttactatgaataggataaattaacaaatgcaccgtagactggtgaaggcggctgctgctgctgctgctgctgctgctgctgct

SEQ ID NO: 754 - DNA, 4220 bp, Cannabis sativa
taaacttaaatatttatctgctataacaattctttttttattttcttctttattttttcttctcttttttcattgcttccgaactaataatatatcataaaacattagatttcacatattttaatttaataattattatataaaaaaattctaaatcatttctaaagcactatcacctagtagtgttgtacattattagtgtctaataataacattttttttaattttttttatcaagaattcgaaatgaataaacaataaataaattgagtaccaataaaggagggagataaactccaactataaaaactcattattcagctaaagaagatgaataacaacaccctatttgttttttctaagttatacattctttgacaaatatataattcataaaataatcaagtaaaattaaatctattggtcaaacttcatttgcaacacataaaaacaaaagaaaaataaaataaaattaagccatagtccatgtacattgttcacaaccaagtcatgtgcaatacatgtataattattacaaaaccgaaaatgttttcaaaagaaatattacacaataaagtgagcttccaactcgagatgaaaactatattagctagcttgatacatatgttacaaatcattgaatcactcatttgtcactttgtgctttccatttccattttctattggaatggaaatcacatccttgtccttgtatgcttttgtagctttcaaattaatgtcaccatcgatttcgccagcagccttgtgatcattagtgctaccattattctctttcagcaattttgaaagcgttgaggctatactttgtcttgctgctggagaaaccccattcttaccgataattgactctaatattgcttctgaaagtagtttactttctatctcactgacccatgtttctggtatagattcatctttcgagaaacttatctaaaaatattcaaaaacatagcatatttcaatgtataagtgttttttttttaagtcaataaattttcatttaaagttctttcagtgatataaaatggagtacgaacctttaaaaatccgttaggtgactgagtaaagagaatagaggagccaggtagaaaattttcatccttaaagatctcaagaaatttatcaatggctttggcttctgcatcactataaattccaagagatttccaaatggcaacgcaattctctgctactttttcggaatattgtttccccgtcaatggcaatatcattgttatccgagtaaatttatgaaaagggcctgccattttaagagaattatcaattagcctcttacagattgtttgataactagtttggttggtttggaggttgtcatcttaccactaacaatctccctgaagaactcgacggattctgtcaactcttccgacgtcttccccttccactttccagacagccatgttacagcgctatcctccaagtaaactccaatggatgtaaactttactaaatttccctggatttctagggccctcacccctacaaaatcattttatgtaaaatgtaacatattattattattttggcagaaatcaataataaagtagttaacagaatacatatgtagttgtttaaaagaagtttttttttttccttcaccctgtgaaattgcactctagtacagtaaaactaagactaagtaactccattagcgctccaaaaacaccttcaagatatctctctaaaaccaagaaaattgtggttgggattgattacgactagtgagcaaagccgtggaagttgggcacagcaataacctcacttgaactgtcaataactacaaccactacctccatatggtggtataagataaccttacattttctttataaaaggaaaaaaaaacacaaccataaacttccattaagatgaaatgttagatacaagcactgaaaaagaaatagaagatgtaatatgaccattccacacaaattcacaatctaaccccaaagcttgttgggctaatgaatgtcctcgagaagtactagcctccctagccttagatcacaaatgtcatgaattagattacgcaaaggagaaaaatctctaccctttccccttatattatcaaccaccatcttacaatcagatgctattatattaataggcagacaaattgcattacaccattgaaccatcataagaatagcccgaacttccatcagaagggtgttagagaacccatgtactggtattgaaataccagcgaaaacttggccacaataatggcacaactgctccaactcacattgtcccgtttgagtcagaaatgacaacatctacattgagctttaaactctccggaggaggaggagaccaacagagccagaagctctttatatttcggcgaaaaatgtgcaacccaatctacaatttcattgaaaggaatgctagatttcatatggaaaaggatcacattcctattgttccacatagctcaaagcaagcataagaactgttcaaaatgataagcagtaaactgcctccaagccaaaagtattaaatcatagatatcaagatgagaggaagatagaatgaaattgtaaaagggagaatatttccaaatttgccttaccctggaacacaacagtaatgcatgagaaacagtctcaacattgaaaccaaaatgaaaggaaagtggagaaagtggagtgttaagtatgattgagtagttagaaggaatgtctttgcaatgatagctagaaaaggcatttgtgttcggttcatccatgataatagaatgataagcacctggctcgattaattacagacaacagcaaaacaccaacaagaataagaggaaaatcaatggtacagtagcaatttaatggaaaattcagggagctttattgaatcaaaagaggagactcaagtctcatacaagggaagagtaagttcaggtgatgctgagaatatctctcgattctagcatgaccaagactctagctccctacgcacataaagctgccagcacataataaaaagactcggcctactgctgaccatttggtctgccatcccttctagtgtaggtgactcgtatctcaggccttctacgccgatcagagaagtacttctcggtagttgagttttctcactaagagagttttggtgttcaactgagacttgtagctacttttgtaatcctagtgacttgtgattaataaagagagagttgagctttatttccccgtggatgtaggtgccttaacagtgttgaaccaagtagatgagtgtgtgttctttggttatttatttatttttttttcaagtttttgttctttgcactatttcttattcattttctatgtcaagaagcattgttcttatttggtgtgagtctactcgaatcacaacatggagagaatgtataatattcctagtaatcaaatgagaagcaaatgatgacaagaccgccaaataaaaaaatgcttaacttttgggggtaatctgagatgccacaactaaccaccatctctaaatattacaggatggaggagtagaaacggctgaaaaagtgaagtgataggcagttctaagagaagttaaaccccaaaccaaagagaccatctgatctaaattaactagaggaatagataagatagcttgaaacacatcataggaaaagaaactcctcaattttgaaacatcccacaagagacagagacacgatcagatggagtagaaaccgaagccccattactgataaaagatgaacctaaagttggggatccaatagtcatggatagtagaaactgaagccccattacctatgtttaagattaaccctctcctaagaagatcttttccccaaagcaagtgtacgaaggggagtgaccaggcttagcatcaaggacattgcacctaggaagataacatgccttaagcaaacgaccaaggcgagaataaggattctggaaaagccggcaggctttttttggcaagtataccttgattaaagtgaacaagccatctaaaacctaagccaccacaaaacttagactagcaaaaataagatcatttttttcccgttgaatgcccgactttgaacccaatgacccacccccaccaaaatttggccataactgattcaatatcttgacataacttaataggaagaccaaaacaggccatagcataacaaggtgtaacttgaaccacagttttcaaaagaa

SEQ ID NO: 755 - DNA, 3321 bp, Cannabis sativa
tttttttttataatgcagggtaaatgaaaggggcaaaagcgtaaaatggacgaaaacccacctagtgaatgacgatgattccgaggtaaactctcctatttaaaaccctaacacaactaaaagctctctcactctgtcccatttctccatctctcccatccaaaaagaaaagctttcaaatcttcactacctgacaatgtcttgctacaagggcaaatatgctggtatacatactcgtatatatatatatattttatatgtctatcatcttttagattgcattgttttctgattctataactacatttcttagatctgtaattcttttttcctcaaagttttcaccttgattttggatgcggtttgactaagtaggtttattaatttagagggatgatctgaatggattcatcattaataaatcaattacgattttgaatcggtttttctattgcgaaatcatattttacttcgatggttatagaccaatatcaattgtttatgggggaaaagattagaactttggttattgtttatttatgatttgttatctttgtgtgtattgtagatgagctcatcgccaatgctgcttacatcggtacccctggaaagggtatccttgccgctgatgagtccactggcaccattggaaagcgtctttccagcatcaatgtagagaatgttgagactaacaggcgtgctcttcgtgagcttctcttcaccactcctggggctcttcagtacctcagtggagtcattctctttgaggagaccctttaccaaagcacagctgctggtatgtgttctccctagattttacatctttaagatctgatggaatatctttgtttttatcttttgtttgtgtgtttgcatcatgtatttttatgatcttattaagagaatggtacggattataagcttggttgaatcgagtcctgtcattgttataagtaattgggtagatttgatagcccttttgattgttattctgaacaaagcttttggtaacaatcatctcatgtatgttatttgatttagatgtttgtatatggtagtttgagctaacattcttgatctgtaattataattttcaggtaagccatttgttgatgttatgaaggaaggtggagtcctccctggtattaaagttgacaagggtacagtcgagctcgctggaacaaatggtgagaccaccactcagggacttgatggtcttgctcagcgttgccagaagtactacgaagctggtgctaggttcgctaagtggcgtgctgtgctcaagattggccccaacgagccatctcagttggccatcaatgaaaacgccaatggtttggcacgatatgccatcatctgccaagagaacggtcttgtccccattgttgagccagagatcctcgttgatggatcacacgacatcaacaagtgtgctgatgttaccgagcgtgttcttgctgcctgctacaaggccttgaacgaccaccatgtcctcctcgagggaactcttttgaagcctaacatggtcacccctggatcagattccccaaaggttgcccctgaggtgatcgctgagtacaccgttcgtgccctccagcgtaccatgccaccagcagttccagctgttgtgtttctatctggtggacagagtgaagagcaggccactgttaatctcaatgccatgaacaagcttaagggaaagaagccatggtcgctatcattctctttcggtagggctcttcagcagagtaccctcaaagcttggtctggaaaagaggaaaatcttgctaaggctcaagctgcattccttacaaggtgcaaggccaactctgaagctactttgggaacttacaagggtagtgagaaccttgatgatggagcatccgagagcctccatgtcaagaactacacttactgataaagcttttagggattatctttcatgtctttcttttcaagattaaaatgtctttgttttgcatgaactatgattactaaggctgttaaaatccttggtggttcatttttaatttgattaaagctattacagcatttttctggggaagtttttagctttcgtaagacgttcacttattttactttgggaatttccgagtacaagagtcaatttggctctataatgcatcgagaatatgttcaataagtaataatccttttgtccattttgttgatctgtcattttcactcttcaggtccttttctccttagggatttatttttcatgtctttcttttagcttgtgtttggtgagaatggaaaagtgggaggatggaaaggacaggagggaaatgagtgggaggagaggtcaaatactcttgtttggcaagatcgatcattggatggaaaggaaaagtgagagaaaataaatccactcaaatttacacttttaaatccatagtactctcaattcttatttgtgcaaaattacaaaattgccttttaaaaaattatcaaaaattaatttgaaaataatttagtaattgtataaataaaataatgatctatcattccatttctctatctaaattggaatacttctttcttctccctctatattttctatcttctattaactcttcatcatctttattctcttttcaccatgccaaatatattgttaagtttgaacacatcaaactacatgatagcataataatttacctataaatcttatacataatatacttagaatttgttaggttttctttgtaatattaaggtacgattttggtgtttgctgattgtatttttacggagcattctgccgcatttgatttgtgttgtattactccagtcaattgaaatgatgatattcaaatatatatttatctctttttttatatatatatatttttgaatgtcacctagtctagtaagttgtcatttctttacattaaaaaaataaaattaaccacgtgctccatttacttgctctgatttacttattttgaagtgtcatgcactttcaaaaaaaatgatcataatctcatttactgttttattttacttattatacattgcacgtgccgcatgtaactgatactagaatatatataattaggatagagtctttttagcaaaaaaaaaaaaaataattagaataggaaatttaaaaaaaaatgtgatgatagagatgtacacttgtagtgatgattaagatgtaatagttcaataaattatgagaaaaataaattaaggggtgtatggaactgagatttaaacaataagttaaaaatagtggtaattgagtatctataaattataattctattatttatagtaatattgaaaattggtagg

SEQ ID NO: 756 - DNA, 2663 bp, Cannabis sativa
aaagaaaaaatgtaaaattaatgtatatactatctttgactaacatatatacatatatataaagataaaagatacatgaaaaaaaaaaaaaaagagaaaataaaagaagaaagagaaaaggaaaaaaaatgttgaaaacaaattattaaaataaatatacataggatgcttagattaataataatgatatttatgtgaaatttttttaaaaaaatacattatttattaaaaataatatgaagagaaattaatcaaggatattttggtaaaataaaactttcccaaagaaaaattaaaaattaatggtgggtcccacctattttttctcccccattttcctttccttcttcattttatctcctaccaaacacacattctttttcacttctacgaaaaactttctttcctaacttttcacctctaccaaacaaagggtgtgtggttccctattttaaacactacccgagtaggcaattcattatgaatagaagtttcaatataatatctcaatagaacataccatagaagccagaacttgtagtccagctgctcgcaattgtagagctacgtcatcatctccaacttcttgagctaattgacaaagtttaggaatgaggccctccaagttgaacatgtatgtactatccatctacttttatatgaaaaagtcagatcaatcacccaaatgtgataaacgttataagttttgaatctgaaggtctatgaacaaattctaaatggaacataattaaagaactattctgcgtcgggatatttaacggttccccattggatatagaatagaattaataaggttgtctaacacaaacatcaatcatttttccctccttgtgttgattcagaaaattatttatgagaacataaatttcctctcttttttcccttttaacatacatttaggtcaacttgaactttggaccactcacccacccacttgagccagcctcaagcgaccttgaaaaagtactccagcatattaactactgtatccctattaatagtatactaatcaattactctggaagaaaaaaaaaacagagtatctctagcaaacatttacctggcaacttataaaatcaacaagagtattacaacccaaaagccgcatgtccagctgccgagtttgctccaaaagagtccgaacaagacctaataagctactagcaaatagtggcctgcaaccattaaaaacaccagtgaatatcatcatacatttatgtggcaaatcatagaaaatcgtaaacaggttgcaagcaacaacagcccatgatcaaaccaaaggaaataaaaaaacacagcatgagtttaacgatgatacaaaatctcttggatatcattacacccttgcactccacaactctcaaacataggacttgactgaccactttcaatatttacaagaccaccatatagtccacattgtcttgtatttcacattgtaaattgtaagatagttgagtaaaatagaataaaagaagatctacgaaagggttgaccctttttagataatgatgcctcccatcttgatgcaaaaaagaaggaaggttctgcaactcagtaactaaaacctaaaagttcataaagcctgcttctcacttgtggaaatgtgtatgcttatcgaggtcatggcaaaggcaatggtttatattcactcacagtttaagctttcttttaggcaattttgtaggagaggagcaataagttttttgaaacaagcacttgtcatctaacataaggatgggaagtgaagcaaaaatataacgtcataaatttagaattatatgaaacttacatctggtccttgcataacagcaacaacttcttgtaaatgcttaacacaacttttacagatccaaagttctcattgcgcaaatctttgtaaaatctttgctctaggaggtctgtgatctgttaatgataaacactggaagaaattatgcatttaattttaatggaaaaggaagaaaattgtacccaacaacaaacaactacaattttacagcaactataacaatctctaatcgcattcacaataaatgtcaggagtatcataaataatcctaactctggaacaaaataagagggatatttttttttttttgaaacgagacagaggtcatatgtctaagactgaggtcctccatcctccaaaattgattaaggagcctcacttatggcagagaaaaaccgtggtaacaaaaaaaagtgaaaacattagaatagctacaaacttctacacaaaacctatgttttcaatacataaagcaagaaaaacataggtattactatttttcatatgaagttcttgcttctaatactagaactaaacaacctacttcatagcattagatcaaaaaccattaaaaattcatctaagagcatgcatctaaaaaatagaaactgtacagaaaaatataagaaaaaactgctaaaaggaaacgaaaaccacttactttaggaattcgcaacggattttttgaagcatatacacaaagtttggcgattttcctatcattcggttcagcatcctggtagacagtgttaatgaaaacaagcaagcatataaggacccagaaaattatatcaaacagaaaagaaacaagaaacactatactcaactaagcttcttcactggacccccc

SEQ ID NO: 757 - DNA, 1375 bp, Cannabis sativa
aagaattttgggttaacatcactcttgttgcagaaagagaatcaaagtccataacattgattctcatagggaacatattaggcttcaaagtttcataaaataatccagaacccaactcatcctccacttgaatgacaatcttggtctaagatgtaaatataaataacaattttataaaagtataacaaaaatacaagttaagctaaagttagattaagatttatctctccacacatgtatgacttacaaacaattttaatacctaagaaaaagagaaccgctaattttgtagaactgtcaataataaaatatcgattattatcatattggcatgaaatacacaaaatatacaaagtgtattgatacactattttacatgctgtagggatccagattctctgtggtgagaacccaaaaaagaaacattttgaaatgacagaatatgaaatctagttatctgctttcctacatgtatccagaatttcttaaaaaatgaaaaatattgaagtaccaagaccacggcataaatcagaagatttgattgtcctacatgtagccatctttcttgtcttgctcctcggcttctttgttagccacttgaacggatttgaaccacaaatacgcctacaccaaacactcattcttaggtgaagagaggtttaaatgaacactggataacatacatgtaagtacatatgtatatctctctatgtgccatattcctagttcgccaagcatctaaagctgatctcagtagaaagtatgtattgattgaaaaagccagtatcactcagattataatttcattaattgatgaactaacaagacaacttacagaagtgggaatgccagtaaatgcaaagaatcccagcagtggagcatagaaaatgctgtctgggttcactactccaaagactggtttttggtttgcatactcgaaaacggaacctatctgcgtgtccagaacctcaaaatcatttgaaaattatactgtaaacagatattaacttatgggattttaagcagtgattctctagtctaatgtatgcatctaaaggtggaacaagtgaaagcttagggaaaggggacttactgctgcaattgcagtgattgctgaggatagtaaataaacaaagaaaggaacctcaaatccattttctgatgcagccttttgcgtttcaccctgagcccaaggaggtggctcttctgaatctggttttgcccaagagggtactgtttcttcggatttgctagattctgctgaacccttggtgacagcatacacagtaagcttaggacacaacattttgtttccatgaaaacaatggccttgacttccctttccagtgagctgaaccagtattctgtgtctatt

SEQ ID NO: 758 - DNA, 999 bp, Cannabis sativa
tgagtgtaaacctcgcctgaatcagacgcaacgagatgatgcgacccttggcctattaattgtttaagttcaaattaaagggaatttttgtaatttgcattacggggttaggtggaaacttgcttttttggacacctggccattagatcacatctttcttttcagcttaagtcttttgattattagaactaatcccttaaggaaaaaaaatcaagaattagctagaaaactcattttttccctctctcttcgaatcaaggtagaggctaggagtgtgctgctgatttcttcaattcagcaagactacagagtaatttttaggaggaacttcagaggtagtttgagctaaaccctaaacttacttattttcaagttgtttaatcttcaagtttggttttaacatgtaattttaagaagtagtgactgtttaggtttagtcttgctcttgtatgttctctaagtttattttgaataaaaataagttgtttgtggctagtttagttgatttgagaggagaatgatcaagtttgagtttggaaactcaaacttgattcattaatgacacttttttgatgtgtggtgtggttaattggaggaaattattattattttgagataagagagagaattattatgtgagtctattagttagtttgtgattaatttgtggtgtttaaaatttccatgctaatgtaaatggtttgttgatggtatttttccttattaggttgtttattgaatcaaatcatatggatttagacccaatctatctattccaactttctttttagggaaatctatctatttcaattatttattagattttgaattgttaaccgatcaaattcaatcgaattaaatcgactgatccgatttgatcaattcaatgaatgtataggattacctttgacaaagatactgtcggtgttgggtcttgtggtcgcggggatccgtgggtcgtgtggtccgattgtgtgcttttccgtgtgcgtgtttata

SEQ ID NO: 759 - DNA, 1432 bp, Cannabis sativa
ttattttttctattttcatctaaacaattataaaactgaagaaaaaaataacaatctacatcaagttcagtacaaattttgtgttacagcaaattcatttgtctatgagactcaaaatctacatattctccgttaggacggccattgaagccatacacatcaaaaatcttatcatcggaagggatgttgccctctcgacctttaaaaccctcagcccaagcacctgggtttgaggcgttcgaactcgcttcttggtttatggttatagcagctgtactttgcggtgaatttccggctcttctactggatgaatttgcagcggtcagagaaattgatgccgatggttgttgctgcaattgctgctggtttttcatcggtgacttgggtcgaagagattcaatttccggggttgtcacaaccagatgaggtgcctcaggtggtggatttcgtcccccgcctccttgccaaacttttccatccttgtcagaaaagttcctgatatatgcctggatatcattgcaaatcataaagtcaaattctcacaagaaaacagccagttgaagtaagaaaaactatagcgagtaggatggttcaaattcttcactttagccataacatagaaaagaatgtcataatacatacaatatgaaattggatgaatatgcattatatgataaggcagaaattcgtacctcattattgaaatttgatgaagacaattctttaccaacggtcatccaaccagaccgaatgttatgatcctcgccaaaaagctccagcctcctccgtccaagggcaaaatgttcaattatcctatacatgtcttcgggtttttgggttgaacctgcaaaattccaaaaggaacaaaattatcagcgagcacatacaatttctgctagggtgagggactgcaaagacgggataaacaattaaaaatatcaccacttaatcatctaaaagaatgaaacatatcatagatgtaaatgaaatactaaccataaggtggttcctcagcaattattacatcagtatcaatgtttgcatggattatatgaccatcagtgcttcgacgaacagtgccttttatccccatcaagcagtgctccttcatcaaatatataacacaacaaaatatttaaaaactgagttttatttgtttaacttgtcgtatatccaagagatattgaaataaaaaattgagatatacaaaccattcaatgaacagtatcatgtgacaaatgaagttgctagttcccccatcagaagaaaaaaaaaaccaacctttgaatgctgaaacaatgtgtgagcatcgtgccgcaatcctggagttgcattacttttgttggtcttcacccaacaaatatcttcacatctacggaatccccactgcagtaaacaacatattatatgctttcagtaacaaaggtatgct

SEQ ID NO: 760 - DNA, 7332 bp, Cannabis sativa
ttgtttggccttataattattaacttattatcaatcaacatatctatttggtattgtttttctggatagctgtgtttttgtgtgattgtttgtgatcatatgtttggagacgaacctcattttctttcttcttcatcttgaagtttatttgaacaacatacatatctttgttaaatttgatttttacctcttgtaaagcatgtgttttgtttactgtccaataaactcacgaaactttcctttgtctttaggatggatataaaattcgagttggtgattgtgcattatttaagccaccccaggagtcccccccatttattggaatagtacgtaggctgacattagacaagaaggacactctaagtttaagtgtaaattggctttatcgacctgctgatataagtcttgcaaaaggtatatcgcatgacgcggcactgaacgaggtcttttatacctttcacaaggatgagattcctgctgcatcgttactccatccctgtaaagttgcattccttcgtaaaggtgttgaacttcctccagggatatcctcatttgtatgcagacgagtttatgacattgagaacaagtgtttatggtggttaactgataaagactgtattaatgtgagtatcattatcattattatgtttgattgcttgtggtctccattgattaataagacttattatcattaatttttataaactgcaggaacgactggaagaagtagataagccattagacaagagaatactagaaatgcatggggctgcgcaacccggaggccgttctccaaaatcatcgaatggtccatcatcaacaccgcaattaaaatctggttttgatattgtacaaaacaacacaccctctttttcttcacaggctaagggaaaaaagagggagcgaggtgatcaaggttctgatactgtgaaacgagagcgtttagctaaagtagaagatggcgattcaggtcaatttaggcctgaaaatatgttaaagtctgagatagctaagataactgacaaaggagggcttgtggacctttctggggttgaaaagttagttcagctcatgcaatctgacagtgctgataagaaaatagacttggctggcagaataatgcttgttgatgtgattgcagtcacggagagatatgattgtcttggacgatttgttcagcttaggggcttacctgtgttggatgaatggcttcaagaggtccataaggggaaaattggtgacagttgtcccgaagatagtgataaatctgttgaggaatttcttttggcattactccgggcgcttgataagctgcccataaatctgcatgcccttaagagttgtaatgtgggcaaatctgttaatcatttgcgtagtcataagaattctgaaattcagaagaaagctaggactttggttgacacatggaaaaggcgtgttgaagctgagatgaatgtgagtgatgtttccaaatctggacagggtcgtggtgtttcatggcccaacaagcctgcatcgtctgaagtttctcatgttgggagcaaaaaaaaggggaatactgctgaggttggctcaaagtgctccaatgtacaaccttctgtctctaaagctcatcaggttaagcttggttctggggatgctgcttccaaggcatctgcaactcctggattaactaaaccgacaagtgcatctgtgggtacgttttcgaacgatcagaacttcagaatgttagttgctgtaggttcctcagatcttcctttgacaccaattaaggaggaaaaaagtagcagttctagtcagtcccagaacaacagtcagtcaagtgaccatgggaaaacagtgggttcatcatgtaaggaggatgcaaggagttcaacagctggttctgtgtgtgtgaataatgtttctagcagtggttctcgccatcgtaaagtagttaatggctttcaagaatctgctattgcaggaggtcagaaggaaatcgggtcaggtaaagctagtacgccaagtagaaatgtgactcctgaaagaccaactactggagagtcccttgagaaacttgctgatgtttcttctgctgaccacagtaataatagactcattgtaagattttcaaacactggtcggagccctgctagaggtgcctctggatcttcttttgaagactctgttgccgcatgtggcagagcttctcctcctgtgaaaaagcttgataatcatgataaaaagcctaaaggtcgaaatgatgctgtccgtgctaatatttcttcagatataaactcagatttgtgtcaaggaaaggatggtgggtttgaagaatctgcagttcctgcttatgtagagcatcaaagggctggtgaagatggtgaaaaatcaacagaagcatctaaagcagctggttcattgtcaaatataatttcaaggtctgggaaatcgtacgaggcttctttaacctccatggaagctttacttgaaagttgtgcaaagatttctgaagcaagtgcttctacttcacctatggatgatggggggatgaatttgctcgctagtgtggctgcaggagaaatatgtaaatctggtaatgtgtcaccatcagcttctccggtgagaaatccatctacgccagagggatcaagctcaggcaatgatggaaaggtgagacaattaggggaggtttctctagccaagtgtcaatctattgggggggttagtggttgttccccttcagagccgggtaatacggtggactcttcacttgctaaaaatgattcaagaaatattgttagtggcggtccaaccaatgattctggagatatgaaaggagatttggatggttcttcgagtttacaagaaaatgtagattccttaaaattgtctgctcataaacccagtgaaccatacgatgtttctgtaaccatacctgctgctagagaagaaggttatacggatgctgcaggagcttaccagattcaagagcaaagaaaatttggagttcgtaggacaagaagtatcagcagttttgatcataaatcaaaaccagaaacttcatctgatgaggataaaaaagttgatagtaagaaagcttttaatggagatgggagaactgtggaagacagtgtgccaatggcatctgaagctcattctgggagtgcaaaagtcgagaaggataatgaaacatcagcttactcatcttcagagttgggtcgtggggatcagaacactgacaaggagttaggtaatgatgtttcaacagaacagaagccatctcttgagacagtaagtaatgctgaacccttggacgggaaaagtgataatcccttgcattcttctggctctggaaatactttgaatgcggagtgtaatggtgaaaagactgataatctcaagactggcatcttagctgaggggacagatggacaagctgggggtttacgtactacttttgatcatgaaaaagaatctgttggtcatgtttcagttgcttcatctcccaaaattgaggttcatgcaattgttgggcaagaaagtgaacatgggaagtctaacaggcagaagatagatggtttggagtcaactaagacagaggaacaacaaccttccactgcgaatgcttcttgccatgattctgttgtaaaactggactttgatttaaatgaagattttccttctgatgatgcgagtaacgaggaccttgtgaaaatgggagaacatggaagttcagcaggtattcatttgccttgcactttaccttttccaaattcatctacttcttggggtttcccatcttcaattactgtggctgctcctgccaaaggagcatttaatcttccagaaaaccctttgcaaagtaagggtgaacttggatggaaagggtcagcagctacaagtgcatttcggcctaccgaacccaaaaaaaccagtgatgcaattgactcttctgttagcaaacaaggttgtgctcctttggattttgacttgaatgtaaccgatgacgcagcttatgaggatgagtctggaccttgtgttcgtgctgctgctggaggacttgatcttgatttgaatagagctgatgagagtcctgatgttgagctattttctggtagcaaccatgctaggttagaaatggcgtctttacctgctagatcatcattaagtgggttatctattggtgcggttaatgattccagagactttgatttgaacaatgggccagggcttgatgatgttggtgctgaagcagcacaatttgttaagcctatcaaaagtagtttgccatcgacaggacctgttggaataagagtcaacaacacagattttgggaacttttcatcatggttccctcctggcaatgcttattcagccatcactgtgccgccaatttttcctggtagaggggagcagagttatgggcctccggctgggttacagagggtcttgtgtcctcctactgcgagctcctcatttgttcctgagatttacaggggtccagtgctttcgtcatcccttgcagttccattttcacctgccggccaaattccatatccaggatacccttttgaaactagttatccgttgtcatccaactccttttcaggttgttcaacagcatatatggactcttcctccggtggaccgctttgttttcctaccattccctcacctcttcttgggcctgcagatgtagtcccatctgctttcgctcgtccatatgttatgaacctaccaggaggtgctagtaacattgaccctgatggtaggaaatggggaagtcaaggtttggaccttaatgcaggacctgggagcgtagatgctgaacgaagagatgagaggctacctgcagggttgagacaattttctgtttcaagttcacaggcccttgtggaggagcagctaaagatgtttcaggttggtggtgtattgaagagagcaaaacccgatggtggacttgatccagtggatagaattagctacaaacacccttcgtggcagtagggttgggttgcgatgagaaaaacctcggaatctgtttaggcctggtgagaatttattgctgtgagtaaataattgcgtgagctgtcattagtgttcgtaactgcaatttctcaatacttaagtgttttggcatcatgttcttaccattaccaataaatagataatatactcttttaattaattttttttttccatttatctaactatgtgcagctctacaagacgagtgtcagaactctggtaatttgaacgatcagattatggaggtgaagcccaagagttcgtcttgctgaacactgccataccaccatctcttaactttggaaaattatggccctggaatcagtcaagatgctaaatgaatcattttgttgcagataagttcccccgtgtagatatctaactcacgattaaaaggaaaaaaaaagcatgtttgttgtgctgcctaggaacctatgaaattggtgtagatattgatccattttaaaggaggggattggattgtacgaactgttcaggctgtggccggcatgtatcttctgtctgtcaaatttttctttcccaccttccagttacaaatatagttatttactttagtcatgactgtcgaatttttgttacttgaaaagaaatcattctggttattgatatttgcacaggcatgtcttcatgtatatttgtacttttccctttgtattacaagttataaccagaatcaaaatattctctcacaagttgagaggaaattttggatggatattttttctttttcttctggtgcatttgactcctttctgctgtgtacgtttcaattgagagggagataagttcaattgaggaataaagaggcagatgagcatgatgatgagtgttctccatggctttctggacttggaatccccaacttttcattaccaggtagattttggcacttttatacctttttcacattgaatggttgattcaatttaaatggaatcttttttattattattactaaattaaaatcttatcatttcattatcctaagagcctataactcgaaattcttatgaccttttaatgtaattccatttaaaccctcttcttgttttctttgcttttctatagttttccaaggaatgtttggtttcagcctatttctattagctattttttatttatttatttgactttgggaagggggattcgaatttggggcatcttattgtgaggagtgatgaaacactaggctatgcgtaacaccacattaactattatttatttgtaaatcataaagaattgctcaaaactctgagagtcaagtcagtgtgtgtgcttactcatccacagtactacacacttagaaatttaaactacatattcttaaatataaatttattactaatgggtaatattgcttttcatgcaggattctagctagtttatatcctggaactgttgctatatggaaccagtaccaccactccaaaccaatgtaagaccgaaaagggcatttccatctattactgaactctaatacctatgtaatttaactacatttgggcatacttttaataacttgttcacacttttcagtaattagaaaattcttttcaaagtcatcgactcattaggtacacatttgtagcattagttgtcattatatacattcttctgagttttttttttttgcagtagtactaatcaaataaaaaaaaattcttgaaagaagcattttttgtacatacatcttctgagttacacacttgagattcgatcacataatccccaacacacagtcacgcacccctcaataccctagctcaagtggcttcagactaggagggtatactagcaacttcataatattcagatataattgatatatatgtacacatttgttgcgttcttctttgaatgaacttgagctcaagcaaccatctttcccattccaaagaaagtttacagaatgagggcgtacacttcttagtcctcagatccgcgtaaccatttccttagtactacttactgataacggaaggtggcccacgttgttacagtaacttcacataagttgcgtcggtgaagtatccatcgtctctaggactcgatcagagaatgtttttctagcaaataaataaataaattgataattttgatataaaagtactgcagatgatgtggagtttttttttcccttagctgaaaagatgatgtgaatggagaatttttttttttctacaaattccaatcatagttgtgctctttggagtagcatatcctttgataacgtgaggttatgattttagggccagatggagagtgagaaagcctaactttcaagttagtatggtctta

SEQ ID NO: 761 - DNA, 1058 bp, Cannabis sativa
cggagtcgacgaaaccggcggcggcggcggcagcggttgtagtagcagtagtagtggtggttgactttattttgatcttattttttgtgggtattttcttgagagcgttgccggaggattttttcttgtcggccggtaaggaagaagatgggatcaagaaatatatgctgccccttttgagctctgtgtccggagaaagtatcaaaatccggcgaacaactccctgagagcatggtttgctaataacatgattagggttggccttgagaatctcgccggcggtgaccggacgtgtaatttcctcgacgtagccatttagatggactatacgaattaaatctaaggcaccacatggaagaacacaagccaaacaacaccttaagctgtttcccattttgtaataataataataataataattagatcaaatatattgatttctctctcactctcactgtatatgtcgccggagaaatattagctaatcttctttctctctctttttctgatcttgtgaacttagttggaaggaatatacataaatatataattggtccaatgggatagagaaactgagaatgtgtttgtatatatagatgagaattataagtataatttaccgtacgtacactacacatacgatgaggattcttattattaatataattaattatgattgtgtatggtatacgtggatattatatgcattattattttgtattgtgaaatgactaaaatgtcctcgtttggagttttcatgcatagtactcctgtcctgggtatttttggtttttcgattcttattaattattccttcagtaggataatgacttaagccgcccagtcatacactaatgacagtaaacattattattgctttgataattaacttcttctgattagtcttttctaacaagttgattaagtctttggtctaagctagcgtacggatgcaaataatttatgagtgccttaaatctcaattttatcaaattaataacattttcatttcttcaaatgcaatgaattaggaaaatagactgaaattttatcaattt

SEQ ID NO: 762 - DNA, 3261 bp, Cannabis sativa
  modified_base (2217)..(2225): a, c, t, g, unknown or other
tggtactgttttttaatattattcactttctagacattgatttaatttggtatctaggttactagatcttggtagtttcgttactgccattttcttttagtttaaatccaaagtaaaccctttaggtttgaacaattcctacttggtcaatcttttttctttttatccaaaccttaattaattaaaaatattttcattattcatgaataattttattttttttttgaccaaatagactcccgcagttgccgctgcaggcagcttttagaattgaattaagacagtggtagtagtgctcacggggtctgatttgctttctgtgaattatgctcaccttggtaatgtatatatattacatttattaatcaatttataccatttaaacgaaatgaaactactaccagtaaaagcaatagttttcatgactttttttgtgtcgttactaattatatataataataatttgaattaataaaacacagacagtactactggttagtactgtttcttcctcatcctctaaccaaataaagaattaataaaattgaaacgaggcaaaaagggtagtgaaataaccagtgggctaataataaagctgtcgttttcgtgtcatggggttttctttactttgttgcgtttatcgtttcaatagccgtacgacattacattaccactcactgagtggatacaacacaacgtaaaaccccctcttttaattaattattataaatgtttgtgaatatatagtgtgtgtgggtggggcctggctggcagtacaagatttgatgtggtattagaagccaggctggggttgtggttgtggttgtgatgatccatcacatcgtcgttggtgtatgcctgcgtgcatggtcttgtcgatcgtggatatatatcagctttctttggattcgtgtaccaaacaggaaaaaacctcttaatggcatgcacttcacttcactctgtctttcgctcaacatgtctatttttatcttctatcttttctttcttttagtactgatatgtgcaccctgcatatcaaacatttttacacactgcatcttccttttgaacccttttctaaaattctaatatttttgtgcatgcatgcttatccaactctataggagataaatagagaaatgataacatgctctcttaaggtgtcaaataccataaaaagtgacaaagaaattactaacctctcacagcctaccatatccatatgttgttgagcacatttaagtgtctagccatgctcatagaattacccaataatttattacactgagatgtgatcttctagaagctttttatttaatttagattggctgattaatttagaaaacaatactatgataatgtttcagtgctattcatatcattagtactactcttgttattggctctttcatgagttattagcatattttatcagtggttcataagttgcatatctagttaaattaaaatatgtgaaaattgaaatagtaccaaaatgactaatttttgataatatgataactatgcagagttgtagagcactccactaatactccttagcagtactacactttctttctagtatactatttgtttggactggactttccttttatatataaaaaatagaaaattattattgaaattactttgatgtgtaattatatttcagatgcagaaggtggtggtggttcgtcagaggaggaggaagagcatgaggttagtggtggtggtggtggtggaggagaaatggagggtctacggatgatcacacaagaagatcgtgagctaaaggagaagctcttgcgaaaatacagtggttatataagcactcttaagctcgagttttctaagaaaaagaagaaaggaaaactacccaagcaagctcgccaaaccctccttgactggtggaccctgcactatagatggccttatccaacggtaactcattatcaatataatattgcaattattattattgggccattttttgttgggataattaagcactatttttttaaaaaaattatattttgacatttaaatattttttttgacatttttttggtacttttataaaaacaatacgaaaagaacaagaaaactacatgaaaataacatctaaataatatcaaaactacaacaaaaaaataacatacaataataaaaaaattaacaagagtacaacatagaaagaccgtattttctgtaaataannnnnnnnnaatatttaaaatttcgtgaaattgtatttttgtaattttttttttgtgtatttgtgaaataatctctatttttggtacatagagaattacaaactattgtacattattatagttacagtacatgattttgtttatttttttagaaattctgaatattttagtgtgccgaatataagtattcaaatagttagtttgcatgttctctttcaaaaaacaaaattattgcacacatataaaataggacgcatacaagtgactaatttgaattttatttttgatgtacacagtaaattattgaaaaaaattcaaaaatgaacggaatgcttactataatcatatagtatatcgtcatattaaaaagattagaatgcagaaaatgttgttacaacaagagcaaaagtgatgccccaaaattttgtgttatctacacttaataattataattttgatcttttatatggttgtatttttacattgtagttatagcttgcattttataaatttagaaaaatatataaataatttacaatactaataataaaatttatactttttttgttgcatccatatatatttgttttaacagttatatatatatgtgcgtgcaattataaatttgaactctaattttggtattataatttattactacaatacaataagttatagtcatggaaaaaaatgatattataatcattttacatgtggaaaacacagaaggtacacagtgattcttttctttttctggggaatcacttgactcgagaactaacagatatatatgtatatatatataaataatatttgatattgagtttcttgataataattatttgaatacgtgtacaggaaacggataagattcaattggctgaattgacggggttggatcagaagcaaataaacaactggttcatcaatcagaggaagcgccattggaagcctccggagaatatgcaagtagctatgatggaggcacattctatttatgcctcatccatatgccataatcaataattaattgtttcattttttt

SEQ ID NO: 763 - DNA, 1438 bp, Cannabis sativa
ttgaatcaaacatgccattttaattcagtggtaaagtaacggcatggtaaggtgtaagtcattagttcaaatgaatattcagagatagaacgagaaaaattaaatttgattaattcaacttttaaaattttggaacaattaaaaaattacaaaaataaaactattcgtttttgtcaacaaagaacgattataagttccacaacaggttttccaggaagttaaaaatcttgaatagcctttatgtaatgtatactgatttttgcataaaaacaattggcacaccaccatctacagctacattgttacaatgtatgaactgatagtgtaaaatatattctctatatttttcctttataagaatttaaatatgagttcatattatactctaaattatattcctatgtattgtagactgtcctgaaacaaataactttgctctgctacattttatttacaaagttcctccatatattttccctattccaaatcctgaagatcatagttcacttctttctttccttcaagtttaagttgttgaattctctgacgaagtcttctccggtgatcatgaatcttccaaagaccatgacccagtatcacagaagagtatatgccatgtgtgattatgggtgcaagaatgttatctgtctgtaaaattttcaccagaataaaattagaacaactcaaccattttcgaaattttcagagtatgcaggttaagaaaaattgagtctaggcaaaatggttacctggatccactcaaatccaaggtagagagccaaaagtccttcaagtaatggagaataaattttcttcatttgtctcctcttataccaggctgcagaacccaatgatgaacaaatcatgagtactatcattgatttattttaagcaaccaaattaatgtacaagattttaagaacaatgccattattaagatggaataactcaaacaaggtgatgagaaacacaagagtcatagtgaaaacctgtgaagagtttcttcagatcttcgcgactagcacgagatggcaaaactggtgcaactatgtaagcagggtctggaagaaacataaaaatacgatgagcaaacgaaaaattgtacaagcaaagatgaaaactcaggtgcaatattagctcgatgatcgatggattcacctttcggggatgcagccacatagtaaagggaaccagttagagcagctgtcataacagctgcaaatgcctgagcaaatggaacaaatgggggaagaactccagtctacattttaagaaaaagaaaaagcaattcatcactcatgaaaataatgaaaaaaaagataatgtggagagagagagagagagagagagagttgcataccagagatgccattcctctagcatctgatatcagatctgtacccttcaggaatatttcagccaatgccccctacataat

SEQ ID NO: 764 - DNA, 872 bp, Cannabis sativa
atattttaaaattttaacaagccagccattattgtttgtactaaaaaaataataataataataaaaaagccagccattatttttttgattattaatctctatttgcaatttgtacataaatttcttttttttttttaagtttgtacataaatttcttgatatatatttttttcattatatacatttaaattaaattgcttaaaactctggaaatctctgtattatgaatgggcaatatcgtcaattaatcatattttaggctaatttagtaacttaaggaagcaaaagaacgggtcttaggagccaataatttgaacacatgtacgaaaatagcctcgcatttatgatggtgatcttcacgcgctccaactcactcagtcaccgccctcgtgcgcgtagctttttcctcacgccgctagacctgagctgagctcaaattcggctttcggtccacgtcatcaaactggtggaccccacacagcctcagaaatttgaaaaccctaaatgcacgacagattcgcctcaaattcaaatccaaattagaattcacacatttaaggaatctccttatacatccgatgaacgacattgcgccacgtagaacaaagatcgcataacaaccgtccgtgccagatcacgcgggcacaatcccgggcagctggagaacacgatcctaaccgtaggatcaacaatcgaactctaatcttcgtctattaatctgcccgaaattttgtcgggtagatctcgaggcctttaagaagccaccctagcccccttatcgttctcgctcagattagggtaagttccttcaaaccctaggcttcttctaagccaattttctgttataatttggttgatcggtggcgcgtggg

SEQ ID NO: 765 - DNA, 4420 bp, Cannabis sativa
tggagtaagatggttaaggtactcttatgcttctattacaggacctgtttgaaatagtttttgcctttatctttaaacagtaggaaaagaaataaaagcctatcttttgtagtctcttttttaatattactctttaataaagtttttcaagtcacaaaaaaaaaggcttaattgtatttaatttttgttttctttgattaacatgaggtgtgaataggaaatgtatttgggagtgtcgttaaaactaaaaatcagccttcaatttaggctggaggtttctacctagagaaaatgtaaattccttcagttaagctctaggacaagagtgaaagggaggaattggcaggcattgcgggagcatagaaaatggataaaatattgaatgttaaatttttgttagaactcaaagcaactttccttcgttttttaaaacccttcttttatatgcattagattaggttgcgtcttatttataatctcctaccaaattgtggtttgtcatttaattgacgtttattgaatgtaactctatttacctggtttgattatcattattctgaaattcttccatgttgaagctgttgatatgcttgtttaagcttaactcatgtaattctgctataggaaggacaatttcctcaagagaactttaattccggaccatgtatgccttcagcacctggagagactctctgtgcagcagtttcggcctctgcatgggtggagcctcatgggaaatgtactgttgcattttccttggcatggtcatctccgaaaatcaagttttctaaaggaagttcatatcataggtaaatctattgaattttacatttcaactgtatagtattgcaattgatagaatgatagttacccgaagtactgtgtagtgaaaagttgcatgaacttattttacatgtatcttggtgtctgttatcttctgcaggaggtacacaaagttctatggtacatctgaactagcagctaaggaactggcgcatgatgccctaacaagtatgtatctctgtctctgttcatgatcctatgctatttaatcattaatgtcagttatatcctctctcaaagacgaaaaaggagagagaaggttttacggcgattatgtgcttaagtttcgataaaaacaattctgaactggctttatctaaaaatttgtacagattataagcggtgggaagaagatattgagaaatggcaaagccccattctgaatgatgttaggctaccagaatggtaaatactgatttatcctatcaagaatttacaatttcagatgttctctgcattaagctcttggaaacttatgggttcagtttcaccattctattagagtcttctattgtcatacatttcattgattaaacctcatatagccattgcttccctttacatttaaatttacatctatttacatgattcgaataccaattcagtttctgtttttgagttgcttatacgcttgagcaagttatttcattgatttagtgatcttgggcatgtacttgagttccgtgtctctgtttatgtccttaaaagttgtttttgttctaaattgttttctatcaaaatcaatgtgtaatccaccatttgatgctgtaggtacaagtttacattgttcaatgagctctactttttggttgccggcggaacagtttggattggtatactcttgcaatccatttttcgtacttttagtattctggtttctcgtatgttttagtgttgcattatcatacttctcatcactttccgatcttgtacagattcttcctcaccagctaacatacgaaataatcagcaacagctaacaaatgttgaagcaggggactgcagagcagttaataagcatgcaacaactaagagttgttacagtactgctgctaatttcggtttggaaaccgatagaaaagaatactcatgcaacgattatgacgaagatgttggtaggtttttgtatttggaaggcgtggaatatatcatgtggtgcacatatgatgtccacttctatgcatcatttgctcttcttgagttgtttcccaaaatcgaactcagtatacaaaaggattttgcgaaagcgatcttatctgaggatggaagaaaagtaaagtttctggcagagggaaactggggaatccgtaaagttagaggtgctgtacctcatgatttgggaacacatgatccttggagtgaaatgaatgcatataacattcacgatacgagtaaatggaaagatctgaacccgaagtttgtgcttcaagtttacagagacttttctgcaacaggggatatggcttttggagttgatgtatggccatctgttcgtgctgcaatggaatacatggaacaattcgatcgggataatgatggtctgattgaaaacgatggttttccagatcaaacatatgatgcttggaccgttcatggtgtgagtgcctattgtggctgcttatggctagcggcacttcaagctgcagctgccatggcccttcaactaggcgacaaagatttcgctgaatggtgcaaaaccaagtatttaaaagccaaaccagtatttgaatcgatgctatggaatggttcttattttaactacgacagcgggtcaagtaataacagtaagtctattcaggcggatcaattagctgggcagtggtacactgcatcctcaggcttgccttcgctatttgatgattttaaaatcaaaagcgcgcttcaaaagatctatgattttaatgttatgaaagtcaaaggaggcagaatgggcgctgtgaatggtatgcatcccaatgggaaggtcgatgagacttgtatgcagtcgcgtgaaatatggaccggtgtcacctatggtgtggctgctacaatgattctcgcgggaatggaagaacaagcattcgctactgctgaaggcatttttacagcgggctggtcggaagatggttatgggtaagtaccgcacttggaatgatctttttttctatttcaaaaagaacggaatgaaaatagtttttattccatttcattacctccaaacaaactccacctgagagatatgtttggttagaataaatgaaaattgaaatagaaagagaataaatgaagaaatagaataagaataggaatagaatgaaataaaatttaaaatatataaaaaattattattttttattatgcattgaaatagtctttctttcggtattttcagtaaaataaaaatagaattaggaatagaataagaatagaattaggaatagaatgaaataaaatttaaaattaagaatgaaatgaaataaaatttaaattttaaaattctaaattctcatgtaagaaattacaaaagaaattatttcatcaaaaaaatgtaaatgaaatgacatttttaatattttaaattacagccaaataaaaggttaaatagaaaattgaaaattgatttatttttattctatttaatttcattatctctaaccgaacacaacttcagagtcaccatattatcgacgagtttgtccgactgacttgaaatctgttttccgactcttataggtactggtttcagaccccggaaggatggactatcgacggtcatttccgatcgcttatctatatgaggcctttgtcaatatggggaatgcagtgggcattatctatgccaaaggctattcttgaagccccaaagatcaatgtcatggacagaatccacttatctcctaatacaaatgggttaagaacatctcacactcatggccaaacaggagtccgaaagatcgcgacaaaagcgaaatgtttcgggaattcggttttcaattgttcctgctaaatttgtaacatgctagtagttaaaatcatatgctgtaaagaataataataatatgtttaatgcttatatagtcattcttcactttccttaattcttctctctcagtaagagctgagggaggtttatagaggaagtcgtgtagaaataagaggcaacaaaaaaaaaaaggaaaaagaaaaaagaaaaagaaaatctgagtggtaatggagtagctaatttcatttgcattaaattttgtacaattcttttttagtattcattaattaatttatcagcattgtaaattttaggagtctgaaaagaaaaaatagtacatatatgatgattgatgtgttagtgtctaagagcactcgtagagaatttttaaaatatttatgaactttaaagcacctaatagtttctctactatattttttaaaatacataattaaaattttattttttttctaagttaaaaacatatttttacattacattcgacattagtttctttaaattacattatttttttattattttttattcatttaaatatataatattattatatatatctttatgaaaaaaattattattaaaatctaaaacaaa

SEQ ID NO: 766 - DNA, 2442 bp, Cannabis sativa
tcttcttcaaattaagggaaaagtttttaatcacctcactagtactcttgttatataaatctaagctctgaagttaacttgatttggccaaatagtcacatattataaacatataatcctttacatctaactaccagatgtgataagtttttggtttgtagcatgagagtgatacatatatatatggaaaaaaaaaattcacattattttatttactaattattagtctcattgtagttaactatatatacaaaatcttatacttattataataatactatttttgttgaaataaatacttttaggtttgcttgatttagcaagtcttaatctgcacatgaaattttatcttatataaatacatatattacgattatttatttttttgattctccctcgatcgagctcatcatgtatatccacttttctcttaatttgtatgaattaggaaacctaatcttcgaatgcattttcttgagatttttatatttataattattgtgtgtatcccaattatacagatcgtgaggactagaagaagcgaagatagagaagtgaaaagcttaatatataactcctcaagtaattattgtggtaatttgtcagtgagtactgtatatatatattttaatttttttctacgaaattatttctaccatacaataatgaaaatcacattatacaagatatgattgagaattccaaggacggcagtagtgattttcctccaagagaggatgatcaaggcaacttaaaagaaggaaaaatcactacaaaattagcttcaatatcatctaataccactactactacaaatgctagctcaagcacgccatggttaaggctgaaggatcctagaattgttcgagtttctcgagtttttggaggaaaagacaggcatagcaaagtatgcaccataagaggattaagagacaggcgtgtgaggttatcagtaccaactgcaattcaattgtacgaccttcaagatcgattaggccttaaccaacctagcaaagtggttgattggttgctcaatgctgctaaggatgaaattgatgaactccctcctcttccaatgccaccttccggtaacttttctctgttgacgcctcgcggtttagaagccagtaatgctgctatgaatgccaataatcaatctaataatgaacaccaagaaggattcaagaacatcaacaatgagagtagtgaatggaatgttggttccagcagattgcccgggtctaatttttggagtaatagtaataataataataataataataattcatcttcagataatgttgtttggagagggaaatcaaaagaggtaggcagaaatcgaagtaataatgatcatgagaaagaagaaagagaagaagaagaggaagaagaagaagatgaagaagaagaagaagcaaataataatggtaatgaaggagagaacagtaatctgtttcatcatcaaagacaaaatgttataagtcatccttttttcccaggtatgattaacaataataccataccaagtggttaccgttgggagcctcagaattatcctttgtctttcttaggcagcggtggtttcacatctcaaactgatagtcatcatcatcatcatcaacaacatcatcatcttcacaatttgaatcatgtaatgtctttgcagccttccacattatctctttcaactactgggtctcagttcttggtatgccctcctggaaatactacaataacacaaacttatttccctacaagcaatactactcaagctgctgcggcggatgagattcatcatgatccaagacaagtacaccattttcatcagatgtttaattcgaatccacaaagtgggctcttgccaaatcatgatatgcaccctaataataataatcctcatcagacaatgagagctaccttaccactccactttagtgctacgagtagtgattctaataagcttgtccatcatcaccaaaataaggattaatagggatccatctcatcagttctctctcttcttcaaagtactacaaaaaccagcttattccctgccctttttcaagaaaataaattgcttcatcactatatatatggataagggaaaggtacatatataattagagggcatgcattctactaattattatttactcagaccggtttgcagacttaattttatatatatatttttgatttcttatatatgttttatttataagatgtgtgatcaacttattgtattaaattaattttgttttcttcaaagtgtttgaatttgaaactagctagaagttcatcaattcatatcagatcttttccttcagctgtaattttgcatttattggttgttgtaagtaaatgatacgtgtgcaaattgattgagtatgctaaaaaagtcatgctatcctatatcactgggtctaatggtatatatatata

SEQ ID NO: 767 - DNA, 3481 bp, Cannabis sativa
cttggcttctcacctaactttcttagcaaacggttcttctctaggtcaagactttgagatattaggccaaatattgtccccatcaacttattaatctcctttgcatattcaacaaaaacctctctttaaaagaaaaaaaaaacagagaaaaattagcaaaaaaagaaaaagagttaatgataacagagttggttgaggagttatataagtagaaagataccgataatgaggaggattttctggtaagtgagtgatgaaatctccattaggatcccatgaatggagaaagttttcactccacattgtgactttttcttggttttgacatttgaggtagtagttcaaaattctggcttctttgttatgatcgttagagaagagctttgacctttcttgaggaggaaatttgaataaatcagaaatggcagtcaacattcttttgcacaagttttgagggactccatggtttatgatgtggaagaaattatactcttcacaagcttgtgttatctaatcaagtagaaactgagaaggagtactcaaatcaatgatgggaattgagtccagagttgatatttttgagagttttgggcttttactctgttagggaaaaaggagtgctgtctttggccatacaaagagactaaggggttgcattaagcaagtgtaggctatttattaatactcaatattgatcaccttaattatgcattgtttaaggtacaattaagtaacaaagacttagaattagcaaggagatcatttactaagaattatctacatacaaatgtcttagagaacatgaaagaagttgtgccttttattttcccaaaaaacacagaataaaacataaccaaatactaattaaaaagttctcaaattaactaaataactagctttatttatgatgattcagtatctagcagctgcaatgcacaatccacagattgttcacttggattccttcttcatttttgttcacatattcctgcaaccaaacacatcaaaaatcaatttgaaaagaaaaagataaaagaagaaacatatattagggagtagaaatagatgatcaattaacctctcagctctaatctcaaacaggtcttcaagcattaaatcccactcaaaatcatcacacaaatactccatagaatgctctaagttatagtcattcactttcaatatctcctcagttaagttgttcaagctaaaccccatttcaacaactttattcagaatggcttcctcatctttttttatattatcatcactaattaaaaatttaccatcatcaatttcaacactattaccagtatctggttcatcatcttcaacatgatgataatgataataattagcagtatctcctccatcaatcttcttagccataacttcatggtacaatagtttccccatgagctggtgtactaatgaattttcttcttcttcacaagagtgatgaccattctcaatctccatccaaatcgagttcaaatttttattttgccattgtgtagcattgtcaacaaatcctgtccaatccgattgttgattatacgaaacactctgtgaaataataatttgttaattgttagtaatgttaattattgataataataataataataataataataagaagaagagaatactatatattgattactatatattatcaatgcaataatatttttaattaaatttaacaatactataaattatttcagaaatataaatacaagacaacttaaagactcttatatataagaaaattttcaggtaggatcatgacttttattcctacgcattttttatttttcttatataaaaatattatcaacttcttctttataaaattttgaataatttataatggtaaaaataagactcaaataattaactatatattttgaattttattttttgaaaacgtgcaacttactgtaactttttttttcttttgcaatgtaacttaccataactttaaggtataacacaaaacataaaagaaaaaaaatccaaaaaaaaaagtgtcgatagaggtaaaagtgtgatacagtggttttatgaggtcccaatttcgaattatcttcccgtattaaaaaaaagttatattagctagggcaaaagtatatatatttatctatatatataaactaaaataaaattgtatgtaatgtacttacatccactttctcttccacaatgagatctttagctttttctctgagaattttgtccatttcttcggacgtcctacaaagaggaaaaaaaaaactcaaatcataaatatagaactcaaatggtcatatataacaatcatcaatattggagaagatcaatgaagacttcacttacattgatgaagaaggattttcttcactggaaaatactttgtgacatgactcaacacattgatcaacatcttcatcaatcttatcacaagaagaaacattattcatgaaatgtaatatttgatcacgatcatgagtttggagtggtggtagtacttcctcatgatcatgattattattattaataataataacacttttattagtagtagggcaaagattgtctttggttataatttccctattattaggtttgatggccgttacaaagattctcaaaggtttaagatttaacctaaaagcctcataaagatcttcatcttcaataagagagatttcatcataatcttcatcaatgtactttaaggaaaagtcttgttcttcccaagaaaataagttgaagagatgaagaattttgtctttcagtccacgcaagttggttattccattatttggaaaaattgtaaaacgtcgaacactattcccatatttaacctgaaacattaaattgataaagcaaatcacagattgaaattataaccaaaaaaaaaaaaagaaaagaaaacaaaacaaaaagctcaccttgactactacgctagattccatgagttgaagggtgatcctatgaatgcacagaaaataagtgatgatgatatataataatatatagtacagataacctttgttataattttgaatatgttgtaacaataatatccttcatttgtgcttttttgaatttaaaataatatgtaatgttatttttaatagcaaattatctttttttttttttttttgataatatagcaaattatatttttctttaataaataacaaactaatttttttatatatattttgctagcaactttttttaatatgaattaacaaattaatctttattatttgaaaatcaacgagagtttgtaatcctcaactgctcgtacatttttttcttcttcatttgatcgacaagtggaggtagagttttttcatttggaaaaaattaatgtagtttaaacaataattaaaatatgggaaactaaatataaaagatcaaaagtaaagtgataaaatttaacgggtgaataaaaaattcaatcaacacaaataggagttaatgtata

SEQ ID NO: 768 - DNA, 1582 bp, Cannabis sativa
aaatcttgatcttggagtaaggaattgaagttaacttgttgagtttttggtgtttgggcttgaggaagttttttgaggaagtgaattgttcatttttatttctagttgtgagttaatttcttagaatttgaagcttacatgatatgtgtttatgatgttcttgatttagattttggtatgctattgttggaattagcttggagaagtaattgaggtagctaactcatctctaattgcttttaattctgaatctttatctatgattattgattttgcatgatgtggtttcttgagtgtatttgacatgaatatatggtgataaattcatgaataatatgcttgattttttgtgttgtttgaggtttgcaaaacctagattttaggtcaatttattttgttgagaaatgattgaattttaagcatgttttgagcttaggtttgtgcttagttttctaagtttgattatgtaaattttgaaaaaatttgaacttgaatgtgtgtgtattagacatgtgatatttattttattttgaacttgcatacactcttgtgatccgtgtttcctgtaaaggacacgtggacgccatgtcagcactaaaagcccatcagtaggcccaaagaagataatttgggtcaagcccaagttagacaagactttccaagaaggtatcttagctccataatcaaacaagcttccaccaaggacagcctgtatccggaagtagttctagtaccatgattctagagggcaaaacaacgtaataacggaagaccagtttagtttctctttttatccaagcgtacagaataagtaattagctctccttaaatctcagccaaaggatcctatcaacccaaaaaacgaaattacctaaaatggagatcaaacaattaattcataattaattgcccacaattgtaagacatgatattgacagcttaatcgtatctaatctgcttagtcagcacattgaatctttcatggtctgggcctcacaaagacagcccaatttatgtattttcatgtaaattctcccattagagggaaaaagaaaaactaggtagagttcctgtaaacactataatacccaacaaatccttcgaattaagggttgaactctcttacaatacttgctcaaaaaaaaaaatagagaacttatactcattgtattcccaaagacttttctagctaaaaatacataataatatcgactcgtagactaaggctcgttaacgccccaatcacgtaaaaactttgtgtgttgttctatttctttctttgaattatttatttcttcagttctaattttttaatattggtttttcgaaaatctcggtaaacattttggtgctttatagccaactgagagctgaaggaaacagtgatatcatctgaagattacatccagtaatcatggtactcacctgaactaaatttggtcttcactttactagacctagtgctaaggcgggcgatacaaaagatccaaatgaggtgaccagtcgccacaaagatcaacgtgacaaataccaaaattgagacgatcccataatcgaagatagagaatagaggatgatcccc

SEQ ID NO: 769 - DNA, 1779 bp, Cannabis sativa
gttagtggtaaagtaaatgttggttatggtggtttaggtgaagaagaggataaaactaccatgaaggttgattcgattgcaccttatgctgatcctgtgaagaggaagacaaagaaagacatggattttagcaggtggagagagattctaccgggtgaaaagtctgacatgactgaatccgaactaaagacgttaggttcaggtaaaactgataatcgaaaaaaagatagagaagcaattgatacttcttgtagtagtgaagataagcttcatattcaagataataataaggatttcatagctgttaccttcgaaagtgaaccaaagcccacacgggtaaatagccaaattgatgcagagacaaagggtcttgacaatactaatgtattattagagaggccaaagagaagagagcaaaagtgttcaacttcaattatagcttcttctgggaataatctcggcagtgaacaagaatccatgtcacttgagagtcaaattgatgccgaaaaccgtcagcgcctgcatgaaatgtcacctgatgagattgctcaggcccaagctgagataatggagaagatggaccctgcattactgagactactgaaaaagaggggtgattcgaaatcgaagaagcagaggtctccaggtctggatagtgccatcaaagttgaatcagttaatgaacagaagaatcaggatgaaaacgacatgaaagcttcttctgtccctgtgaattctattgttcatgaaatgacgaaaacaacatcaaatgaaatacatagtggggtggacaatggggaggtacaaaatccaaacccaaccagtggcggtttgtggaatgcttggagccagcgagttgagaatgttagagaaataaaattttccttggaggggactgttgttgaaagtgataatttccatacagcagaaactggttagtctaatgtcttttttttttgttttggttatggtgtcacaaatataattctatcatcagttgtctctgtttttgtgataatgaagtaagattaggcgacctctttcaaatttttgtttattgcattgaatttttggacttgcctagatattctaccgtcgttcatgctcaaattatatgctgcttaaaaatgtaggccaattatatttgttttaaattttgggggatcacctagttagggcccaaggtttggtaattaagagttgcttagtaagaaacttaaattgattactctcaattatcttgttcttattggtaaattagtaagattgctgttaaccatctgtaacagttttcaaagtaatgttttaaaattcaaaagaagatatttgttgatgtgcagttctgattatttatttatttatatacttttctggatatttcattttacagattgtgttaccgagcgtgacttcctgcggactgagggggatcctgggggagctggttatacaattaaagaagcagtggcactcactcgaagtgtggtcagttaatttattgtattcctttattagtttattgtactaacaacatacttattggtttgatttttcaagattttttgaagctagaataaacataaactaattagagatgtttgtagatcatatggttcattttttttggctactgtttttatttttatttttaaatcgtttttttttttgaaaagagtcaaaacttgtattgatgaaaataatacaaggatagtgtaaacaatcacgccagactgctgtaaaaaaaatcacaccagcctgacaataacaacacaaaaactc

SEQ ID NO: 770 - DNA, 1124 bp, Cannabis sativa
ggatctaaagatttattaggattcatatctaaaagagtcgctttaacttccttagcagtgaccgactttaaaagctcctggttttgagaatctgcgaaacagaaggaaaaatgcaatcaacaacttcattcccatttgaattggttgctgcttgaaagatattagaaaagtaaacaagcccatgactccattctacctaactactattttcatctttaagcttatgaataaaattatttttttagaagtagttgtggtatgaaagtacttggtattactatcgccatctttgagccatagttgtttacacctttgtctctaatagatctctttctgatggaaaatagtattcaacttcttcttttcctcctcaaataaagagcaagatattgggtcatgtttgtccttcaactgcgtaaatgactttttagactgagctattctgcttttaaagttccccaagtagaaaggatttcaccacaataggccaccttctcaatcacagagacattagtttttgtttcccacccttctttaataatatggagacacataggatcagtaaaccaggcgttttcaaacttgaaagaattcttttgaagaagagataaatgtgtgataggatccaagaacaaagcactatggtgggagaaagtgatatcaatatgaaaaagcttagctattgagaagacattaagccaagccaaagagaccaaaccttgatccaaacgaacctcaacctaccagttagaccccttccatcgttcccaagtaaattagtacccacctaaatctaaattgacaatatctaaatcagaaattaccttttaaaatccttcaatgagccaattcggatacgactttccaccacgcttatcggcttgagaagttacattgttaaaatctcccaagagacaccaaggaagattagattcagctttcaaacttctcaacaaattccatgtattagcacgaagactccatttcggctccccataaactcatgttaacctccattctatcataccaggaactcgaataacaacatcaatatgattaatagagaaactaaccacgttttcctcctcacaaactctctagagaaaaagtaactcccccctcta

SEQ ID NO: 771 - DNA, 1314 bp, Cannabis sativa
gatctttgttaataatttacattaatcacacttgcaggattcctggcgtgacctagcaagtgcttttgctaatgataagacgctgctactgttaaacacagtgcaccaggttgaacataatatgccatgacttgtactttctctattgttctcgttgtttacagaaaaattttctccttcctttcagcgatcgcttgctcaaacacttgttcggtcagcatctggcctgagtaatctggagttatcaaaccagtaagttttcctttttcaaactataaaatttgatcttgtcaaagtgtagatgtaattaaattgtaaatgttaatgtatgtctactatttcttcaaaggtatgtaaggaatctcatgggtcatatgacaacatattttgtggaactttcaacaaagaatgacttcaaaagtgttgctcaacaaccagatataatccattcggtgaggataaaagacttgagatagattcattagctaattcctattcaagaataacataatattcagcatcctttaggtcagctgcttattggagcggcttcgtggagcagctaatgcctcagagcctcgaacacagaaagcaatctatgagttgggattctctgtaatgaatcctatcttagtattgcttgatgtttacaaacatgaggtactatttgcaccatgaaaactgatactcttgtgtaactttctttattcgtggaaattgcattgaattcttcagttatttttctttgatctttgtatatctttgattacttaggcttatggtttgttggtttcctgctctaatcgtaattggacatacttcgtaatatgtttgaatttcttgtctcctaaaagattggaggtttcagcaggactgttgttaaacatataactacgtattttcagagccatctgataatcataattgggacaaaaaaccagttttctttactcttgaaaatacaagtgacaccatggggatccgcttatttgcgcttatcttttaatttctgattagtctgcagttgtttatctgctactcaagtttgttgttgattgggttgatggacaaataagctatctagaggctcaagaaactgctgctgtagttaacttttgcacgaatttgattcacctttactcgtcgcacaatattggcaaggtacttttcctctgttttcttctgaatattaatttgaagcaaacatccattgaaataatatacattaaaagaaaaggaaaggaaataaaaaactggtcagggatcccatcctagatagtctcaattctgaactattaacttaatcaaattcta

SEQ ID NO: 772 - DNA, 1774 bp, Cannabis sativa
ttttttttttttttgtgggggggtactttgtaggtacctaagagggactcaaacctctgaccttatggtgaggaagcccacatacggcatgcccactcgtttgaggctgagcaacacctctgttgatacttcatttattataattgcttcatttatgcagaaaaaacaaagtgcaggaaaattcaacaatacattgctagcataagatccaagcaccgttgtaaaagttaaaaccaaataaacatatttcacaaaccttcccaatgatggttgagtttgagaagtcaagctcagaaggttctatttcccagtcacacttgtttggcagtggaggtgcaacaggttttggttcaaaatggcttccagtttggccctgaaaagattagactataattagaaccttcaaaaaaaataaataacaaataattgaaggcaaaaatgaatcttgtgaagactaggataacagatgagatttcttctattgttattgtatactagaacaccacattgcaaaagtaaatttaaactgatcaacattttttaatatgcagtcttttttttagtgaagtgtttatatataaataagattacacaatttgagattcgatctcagaaccccccacacgcgcacccctcgtacctatatatgaccacttgagctagcctcaagtggtttttgtaaatatgcagtcagtcgctgtaatttataaccacatgcttattgataatatatcagaacagatggatacgagtgtgaagtcaatctaatctctgatcactgaagccagataacaatgaagaagttgtccctcaaagcttcctttcagtttccacacaagccaaataggcttcaaatgaggctacaaggagtctgtaaccaagcaacctcaccacttattttttagtaaggtacatgtgaaaagtatatcctactacagatcaaccctgcccaatatgtaactatttttaatataagttgaaggaataatagcatgagcataatcttcaaaatccatttccagctcatattcttaaatctgataataagtgctaaacgtatctatatcagggacttcagaaaaatacactataagaacaacaataccgaaatgcattcaagcaatgtagctagtgaaaagccagctcataaaaaataatgaactgaaattgggggaatttacaattacataaacaagttttcaaattttcttctatgttttttcattcgcatgtaatgtatgtatttataaatatgttgtctaacgaatttactatcacaaaaacagaaaatggagagataaggctatgcactcacataggatgagccgccatatgattttaagagctctatcatggaatgtttcttggctccttctgcatctgccagaggctgtcattacacacgggactttgtttaagaaagcattcacagatagagtgaataagtaaagcttaaatagagagtaagcaacaaaaatttgtaacttaaatataagctctccaaatttgctaccaaaagagaaaacaacaatactttctaaaaaccaatcaaagaaataagaatccatccaataccgtattcttccatcgatcctgagcgttgacatcggcgccaaactcaatcaatgccttagcgacgtcgatccagccatgtagagatgccacgtggagtggagtacggctgtcgtagtccctggcctgaaccagggacggatcctcctcgaggagcttgcggaccgcaacgacgtcgttttgatgggcgtgccatagtata

SEQ ID NO: 773 - DNA, 3256 bp, Cannabis sativa
tttaatttaatttatcattcgggaattggaatttcatgttcatgttcgtatattggatgggatattttagggggaaatggtcttattcatggtggatttgacaagtgaaatggtgtatattggctggtgtttttacggttctttttaaacgccatggttgttagaaattaacaacttttgaggggcttccatttttttcttcctgtttttaccttagttgctcaactagtaggtggatggatgagtggtataagaatatgtaaacgattatattattgaataacttaaatcttcttgttttggtcataaatgagttaagttctaatgggcatcaaaagttaacattactaatttatctgtaacaagattttataactttgacaacagtattttgtaattcatttaataagtttatcatgaaaattttatagcccattccaaaaattctgagtcagtcccaatacgaagtttataaataaaacaccataggctagctcaccctcacacattcagatatatgaataaaattcgatgaaattaggttcacaaaattaaatcgttaaaagagatttgtaatgtcaataccgaaacgttagttctattgtaaaagtttattcactttaaggttgtcttccctaataattctaaatgagcagtgtggtttaaaactatcactcaaaaacaaaaccttaaccattcctcttcttaagaagttttaaactgcattgcttgcggattgtttattggaacaatgtttttgtagttgatagttctaggcttgtggcttttctatgggaagtctcctcttcttaagaagttttaaactgcattgcttgcggattgtttattggaacaatgtttttgcagttgatagttctaggcttgtggcttttctatgggaagtttcttttactcaattgcttataaatgtatcttagcaggacctccctccttacaggtttgaaattgggttttgcatgtgtttttaaaatttgacttccctctactcaactaggtatgcaatttgcaagagagcatattattcccctgtcatggaaaaaataatatattttaacagcctgaacttgtatatggatgacattttctgagctttaagttttttagaataactgtataagaattgtaaacttcactgtctgataatacaagttgtttacttcaccatggctgttacatgctttgagttatgaaatttggtagaaaagatgaatggacataatcaactaaaagtctaaaaccaagtaaagtctctccctgattatggatggtcagtactcagtggtctctgtagactgtagtgatacttattcttgtagtagaagtagtttagttgcttctaaatactaaccaatacattaaattcatgtgaagggagataaagtgattatgtgttagttctctgaactgttgaagcatcattttttatgacaaatcctagtactactaccttatcttgattatgttaatttttcttataagaaaaataattaatttgatataaattttcaacatatgcagaccgagggtactattcagtggagactgtctcacttctcgttgctctgaaagtgcgttatagagatagaatcacaattctgagaggaaatcatgaaagtcggcaaattactcaagtgtaaggctccgttctttccaagtttacagaactcttaactgctgatactggagtttgtccaagttttttttgtattgctattgtaaaatttatctttattgtccacagtcattaattgagctttaaattttaccactagaaggttattcagaaatatctttgaccaatttattttgaatttttgtattgttaatttcaataaccactagtggttgttcaccatgttgatgcactgtgggagtttgaatttaaacggctatcaaaagatttctgtatattttcctaaaaattgagtatgagtattgacatacaatgtagaaaagtaagtcaacctttacaccttacgttattttttcggcatccaggtatggattttatgacgaatgtttaaggaaatatggaaatgctaatgtctggaagtacttcactgaccttttcgattacctgcctcttacagctttaattgagagtcaggtttgttttcttgttgcttttccctttgatatatatatatatgtacatgtcatatctaagctgacaaacatactcattttcatgtgtagatcttctgcttgcatggtggactctctccatctttagatactttagataatattcgtgctctggaccggatacaggaggtaagctaacaatgcacactatactcaagtatattgtacttccttttcaaaaggatgctgcagacataaagtacagaacataatccattaaaacatcttttgctcttaggttacttttaatttttagattcaacactaccgttaatcaatagttttctatcaaaaaatattatagaacagtttctgctgatttagcatcttcatgtgcagttgtttttgaagaaggttaactagtcttagttttgatgtatgttgccttgtaactttagttttgttttgatgtttgcacgggaataggttcctcatgagggtccaatgtgtgatctcttgtggtctgatccggatgatcgctgtgggtggggaatatctcctcggggtgctggatacacatttggtcaagacattgcctctcagtttaaccacacaaatgggctcactcttatttctagagctcaccagcttgttatggagggttacaattggtgccaggttagtcaacatgttcaaattgttcttttcattttttttttcctgacttgattttgtttgaaggaagtttatttacttattgtaggataagaacgttgtgacagtgtttagtgcgccaaattactgttatcggtgtggaaatatggctgcaattcttgagataggagagaatatggaacagaatttccttcagtttgaccccgctccacgtcaagttgagcctgataccactcgccgaacgcccgactattttttgtaaaccccattaactctccaagtatttggcaatttttgttgtgttgtgtcgttttttgtagatttgtcttgcaaaaagaagagttttggtgtttaattgagaagatacagcatgatcgcacttatgattattatgttggttaaaaattctccatttatcaagttgaatgagtttataggatttaccagccttatagttcttgtatttagcaaaaat

SEQ ID NO: 774 - DNA, 2114 bp, Cannabis sativa
aaaaaaaaaaaaaaagcagcccataaatttctggtaaataatattcaaacctttacaatctctcaatggtgccaaagaaaaagttttgggggagacggatgagtttatgagctattttaatttttatacttttacaggttaacccaattcatattgagtataatttttttttagagcatattggatataaatttggttatgtctgattacaggtattgagtctgtacaaattgtacgtgctattctctattttcaacaaaagtttactctgtattatgttattcaagcaaattaatttaggattgggttgtgagtgttgaatgtgactagtttaagatggtattgttgatttttatgtgttttgcactggaataaaatgcgtaaaatgatctgagattgcaattgttcatataaaaggctcaagttttgtatgatggaactcatagatatataattaaaataatggcacctaatcatgcttgtttcacctgtaccattttatgtgtggcaggtttatctttcctcaaccaaaacaaaaaaccagctagagcacacaacaactccacgatccacatcacatttacctatctgatccactttctccaatctttatataaacccatacatacaattgttctatctcacaactccaatacacaattatataacataatacatttagagactacgtacaaaaatggccatacctcatgttttcaactcaaagacagtgactctctacatattattcttagccatcgccgttgaatgtgccatctcagctagattattcgacgaagtagacccacaaccacaacccctgcctacaacgactgtcccaaccaatgttctaccacagcctaatcccacagccccaactcttttgccaagtggcgaaatcccagccgtagccccagcagtcgcagccccagtagaagagattgctgactcaccaattcaagatgttgccacacctgttgacgattctgttgctgactcagcccagccagctcagcctgctgttccacttccatccccaccaatcgacgtggcacaacccatagctggccccacaaccactaaaactggcccaacaacaacgggacaaggccctgtacaaacaggcccaacaacagggcctaatgggcatccaacaatatcattcttcatgcatgacatagtgggtggatcgcacccgacagcccgagtggttacgggcctcgtagctaacacaatacaaaacgtcccattcaccaaagccaacaacaatatcttcccagtcagcggtgggaccccgttgactacatcgaacattaacggtttcattaacagtaaccgtaacaatcttccatttttgacgggacttaacggtaatgaccaaagcagcaccgttattcaaaacagcggtaacaacaacattgtcgaaggaggaagtgaccagccatttgtcacagccggtcagctcccagccggtgcatctctacagaaacttatgtttggatcggtgacggttattgacgatgtgttgacggaggcacccgagttgggttccgctgacgtgttaggtagggcccaagggttttatttggctagctctctggatgggaacagccacacgatggtcctgacggcggtgattcacggcggagaacacgcgggtcacggtcatgtgacggaagacacgatcagcttctttggggttcatcggacggctacgccgatttcgcacatcgcagtgattggtggaactggaaagtttgagaacgcgcaagggtatgctacggtggagtcgcttccacaggtggaccagcacaccactgacggtgtggataccatcatgcacgttaatgtttatctttctctgtaatgtgtgtaatctagttatctgttttcttaaatttgatgtatgatgtaatgtatcccataagtatttgaatttcaatgaaaatgaatctttttacttatttcaaacctttttcaacaaattctaataaattaaatatatgggggatatacaaaaatttatttataaattaaatgttaaactaattaatatgatgtatgggtaaaatggtatatggtaaatgatattattataaatatgaaaacaaaaa

SEQ ID NO: 775 - DNA, 724 bp, Cannabis sativa
ttttttttttttttttaataaattcttatatgtatatcactcacgtgtaattaccaaaataaattttagtctatagttgagctacctgatggggtagttgagttatttacgtatagacatctttgaaataaacatatttataatacatcaagaatataatcattactttgaattttcttaaatgaaaaatacactttcttttttgggggtgtcaatagaaactccaattagaattagaatcatattcttgttgtagttagattaatcttgaaaatctagctcttatcaattcaacaagattagttgagtattttataagacccccaaaacagagaattaagttgatagagagtcattgtctttgacagagagctattcattttttttttctttttaacaaataataattaaaatagttaaactaataataagattcatttaataataatatagtcttataagggcagcccttagaaagttgaacattcttcccccaaaaaatgacaaaaattatggtgaaaaacgtgataaagtcctttgaataaataaatagaccaagtgacccaaaaacccaacctttttctcatcttctttgcttataaaattgggaattaagaataggaccccacgaatccatatttctttttataattgtagtgcttgtttatttgagacaaatacattgagatacatcgatttttcatcattgatgactagttataac

SEQ ID NO: 776 - DNA, 861 bp, Cannabis sativa
ttttttttttttttggttttctttgtttggcttggtaaatatcattatcatgtaattaatggtatggttactttgataagaacatgatgactattttctaataattttgttattgaatctgtgaaattgggtggcggtggaggaggttggtggtgatggaagcttttatttttgactacaaaaaaagaagtatgaacaatcagacttggagttgaaaatggctaacgaggtgggattgtgtcatagacttgtgtttctaagtcaaagggtcagccacaagcaaagaccaaaaaaaagtcaatacacaaaaacagaacaaagtattattattaatgtgtttatattatattatctattattcaaccagccaaccgcaacaccacttttgttttccacatctttgcattacaatgttaataaaaaaaacaccaactttgacaaaagaataagaattgtaagtactttcttcctaggacattcattcattatagtatcatagtatatgtatgtatataatataattcaggaaacaagagatggacaaaatgttcttcaaggtagtgaattgcggtgatgtttgagagcttcaaaacgagcagcgagtgcatcgtaatcaggcagtttcggatggacagaatgagctggtgaaccctgctttagcatttcagatgatggtacaggtggcgggagcctgtcaggtggtagaatgccaaagctgccaccaccgctgccattgccacgctcctcttcgaattcttcctcgctgtctgattgatcaaactttatgtctgaatgtgcagatggagcattgtagctgctatgcctcctatacatttttctactctccatgttgttgttgtt

SEQ ID NO: 777 - DNA, 3514 bp, Cannabis sativa
gtattggatttatatctccctgatggataatatcaccatctcttcccatccagttttggcaccacaaattaaccttagactccttttctgtgatccacacactatgctccaagataaagtcccttgttgcccaaatacctttgatgacagaagaagcctttttcggcataggtgtggagaggaatccttcagaatcgcagtatttggcacaaatcatcgtagtccacaaagagtcgggccccttcgcaagcatccaacccagtttggtaattaagcaaaagtttatatcccttgcttttctaaatccaattcccccgcactctttgggtttacatatagaatcccaggattttagcgcaaggaatctgcctcccttgatgtttcccatccaccaaaaccgcctcacaatttgatcaatttgggaagtaattttcttggggagaaggaaaaccgacattgtatatatcggtatagacgccaagacactcttgattaggttagtcctcgcagcctgagataatagtttggctcgccatccctcaaaacgggaattaatcttgtcattgatgaactcaaaatctttgctacaattacctctatgaagtaaaggattacccaaaaaacgttcacttccagtcatctcctcaaaccccatcttctcccgaatgtgaaagcatatatcttggggacaattcttagagaagaacagtttagatttttcgacattcaccttttgaccagaccaagcacagtatttggccaggcaggagctaacctcatcaatattttgattgtttgccatagcaaagatgagcagatcatctgcatacatcagatgacttaaagaaggacccccacaactcagctggaacccctttaatcttcctcctaactcctccttgtgtaacagcctcgagagcacctcagcacaaagaatgaatatgtagggagagagagggtccccctgtctcaagcctcctcgaggagagaatttcttggtcaaaccaccattcggcaagatttggaattgaaccgtcgaaatgcatgccatgatcagcttgcagaaatgttcttcaaacccaaagcatcataaaaccttatcaatgaaaggccactccaacctatcgtaagctttagacatatcacacgtaatgctcacaaaaacatggcttccctgtttgtgcctcaactcatggaacacttcattcgcaattatcgagttctcagcgatccatctcccttccacaaaaagccgattgattaggagagattagtttattcaggaccattttcaagcgattagccaccaatttggagataatcttgtacaccgtattgcagaggctgattggtctaaactcgtcaaacctactcgcatgggccttcttaggaataagaactaaaaaagttctattcatctccttgcacaatttccccgtacgaaagaattcttgcacactatcagtcacattcttccccacaacatcccaataatctttaaaaaatttcacagggaatccatctgggcctggggacttgagaggagctaactcccaaacaacttttcttatctcttcagtagaaggactcaagatcaactggcaattttcctccattgtcacacaagggtcgattatcccttcaatctcattacatatccttggatttgtagactggaacagattcaaaaaattacttcggaaatactcactaacctccgccctctcctccatccactggccatcctcattctcaatggcccaaataaaattcctttttcttctgactaccaccgaagcatggaaaaagcaggaattcctatccccatttttaagccactcttctcgagatttttgcctccaaatcgactcgagtcttttttcattttcatctaattcaagcataattgaagcttccaactccacattttcttgagagtgcgatctgttttgaacctccatcaaaagtttctccaaagcctttatttttgattgacaatgcccaaaaacatgcacattccaatctttcaatgctttcgcagttaacttcagcttgcggcaaagaacgaagctatgatagccccacacggcttccctccagacttcctctatgactctccaacaatccgcatctctactccaagcatccacataacggaacggagcttcaaatccctcccgctcgagccgagtatccatgataatcgcactatggtcaaaatgtctaatagggaggttacacacccgcgcctttttgaacatcgtgatccaaggaggagaaacaattactctatccagtttctctcgcaccagactgtcccaattttgaccattagtctaagtgaaaagcacccctatcccttcaagatcaaccgcccccgtatggaacataaaatttctcaagccttgaccctccactctcttccccctctcttttcatttgagttgagtatcgcattcagatctcccatcaccatccaaggggaggataactcctccatagtggtaataagtccttcctagaaagcctctctattttcccatcgaggaggagcataggtgaagcatcctacccaatcagagatattcctatccgcaccaaacttaacaatgatgttattgaaatttgaagacaaaagttggatatcccacccctgtctccaaaacaacgccaaaccccccgataaacccctagcagaaacatcaactctattattgaaacccaaccgaatccaaatgtcctccatttcagatgcatttttcttagtctccattagaaaaatgacatccggattggcactccgaatgagactcaagagagaattgactgccgcagattttgcaaattaaataagttgataaactcctttcctctttgactataatcgaaattcccagtggaggtttgtgttcagaagtaggacaatgaagtaattgaggtaaaaaggaaagggtatttgagtaaaatcaatggagctggcagttatatgctgatcgatatcgattcttgtcttcctcgccactactactgtcgtctcttggcactatcttactcactccctcacattcatgattcatctttacataatattaataataacaataataatattataattacagttgaaagctgagctcagtcaagacatgagccttactgccactgctgattccgagagagagagaaacacagacagagatctatctaccgattctagagagagaaaccttccatttttctagaaagaaaaaatgagggaactaatggccgatgcttcctcattgccacaacaacctcaaacgccgcctcaggctttgctggagagactcaaggacttcggccaagaagatgcatttgctctctgggacgagctttcccccgaagaacgcctcattcttgtcaatgatatcgaggtcattttccttttccccagatctctctctcttttctcgccaaccgaacagtaattatttgaataattatgatgattttgcatggttataacttatatatg

SEQ ID NO: 778 - DNA, 2131 bp, Cannabis sativa
agagaaaattttaacaagttatttgtggcgcatcaaaagaaaccattacaatcattggagagcttatcaattgtaagtaatttagaatcaaaagatgatgacattacttttgttgggtcaatcaatgtcttggccatataagacaagacttactatcgtaggtctagcccaagtacaatataatatgacaactgtaatataagcaaacaaaagtactataattgtggtccaaactgattttatacaataattaattaagctaattatttaaattcaaccctttcatatgtattatctaaattcatatttgtcaaatttgatgtaaggaggcagaaatgtatattttgggaacaaaagatttcttttaataattgatattaactctttaacaaacttgaaaattcatgatcatccaccacattaattaaagccataaatacactccactttatttccaaagataaaagaaaaattacaaacacacaaactcaaagatttacaagtgagaaacacttaagacatattccatggtcacatatacaaattaatgttctaattaagaattgacagcccaacacttcttcctaatctcaccagcagtgccagtgaggacctcaatagctcccatcttcttcatggacaatgcaaattcaagaaagaaatcattctgatgaaccaactcttgaacggtgttacgagcaaccttgttggtaacaagtgcggcgtctgaggtaaaaaggcccttatgcttaagtacaacgccgtagtaactactgtcgaatttgagagcactgcctgggtccatttgcacagttgtgtttttgtcatttggagggcatttggttttcaaaagcttagcatagtttttgtccaatgaagggtcttggtctccttttccagtgaagttgtagagcctgttgttgaatgcactacaatgtcccacaccgattgtgtgtgctcctttaaacatagatatataaatactatgattagtaacagtaattaatgctacaaaattaagagtgtttatataatctgcaatcacaaaatataaatcatatttgaactaaaccaattcattttaattaatttagttttgaatttttaaaaaattgtaatacttgtttggtttgaaaaaattgaaaattcggatcaaaccaatccccctatataaaactacttaacttgttcagtacttatttaattttgcacctgataataagacgaggtcatgcacagaaaggcctttggtggcaaagttttgcttgagtcggtagaagttgaaggagggtggtggaatgttttgttgtgcttcgttttttctcgacactttcccatctcttctacccgtaggcacttcccacattgattttttaaactgaatatatatacatattattgttaaattgaatatagatgattagggtgtttatcacccgcactgtaaacacccttaatagatgacattaaattttgtttttatgtatatttgagcataccgagtaagatacagagtcccttgctgccaaagcgagaatatcagcgcatgaaacaactcccggacatttcttctcaacttgtgctttgatatcatcaattacatcgaaccccaacaaagtttgatttggaattgcatccttttcagcatctttctttgttgagttcaaaagtaccgatccatcacaaccctaaaataataacaaatgcatacacttaacatttttttttcatatcaatgcacttaaaagataagtgtgtgttatgaatatggcttactctaacaaaacaatcgtggaaatgcattctgagcaaacgtgcaggcacagccggattactagccacatgtttttcggtgaccttctttacaatagtctccgcttcttcgcaactatgtttgtagaaattatttgtgagtttgcttccttgtgaggcccccaagaagctaatgagaataccaaacactaatatatgagtgttgattttcatcatcttaaaaattgtttactaatttcttagaaattatctttgtatttatgagtaaagatattacttggtatgaatgaatgaagcaatgtttgcacatccttatataggcatataaactatatagagatatgaacgtagttcattt

SEQ ID NO: 779 - DNA, 6783 bp, Cannabis sativa
taattaccaaattctatcagtaataaatttttgtattttatttattcttattattaagagaataaaaaggtttcttgagctaagaggagagagaaggtaaagcttctatttttgatgtattattataatatggaaatcgtacggacacatgtacctaattgtgaagttattcccctcaaaataaataaaaataaataaatgccttttcaaataaataaataaattgtgaagttattcaatgaaaaaaaaaaacttgaattcataatttcataattctctaattttttaagaacaagtgtcattgtcatcacttcaatttatttaagatattattccatttccatgtgcttaagtaccaattcaatattttcattaatccaataataatattaaattttattaatataatgacacttgcctattaatttaatttttttaattccaaaagtacctaattattgttaataattgtagtctagtaagtaccaaatacaatttttaaaaaatattatgatacaattgttgtaaaagaatacatttacaaacaaatattattagtagtgaaaattgtcttattttatttgatgcacttttgtttcatgtaactttgatggttttttttaattattattatcattttaaataaaattatacaatgcacttaaaatcatattttattttatttttttacatttttacaattttttttaatattttcaaaatttttatttttttttttattgattttaacattttttttttcatcgcataaaacaactcatatttttgtaaaataataaaaattcatacaaatgtaaatatatataattctctttcatttatagagaaaaaataaaaataaaaattgataacttccatacacatctaaagaccatactacatatttggtcatttcttaagaattttttttttctcacaacattaattcatcaataaatctccaatttaggtaaattttcttccaatattggataataaaactcaaaaagagtaaaagaaaagaaaaaataaataaaaaaattgtattacaacaactcattgattagtttacatcatttcaccaatcagtaaacttacaaaaaacaagagttggctcggtagcatcggccgccggccgcagcatcagcttcggtttcggtttttatggttagttggtattatagctgctgccttcccaaactccattatcattacatttagttacccgaaccgaaacacgctctttttcgatgatggtatgtatgaatcattacacgaaatgaaaaaccgaaacccccggctaaacaagcttctacaacagttcaggaaaccatactcgaacaattcgaatgtaccttaaggctgaagttacttggaaagctgagtgtgaatcgaatatgggatcgttggtatcgggaaaaaaaatgttgtaagaagaaaaatctgaagcttttgcttgttttcgacggttttggatctccacatagccattgccctatgtacagtgcatatgtttggacaatatgagatgaaaaaaaagggaatctgaagggcttttagggaacagggggagcatttttcgggtatctagcagagggtacgcgttgtaagcctcgtgggaaatcttgtgtcgtcttcaaacgcttattcgggaatccttgcagtaaccttattattatcaaaacaaaacaccaaaataagttttgtgggcaatcagttaggctaagattaagtgcaagagatgataaaagtcaaacctaggagaatcttggcgtttcgggccaccgtgcattgatcttatacttccgagtgccctttcagcagcctaaggggaaaagaaaatatgaagtttggaagtcagtagcgatactcgagtcgatgaagaaacttaggagtttttacacaacatacctgcaactttgcatcatcccatgtcatcccgattcctttcccggcaacttggccgtctatttctacctaaatataacaacaaattgagctaattatgacatatattccatacatgacaagaaactcatttgaacattatcgaaattcacaaaccgaatgatggttttcgatacatacctgtgcatggacttcatcttttcggatcaaaccactagcaggtaaaggcagaggatgaaaagataaactaagaccctccatcatacactgaagaagttaaatccaacatattaagtttatgcaagaaaaaaaaacccgaaaaaggacaatttagatcttacatattctttaagtgcagatactgaattcgtagatttcttagtgcccataaacctaggtggttctgaagcatttgaaaatgacaaagattcgtctttggccaacgaaaagctcccggatgaattcacattactgacgaaaccattctcactagtttcgggaagcggagaatcaggcttaattcttgacatgtacacatctgcagaaatcgccccagctcaaatcaatttaagtgctctgctaactcaaagcattcctaacatcatgttgagaaatcattcttaccagccaagttcttaagagaagactcggcagcaaaaagctgagcttctcgtcttgttctaccagttccgccaccaattttttctccggcaaaccaaacctgtgacaagaatgaacttataacttaataatgcatttttcggtgagaaatgtgaaaacaagccatatcagaaagaattcagaaatttctgagaaaagaaaaatgtagctaagttagagctcagactcccatttttacttaaaccagcaagtggctttgtaatctgtagaaaatgttaatttgggcagaccgagtctagtttgattaacgaaatactatggcctaactaacaaaaagacatgtcgactcttatcatcaggtttcggctactttagatgactatgaactatttcaaaacatagcaatagtgcatatagatcagattaaaagcccaatagacctgcacattaggcaaaaaaaaaatgcataaggttcgcgtgtagaaagtttaaagaaagatacctcgatagaaaactgcaaatccgtggatgaaaccaaagatggtctaaactccaccttggctccacatttcattccaatttcctgtagaacactaattggagaatctgcatttgagactggtggcccagaatcaaagtcagcttctctaatgcttgaagacgatcgactcaaggaaatatcctctcctgcaatcatgcaggtacaaaatcaatcataacacagcgaaatagctaggaaccaacccaacaaattcgaacttttacaccatcaaacaacctcaaatcaaaaattaataaaaaccaaatgaacatattgttcgtaaatgctaaaacataaaaaatccagttattcatatcatcactcaccaggcacaacattataaggaggcaaggaatggtttgttctcatctgatcctctctatgtaaggtctgcaaaagtaaagtatcaaacaacaatgagtttcatcagtcaacaaaaaacccgaaaaactcagcaaactacgtgccaaatacctcttttggtaatctttgattttcgtgaagaatcctatcagaaggcattgaactctcaaccttggggaaaaaagatgcatgatgaggccgctgctgcttctctatatgcattggatctacatctaaaggaaattctttgggtgttacccggtttatctgtcgtggagggctcatctcttcctctaccggaaaccaacctccacgagatggtggcctcggaacagatacttgcatagcaggtctaacaggaaactgaggttcaggtggcggttgctctctattatcttgcccgtgttgcagaatgagaagccttctccttgtatcgggatccaactctgattccggtacctcaccttcttctctagcaggagagctttgtaagcttgattccaatgagccagcatatgatttaattatcggggctacctggggttggggatactgtacactggggaaaggtgtcattgaaacttgagatgttggtagtgaaatacttccggtagatggtaaggtatattgaagtgcagtagcaagtctagaatcagggttaatggctgacgaaccagccgataatgcttcctaaaaacaagcaacgactagattagactgtcttgactttttatttcagaatctcaaaaattcatatattaatgtaaaaccatacataaacacatatatttagatcttaagaacaaccttcaatctcctttcaacctcagcatctgccatgccatcaaaaacaggtagatccctatttccatttgcagcagcagcagcagccgaaccagaagcagaaccatcatcctgaatgatacaaataattaatctccacccaatacacgatatgaaaatcaaatgtataaattcccggactaacctcagaaactagatagctgctcacatcgggaggactgggaacatctttaatatcatcttcatatgaaacttcaacaatcttttgtagaagacagtcatcaaattctctgttggcaaaatccaaggttataaacatattgaccaatatttaattctcatcttgataagcattgtatcttacttgaaaaaaccacctctgacattacaagcaacatttctagcaacacacaagacaggaacagtattgttcacctgcaaacattaaatccataataatttgtcatttaagcaatatggatacccagcaaatgagggtgcatgaataattcaaatagtgagaataatacttcagcttgaggagcatagtatggagcaaaagcaggcacaacatgcaccctaggttgatctttctcatcccaaacttttaaccgatcatcgatcaccaatgacatctttggatggcatagaccattttgaaagacattaaataatgatttcctcaaacctttaaatatgatcaatgttagagaaaccataagacagcaatacgaggcgcaaggttttgcaaaaatgaagtgcaaacagaattgaaatgaaataattccacttaccagatttaacacacacgatgcgatccagtaattcttttgagtttatcaaatttgactctggatcaagaagcctccacatttctaaagcataatccctttcagccatcgtacaaacatagacctcaaagcgcttacgccctcttgcagtcaaataatttctaagatcctcccacgcaggtctcaacctcacaagaacactggtatcacgaatctacagtggtaagaaagttccatgttggtcaaaagaactcacactatcaaatatattatcttgtaacaaaattccgaagagttataagttgttaaaagcatacagaaaacccgatgtaatacatgtcaatatcaaataagcaactcgtcaattttataactgcttcaaaattaatgtctacaaacctgtggattaatgcgtgtcagaatgatgtttttctcatttaacctaatgagcgggcggacaatagtttgatgattcccagaaacaggaggaacaacctcagattggactttgataacccttccattgtcaacaacctgatcattttcagcatattgcttcaatatagccttgtcatcctgatagcgtctgacttctgcaaccataccagaaaggcgttgcgggtctaactcactgcttatttttcgttgcagagactcaattctatcctcaaacgagcgcattgtgtttgcaactatgagagtttcatcgagatcaaatacaataccaagacatctaaggttcagcatgttaagacaagagttgtaaagtcctaatgcaacgttgaaaccccaaaaacacgggtattgtttatcatttttcctggaatacattgctaccaaatgaagttcctcccctgctacgggcatcactgcagtctgtacacataaaaaatgagaatgatcaactagatttccatgcagccttgccatataaatccttaccagatttcccagaattactaagaatcatttttaacactaatcaagtcagtcattattagtttaagtggtaatggcaagtattctatttcttcagaaatctttacaaagaacaaaaaccaaattgtacaaaattccaataaactcttagtgtcaagtttcagttcaggtaacaaagttcagtcatatcaagctcaatctcattaccataataataataacaaaaacccaataaaatacttattattcaaaaaatcttgccattcattttcagacattctcatgtataaatctcaaactgggtcccctgcaaatactgtccaaagtcagaactagttcattatttgaaactggatttcattgcattcggattcttcttaattcttcttcatcatcatcatcttcatttcttcttcttattattattatcattattattattattatttattattattagaatgaattgttctttgtggtttattattatataccttgttctccatgacacaggaagagtgcaaaagaaagagcggcgaatcctgtgattgcgaggtctttgactccattttgaagcaaacaccacaagaagtaatggtatgaagcactgcaagtggtggacatctctcactcggttgagaaaaatggtttattctgatatccttcaattcatcgataatcttcttcttcttctcgttgttgttgtaattctcttcatctgggtatatctcaacttcaccaactaactcaacccctttatacaccaaagacttaaacattattttcttcttcaagttctcaaaaatctcatcaagt

SEQ ID NO: 780 - DNA, 2279 bp, Cannabis sativa
ccaaacaaactcaaaaaagttgaattaggattcatgatttacctatatatacctagtcattgtcattcatacaagaatgactgaggctagctagttagttctaaatatttttcctctctttttcttatttttttttccttgttgtcaacttaaacatcgtgtctcctttgattttgatctatcaaaatggagagcagtaaaagagaatcatcaagtagaagtacaagagctggtcctagtaattataatgaaaagtactattccaaagccaaaccacctcttccaaatttatctttatcattattttctgtggaggaagccattgcgttactcaaagacgatttgactcgaccaaatgccctcgttctgctgggcaaggtataaatttcataaatatacacaaaccctcacactaaacaaattttatttatttctacattttcatctaaattttttgttatttgcgtttacatccttacaaacattattatttttcaataatatccgtattcaattgcatgtttttattttgcttttgaccaagttttttactctttgttaattgttttgtctctattaaaacgtatgctgatttcttgattttcttggattttttttttggtataaaattgttttcttgtttggttcctgagaaaaagttttgccaagattaatctctcggaaaatattggaagagaaaataattatataagacaattattgtctatataagattttccattctgttttgttttttttattattataataattaataacagtcatgatacacgtttacgaggaccttgtcatcttgcaaggctatctttaattattttccatagacgtaaagactaccaaattatgactctaaaaaacgttagaaagtattataataaatattaaattattaatggacctcagattttttttctcttttgtaacataagaacttttgaaaaagaaaaaaaaattatatctatttatatgaatatatagaaaatacccattactcatttaacccgttttagtgatattggagtactttcatgtatcatcgtttattatcatttatatatttcacggaattaattaattaaactttaaatatgacgatgattagccaaataaaaattaacacaataaaaatcattttaagttatgtgacaatattatagaagcttggataaattttaaagttatttactgtaagttttgttcttgaattaataatataatactaataaataagtagtaataagagcttccactatattttaatttttcagatgaaatcaaatcatcaaaatatgggtccaatggtgtggaattccagtggtactatatttattcttctgaaggtacgtatgagtggactcgtatgattaatttacatgaatgatttgaaaatattgaaacttatactgtcgtacaatatatgaatctgaaattgagtttttatttatttatttatttaatgaggttaggaaataactcaaatatatcgctggctttcaagtggactaattgctgaaaatatggccaaacaagtgtgcaatgcccttttagtccttcaggttatatatataattatttattatatctaagctatccaattcggacattcctaaatttgagaaaaaacattagtcctaattcatcaaattatatatcgttttcagtctgtagcttcacacccacaaagccggaaggaatttattaaaggtaattaaatcatccttattattgagatttacaaggaagataaaaagatttaacaagctaatactttagtttttagtttctttgctttctctttttattggttttgagtctaattattttttttttattatttttatactttagctaatcttgcagaatatctgtaccctttgatttccataacacacagacaggagccttatgaaaatctgagggtggccagcttaggtgttctgggctctttactcaaggtatggttctcctcactcattatcattaaccaatgaaaatgttcccatgtccatgtcttaatgtgcaatttttatgatcttaatttgaattagtttggtttaccaaatttttgtgtgcagcaagatgatgcagaggcccttcattaccttattcagggtgacatattttccaaatgtctaatttgcttgcagacagacagtctaactgtcaaaacggtaactagattgcattgattctttccaaccaagtatatttgtatttgtattgaattacttgttatgatataataataacttttagca

SEQ ID NO: 781 - DNA, 2175 bp, Cannabis sativa
aaaaaaaaaaaaaaaaaaaaaaaaagtagccgttggagatattagacctgccagttgccaccttgccgacaccgtgggcaactcgagtttacttcgctataaatctcttttattatttattttaataaattaataattaaataattaaataaaatctgactgtttaagtgccaaatgtgagcatcgaattcttaacctgacctgatcgtccctactttgatcaaaacacctctcacctctcacctctctctctctctttctttcattctttccttttccagaatcgtctctttcgattaatggactgatttttttgttagtgtttggatttgtggttattaagggaagaagtctttgtttgggtgtgtgtttagtgtgacgtgtttcctaattttccagagaagaaagttaggaaccaaaagaaaagaaagactagttgggcaaaaaaagtatagttcttgctttatttggattttcaagcaatccaaacacttgcctttcggttacccgatctatagtttctggtttttctctgattcttcttcttcttggagccggattatgaggttgtttggctacaagggtttttagtttaacacaactccagagtagtaatttttagctttttaatcgaggtttgttccgaaattcttacttttcttggttttgaattatcattttaaagtgaacattcagctgattctgatcgagtttagtgtaatttttttttttttaagtttattggaaatataaatggctacactcggagatataggagtagcggcaggtttcaatctgttggcggctttcatattcctacttgcttttgctatattgaggcttcaacctttcaatgacagagtctactttccgaaatggtatcttaaagggttgagaagtagcccatcgcgttctggtactctggttgggagggttgtgaatttggactttagatcatatcttagatttttgaattggatgcctgatgcattgaagatgcccgaacctgagcttattgatcacgcaggactggattccgctgtttacttaaggatttatttgattgggtaacactttctacctcttctgttttgttttttaattatcttattctactttgtatcgtattttattgtgcgaaaattttaggatattgctaggcaggatcttacttctaaccatacccaaatcttattgatcaaatcataggctcgatcataggttttgtagacttagaagagtctggtttaagaaaaggtctggttttagtgtttagtgaaaagtctggtttcttgacacattgattatcttgttgggaattttcacctgttaggccgtagattagattattgattttataaccttaaatatacagtttagtttttatttccacactttaagtacttgttagtttttgtttaattgctggaaggatgttattacagttgagtttcctggaaagatagtgtctgcagacagcatactctttccttgttcttattttctttttctcttgttactaatgcagacttaagatctttgtccctatagcatttcttgcatggactatcttggtaccagttaattggacaaatgatgctttgcagatactcgatctgacaaaaaatgcaacttccagtgacattgataagctttcaatttcaaatattgagacgggatccaaaaggtatgaaatctgcttccttgttaacaactgtacattacaacgaagttgttctttcttgtggacattatataattgatagaggtgtgaagtttatcttgacaccagttagaaggttggttgaaaaaggaccaccagtagccaatgctcttgcgcaaaggatttatcttaaatttaaaactgcactcctctaatttctgtacccacccccgctcaggctttcctctattatttgaatttgaaagcattaaagtttcaattgtgcgtgtcttgaatttgcagattatggactcatatagtgatggcttatgtattcaccttttggacatgctatgtgttgctaagggagtatgaggtagttgcctccatgcggttgcagtttcttgcaacagaaaaacgtcgtccagatcagttcactgtgagatttactatttctcttagtaaatatacaactttaaattgtctgatatgtaaacatgaaatgcatctga

SEQ ID NO: 782 - DNA, 2698 bp, Cannabis sativa
tttgcttatttattatttgtattgtatgtgtcgaatagattgttactttttgtttggaattatatattttattataaacacagtagtcatcaagcggggatagctcagttgggagagcgtcagactgaagatctgaaggtcgcgtgttcgatccacgctcaccgcatttttgttcaaccagtatgaatttttgtatcgaacatagctagaaactcattatcttttacttagaatttatctacagacagatagtatatacaaattaacatagaatctattttctttggacaaaaagaaaatgttttataatccttagcatagcctaatatccttagtgaacgacgattgtttgttctgttgttcattgaagtaaaatatacacacacacacacacaactggtaatctcttttatccaaataaaccattaacaaaacgaaaataaatctttttcagtatgtctaaaaagaaagtgagcttgatcaacaaaggtccccatgtgagttctcatgaacatttgactctcaattttgtctctcaaattcattatcatcatcaatctatttcgacattgcaggttatactcaacaatggatatgtaaaactaacgatatcaaagccacaaggatacttaagtgggattacttatggaggaatggacaatgttttggaccccaattcaaatgaagccagtagagggtataaccttcaaagtttgaatatgtcatagtggtattggaatatctctaccaagtctcataattcttccttaattttttttttggtaatgtgtagatattgggatgctaattggagttggcctggtggtcaagacagatataagttgtatgtttttggacatattttctacactgaactaatgaaatttataattaattagtgactcatttttgtataaacacagattgagtggagctgaatatagtgttgtcaaaatgagcaatgaccagatagaagtttcattcaggaatatatatgatccatctaccaagggaaacaatttgccacttagtgtggacataaggtcttactttcatttcaatcttgcttgattaagaagctctgcaaactcttgctcaagtgtttgtagattacttgtcaactttgtttaggtacatattgaagactggtgtttcgggtttccattgctactcaatatatgagcggccttcaggcagccgtgcctttgaccttgctcagacaaggatggcttttaagctgacaccagaaaagtagaatttttaaacttacttcttgtttggaggccgaactttttagatgtttgtgttaattttgtttcttgtgagttgaattaggttccactacatggctatttctgatgagaaacaaagagtaatgccaatgccacaagatctgcttccagacagaggcaaagtgctaattgtaccagaatcagttttgttagttgatcccattaatccagatctcaaaggcgaggtgatgttgcattacacgagtttatttgagtatgtttgtgtagtggaacaaccttaatgaattcctagttgaatgcaggttgatgataagtatcagtattcaatggacaacaaagatggtggagttcatggatggataagttctcgccctgttataggtttttgggttatctttccaagcaatgaatttcgtaatggtggtccaacaaagcaaaatctcacagcacacaccggtccaacatgtcttgcggtaatgaccaagattatccagcttcatgagatgacaattttccaatattctcaagctgaaaaaagtttgaaagtatgagatagaacatctaaattttattactacatttcaacagatgttacatggaactcattacattggagaagacatattagctcattttgaagagggagagacatggagaaaggtttttggtcctttctttgtatacctcaattcaacctcagatgtatcaaatgcacacaacctatggttagatgccaaaaaacaggtactaaaacttcactcacattttcttttgataatactttgttggtctaacataattctactatcatcaatgactgaaacatttgttggttggttggttatgtgcatggtttattgtagaggctgttagaagagatggcttggccttacgattttgtctcgtcgccatactatcttaatgctaacgagcgtggttcagtttcaggaaaacttcttgtccaagacaggtaagaatattgcattcatgtcctatactttatctctactaaaattacttctacttattcaaacatttcacattacttcaggtatatttctgtatctctgatacctgccaaaaatgcatatgttggactatcaactgcaacaaccgaaggatcctggcaaacagaaagcaaagtaagcaacttgtttaaaatttctaagaaaagttctagattagtcaatttgaccagcaattgtgatgtaatatacagggttaccagttttgggtgcaaactgattcatatggaaacttcactataaagaatgtcatccctggtgcgtatgggcttcatggatggattcccggtttcattggagattaccttgacaaagcaatcattactgtctcagctggtacttctttatcagtaattaccaatgctagaatttggtgttagccacaactgaaatctggtcatttcttagacaatgttctaa

SEQ ID NO: 783 - DNA, 4044 bp, Cannabis sativa
caccattattttaaacactatcaaagtctacatatagctgtacacatgtcccatggagtatggtttttccaacaacaaacaacacataatttcaactctatatataatgcactctcaccaaatttatgaaaataaaataaaaaaatagaatacaattattgttatgtatttataatatatcttctacatgagaagagatgaagaacaaagctttttacaatcacaaaaacagaatgtgagtgagtttttttccctccacaaacatgaaagagcaaaccaacaaaaaacaaaacatcatttgctttgctcttcttaaatattaccaaataataataataaatagaaaaaaaaaactactaaggccttgccttggatccaaaaaaataaatccaaaggcctaaaaaaaccataaacaacttcttggggttgggacattattcaagtacagttgatttctttggctgtcaaaattttttgacatatctaaaatggatggttggtggataataatacatgatggtaatgaaaaaaagtataaaccaaactgtacatcatcatctcccggggacggcgaaaaattagtgcatcatctcccggcggtggcaccagccaatgttgttttctcctcagcaatagaatcttgagcaaggattgatgttcttggaagaacatgttctttgctcgaagatgatgaggttgcttcttctgttacaacaactaggtgtttttcggtatgaattggtgtgtagttgaatgaaagatctttgttagcagcaagagctaagagctctttctcttctagcccttttactggcccgatgctgcatcgatcggtggtgtgttttgctaatgcatctttgaatttcttgatctgttatacacaataaccaattgccatattagatgatatagctcttggaaaatttaagacatttttctaaatagagatcaatcaaaaaactaacataaaagagcaatactaactcaaatcaaatatgtatttatcagactcttcaacattcagaatttcaaacatatattgtgatgataattctcttgaaccaatcacattttcatttcagaatcacaaaccaatcagatcaattgagacaattgagagactaagctaacacaaaaagcaatactatgaaaactcaacaatcaaaatattcgatacagttatgaaaaatattcaaacaaaacaagatgggattaagagactaacagtggcattagtacaactaaagctgcataaacggccatgagctcctctgtaaaacctaaagaagggtaaaacatgaacattaagactataacacatggatttgtgttcttcataattgatctgaagaaattgaacatctgggttcatctcagccatttgacatatctgttatcacacatcaaaaatcaaacaatagtaagaaaaagatcaacgattccatttttatgaaaaataatcaaaaacaaatttattgttaccaccttgggatgaagagctctgcaaccaccacaaccaggagaaaagaaatcaacaataacaagcttatccccagcttttgaaagggattcaaccaagtcttcagcagattcaacctccttcatgtttggctgaacccctttctcccaccatttctgagctttcccaattctaagagtctgtaaaaacatgtcaatcaaagattatgattattataaaactaaaactgaaaattgaataaattaataccagaaaatcaaaattaagaactaacctgggcttttatagttaatgattgggactgaaaagttgttcctcttctgggaaaggttgcacttttctgaagagaaattcttttgccatgaaaatcactggttgaattgagtttcagagaacaaaaagttgctaatttcttctcgtgatgatggtggtggtggtgattctgatgccatgatgaaaccagatttgttttgctcagaacctcagccatggaaaaaataaaaattgaatctttcaccaaatttcaagctaaacaaacaaaatccctcaaacccagaaattgaaaatgaagaaaaagttttcttgttaagagagaaaagtggttctcaatttgcttttagctaaaaagcttcgtcattcagaagaaaaatggattagggaagaagaaagcagaatatatacaatacaatataatgtaggggtaatttcgtaattttgttattaagatgtttatgttgaacattttgagccgttggattaaaaagttattaattaatgggtttaaatcaaacggtgataaaattgtcaaattttgtggttttggacttgacctcttttttattttatctaaaaattattatttattttattttatccacaatcagatttgggaggaccattttatacggttggatagtaatacaggtgtaattattgacacgtggcactatgttggagttttatttgttttttgaggtgagaaaaatagttactttttttattaaaaaaataaaaagaaaataaataattttttttggaaagaacaagtcaatctatcccacattttaattttatagacaatatgttatccacaagtttttcactaaactctcaacatctaacattgtaataatagtaaatatataattaaaaaaatgtagatataataataaaccaaatagaaaatataatatttttatgataattatatattattggtatttttttaaaaaaaatgtatattttttctaaaaacaaaaattttcaaatattaagtttatattttgaattagtttctaaagcaactctaatagggatttacatccaacgaatattaccgatcagaataaaaatatgttgacgtggaataattttgacggttattaaaaagttactagttaaataaatttgaatccaacggtaatcagaatcttacagaaaggcaaatttttaagttaagataatatttttttataaatttttcactacactatctccacctaaaattataaaattactagtaagtaaatcaaatagaataattatatacatttcaacattattagatgtctaacactacatcgatgtgggatgtaaatttttaatttgataactataggtcaaaatagtagtgaagtccccacaaaattaaataaactagtaaaagtaattataatgtaagtataaatatttttttataataaataagccatcgcaaagtaacagttctaaatttatcactgctgaaggtacattttttttttttatgtaaggtctcaaggtacaaatttaactcatctatattggtgaaatacttctaattagaaattttttccttgaatttggacatgcatcaaattatatccccgaactttctatatcgttaaaaattctttttaaatttttgaggttgtttgatttaagaatttatcccaaattctattcaattttactaaagtaatgaggatatttgtccatgcacgaaatcgtattccccgaactttgacatctagtaaattgctactcccaaactttgacatgtactaaattatctcacttgaactgtaatcgacatatgactttcattagtaaaattgaacaaaattttttaaaactaacaatcttaatagtttggggtaaacttttaacggtctgaaaaattcaaaaaatataatttgatacatgttaaagttcagagaaacaaaaaatcattagtcttccttttctgttgttcacaaatcttttttaggttcttgaatgtggtgttcaataattgtttggactgcatttatttacaattcaataattttttcttgtaacaacaagtgagaaacttgattgtaagaaagaagtgcctccataattattagaaaattagtaaagattatgttatattgcatattggtcttttagaagttgtttgtgattttgttgggtccatagggtcacaaaataatattgccccattttgctaatgcaatagaatattccaacattgatcaaagaagattcggttacctatcacttcctagttagatattttggtcaaaataataataataata

SEQ ID NO: 784 - DNA, 1946 bp, Cannabis sativa
aaatatttttgtagatttttaaggttcagataggtaagcatactgctaaagacagattaagcattgtgaaaataaattaaataatcatgaaatcaaacatgctcatctacaaaattcacagcaagcagcacttacgcagcatcaaaatactacaagtatctaacaccaatggagtatccaaaaacatttgccaggagtctccacagaacatcaccgggcagtaattacagaaaaatctctaataggtgtagcatcaccactcaccagtgttgtaaggaaaaaaaaaaacttctactaaattatgaatatcagttgagactagagctaaaggtgaaacacatatggccgattagactgtatttcataaccactgttggaagatgctggcctgtcattgtaagtaactgcccgtagaggaggatccccagggtaataagccagagaactatgtgggcttacattggaagtgatgccagcagttacttgaactgctcctgtagatccgaactgctcagtcctcctcccacttgcgcctacactaattccataaatgtctgccggcaagttcatatgtgcagaactagctccagagcctgctaatccataatgagcagagctcatatgatgagtctcagggttagaactcatcaaactataggctccaccagccaagtttgtctgctgctgggtcacagggggtgagttcgtcaaaccatgggatccagatggtatgtttgtatgtaaatcaaggatggaacgggccaaattgtaataccgggaagagtattcagtcccctggcccgtgtatgaagctcctgcctgatagcgagatgcttcagcggagtaaatgtttgaagcagcaccaaaagatggatttgcagcaggagcagcagcccctgatgaaggcattctagctggtaaatagtattctgagccttccccctcaaacaagccttctgcgctgtgatgcattgcttggactgcagctgctctagcagagacattagatgctacagccattctgtccgattgtatcaagtaatctgctctttcaccttcatacaagccagctgaatggtgatgcaactgaactatggttggtgctctagcaggatagcttagagcaccagtagcaggaactgatcgtggatgcttttttctgttctcctgccttttcatttgggttttagaatcatggaaattgcgtttctgtccgctctgctgctgctgctgctgctgagctttggcagcaagagcagaatgtgttggtggtgctctctctctctttagctttcgcagactctcaatttgttctttaagattttcaggagataattcggattctagcttataatcttcaatgcatcttattacacttctcattgcagctatttctttatttgcggcatcatcctgcatgtatgacaaattggcaattagatgaaatcaaagatgtttgatgaaatgaggaagagatgaatgagaaaacatttataccttcagtttgagagagttatgactgtttcccaaaatagagttagcaaccttcttggcctcttgcaaatgggccttaagaaggggaactggtgggaacttgtcaaccaattcaaatgtataaatgaatctcacagcctcaatcatcttatcttgagaaatgagattttggataaaatctgataccaataaaagaaaaaaaaaatgaaagccagcacaagaagaaactccagtttgaaaactagagaacaaacataaatgcagccgtactagtgaaaacaaatatgaaagagaataattaagtcaaatgtatgaacaaatatttacaggaaaaattttcaatattgaacaacaaagacacactattttaaattatcactgaattctaacgttgtttcacaaactcagacaattctagtacaagtaacagtattatttaaatattctaacaa

SEQ ID NO: 785 - DNA, 2040 bp, Cannabis sativa
cttccttgttcaaattttctatagaaaccaacttttacttttctttcattctatccaaacccctattaatatatttagttcccaatgcccatgacacaagaaaatttctcagtccaaagagtgtcttagtaaaaaaatacacaaacaaaaaaccttggcgtgcttttaacttgacaaatatatactatctccctcccttgggaaagccatgcacataaaaatatatattttcactttcttcaatctaaaacatagatacagtttttgttaaaataaggtctttatagaccaacattcttttttgtcttactaaatgtttcttaccaaagtaataaataaatttatatctctatcttgggacttgccccctttgaaaaaaataataatttgtttataatcgaaagcaacaaaaaaactccaaaatcttgaacaaagtctttgctttgcgtgtgtatctatgttaatttaataaaattggattttggaagagaaagttatatatttttgcatggattgtaaaaggggtcaggaatattgacttaataaatagattttcaacctgtcctaatgatggaataatctatcaaatgaccactgacaatcttcttctctgttcaatttttttttttcctttttaatcaaagtgtctcaaggagcactaacctattttcttgtccatatttatcttaaaacaataaataatattaatggtttatataggcacattatttgaagttattacactcttatctttttttattgtgtaatattaattattaattacaagattacctaggtttgcatgaagtgagttttccaaaggtactgaaagctttggacaattccctattgatttcttcctcacgtgactttcacgtgatttatattcaaatccgtattttacaaaagaagaagaaaaatatctacatgaaataaataaataaataaattatgtgcaattatttaaaaaatattacacgaccaaactcttcaattacataatcacaaacatatggttattgtaatttaaaccattgcataacttatttatcaacaataaatattaacattaatagtaattaagggttatcactaatttaggtcctccctccctctcaacatttatttatttattttcgataaatattaaatagtcaatttcaaatgcagagctatatttcaatatcacaaaggttttaatcagataagtttcgtttttttttttatcttcttttacttcagtgggacccaccaaactaatctaatcagtatttgtgttgtgactgaaaagatcacaacctttcattcacaaaaaataatcagaaggcttccgtcataaaaactggttcatctggtgtccacacggttacttctgtgtacctacgtcacaccatatgtaataaatgagagaaaaaaaaaacattattattaattttaattattattattatgagtcaaacaatcttttccttgacgacaccgtgacgcctatctacgcctacgttacgcaatccaacggctatcacaatccctatcaaaacatcctcgagatcactacccgtccgatctcatatttctgtgtttaccaataataccctcccgttcattttctttttccttcgctaaagaaggatactattgtcatttaattatacataaaaacccgtaatgacttcatcatcttaaatttcttaatgatgaaactctttaattttatttccaacgaatgattactaaaagagtttaactcaaaactgacacattcattaccatgctaatgatgagaaatagaatcccattaagagcttttatggaattaaaattaaaaataatagtaataagtatttatttatgagatcttttccaaaaaaaaaataataataataagatcaaataaaaaaaaaattgcagtaaacaaaggagtgtttcagtatatttttaatttgtttcaaattaacattccaagaaagtttttttttttttttttgtaagtttaaataaataagaaagtttttattttgtaagtttaaataaataaga

SEQ ID NO: 786 - DNA, 817 bp, Cannabis sativa
acttgaatggctgaaaacaagttaaaaagctttatttggcaactaaattttaaaaaataaatgagaatcctcggaaaacctagatttagaaagttacaattttttgacaaaatatatataatacatgatatgaattacgggataaaaagtacttacagtgtgctcaacatttcccttggaaatactccctgcacaaaaaagctcgaacttttatcattcatcccaaaatcaatcagtacactaagccactagtgatgtgaatttcgaacccaaaaacaccagttcgttttcataattacttttccaaagatgtaattttgctcacattttatcatggaaaaacataaaaaagaaaaaatgtaagacaataaaaattgaaaaagatagcattagatagggatatacctttcttgacgacatggaaaacatcctcagctacagctctggtagctgcaatctaacacacaaaacaaaaaaaaaacaccaatcaaacccaaacatcaaataatccaaaaacattattctcaaaaattaaaatcaaaatgacatgtatgtgcatacggctccgatcttcaaaaatccatcaacggtgtgattgagaaaagggtgccccatatcgatggtaacagacacatcggggctcgaaacagaaccggagaacctggtgtttggcatcttcttaagctctgataacaatggcttagctgacactgtttttttttcaattgtgtatggctgagcttttacttcagttctattcctttttttcactaatctaaaagctctcttaaataaaaaaaataagtgggactcaact

SEQ ID NO: 787 - DNA, 3408 bp, Cannabis sativa
ctctctctctctctctccttgtttttcctctctagaccataactaaaaaccaaaggacatcatgaagttcaaacccaatttatcctttgaaacaaggatttcagttagatttgaggcgaaagttattagccaattcaaggtgaactctaagttcactatcctttatgaattttaaggagaaagtttggtttctatgcttgtttttatgaattcgtttctatatcaatttgagggattaagattagctttggagcttgttttatgattgttcttagtttgtttttgagactggtagtatttgttgtagttggaactaagttttgagtttcaaaaactcaaagcttggtctacaattacaatagtggattttcattcaggagcttatggttgcttttgactgttgaaatatgtttagaacttgattatagagtgttctgtaaagtttgagcaagtttggggtagatttgagaaagataagtttgagtttgggttttctactacaaaacggtccactgtttctgtagaaacagtgaattgtttccccaagcaggacctcaaaaaatggtgaactatttaggaatctgtttcaccaattcgggtgatttttgagtacatgtgtttttcgtattttcttgatattttaggtattttcacgctatatatcaatagagaaacttatagttttgattttaagtccccaaaagtattttaatgagacacttaccaattttttcgtaattgtgacttagggcatctaaccatctagaaatgtttccaccgagtttagccagcacacttgattatagaatttaggtaagattagtatagaacacacatatatgcacatgtttagcatgcatgtttttgttgccattagattaacatatcacggtattggtgatgtgtacgtagagttacactgagataccgacagatatatgttaggaaaaatataaagccatcagattagcatatcagggtactaatgatgtgtacatatagttgtactgagattttgatatatgctaggctttcaaaaagtacgaactaatgctaccaatacttgtacgcctagagtactgagtgcatgtggattatggttaaccatactttagttaagaatgttcaagattgagttttagacttgtgagtatgtgtatgggtgcctagttataagtcgactatatgtttatgttttatacgtttttttattgagtttgtcgattcacagatttattttcatgtataggtataggctagggctggacaacagtgaatattggagcttagtgaagattgtacttatttggatgattaaacttgacgtgttcggatcttcgtgatatttttgttatgttcacatttaaaaaattaatttcgggatctcaagttttgtaaacagtttacatttacaatgtttatctatgagaatattttattataataaagttttaattaaatacaattttatatcaagccctttgattagcaaaggttggcacattaattaaaaaaatactgtagcatgcctaagctagtagggcaatataattgggtattagagtcgtcaagttattctccgaagatcttcgagatttgtacaatcatcatcaaaaacaagctcgattcacatcttagtaagcctttacatgttttagtagctttaatcagataagcatgattagaaaaacatgataggaagcataacaatagaattcttatgttaagcatgcatttgcgataaacattaattctaatacttaacataagaattctattagtttattttaagtaaaatagcaaaataaaatacaaaaaattgggtgaaaggtgtgcataacatgattttagtatagaaaataacattttttagacaaccggttcaaaagttattgatgtttgaagtttttgaaaaattttatgcataattttggtctttctcttattttaatccattcattttgtactttcacttattgtttcattgtattggtctcgaaaatttatatgaaaatgagtggtcacattgcataattggttaagaaatgaaaaaattatgtcatttcaaacctactaactgccctctactcaacttaattttctgcaccctatagttttggtccttctcttattttttccatttttttttctcatcatttcattgcatctaacttgtttttttttttttttttttctataagaatttttctccctttttttgtataatctgccctatttataataacataggttggcagttaattacattcaaattcgaattccacaacgatatttttccaaaattatgggcttaattatactccaagtaaataaatgcagttattatttaaaaaaaacacagctgtgattaaattgcttttaaagggtcaacactgacgtggattaagacatattgcaaaacgtatctcgctgaggtgtctcgcttggtgcatgaacatcttggtctattcataagtcttccaacaatggcatgagtactagtgtactgagcaaacttaagaactactctttgaccataagaccttgcagactggacaatcatgtccttcaagttattatacttagttgctataatgtatagtatacgctaagttttttaataaccgactcacctcgttaataccttcttatacatatcgcgaggtagatgcctcgctatgcgttgtttaggtcttccttgagattatgccttctgacgcgaaatgatttctcgtcaatacgtgaatcaatagttcgtacgtccttgtctcgctaaagattgtgtagttcgcgagttataaacatactttatggattctgcatttcatgatttattccatttaatatttgttgatataattatcaatatattcgttgatttatattctctgagattgacacgtgtcaccgatacacagccgaattttgagtataacactttccatccttccatttttttaggaacattatctaccacaaaataaacatagcttattatcttcttctacttattatattcaattgcttgtactttttcatgtgtataacttttttttaatcaattatatactcctgataattaatttgcaagagaatatttgtcttgatattttattctattgatacatttttctctcacaagttgtctttatgaataggagaaccgaatggccttaattagccttgtattcatattgttctactatttatccacagaagttgcattcataaaatataatatacacatttaattttttttttattaaacttaacatatcattatgtaaaagaaaagtaatctagaaaatatgttaaggagtaaatttaaaaaattaatttactctgcaacatgttaaagtgtaatttactcttaacataatctttaaaaaaaaaagaaaacacaaaaat

SEQ ID NO: 788 - DNA, 1067 bp, Cannabis sativa
gtaaaataatttccaacaagttcaccattgagaaaagcattatctacatcaagttgctttattggccaatttttagataaagcaactgtgagcatgattctaatggttgtcggtttaacaacaggactaaagtcaaaaccatattcttgagagaaccccttagccataagtctaggttttagtttatcaaccgaaccatcagtattttctttcactctaagcacccatttgcagcctatagttgtcctaccattaggaaatggaacaagagaccaagttttatttttgaccaaagctgtcagctctatattaatggctttgttccatttttcatcttataaagctttggtgatagatttggggatggcatgagcaagcataatctttggcttgtgaataccagccttggcccttgttgtcataggatgagtatttagagtagttgcagcagggggaggtggtggaatagcaggtgttggtgtgttggaaaatgaagatggatgtgtggtagagttggagggggaaagaggtggtaaagtggagtcagaggtagaggatatagaagggtttggtaactgtggtaatggatgtggtggaatgataggaacagtaggaatgtgagcagaagtagagaagttggtgttttgttgagatgaagaagtttgagtgatggtagagaagggaaaagagaattcattaaacaacacatctctagaaatataaaatcgaccagtaggggagaggcacttgtagcctttgtgtttgaggctttaaccaagaaaagtacatataagagacctgaactgaagtttatttttatggtatggtcgaatgttagggacacatgcacagtcgaatactcttaaagaagagtaatctctattgtacaacacctgaagaggtgctttgttttgcagaacaacagatggtattctgttaatggtgaaggcagctgttctcacagcttcatcccaacaagataatggcatagatgcatgagcaaggaatgtgagggttgactctataaagtgtctatgcttgcgttctacaaccccattttgttcatg

SEQ ID NO: 789 - DNA, 1274 bp, Cannabis sativa
gggttatgagaatctgggtttgaagaggcatactgtaattaagcttgttagctcttgtcctttgcttttgattggtagtgttgactctgattttgtagaagttcttcgaaaattgaagggattagggattgaaaatcattggattggagggtatgtaactagttacaccacttacagttggaagagaatgattgatacaatagaatttctagaaaagttgaagtataatgaggaacagatgtgtagtttgtttaaaacaaatcctcaattgttgcttgaaggttctgggaagagaatctttgcattgtttggcaggttactcaagttgggtctgaagatggacgatgtctgcatcatgtttaagcaaaattcaaaaatcttttcttggaagtgttcgaaaaatattttgcaggcagtggattttttgttggagattggaatgcctataaaagatattgccgaaattgtgactgaacacatggaattcatagggttgtctactttaaaaggacctagaactgtttataaagaattgaaggttggtaggtctggtctttgccaacttatgaaggaagaccctttaagggtgttaagattagcaacgaaattggaattgaagcgcagtgaacatgtaccatgccccaatccaagcagtcatttggaaaaagcatcattcttggtgaatttggggtatgttgaaaactcggacgagatgacaaaagctttgaaaaaattcagaggtagaggggatcaattgcaggagagattcgattgcctggtacaggctggtttggactgcaatgtggtagcagaaatcataaaacgtgctcctatggttctaaaccagagtaaagaccacattgaaaagaagattgataggttacaaaactctataggctatccactggaatctctgattgcttttccaagttatctatgctacaacatggagcgaatcgaccttagattctcaatgtatgtgtggttgagggatagaggtgcagccaagcctatgttgaaattgagcactcttctttcatgctcagattcaagatttgagaaatactttgttgatatccatcctgaaggtccagttgtgtgggaaagtctaaaagccccatcagcttcaacattggaataagtctgtctccagttttcacaatgttgtcttgtacgtaacagttgtttttatcattttcttcatttgttcatttatatttaatgcttatagttattcatcttcatttatttattggattaattgattctttttt

SEQ ID NO: 790 - DNA, 4342 bp, Cannabis sativa
gcgtttgttgaatatgagtcagttgagctagctgagaaagctgtaagtatttattttaactagtatattacaacatttgccttccttcctcttctgctagagaaataatggggttcacattatgcaggtttcagagttaaatgatgaaaggaactggaggagtggtctaagggtccgcttaatgtttaagcgcatggtatgtgaaaatgaaaatattttgattgtctttgaagttgaatgcaatataagcaaactattctggtggctttatttctttgaaccattgacagtcaaaaccttctcaggtccgaggaagaaggggccaggaaggagacgtgcaatgtgaggaagaggatgcttgtgcagctgagcaaccagtgaatggaaaggtagtagaagatgctcctcagcagtccgatggctattcacacgatcacgtagtaagtgctggtgctaggaggcttattgtatgcatgatagaatgtgggaattgtttgtcctggtgtaatgaatttttccttaaatttcttggcaaatgtttattgttagtggttctgtgcaaaaactaaaaatggagtctcagggatgccattgtggccttttaattattaagattaatgtgttcgaataatggcagggggaagagcagcatgggaacgagaaggaaggtgggcagaaaaaagggcgcagtcggggacgaggcaaggggcgtggaagaggacaataccaccacaacaatcgtggaaataacatggcagggacttcgccatcaaataatttagttggtatggaggcaggggtaaccaagcagcccccacctcctggtccgcgtatgccggatggcactagaggatttgcgatgggacggggaaagccagtcgctgttaatattgcataaagactggggattattagtcattagatagagagaggtggttgtgtgtgtttgaccgctctgttatgtatggctatggtcggtgagattagggtggtggtggtggtggtggtgtacaaggactagtctgcgcttggctttcgatccttgctacttagttggagcagggttgaatgtgtcggttcgagcgtactctattctctcaattcaggcgaaggtgaggccaaagaaatgtggttttggctgccgactttctctctctatttatttatattgctgccatttatgtagaaaaaaaggaaaagaaaaagaaaaaggaaacaaaggaaacaattgagagtgcccaatagtaataataataatacctctatatagattgagaaaaaaaaaacaaaaaaatagagtgagtgaagaaatgacattgaaaaacaaaatatggatacttttatatcattgccgacttggctctgcacacccttctttctcattattcctgctcaacccaccaccacacatccacctgtgcacttctctattagacaatattaatctttacttgttatgtactgtgtttttttcatcacaaaaacacaccaaattttgtcaataattctttttaataacattctatatagaatccttactgcttttctttattaatttaatacttctccaaaagtatatttaagtgtacattattaacataaattaaatatcttcataattttaaacaacaataccttattttcttaggatacctcaacaaaaggtaaacacttgcatatttttaagtaataattcgtttatttgatgattatgtaaaagaaacttcataaattatacatgtacatgtaaggtatacttatttatttatttttttttaactatcaagtaaatagtgttaaaatagactaagatcataccttagaaaccattcaaaatttatccactgatatgtatggaattttgtccaccactacatttgttgaacaaatttgatatgatcgtatagatgaatttaaaattacaaattacagtacgttgtgtagtagttttcaatagtaagataattaaaattaaatatttatatatagatgaaattaaatggctttgaaaatgattaattatataactatatatatatataaaaaaaagaaaattgattaattatttcagtaattaaggaaaagatccctttcaaacatgaaatatttaaggaaaagaggagtgaaaatagaaagaaaatagggagtttctggttgggtgggtcagtcagtggagagagagtaaagagtaaagatctgtgcccaaaacaaaaatcgattcatggcggacttggcaatggcgccaccaccgccccttaaggctgctcctcctgcctctccccttccccttccccttcctcctccagctccggttccggctccggctccgtcgtcttccttgttctctttccctaaaaggccgaccattcgtgtgacttcggagttggatagcgacagctccgttttctcccacaaagtatcgtgcaagttgttagaaggccttgcgaaggtgaagttgtcgttccaaaacgaccgtaagggtcagctgttccaaccgcagctcgcttttgtctccaagcacctctccattcactacgaccttgacgaccgcaacgccctcctgagaggctcttttgatctcgctcccggcttgcagctccgcgcttcccacgatgtcaaggtacgtacctaatacctattttggactggattaatctctaattaattacctatttctttccatttcttttaatttttcattctcattaggctcaggaaggggagatttcgatggttactaggcttgctgagcctaactatgccttggagctttcatcacctgttccaaccatcggtttggtcagtaatatagtactcgactctactgtatgtagtatctttacttatttttaaaaattctattgttcattcttgaaccattcatttcccaattcccagccaagggcaacctttaaattccctcgtggccaagtctctttggaggagaaagtggagagggaagaggaggaggaagctcacagggttttgtccattaatggcattgttaaaggcaatcttttgaatggcatctgtactgctcagtatgctgatgaagaattgagactcagatactcctttaaggttatcaatgatacatacttttacctttatcctttctgtaccttgaaatagcactatgttccaatatacctaacctaaccttatctatctgactgtctagatgagtgagtactcttgacttctcaactctttttctgcactgcaggatgaacaaatgtcctttatcccagctatttccttgccttcaaatgcattatcatttgcctttaaacgtcggtttggtccttcagacaaattgaggtaacaataatggatcctggaattctgtatacacgtagtgacatgacttacatgcttgatgatattttacagtccaaaggaatatgtatatgcactcactcatgttgatatgtacatgttgcccggtctcagtgacttgttgctattttaatttgtccataataattcgtatgctgctcgacattaatgatctgaaaagtctagttgcttgttattgaaaaaggaaaagaatcatgtttctttgaggtactactaaatacaactcggtgccacttttttttttcttcatattttgttaacatgaaatgtttataatttggtaaaaatgacatgagtggtgccctggagtctcgagctaccatttgtcttcagtaattgtttctcaatcaccacaatacagcttcatgcagcacatgataccttttctgattgtcctggatatcgtaaaagctgatgcatacaattggagtgttgtgcacaagcattcacatggaatatgtgatagcttttctgatttattttagtgacttcgtgtccagtcactggtacaattttagttcaaacaattggagtgatatgtacaagccaccccatgcaaaatgtttgatatctttctaattttatttcaataaaattcatttccagctactggtacaatttcgatgcaaacaattggagtgctgtgtacaagcatacatatggtaaagatttgaaatttaaagctggttatgattcggaagtacgtcttggctgggcatctctttgggtatgtggtcctacatgctaaacttattgctgctgtttattcattatttcatatggtgatagtaaacatatcattaagtgtcaggtatgtggacctgacttcttcctgatgttatacgttttattggtatttggttccagtcataaaggtttaatatagtttcatatgtgtattattgtttgttagtttgtatgagaattgcaggtttttgtttgctccaagctaggtaagtgagattggtttattgcagggcag

SEQ ID NO: 791 - DNA, 5607 bp, Cannabis sativa
agagagagagagagagaggatctgcattacatttcaattcttgtgaaaaaaaatagcataatactatatggacaatctttagaatgtaatattaagacttgaacatgaactattggaagaagcaaaagtacaactgatgccaaacaattcttgtacaatttatcgtcagtaataagatagactgaaagatgcaagcagccaaggcttgaaagaacatttccataggaaaacagatcaaagttgatgtactaacaaacaatgtagatacacactgacaattataaacttctcgaccaccaggagaggaaaaaaaaagcaacctacacaaagaaggatgcacttatagaaagttcaattcacggactcaccaattctactctagccatttcaaccatgtaagctgagggattctcctgcacgcgcacacaaaaaaaaaacagatagtgtaagatgcagaaacaattcatagatccaataaatgttgaaattataagttataaatcttaaaaacatattgaaatatcagtaacaattaatgcagcaaataaaaaaagtgttgttcattttgtgcaggatagaaaaattacaaaaaattacattccttcagttttcataaccgcatgtgatggttgtaaagcacaaaaatgtaatttgattgatcacaacaatggaaagaatttggatttcatagaccaaaacaaataataattacttccgtgttatatgtttaattgtgaatactcatttgtaaaaccaaaaaattccctagcagaaccttatacttatttctgcagccacaaattaaaataccaaccaagaagcaagtacctgtttcgactcgaatgctttcactaaaagcatcaaatccccataggaatgacatgtctgtacaacatttaatgcagttgccatagcccggcttgtctgcattgtatgcatccttgttgttagaaaagttagataaaatcaagaaatacaggtagaaccatcaggcaacacatgttcaagcttcaaggtgtaaacatgttattttgactgttttcatttaaatatattatgtatacaccagttatttatatatataaatatatttagaaataaacatatagatttaaataaatagttcacggaaaagcaatcccgcactagcacatcaagtgtctgcctaaaatcatatcattatgtcaatactataaatgcattattgaaattcaatcatatatccttcaaatattgttttctgtaatcaaatattaaattatacttcacttaattttattgaagactacacaaaatgtagcccaattatgcaacacaaaaacctactgctgatgtgtattagtcacataaaaagaaaaacaatcagccaatgaatagcagtctggcagatactcacccttccagagaaactgacagcactttctttttcgtgatcaagtggagaaatgactggaaggtactctacctgtataacagaatataaggagtcaataaaattgttccaagtcaactgcagtggacaacataaagaaatagtgaactctaattaacagagaaggtacctccataaaattatggaactgtgtaaacatcctaaacatgagctttgccaaggaaatgtgccccctgatcaatgtgccaaataaaacactgcttagtataataattgaagacagaaccaatggtaatgtaatacattaaaatatataaatatataaatatcccaccaggattgatcaaagtgtacatggggataacgaacaataactggctgaattgtgtgaccagggatgaacgcccccagctggaaagaaataatgactcttccattggttgtagttccctcgggaaataaaagaagtcgaggaaatttatcgcaagaggcttttctctgttttcagaaccttgaaagcacacttctgtatcaaatagcttataaattgataaaaataaataatttatttatttctgtctgccttactggcacatgtctttgggaaagctgttcaagatcatttatcatactaaatataaccagttggatatgtttagcatagattttaaaattcactaggtttattattaattacaagtagccttctctctagttttgagaaccataccaatgcaacatgccaacatgacatcaaaatattattcttttgaataaatctagaggctcttcaataaaaaaaggggaagataatatattgccataagcatctacataaaatacaagtttgatttcaggaggcttgatatgaaaataaaaaatagctctaaaattttgttgataatggaaatgaaaatagatgagaaaatgctcgaaagccacaagaaaacttcaaagagaaaatgagagcagaaattgattttcatatcagtacaaaacaaggggtcatccaagcacttagaatgtaatcaataacagggtgtaacacgttcgtcaaaactcatagaaactttctacctttatttcattgacagcatgcttccttgatgacgatgagaacctatttacatatatgacctgagaaaataaagattgagataaagcatgaagattaatacaagtgtcaacaacaaaagactattataagctgtattaatcaacatattaatccaagaatatttgcaaagcattatttacctgcattgctctgatgatagttccaacaaaaggaatagaatcatgggactctgatgcaacaatggtaggagacagttcataaaaatagaaaatagggtcaatgtatgatacatgattagatacaactataggagctgtttccctaggagctggcttccccttacgtttaatccaatggtacctggaaggaaaagatccatgtccacaaaatcagcattattcataacatactttataaagtaaaagtaaaatatgtttgaaaaaacttgtcatccgaattacacaagtgatatggtcactagcgaagggaaaacatactagagtattacatacattcagcacactaaactatgataacaaaggtaagacttatctttgagggattttattttataggagattttcaataccctttttttcaaatttaaaaagttaattaataagaacaatataaagaagaaaaaaaattcagggagttcccactaatatggcctctcgatgaatttggaaaggtaaaaaaaaatcacaaagagaatttttcgactgtgctttcacaacaacaaattacacctacatttgttaaaagttttactgattttaaacataaaaaatattgaagaaaataaacaactagatgattgaatttatgaaagacaatataataaaatatatatatatatatatataattcaaatatatcagatgaacataataacacttgtatttgtatatgagtattgaatattaaaccacaactcgcattgagcagaatagaagtatgcttctgtaactaatcagactaattactatgctaacatagttacttcaataacatctgatgatatttgcttctcatcaatcaaaagagttcactaaagatccaacacagatcaataccttaattttttattgcagcatttaaaatttataaaactaattcaaactaagcatccaaccatacaaagaataaccacataatctttgttacagcatttaaaaatttaaatccaagttatattaagcatccataccatacacaagattaacgtttgaaattaaaaccacaagccacttcccaactaaaccccaaagcaaaacccataaatattcagaaaactttcatttccaactcagcctagtacaaactaaccacaatgagttgaataagaaaaacgcattttgtatcaacgtccattctccaagatactaaaacgactatcaattttagataataactcgaaaatctaaattataactgtaagattacccaaatgtgaagagaatacaccgtgccgaaaacctagttacccacataatcctgcacctccatttgggcataggattctgcctatccttccaacccgcaagagctaacttggtagccaaatatcccacagcaagacaagctccaaaaagaacgagtcgaacaatcataactggaaaaagaatcagaattttgagccactcgtagaccccatcgatctccttcgtatagttccggaaggggttcacggtcggctgcaggggcacctcgaaccagtcacacccaagaaacgcatacgggttgcgagaatccaactggttatcatggcgagcgaaattctgatcggtgggactcaaatgatcggttcggtttgacggctgttggtcttggtgatggtgatgttcaagacggtcgtcgttgtcttggacgtctaagatcaagtggagatgatcagacggcggagatgggaggagaggcgaggtaatatcatggtccgccattgtcctctctcctctgtgggttggaaaggaatgtgggggaagagcagcactgcttttggagacagaaaacgacgatggtggaattgaaagacagaggaagagactttgacaatttttttttttattatatataataataattaaaaccgattaataattttattctgaaaataaaaataataaatggcgtgaaaatcgactccagtacgagattttatgccatttgtaaaatttagtggtggcgattgggaaaaatcattaatttattgatagccacgtggcacgtgcttcttcgtatatgttgatttattttgtatatttatgtctttttgctcattctttttttaactactcactttctcttccaaattctactattttttgggggtaaatttatttcatctcttttgtaaaaaaaaacatatatattatcttctttctttatttttctaacgccacttaattaaatatttacttgttgaaatggaatatgaaaaagttataccagctaaatatttaatgtaaacgtgtcttaattttagcattggatttttgactaatttatatcaattgaaggatatgtttgtggtgtaagtaaatatattaaaatactacttaaaaaataacgaatatatttcagctatcaaaatatcaaataattatgctaattttatgaaaatatattatgatttattaattagtaaaactattactagtaaaactattactacaacagtcttttgaatacgaactctatttgaatcctatattaggagggagggtgatcgaaatccatttgacttttcagaagggtttttaaagacatatttaaaacaaatagtgttaaattccttgatatattaatattctcttggaaaaaaaaaaatgagataactaatataataatttcattgacttaagacttggatcataaaagaccttaaatatggttctatcaatcaattcaacgtttaggtcggcaaagacgagaggaagagtgcgatagctggtggtatgaggagacgagtggctctcaaagactcacttggcattgtttatgaacaaatatatttggccttttaatcttttattatttatttatagaagataagaataaggaggtggatcaattcaagcataagtggacacaaaaatgggccccgtacccattacatgtagtaaaagatgttgag

SEQ ID NO: 792 - DNA, 2979 bp, Cannabis sativa
aagagcttaaagagctatgggatggagtcaatgcatatgatttttcatctcaatgcatatttaaacttcgagctgcaatcttgtggacgattagtgattttcccgcttacgcatacttatctgggtggagcactgctggtaaattagcatgtcctgtttgtctagaagatacaagatctagaagaataactgacaagcaatgtttcatgggacatcgatgttatttgaaaataaaccattcttggagaaagagtaaagaatatgatggatctacagaattacgtggccctcctagaatttttactggcgatgacattttaaagcagttggatgaaattcctattcataccactggtaaagcaccaagtaattcttctagaaaacgtaagcgtggagaaaatgagttgaattggtgtaaaagaagtattttgttcgacttgccatactggtcaaagctcttgttgcgtcacaatcttgatgtgatgcatatagagaaaaatgtatgtgataatattattggaacacttttagatattgaaggtaaatcaaaagacaatttgaaagctcgtaaggatttgcaaaatctaaatattcgtgaagagctttggctgaagaaggatccttctagtaataagattgaaaaaccttatgctagttatacattgacaaaaggagaatgcaaggatttttgtaaattcattcaaagtgttagattaccagatggatatgcttcgaacattagtcgttgtgtaacagacaatgacaaattaggaggaatgaaaactcatgattgccatgttttacttcataagatattaccggctgcattgcttccttttctgacagacaatattcgtggtgctttgattgaactttgccaattctttcaaaaaatttgtgcaaaaacattacaaatttctgacataaaagatttgagggatggaatcgtaataattttgtgcaagttggagaagatatttcccccatctttttttaccataatggttcatctttgtgttcacctacctgatcaagtgttattaggtggtcctgttgctgcgagatggatgtttgggacagaacgtcatatgggtttgtacaaaaaatatgtgagaaacatgtctcgacctgatggctcaatagcagaagcttttgttgtagatgaggctgtaactttcttgtcaagatatgtttctaacatagagacaagattcacaagactcgagcgtaactgggatataccttctccaaattataagttagatgttttcaactccaatgttcgtccattaggagcatctactatcaaattgctacaaaattggagaaaaattgctcaatggtacattctgaacaattatatagatgacatccaaaattttcttgagtacgtaactaaatttttcttcttctaaattaatttaaatgtataccattcacttattatataaatgaatttgatacatagtgaacatatcaagttgttggaagaaaaaggtctttcagattcagatgttgccttacaacacaaagaacaatttccttcttggtttaaaaataaagtaagaggctgtcattgatagtttcttactaaattctgacaccaccattcattcataatataatttctttcatataggtatctcaaatgcgagtacaaaaatcaacacttgccaatgatgatttgtactctttgtctcaaggtccccttgaacggtacaacatttaccaaagttgtattgtaaatggtgttcgatttcgatgtaaagagcgtgacgataatcttaagacacaatgttctggtgtttgcactgaaggtgatcatgacaatattaatctcctatattatggtgtcttgattgagattctacagttgtcatttattttggatcggaaggtgttcttatttcgttgcaagtggtataactccaatccaaaaggtcgatctattgttgttgatcataacttgacatccatcaatacatctactgaatggtattctaatgaaccatttattttggcaactcaagcgcaacaagttttctatttgcttgatatgaagcgtggttcaaattggaagattgttcaaaaagtaaatcatcgatctatttatgacattcctgaaattattgatgatacattgaataatgatgtgtttcaagaagaagaatcatatcaattgccaccatttcgaccaactgaggattttattgaaagttcatctttagttcgatcagatgttccttctctaactctttcaggccaaattgttgttgatttattttcaaacaaccaaaataagaatgttgatgaacaagctaacttagttgaagattttgatgatggacaaatatttcataataatgaaacatttcagtcaagtgatgataacactgaaagtgctaccgaatcagaatctgatgcagattcttaactcatagttagtttcttaatatttgtaaatatttcttttaattattatatatttcattgaataattatttgtctttttttttttatttcaaggaatttcatatcatggcacctggtcgtcgcatcactcgatctactgcttatagtcaacaagttgaaccagtcattgatcctcaagctccacctgcccaagtcgttcccactactcgctcaactttacataatcaacaagtttgtcgcagtactcgttctagggtacaaagtcaacaacctagaactaccatacaatctaatgtagagagtgaacaccctcaccactccacgcatcctttggtacaggatgaacaagttaatgtgacaatccatgttgatactgaagatgataatcaatcttcccaagatccatctggtaaatttaatttcttttatgtttatttctttaattttcctttttattataaagttatgttacattataggaaaaacatcctcattcaagccacgtggggctactcgtggcatgtcaactacaactatagctaaggc

SEQ ID NO: 793 - DNA, 2490 bp, Cannabis sativa
acatacggctgactgggacccctacggttccaccaatgccatgtgttaaaaataagcatgtcaattccctgccatagcttgcttccctcaattgaatccaatttcaatactctaccgattttctctttcacaacatccaccaaataaacatttcggtcaagcattactttgactccataatcctgcaaaaaaaccaatatcaattgtgggatgagagtgagaggtaccaaacttagtgattatgatacaaataaaagagatgcatgaaaatttatgctcgaactctttataaggagaaaaaagaaaagttggctagatatataatttctctacacctacacatcgagtagtgagtgaaggatgctttgctgcgtaccatgaaattttgaattattttatagtatctattaaaatatgggacacgctcatgtataaattgaattattttacttgtgtaaacatgtgtcatttaagttgattggttggcatataatcaatcaatgtcttcactttcttactcactttgtaggtcacaactcattctcatatatggcaatgtatcttttgcaaattgcaacaaagtgatgtttgtcaagcaagttgcttagctacgttgaaaaaataaaaataggccaaaaattgggcaataattgagaaatttatattgacattgaaaggaaaacaatttcacacatgcttgctcggattgcagccccaaacagatcacactagtgcacagaactgtttgaggccatttttgtttgattacaactatagtctagagtctccacattaaacaagttatgtgaaaatgggccagatataaagaggaccacatggttggtacaatgatgacaaaagtttttaaggtctggaaaatgcttgaaatgggatttgaaaggttaccatataaagtcatggacagatatttcatgtgatgccttaaagtataaccacctaaacctattcccacaggagatccctgttagatattgttaattaattgagaagggttattttaaccgacatcatatagtttttaaatagcaacctatgttttgacacatcctaatttaaataaattttgtagaatttgatgattattttatcacgaatagaatattaattaagaaaattacttactgtaatctcaaatgtggacacatcatcaactctggaaatggtgtatttggcatttggtacagcagagtggagcaagcacgtgagtgactgccattggtttcggcttagagaatctccaacaaacataatgctctttcctcttagcctttccaagaaatcctttccatcaaatctacattaacaaaaaatttagaaaatagctaacactaactaagcttaaacttttgtattagtagtaagtgattcaaccacagctaccagcaacaataagattaaaaagtgtaaaaataaaaacatgaacaggcactacattaatgtcataaaaatgtgagattcttcatcacagttcaattgcgccataattgagagaagaaaaaagaatcatgacagttcattatcaaagcgaaatgcaactaccatcactgacacttactccaaaattggaaaaacatcacacccacaaatgtatccgacttaaatcaaatggaataattatgtatataatttcatttcagcctctctttgaaaaaaacaaaaaaaaaatgtgattggtttactctttttgttttttcaagaaaagtgtgtgcgttggaatcttatgatgattaggtgctttagttctgattttacattttaaaaaagaattcttcgaatcccacaaatagagcatgtacatagtacttattgatgtttgttcatctcataaatggaaaaggcaagtcacatggagatggagaagacacagccaccgcagagcccgtgagctttacggctctaaacaactagtttaattcgcatttcaaccaagaatgtatgttgatgttggccctttaaatcggcaccgactcctaatcaatcttaattaataatctcacctccacaacaattttatttattttcaagatattattttttaatcatttcatgatctatatgcattataatactttacgatcaacaatcttcttttattcaaattagaaacattaaaagtttatggttagaactaaaagcagacatattatgccaattcatcgtggtatgttttacaaactgccatacaactcaacttgtatacacatgccatgccactatcaaaagtttttaatagataacttttttttatctaatgcatagatttcacattatgttaaaacattggtttatcactatgtactgattagtcatttttattaaaatatatatagcttttgacttttggagattaaatgaccccctctcacaaacacattccaaaaagaattattgcattcagccaactgtaaaaaaagaaattgtagcacaagccaactgtaaaattaaagtgttataaaaaaaaaaaaaaaa

SEQ ID NO: 794 - DNA, 5043 bp, Cannabis sativa
atcttaaatcttaacatgcagatgagaccatcaactcacagtttttcattaagaactgcaactgtatgaccacctctcttcgttgacatgctctcaagtcttctccatgaacgttcacgaggatcaaatctttctactgatctgagaggttagggaagagatgtgtcagataataaggatcaaaataccaatttttttttttactatgctcgttcgtagtacatgctagctaataccataaatttatatagaaaatcaataccagtcacagatataataaattggcatcatactttaaatagttctttccatcatatcctcccacggcatagattgcaccattgatttcggcagcagctgaggaaagtctctgaacaaagaaggaaaaaccagatatgattattaactgaatttgtagttgccctttgggtttaatttcatgtttgtattataaatggaaaacagcatacacgtcactggttgaacagagtgaagtgagaaattttcacaagagttgcctatgtattgccaaaatttactttcctagtagtagtatctacatttgaaggtgcaaaaatatggagccagatactggaaatctatttgtagaaaaacaaacatttggttgtggactagcaattctcacttctcagtaagaattaaccaatttgccaatagttgcgtcattcattatgccatttaatagatgaagccgacaactagatgcattaagcaagtgtgtgccaaagaaaatttaccttatgtagcatgggttgagctgggatccactttccattgttcacatcaaatatttccaccgttgagaaatattcattgccgtttccaccaccaattgcatagattttatcatcaaaagaaactcccgcaaagtttccattcttttgattcaatgaaggacatctagtccactgattcgacaccgggttgtatgattcgacttcgtgaaaaagaattggtgttaatgcattttgattgaatatctacgtagctgcagaaaatttaattcaagaaaaaaagtaaaactagtaccttcatcataccacacattgttgcatacaccgcccaaaatatagatttctccatttagatttgcagcacaggcatatgaacgtgcaaaacgcatggagctacggtgttccatatgatctaaagaaggatgataaaaatctaaagctggtaaccatgaagaaccatcaaatcctcccactaaaagtactaactcatcaaggtttggatgaagatcattgatggactcggactcctcttgttcatcattcccactttgtttaaatagctgattttccaatgcaatgcatctatcttttaagagttgaattactaatcttgatttaacctgtgaaaactcaaattattcagttataatggagaaaattcaaagagcaaaacagagtgccaagctgccaataccctattgatgactatcataattaaacaaaaaatagagattttcttattatgtatgggtttaagtcttgagtgagttcactaaaggactgaatcagatattttgtccaagaaataagtaagtcaaatggtgcaagtttttcctttccttttatttgaatagtcaaatgatgcaggttggttggtatagaataataaagcaaatacctgttaacttcgctgagaaacatgacaaataaaataaagtgcaaaaataatgaaatttagtaacaaccataccatatcatgctccaaaagattgattttgcgatcttcttctccaagagatgatttcagctctttgatttcacgtagtaactattacaacatttcacaggtacaatacagagttataaaaagtaactaattattgtaaattcaaagcttcaatatgatcggcagatttaattaccatcggaaaaatagagttgaaatcagaagcattcatttccatgatgtccattgtttctggagagtaaacataatttaataactcatgggatgaattggttgggaaaatcaaataaagctcaagtgaaaccatggttaaacaagggaaacccccaaaagagagcaaaaactctctttctatttaagatactcacgtctatcccactgttccaacatacaatgatccatcactcttaagatcatatccaaaacgataacaaaaggcattaaacaaatagcagcaaacatcaaaatcaaagccaaagccaaagtgacaaacaaaaataaaaaggtaaataaatataattaaagactaatgcaataagataaaatcccacaccaaagacattcctgtgacacttgtcttcccaactattattgtttcctaaacttatttactatcactgcagatactgaggtacattcagcatttgatagaaagtctacttgtctcaccaatcattctgtctgtatcctcacctacagcagctttcaaaggttgccttccaaattctaaatgagggggaggacctgaaatttttaacaatgttttaaactattcagataaaaggattcagctgaagctactgttacctttatttgttgttagagaagttggtatagtgtccttttgagtgcaacttgtaaaataagtatatccttctttcttgacaggggaattcaatagttcattaattagtcccaggttcatgtattcctcgtagttttctgaatcatcaacaacaacttctaaacattttcccttttcatccaaactagaatcatcagatatagaaaggtttgttgagcctgaagatggtaacttaatgtcttgactttcctctccagcatcctcagcatttgaacctttgaacaattcgctccaaaattttcgtggatgggaagttcccatggtttgtacagcagaagagtaagaataatcacaactttttgtttggtttataacaccagtttttaacgtttgagctgattttttatgatctatagcttccaaacatcgttcttcatcatctaagcctccatgaacccaatttccattttcacggttagaattacctaacttgggtgaactccatgtattacggttttctccatctgtgttagtctgatcagggttagcaacatttagggacttcactatttcttctcgccttctattaggcacagggaatgctgcattgtaaacagagtttgaagtctcagtattcgctgagatagcagcacgcacagttgtcagaaatgatgaaaacaaagaaattagtttttctgtttgatcccggtcaagttcaaaccaaaacagtttaggctcatagtagttatcagtaattattggtccaaactgatcttcaaccaagggctggcactccatccgaactcgaatcttcacctgcaaaaaagaaaaaaaaaacatatatacaatacttttcagtgaaattgacaaaaggaaaccaaaaaaagaaaaaagaaaaccagaaccaaactacatgacaaagactttaagatgatgttatacttgtgcaggataaagggtataatcagattcatctgcagtccaaccatgtggatttatattcatttgtccagcacttgcagcctcaaaaattccatgaagtttcctatcgctatagttgaataagaacaggggcaaaccaggctttatgttctgcacatacgagaaatgtggagctggtaatcctgttcaaaatatttaattggtatttcagaacattagattcaattattatgaaaaacttttacaaatatgtgtgtgtagtacataaacaggaggaacacaatatctcaccaaacaactgtttcaaaatgcattctttgaaagtgctatgcttgcaaccaaatatgactcccccaagatcattttttctcaaatttctagcagttgagctgaagttcgatggccactgagcctgaggtacagatttttctttcaaccaataagtctcagtcttcctccctgcacccattctgtgttttaaataaataaatcagtgtcataaaaaggcagcaatttgaaccatatgagaataagagtaccatgccaaggaaaaacaaaatagatatatttctttcttacttaaatgcaatgtaaagggatacagtggttacacttgggaaaagaataaaaaaggaaaagcctctgtggattacaaaaataaagcactaaatgccatatgaagcagtactgaaatatatagaacaaaaggtttgtttcttttactttctttctagcttaatcaaggtcagttgactcagttcccatgattaacagaagtttggcgtttctctttttgctcaaaagaaagaaaataataagaataaaaagaaaatttgtttatttaatgatgcatagataataacaccttttccaaacaaaaacaatagtagcaataatagaattacaaataaaccagagtccaaagaacaatgcaacatttttatatatgagaaaatgatccatagaaagattccatttcaagagagatgtaaatactctcagtgtccgctacttccgaaggagaaaaaatgatcgcccgagttctgcataaagagaagaaaacacacgcatataataaataataataaaaaaaaaagcttgaatcaatgaaactttgaaagataaaattaaaatgaaaggaattgtaagaacaaaccttatacaagaaggagaggggcttcaaaaatcttgaaatacgttagatgaacacagaaggacactaatactaactacaggaggtccgtacttaagcaatgaggttagtttctcgagaaagtgaaggaaaagtttgatatagaaatgattgtggtgtgttggtgggtatttatagtcataatggagaagagactgattcggctaaaaatgcagtggcgaaggctatatgaaacgaaagctcattcgggaaaaaaaaagttttaatcgcgcgccacgaacgaaccgaagcgttcactacgtttattttactcacacgctcctgcctcgccattgttgtacacggttcgttgatgttttctcacgtttacatcagtggttcatagcgcgagtttatgaatttcgccaaaaatttactacca

SEQ ID NO: 795 - DNA, 2632 bp, Cannabis sativa
attttcttagagtttctctattgattgtcccaggaacttgtcttcaaatggattgactggacagatagattcaaatatattcaacctgaccttgttagaggagttgtaagtatctcacttatgaaaaaaaaaaaagctaacacatgtacactcaactatacatttatcttttctcaattcagggatttgtcaaacaataatttaactggggcagtgcctgattttctgtctcagatgccaactctgagagttttgtaagttatattgtttagaagctacattttcacttgcttgatttatatttatacactagctaactattactatttccttgctttaacagaaatctagaacaaaacaacttctctggaacactcccaaaaggactccaagaaaggctaaagaacaattcaatgctattgaggtcagttgttgttctcatggtccatgtgttcggatgaatacaaaaaatatcaaaactaacatcaaaattttcctatgttgtgaatgcaaagaacggatggaaattcatttctttgtctatcatcagttccatgccagaagaaggctaaggacaacaacaagattcttgtcccggtattagcatcagttggtggattttttggcctcttgtcagctgtagtacttatcttctggttccttaaaaagaggaaacaaggttgataatcctttcctaataaacatgtattgattttcattgaaatgtaatgaattaagttgtttatgtgtcttctttgacatcctttatcagataaaacagtattgaatgtcaatgttgagtcagaatctaaaaaacttggtgaagcatttgagcttaagaaacatcagtttacctactcagaagtcctaagtatgaccaccaactttgcgcgcatactcggaaaaggaggatttggaacagtttaccatggttactttaaaggcagccaagttgctgttaagatgctctctcgttcatcggcacaaggcttcacacagttcaggacagaggtaactcactactcaatcacatcatttgcatgatcttgttgataattgaaaatatagataaaagttcagcataatgataagcaactgtttttttcacaggccaaacttcttacaaaagtttatcatagaaacttgacagctctagttggttattgtgatgaaggacctaatatggggcttgtctatgaatacatgcctaatggggacttagcatggcatttatctggtatttcatcatactaaccatcctaacacgatgttttcattgttatggaaccttacatactcttcattaccatggatgcagataaaaatgaagatccattgagttgggaagagagacttgaaatagcattggctgcagcccaaggtattgaataagctcacacaatctttagcattgtaattttggagtttttatacttctcattcttaatgaatttttcattgaatgctcagggttggaatatttgcactgtggctgtaagccacccattatacacagagatgtgaagacaacaaacattttattggatgaaaaattacaagccaaactctctgattttggactgtccagaagttttgcacttgaagatgacactcatgtatcaacccttgttgttggcacaccaggttatgttgaccctgagtacctcatctcgaacaggttgactgagaagagtgatgtttttagctttggggttgctctgttggaaattatcacaggtcgacaagcaatctttaagagcaatggaaaagagcatattatcgaatggactaagttttgtctctccaaaggggacatcaagtacattatggatccaagattagagcaagacttcaacaagaactcagcttggaaaaccgcagaagtggctatggcctgtgtatctcccacttccacaagacgaccaaatatgtctcagatagtggcagaactaaaacaatgcttggcaatgcaggtagctagaactaacaacaacattaacgccattgagtcaatagagctcatggaaaatatacatgtagatatagactctggtccacttccaaggtagtagagtaattaaatgaaatgaaggagagcttatcattttggataatatacttaatattgccgatcattcatttttactatatgcaaatgcaacacttttagctgtttctactctggttatataatctcgccaccttaaatgaatgatcatttgcacaaaaacaaaataaatatatggtcgaggagtgcatgataagtggacaagtcgcaagtgatacaggatgacttttgaagttcaatgccatcttagctcaaccagatggatgatttcatttccatttgaaatgaatgacaagttgctataatacagtaaaggaagttagttaagttggttaaggggttagttttgtttgttagagtttgttacactctttgtacagctgtacctttcggttacagttctggcgagctcactagagcattgtatataagctatactgctgtgttgatttattttcaataagaaaattctttctgtctttctctttcaatctttctctatctttgtctttctttcactcttctcaacaatggtgcaacacaacacaagctccaatatggtat

SEQ ID NO: 796 - DNA, 4692 bp, Cannabis sativa
aaaaaaaaaaaaaaaagaaattacctcacattcagtttttcagccaaaaaaaaaaaactcaaataatgtcactatataaatgtggtcaatttttatgggctaaagagcatgtgatttaatttatgtaatattaattgtcgcactcacattcccatgcacgtttgatatctctaaaactaactatactactacaactaccagttcaaaaaaaaaaactagctactacactattattgtttatttaattaaaagaatgtaataagaaaactaaaatggaaaaattgatgaagttcaaattagtttaggattaaaaggaaagagtgtaggtttggtttgaatatatctaatctgaatttattttgatattcaaatttgaagcatgcaaaacacgaaaacttaatggccaagtcacagtccaacttgttgtagtaatagtgttcttctctttctcctggcttggttggtgcagccagctgagtccccaccccataggccataggaataggatattgccatattgggatggtgggggttctcatgtttgaccctgcaatgcatgcgtatttccaattccaactccaactccagtaacgacagacatttcattatagggtcccactgttcatacaattgtcgtttttattagtttatttttaaaatcaaaatagcaaaggaaggagaaaaaagaacgttattattatgagttttattttgttaagataaaggaaaatataatgggatggaattggatggaggggaaaggatgattgagtgtcacatgcttctctaatttagtattcttattattattataattcctcttctcataattagtgccatgacattcgctttttaatttctctgactaaaggcaaagattcagctgtatacagctaagctaaccgcttttatatttaattatataagcattaatttattacttgactaacaactgctgtttataacggtcaacaactcggtttttaatttttggatttgtagattctactagtaaaaaacacactattaaacgacaacgaattagttcttaatatattcaacgacaactcaactaactcctttcatccttattaaatttttcagttttgagaaaccccagaaaaacaaagtgggcatccatcatagtgaacaaaacatattttaatctcgagtaactgaaaagaaaaataataaatgaaattgaatttcatgacaaatcacttaccaatttacatgttacaagcatcttcttccattgacatttgacaacatgaacaattcttgctttctttgatatattcttcatatatttcttttgtatattataacccttaaaagctctacaaatgggcatagtaaaacaaattactggtggtgcttaagtgatttaaggatgcaggggaaaaaactgcatttttctgagggtgttgagttacttttttaagtgtcatcccatcaaccaaagctgcttctttgagaaaaaataaacatttttctaatatgttccaacttccaactgttttctggttctgagtaattagccaaagctcaagtgccagggaagttactgcttgtgctggaaagaattatgaaggcgcatacgacagagagtgagaatacagatagccaagtgccctcggtgtacatctccattgcatcagtgaaagaaaatcgagtgcggttttcagcccagttacggattcggtctgcctctgtagcatacaatgctctcccctgaaaaatatgatccaatcaattcttgcttattaaaactgtttagccaaaaaaagtatgttactctcctgaaaaaaactatctaagtcttagaatctcaaacatgtgaatcagcatctacaagcacatgatgttaattaacctcgtttaaagagcccctataaaattgtactacattccaagtagcataaagttgtaggacattcactacaaatatgggaatggagaattaagttaaatttttatctatgtgcacgcaccatagtgatgttatggtacatatcttagacttgaaaatgcaaaaattacctgttcatcaaaccagcgcccttgtcgcagccatatggtaactaaagcaagtaagattctaggtggggtcaagtagtttatggctttcccacttccttttacaacccgcattcgtggaactaatgttctagcaacagtttcagggagctcacatatgatgttgaacatttgcttattttgtatggtggaaccactgaaaacagtcaatagtcaatgtatcaggcctaagcatgaccagagtacaatacaaagtaaaacaaagtgacgaacaagagaaaactcatgtaactaaagagcaaaaaataaccttgataagtttgttctataaatagtaaacaaaagaaaataactcatttaaagcacctcaaaagtagatctgtaagaaccattcctggagatgctgtgtggactccgactttggatcgccttgactccttcagaagtgatgcttgaagctgccttaggccacattttgttgatccgtagctacatggaaatggaaatgagacaaacaagcataaatatcattatcgcccgccaaaaagatgaatcacaatctcttttaataagttgaaataaagctaatttacatggaacttacacagcagtcaaaggggtacttgatcccccagaacctgccccatccatattaaatatgtgccctcccttcacttggtttcccattaaacccatggcttctcgagtgcaaaggagtgaaccaaccaggtttgttgagacaatctaagttcaaatatttttcaccataaatatatggatagacataaagcagacaacatcatgaagtagctagaaataaactatagattatagtgcatcaatggggacaattaatttatttcagcagatttgcaaaacttcatagaacgacttccttgaattctcatttgagatgcaaagatggaggagaaggaaaagccaataaagtgctccaacaaataacccaagtaaagaaccagccatcaaagtacctgcttaatgtcttcatcagtgaattgcagcaagggtctaaatcccttgtttgtgccagcattatttatctgtccaacagttctaattattaaattatgagtttatacaacaaaaacaattttcgcaaagtgagtcactaattatgaaggcaaactctcacccaaatatcaatgtaaccaagttctttggaagcaaaattccccaatttctgtacatcatcagggttacaaacatcacatgctatgccaacaactttagcatgtctaaggtttgtcctggatgagccacctgcagagagtagaccttccctcaagttttcctcgagctctctcacagttgcgactacagactcagggctgccttcacatgattacatcatatgatcaggaaaaaaaaaggtagtctactaaagtaacaaacaaaagcaaaactaaagaaaactacactacatactaatacatgtcgaattcaacattagcattttctaaaaatcacctgcgagaagcgataaccactctatctcccgaaagaagaaattcacgagcaagagccttcccaagtccccgtgtactgcaaaatccaatccaattcatccaatcaaaaataagcatcaacattacaaattacaataagaatgctcttatacattgcaactaaaacaaacactgttttagatctttcaagtgcaagcaaaaggccaataagcaaatatggaatggaaagactcgaaagagatggtaccttccggttatgacaacattacggggaccagcacgacagtgttcctctaaaaccatgttagctccaatcatagtcccaatgataatccctccaagccagctataccagattaaggtgtgcatttggctgtcaccaccttcaaaaacagtttttgaaacagtaaactttgtcattgttatggtaaaaaagcacaatcgaattgtctttgagagtttcatgttttgcttacctgataactgaaatccaacgcctagtataacgccagtactcatcatggtcacaatatatcttccaatttggacggcaatctggttgtttttcaaggacaaaggagaaacaccttaaatgaaagaaaataactcttgtttgttttcatgaaaattttctttaacataagttagataaacatatcatgatttgattagcaaactagaaaagttatgtcttgttgtactaaatatggcaattatgttaccaaattaagcaaaattaatttaacaaaataaaataacttacggaggaaaagacttcctcacacttggccacagccttgccatactcatcattgtttcttgaacctgagccaaaaccagccgtgacagcatacttcaagcaactccaaaacccacttcctttgttcaatttcagattttccttcactttcccacactttctcgcactttctctctctttctcttgcgcgtcccctccatcgtcactctcgttcctataagccctgcactttttcaagccaaacccactacggacagggcgcactgacccactaaaaccgggtccaatcaggatggtcggtcccgttcggaagtgagccttggaattgaacaggtctaagtttaacccatgtgggcatatgtgaagccttgtaacagcaacagcagcagcggcggcggccattga

SEQ ID NO: 797 - DNA, 547 bp, Cannabis sativa
tctaactctcttaagaaaatattgtcttaacatgattttctattgcattgattgtcagcacaagagtttcaaatgaattgggtgcagggaggcctcgaatagctcgcttagcattatgtgtcgcgctatgcatggttgctacagaaggcacctcggtgggtgctgtcttgatcttaggccgtcgaatttgggggtattgttacagcagagaagaagaagttgtgaaatatgttggagaaatgctgattttgatctcaatttcccacttcttcgacgggattcaatgcgttctctcgggtttgtttttgttcatttttgctttgcttctttttcatgaaagattctaaaacacttgtgatgacaatttcaggtagtgttagaggcttagggatgcaaaagattggtgcttatgttaatttggcagcttattatgttatgggcatacctatagccatagttctagcctttgttttccacattggtgggaaggtaataaataaaactcactctcaaatttcaatttggtaccatgtgtggtgtagtggta

SEQ ID NO: 798 - DNA, 1134 bp, Cannabis sativa
tgctgatccaggaacttgatagatctaaatcttacctgaacatgccatccagatttatgtccacttaagagatgggccatcttgtttgtttgtttggactagttgatgggcctggtatcttagtggtcctccgcgaggggtcacatgtcacttcctcgggaacacagataatattttcccccaagcctccattgattgggagttgcaaaggcttgtcaccttcatctagatttgaaacctctttcggttccattaactaagttgcccacttggtattctcctttagggtacttgcatgagtacttctggactcttcacattctgatggtataatccacgtggtggtatatcattggcttgtgcaagttacataatatatgaagtgtatgacgtgttaggtgtcatactgacggctaatgcatcagcgctttcttcgaggaaaatatcatcattaatactaggcccttcaattttgatgtttgcattaaatgcaacctttgatgttcctcgactgttggatcaatgaaaatgatgttttttaggatttaatcttagcccttaaatcagaagcacatgaatcgccatgaccttataaataatgttcgaataaatggtttaacactttaatcacttcttcaaattttgaaatttttgtggagagaaaaatttccaacacccaaaaaaagtttttttcagtgaatgaccaacctagcttctaagctcttcaaaaaattgttccaccttcaatcacgtttgtgtccaaattccagctccttaactgtcattccaacaaccccatcgtcgaagttttatggggatctcaacgagtttaccaagaggttacacaaccttcacaagaaaatttcgcagtcgtttacaattttttaccaccacccctaacttcaacaaatacaagtaagtacacttctctagatttttggaactaccctttctttatgttgtcgttagggtaataggtcgtagtttgacttccatgaattagaagattttatggattttttttttttgtgttgataaaaaatgttagcctccgctgcatagggtggttattatgtctgtttggatgaagacgtagagactcataagaattttacgaactttgaagttgttagt

SEQ ID NO: 799 - DNA, 705 bp, Cannabis sativa
ctgttctcttttctttttctttttaaaaagaatcacatactgaggtcaatagcagaccaacctcatccttattttttatttgtgtcgtgtgagtaaaaactacttgaaaaaacttgggccaagtttcagtcttaatgagctgctataaaactctacaaacaatttatgaatcaatgaattagaatcagttgaaccaccatgcttctgtcaggtgtataagtccatattccttagaagaataatttctatttggaaaaaaaaaaaaagatttgtgggttattggacagtaatcaaagatcccaatataataataaaaaaaacctttgtaaattataataaattgttaagaaggttgaagagaaaatttatccgctatgtgcacataactttatgaaaatgattttttttataacacaaaaatacaggcaacatccacaaaacagcacatatagtaagtaaactgtaatttatgccagctatactattagtaaggcttgaaagccaagcttctcaacaaaatttttggtatttggcatcatgacacaaggtggaaaaattcaagaaatatgtataataattaaaagaaaaagcaccaaaaaaaaaataaacttaaggaagatgaacaaataaacaacaaaacgaaaaataaaaataaaaaatgagggtatttttataaatggtgtcagtttttgtttatgcccctag

SEQ ID NO: 800 - DNA, 1356 bp, Cannabis sativa
taccttttctatgctggccttattttgctgatcagttcttgaacaaagattatatatgtaatgtttggaagattggaatgggattcatagctgatgaaaatggaatcgtaacaagtgatgagataaaaaataaagtagataaacttctaaatgatgtagatataagaagaagattattgagtttcaaggaaatggctatgaaaagtatagccaaaaatggtcattcttcaacaaatttgaacaatttcatcacatggttggaagctctgtgagagtcaaacacattacatatttttcttcttcttgatctattttactaagttagtatatattttgtactatgtcatttcatgtactgtggtgcgctgtaatatttattaaaataatgatacttttcaacttttattgtatttataaatgtgactaagagcatctctatttgagctgcaaataaacagtgaaaagttaaaattgtactattttttttatttacatttatgttatttttattattttattagtatatttaattatcatattaaattatgaaatatttgttctcaaccacttatgttattaagttcccaaaataaattatcaataaaatattacaaatatattattgtaaaaaatttatttgccaaaatatagttttatttgtttgtcttgggtttgatttattttatattttatatttttttagtgaaacttacaaactgagcatgttaattttatacaagaaaacaaattatttaactatgttttggcatgcattctcaaagttaccatggaagcttgattgaatgtttcaatgctttctcaaaacatatcaacttttaaaaactcagtgtgtcaatacaatacaactaaagattttgtatctgttgcagaaaatccaaagtttctcacaagtcacaataggcccacaagatatttcaaaccagaataacagtaccttgctcactcatagaactagattattcaaggatttatctcaaatcaaaagtcataacaataataattagcataaaaaagctaattattgatatttgaaaggaacagaaaccaaaacctcagaatttgcctactttatttatttatttattacagttgtgcttaaaccaaaatttctctgaaaataatagctacactgttacacttctgcgcatgaaaggtattgcaacttataaaacatttctctatatgcagataccattagtaaaatgaccaaacaagacaagaattaaaaagaaaaaagaaaagaagatatacaagtgactatattgagaagggacaagttgctaatgatgaatctacaattgacatgtcaagtcataagtaggctatatatctcct

SEQ ID NO: 801 - DNA, 2357 bp, Cannabis sativa
attttctcttcattactccttgataaaaaaggatttcttgtttctcatcattctgatcttgtgcttcattttccactgctgaagcctgcttctgtaagaaaaaaatgtttcaatgctgtttgtcaatctgctacgcataagtgcctttgaaattgaaacataattgtttccataaccagagacttctgtttatatgccgtatatgcttttggtgacctggagtttccgaactcttgaaaggcctatgtttctgcacttgtggttacatgatatccaattttgcaatgtttttgaaagaattgttctaatattagggatttgctgtggtgatattctctgattcatccatataaaagctcatttatattgctatgtggtttataaagtaatctctgattaatctatgtagacttacccttgttattgctatttggataaggaagtcaattttttgaggcaaattttatgctgcattgatatttaaacatgaaatgttatgaataatacattgaattatattgggagagacatttgatgttcatttttcactctttccaaaatgttttctgtatttgtcaaatgcatggataaccagtgagttgcttttaaccttttctgcaggtaggaattacaattgcagctcgcagatatgaccttaattcttcaactcctttccaaacaacagatatcctgaatctccagcctgtggttaagcactcagttcctctgtgctcagaagccaaggaacttgttgaaactgggaagatccagttagctgaggtgtgtgaactgttctttgagttttcagctccttttggcaaacctgtttttttaagctgcttttggcttttagaattaaaaaagcacttttgagagtgtttgagtaaaacataaaaaaatcttcttaatctttaagaccttttaattgaagttgggcttcctagtttctaaaaaagagaccttgtttagaagctataagctaaagctttgccaaatgtggggcgttaatgtgttttccaattgccagagtttggatattttgagatcgggaagaaaagcaaaagattgctttggaatcatctgtatagtatggagatgcttaaatatgaaatatggttgaatactgttgaatattttgcttagaatagaatcaaggaaggaattatatgtcgattgaaatatcgacactgtaagtttgtgaacatatttcgatatcgatggaatttcaagaaaaattataaatacaacattaatatgaaaagtatgataaaattaaacaattacaatacgacatacaacataatgaattataacatcattagaatcatacctaatttactttaaaaaaaatcagaaatatgatataatatttattagcatatgctttgttggagtttaaatgatatatttatatagatgtgtactgaggagttcatgttcatgtaaatatctttttttctaagttatgaaattttgcctaaaattatttaattccaactaaaaattggaacccttcaaattacgagaattccctgatatttccaattttttcctccttggttataattagttggtaagaaggtcaggtccataagttgaacataactaaggcttgtgttgtctttatctcagggaatgcttagtgaagcttacacattattttccgaggcattttcaattcttcagcaggtagattttatctgggtttcgcctctttgcacttgatttggaactatggaagtatataagttttttttttattctttctgattccaggttactggaccaatgcatcgtgaggttgctaactgctgtcggtaagtttccaggattggatcactgcaactttgttagtcctcagaatctacatttatggaacacatctgtatttaattatttaaattgggttttctattgtgttttaggtacctggcgatggtcctatatcacgctggggacatggctggagcaataatgcaacagcataaagaactaatcattaatgaacggtgccttggtttggaccaccctgatactgctcacaggtagctatttgttccatttgggtggtcactattcctgattttttataagagaattataatttttttgacgagagaatttgatacattttagatttttctttacacatatgatatgctcatgtattcttaggctaatgatatgaaaactgagcagcattttgatgtatacctgtacacctgtacttaacataggggcttatgaaaatatgaggttgtagttttttgtgaacggatacataggtttattgttgttgatgccaactttgctattgttacgagattggcatctttctccaaatttcataggttatt

SEQ ID NO: 802 - DNA, 3354 bp, Cannabis sativa
actctagttagcttagtccaattagtataaataagtgtctttgcatactttatgtaattaattcaattctattatcaataaacttttttttttattttcatcttctctttgttttcaattcggcaataacttttctctcttctctttctccacccccactttccttcctagttcctaccaaacacccttatgaactaattacacatttagaagaaaaaaaaaatgaaataataaagtgtgtaagtatttcataaacattattcaagaagatttgaaataatcattttgcttttaaaactaccagaaagaaaattttgactgagtatgtcaaactacatcacatgaaagtttcaagtcttccacatattgctgaaactgtgttgaattatttagttgcagcagtcagccattgtcttcttaattttgctgcatgtgaatacgtgattgatttctaattattttgttgaaaaccatatcttgttctgttgtgtcgacttaatatgagctagcttgatgtttcaaattgacatttctaagcaaaatatacatttgctatgcttttgttcttatataaggtgttggactaaatgaaagtgcgaagaaaaaggtaagtgcaaattacagaaactttggtcttctctatttttgttcttataaggcgttggactgaataagctaagtctaagattattagagtagaactcctatcttgtgagtcaaaatgtagcaactaatagcaagacagcataataacaatacaataaaaggactgtatatattaagaaaatcaagttgtgacttcaccaaataccatcaacaccacatattgttgaaactaaactcaaataaagacaatgcaaacgacaaaaggagatctttcactgaagatattaatgcattgtcacatagttaattttctcttatcgttttgtgaaaaatgagtcattgaatgaaagcaactaccctataagacaaagatactgctaattttgatgagtaaccaactccaggttggaaaaaatcaggttacttccgtactgatatgcaatttgtaagcaactattatatacataaaacaaaatctatggcttttgtggtctacccttattatggtaatgacaaccaatactttgacatcttccttcttgcaatgctctgcaaatattctgatactcaagacaaccatcaccctgatatttttttacatatgtcaacttggaccatatatttttatatatatatgggaccactaaaaagtgtaagcaagctcttacattacatatggtcaaatgtctcaaatcatacaattatatgaattgaattgaatcatataatatacagtactgaaatggaggtgcttgatgttttgaaaggcttgatatggaaagaaactgaacatttgcttgtttgtaatgtgaggtactagatgtcacacattacaaacacttgcatttgtaatgtgtttttgaaagttttgctgtgatcagtttatgtcttttctttcactttcattacattacattacattgcagcttcagtttcagtttcctttcatcaatcaggctcattcttttcaccctagtaataataaaaataatattacaatgaactctttacataccattttcttgaaattcttaaacagtatagctccgaaacacaaaagaacaggaagcacgaacagtaactttatatggcgatgtagaacagctgctcaaaacagagggagatcttacaaacaatgcagagaaaataatgttttcgtttgttgtttgattcttacgtgaattaagtctatgttttttctgtttggtaacatctctatcatattcacaacaaactaatcgatattctagcactgcagggctctctttgacgaaaacgcttcaaaaagactagactaaagttactttgaccctggttggatgggttttttaaagcgctttaacagctgctggttgggttacaagtaagtttcagcttttagctctaaaatgctcttttaacagaagcaaactttaatagttttcttagagtttagcttcttaagaagctaaaagccgaagcaaaaactcaagccaaacaggactttatatggtgcaatgatcccacgtaactttgtctagtactctttagaacgtctgctcaaacgagagcacttataaacaaacagtgcattgaaaaatcactcaaaacaagacgttctaacatgaaatgaaaccttatgtttgtatattgaaaactcttaagtgtgattctatgtaacctcactattagatgttataacactatattgagttaactattaataaaatggttgtaaaccaattctaaaatctaaataaatatttacctctactggtttttgttcacacagccttaacactcactcattactgcaactcgagcaaaaaagttattcccattccctctacactttctgctaacacatccttaagtactcacttgtgtgtatgtataatcctacttaaatatcccattgcaaccaaagaatttaaaaaccaaagcttttatataatatcttaactcacaatgataccgcagcacgtgttgttgttggtcatcttcaaaatctgataacggcattaacaaacacattcatttgtttggttattagtttaaacaatacattaccacgtttgagtttcagatcacttgatgtacagcagatgaaaacgattgttgaggaccatatttgccatggcatgaaaaaatctacattgttataatctcaacaaccaacttcaactttggatgacaaaaacaaaattcagttgtagttcttggagctcgcaggtacatctttagtccagatcatcaacagcttttttctacaatctacattcatttgagagccaaaaacaaaaggagcaagaaattacaaacatggaatagtacatgggattttaaagctgagtttttttttctttctttctttctttctttctgttttctttttctttctaggatagtgaaatgaaacaaaaacttataaatataacttatcattagatacgataaatttaaagctgccatagcctcttgtccaaaccaacgcttgcaacctacctaaaccaagatagagagaaaaatattgagaggaaaaaagatgtacaatatgaaaagagaatgtagtgacttgacaaagtagtagataaaggagttagaaccagaagaaacaagataatttccaccaataatcttctatctctgagttcctcttgttctctgtcaaatagaaagaaacccaggtgaatgttatgagctaatggcttttttccaagagacccaagtgaacttttcttacacacaggcctcttttttttttttttt

SEQ ID NO: 803 - DNA, 698 bp, Cannabis sativa
aaaatataagaaacgagatcggaaagggaaaaatacactgacctcagaaacagactcatcgagcatgtgtttaatggagtggtgatccagaagattagtcttcttaggggttttgggtggcgttggtgcggtttctggtttcttgtcctgcatttttgtcgagattgagggtttggaagaaaactggtctgaaaatggttgacagagaaagagggtgaggagatgagcgtagtgttacggggaacggccttttatttttctaatctacgcaactgggtgcgtaatgcgcgctcctttaaaactagaacaattaagtgaatttatggacttcaaaaaaaaaaaaaaaaaagtgaatttatgggtaaatactattttttttttggaaggaagaaattttttattaaaaggcaaaaaagtcaaaattaaggacactacacgatagtcaagattagagggaaggcggtaaatcaggccaccaaactatttaccgccaccaaactcgagaagagtcgagggataaaggcaagcgtgcaagataatgagttgtagcatttttgagcccttttataatgagtgagagaaataaaagagaaagaatcatgaacaataataccaaactcagtctgttatattaatagcttggtcaagacgaagacaggttgagaaaacagtattagagttgtaccccaaatggcgac

SEQ ID NO: 804 - DNA, 4924 bp, Cannabis sativa
ggcgtcacagccgcaatcagacctgtggcaatgggaaaacgccaccgccggtgccctcgccggattcgccacagtcgctgccatgcaccctctcgacgttgtccgtacaaggtttcaaggtatctctctctctctctgattctccagatttaaaacaattaccgagagaattcgaaatctgggtgattgtgttttttaggtttttgtatttgaattgacttattatagatttggttgggcagttaacgatggaagagtgtccaatcttccaacttacaagaatactgttcatgctgttttcaccattacccgcttggaggcaagttttggtttttactatgttctagcttgacaattgataaatcgggaaggtggtgtatcttatctcagtgttgttttttcatctttcaggggttgagagggctctacgctggcttctctcctgcagttattggctccacaatttcgtggggtttatatttcttcttgtaagttcaagtgttcgtgatttgatctttgattttttctgttttgggatttgtaatcattatttcgtttgggctttcgagtttcctttggtttaaattctatcttcttttgtatgctaaattaaaaatgcaatcttttcataaacagataggaaaatttgcgaatctaacaatatgaaattgttatttgcaaaataaccatagaatttgaaatttatggtcgtaaggactatttttacaaaacactcaaaccgattatttcgtgtatgtgtagctacgacagagccaaacaaagatattctagaaacagggaaggcaaactaagcccgggtcttcatcttgcttctgctggggaagctggaggtttggtgagtctgaaaacttatactgattagtagaatggagcagccagagttatttggcctttggcattttggcaattgtttgagttcaatttctttataattcaagtattattctgcatcaccagttgattattgtgacatctgttttggtaggtttgtttgtgcaccaatcccatttggctcgtaaaaacaagattgcagcttcaaaatcctcttcatcaaactcgaccatattcggggatttatggtctgcttcacatcttacattaacttgcttgtagtgtgcactcattcctttcccagtgagtcattaactttggctttagaaatagcagtcaaattaagctcaatcattttttgttttcttttttgtgcactaaagcatttctgttttactctaataaaatgttttttcaactgtttatccattaatgacttttattttgattgtgaattggcctccccttcctgtaaaataatagtattgttgctggagttattattttcttagatgacaatgtgtttttaaaattgaaatggcacaaaagcatatcaaacattactgattgactttttatttccttagaaagattattacaaattttagttctttctaccacagaaccgtttacttttctatgatgttatctctctagatgtttagttgattatcaagctgtattgtaagcatttttctacatgccttcgtgttattggttagtcaagtttgaaagcttaaaaacatataatcacgtggaacacaggctccacaactttagtgcttattttatgcataatgcaatagtttggtctttgctctgggcatgagagcccaacttttactatgtcttttgatattccagatgccttgagaaccataatgagagaggaaggatggagggctctttataaggggattgttcctgggctttttctggtatgttgtttgatgtatgcttgcatatccttcccattgctcattttttctgctaacagcacaaatggatacctacaatttacaactgataaacatgtgtataaaaggattacgggactctaaggtggaggtcaagaacattttagggatggttttctgtttgagtatgctaattgaatatctatgggctgttccagcaggtttctcatggtgctatacaatttacagcatatgaagaacttcggaaagtcattgttgactttaagtctagaaagagcacagagaagtctggaagttctgatgcagttttggtaggtcgccacttactaaaaagccgtgtataattgtttgatattaggctcatataacaatgtttctgcatggttgtgagaagcttttatacagatttatatgtgtataattaggcttttagttctttttctgggggcgtgaatattttgttgttttgagtgcattgtattcatgaagatgcttgtaaaagtacgtttagcaatttacgcagctgtaccaactgaaagtgagcatttctagcatttaggacaacgggttctatttcatgacatgtaaactatcttataggtccttgagttaagttataacatacatttcattgtcgagcattattcatttttagttttaattatcaaaagttggagaggggaaataagattctacttgaaagaaatctcttttcatttacactttaaatagttctcacaatctagacaatttcttttggcacagaattcaattgattatgctgctttgggagcatcctccaaaattgcagccattcttctgtcatatccatttcaggtcagcattttatcttataaggatgtttgtatggctcgtatttgtaattgatcattaattcttatgctgtcttggtcttttttcaggtcatgcgctctcggttacaggtatgttgttgaatatcaaatgtttgtatcaacttatgatgcattgatatatttgaagtgtgttcctctccattgcagcaacgacctagtagtgagggaattccaaaatatgtggatacttggcatgtcgtcaaggaaactgtgcggtaagaatgaaacaaaaaccttgctgtatgttcttctatgatagtctgaaatttacttttttcttctactttgctgtatgttggattcaaagaaacaaaaccctttattgattgaaaaaaaaaaacaaaactactattcttttgtttcttaaaaaactcgaaagcctgcaaggcctgctctgggtaaataagttgttaagaaaacaatgtttcaggtcctttccactggaaaatgcattttgaattttacactcccccgccgcccttctttctttcccctctttgttcaatactgattcaaacttctgtctcgggcttgcaggtttgagggtgttcgaggtttttacaagggcatcacaccaaatcttctgaaaaatgttcctgctgcttcaataacttttattgtatacgaaaatgtccttaaactgctgaagttggcaagaacagactgaaattataagttaatgttctctacattctttttcttagctctgctttgtaattgataaatctaagttcaattttattttaataaagttattatccatacaaaattaagagtatttggatttttgcccatgacacaaaatttatcctttaactaattgcatttttatagatgagatggcattccatattggtaggtacaaatgtagtattatttttcattcaattagccaaactaacaaacatgcttggcaatgtcaagccctcatttaacattttgctaatgtgaaagtacttaaagaaaaggaatgttttctaagctagacaaagaaatttgctgtgctttctcttgctgaatataatggtgaccatctagaataacaacttctgtgtttggaacaagactcctaaaagcttctcctttcacatattcccttgtgccccataccatcaaaaccaatatccttgtcatcacctaccatgaattttgctgggacaactatctttgatcctcccagttcctgttattaaaaatcaaagttaaaaaaaaaaattaaatagcggcataagtattcgaaattttgagtttgtaaacggcataaatttaatgatttttttggtatccaatttttgtaaaattgtaacttttcttcaattttgtaaatacagactccattttgaatttattaaaagaagatttgaaagtaatcgatacatgtttccgtccagagctaataatttagaatttaagtcttatatgtgccatgtttaaaataataacatagtctgtattgaagaaattgaaaaaaaaaattacaattttacaaatattaggtgtttatactgctaaaaaaattattaaatttatgccgtttacaaactcaaaattttaaataactatacttaaaaaaatagttctaaacttggcctagatacatagaaagcaattgtctccactagtgaaagagagattaattaatgagagtgagtttgaattcaatgtcaagatgagaaattttacattatctgatatgatgactagctaggaaagacaaagacactatgattttattttataagaggattgcttgctagccaaactcattatctcttaaggcatactttttttgttggaaaaatttcacttatcgtgtgattttagaacagagaaaatatatatataaaattgtttcttatggtatgaaaatattatggtcattagtttcaaaaagtttattcattgaagatttgttgagctttctcttggtgaataaaatggtggaccatggccatgctctataataaagtcgaaattctaacgaactttctcacccaattgtaatatagtgttcttaaccttcacttgggatctcactttgtgatattacacaaatttcttgagacgagtaaaatatgatgttcaattcgaaagaattacttcactaaacaccaattagtttcaagttaaaacccgattctgttccttaaaaaacttcttctagaacgtagtcctttcgtaccattgaatctcaaaatcaaatctttgttggaaaactaatttttaatccgtacaaaaagcaataaatataagtgctga

SEQ ID NO: 805 - DNA, 1151 bp, Cannabis sativa
gagcagccagacactagatgattctccttctctcctattggaaccaaccacctaaagatcactctcattattatgtgttactagttcttttattaaatcttcaataagcagcattatctaaaataacaataaaaatgctttaataatgactttaataaaaaatatgatggttcacaaaacccatcaatttaaattgtatctttcccaccttgtgaaaataaaaaattgtatctttctttcttcattattgtgttattagtattactaatttcccatcttaaggaggttgctatggttgttttactttcggacacatatagagaagaggcacatggtgaaaactttgagagttaaaaaattagttgcaacataacattgtcaagaggtcactttatgtaatcgattggaaattttagggtgttgtaatttattgttctaaattttgaacctgcactcaaaatgatcaaagcacacatgcgcggaaccatggtaaaggaattttagtaaaagtaattaaatatcaaaacacacatacatgcacaccatcaatatcttgtgaatccactatgaaacaagaaaaggatacacccattgacagtggtggcggaccttagaattttcgccagtgggatgcaaaatttaaataaaaggattgtttttttttttttttgaaaagaataaaaagattgttaattgcgatattttattacatttttttttttaattttatacatagtaatagtagtgtttgtttatatttataacatctttaaataattgtctttaacaagtttttttggaattttctaagggtgtacttactacagcgtacgaccatgaacttttactaaaattcttcttaacgaaacaaacgaaagggtgaacaatagaattttttttatattataaactatttttagtagtcgtattttttgtttatatacttttcgatcaaatcataatttaatttataacttccttccactaaaggaggaatgactttcggcagaaacttcttagtataattcaccaaaaactagaacatctctcttcttctccatcttattattcttcttaaaaatgttatcacttgcttctgaacccccaccattaatcaatcccacacaaccatcggtgcccgtgtcttaccc

SEQ ID NO: 806 - DNA, 1418 bp, Cannabis sativa
agtccctctagggagagattttttgctttatactatgattttgttttcctccattgcatttttatttgctgagttttggggttaaacttcatttctgtaatggtggtcactatctcatactttgcccaattgtattaaaactatttcccatgtcgtgtagtataatttgtacacatttgaattcagttactttactaaattctttctcttttcttgttttttcttgatgctctttatattagctgtgtaagaatagcagaaatccattgtgtgtaatgaaagggttccctttcacttcttgttttactaatcagtgattaaaaatgtgttattcttagttcaaaatgtgtaattcttattgtttgtttgccacacaggtttaccagcaatcgattgctgcagtttgtgtccaggactggcctaggcagagaatgcttgtacaagttcttgatgattcagatgaattagatgttcaaatgcttatcaaggcagaagtgcagaagtggcaacagcggggtgttcgcatattgtacaggcatcgtttaattcgcacaggatataaagcaggcaatcttaagtctgcaatggggtgtgattatgttaaagattatgaatttgtagcaatatttgatgcggattttcagcctggaccagatttcttgaagaaaactattcctcatttcaaggtaacttaaaaatctatattataagagctcttgttcaaatatacaagttaaacaatagaacttgaagaacagaagtagattagagtatacattatctatgccaattttcagtgtaaacacattcatggtatagtttacattggttggccctttatctgactcaaagttcttgcattttcaagggaaatgatgacattgcacttgttcagacaagatggtcttttgtgaacaaggatgagaacttgctcactaggctgcagaacataaacttgtcatttcactttgaggttgaacaacaggtcaatggtgtgtttctcaacttttttggttttaatggtactgctggtgtatggagaataaaggccctcgaggattgtggtggttggctggaacgaactactgttgaggacatggacgttgctgtccgtgctcatctttgcggatggaagttcatttatttggatgatgttaaggtgtggttcatacattatcatttttatttttcaaatattttgtcagattggtattgtagctgatataatacttcttaacagtgcctttgtgagcttcctgagtcctatgaggcatacaagaaacagcaacatcgctggcattctggtccaatgcagttgtttcgcttgtgcttcgttgatgtaatccgttctaaggtactaaaagcttcactctttaaattttatatttaaaaaatccttgaattctatattcaaattg

SEQ ID NO: 807 - DNA, 2993 bp, Cannabis sativa
atatttatatatatatattgaagagtacaattgcccaccccaaaggaccatatagacagacatggaccacaatatttttcatcacttccaattatttccatcgatcaactatgattttttatttttattatcacttgaattgtattaaactattaatgcacgcttcaatttataataccaactctctttgttgcattttgttttaataatttttatttaacactaaaaactaaaagaaaacttccaaatcattttttgtcatttggcctatgaaaaaagaaatgaagtaataatactaaacacaaaatttcatatcatttaagagcacaaacaatcacgtaggaaaatatgcatgaagacataagaaaaattctatatataaaaaaaaacttaattatatattttattattgtagaaatattaaggattcatttggtatgatgtattagaccatattatatggtatagtattatataaattatgatttatattatatttttatataatactattttaaaatttgatttatatgaaaagataatatatttatatgtcatatacaaatcaatattaaatataaatatagtatattatgtaaagatataatataaaatataatttaataaatactatataatacaagaggacgcaatagcaaacttgttattttttgatgaaaaaaaaactttgcaagaacacccacgtaatttaatcccactatctaatttttttatttgttaaaaatacttagtgtgtttgcatttatatttatatttgtaacacttttttctttataaatatttagacagcactaataaatattatattattattagtataattaaatataaaatattatatattttaaattagtaattattataaaagaatgataaattgttagcaaaatatcacctttgtttgccgtgtctaattacaataattttttattacattatttaattttactcaattatataagtttgtccctacaaaagaaaaaaattatatgtttgaataatcccatgtgacaattaagtacatatgttatagaaatgtcatgaataggtaaataccaaaccccacatatttaattttccatgtataacacctaatcacatggtaaagtacacactactacaacacaatctagaaaaataaattattttgattataacatttctttgtcaaatgatatatattttaaataataaattttgtaaaatagcataagtctcatagccagatatggtgttaatatcattagatagattatgctaaaataaaataaaattactattatatgaaataactaaaaaataattaatatttttttatcatataattatatgcaaaaggaagaagagaaaaatctttcctatttttatatcataatagttataattttaatctttttatatgatggtatatatatggaagttgtttatttaagaaattctgtaaataaaaaaaatttattaagaaattcaaaataatttataatataaagtataagatttaatttaaacaatttattttacaacgtataaaataaaagagatacaagtgtaacaaattatataaaatctattttgacacgttaaattatttaaaattctcgaaagtttataaaatattttaaataactattgtgcacattattatatatatattaatatatataattaaaattatttggatataaacaatacacatctatatttgccaaattaaaattaaaactatcttgttaattaaattattataaatttctcaaaattttacatgatactctaaataactataacgtatacgaccatgaaaaaaattatactaaaaaattatctcatatgccaaaatacatcggtgcatcccttttaggaagttgcatattgtataattttccactactatatacactagtggagtaaatatgggacagattttttgacatggcgcaagctcgagaggcacgagcacgatctgacacgaaaaaatataggcttaggcatgacaaaatgttgagaattagcatgacacgacacgacacgaaaaatatgaacttaggcacgacacaatatgataaatccaaaagcatgaatagattagctcgaaaatacgatacattaaaagcctgataacttgataatatttatttatcaattaaaatgatagtgatatttaaattctaataatgataattattttttatatgattgtatgcaactattatcaaaaaaaagatacaaaagtcattaataaaattataaaatgcacataaagtttagtatttagcccatcaattgtaataaaaaagtaaaaatataaacacgacatcgacatgaatctaagcacgatatgaaactatcgatcttatgagtcgtcccgagcataccctaaaaaattattgcacgtcatgatacgacccgtatttttatatggcacgatacaacatgacctgtattttaaaatgtctaaaaaatatggatcgaactagtatgatacactatcatattaaaataatttaatttaaaactatccaatatggaaaggaaaattttataaataatgctttaaactttacccaatataaaaaattagcttcccaataattttataccaatatatactttttattttccctccctattctaccccttttaattaaaaaatcaaaactctctctctccctccattctctctctctctctctctctctctctctctctgtttgctcggcgccattaccgaaagcttcgctcccttcaaccttagtagcgacgaaaccccaaaagccctaagaacccaaatgaaacccagaggcccgatacccaaacttccatagcactcgagcgtcgaaaaaactcagaggccttgaaccttcatctgtgagctttgtccataccaagaaggtgacctcgtctctgagctcgactagaagcccaccagattttgccttcgtcttcgtcctcgttttttttttttttttttt

SEQ ID NO: 808 - DNA, 1780 bp, Cannabis sativa
aaggtaattggccaaatatgccatgtgagaagtaggaataatagcaaattttaatagacaaatatacccaaaaaaaatcatttaatttgaaatatggtctctgaaaattccatgaacattcattcaggtaaactgttattacaagtaaatgacagattcacaacaattttcatctctataaatgtgtataagctaacacacacagaatattacacaaacaacaatgaaaggatataaagttaaaaaaaaagaggacatgaaagaactttgtatggttggagctacaaaaattttctgatagactgaactgaactcgtcctagtaattacatggctaactaaatatagttgaaaagaacagacagaccaaccctgcaacattcccaaccgtaaaaatgactagactgaagcccctgcatatgcaactaccgaaccattctttatgtatcggtgtttacacggttgagattcttccgaatttcgagtcttgaaataatgatttgcaacaggtcaaaatcagtggtggatatttcttcaatgctgaatattcctacatacattcaagttagaaaatagaacaccctccaaccatcatctaacctaatgtgatcaaataacagaatataacagataatagtgcaacaaaagaactcgtagtttatgttaagaggcttcaatctatggttaaacttattctcaagtcttcaaatccaatgcaatgaatcatatttcataattgtaatttggttcctcttgttttaactatagtattttcttttgtcatttttgaataaactgatgagagctatgtaatcaaaattattgcattccagatatctgctagcatgtgtatgaatgcctaaaattatacttataagggctgctctaaaagaccagaatgcagatttagaatgcacaaggccagggcgaacagaacatgttgactaataggaaatcaaatcctatatagtcaccctcgtaccgagatactactggatctgaactaactataaggttgggggagttaaatgtgtgaaatcaataagaatatggttcgcaaataaatgtgcaaataaagtaacatgtaaaatttgatttcttactgcaaagaaaaatgccgttcatggcatgcttgtgtcaaccggataacttccaagcacccgcatgaatgtagcaaactcctgctaggggtatgaatagctcatgttagcataaggtaaagaaaaatacttgtatagatttgtagaggtataaagaaaacacacatgtaaatgcctaagcgcattctgtgcattttggtcagccatagatgcttcaaaatccacgtagaaaagatagtcaaagtatctgaaaaagaagacaaatacaaaatcagagaaaaataattgtgctttggtaaatataacacaaacagtcaaggagccagtcaaactgttgaaggggtcaattaataacgtggcaatataagcaagcatgttacttcacgaattttactttggaccattgctgttatcatcagctgctcgaaaggcttcttttcgcaagggacgactctcaatctggttaaggaagcaagatacagccgttattattgccatcatccaaggccaacacatagcatctagaagagagattttttcgtatataccttagtaaggttaatttgacgtagagcaaaaacagcaagagccttgaaaagaactccagggccttcttcaagtgagaaaactatacttgtctggcaatgagtaaatccatttaatataacataaaaatttgtg

SEQ ID NO: 809 - DNA, 8232 bp, Cannabis sativa
  modified_base (311)..(312): a, c, t, g, unknown or other
tgttactttatttaattattttaaaacttaatctttcttctttgtccctttctcttctcacacgttagcaaatttagcattatggtttttttgttagaaagcattctgactttgatagttatcattagaaatgaaaaatgagttaaagaaaactgaaaatttaaaaaaaaaaaaaaaaagaaagttagagagattgttataattattaaatttgagaaatgctaaagggcaccagtggtgcctagcaccctcatatgtgttaatattgctattggtccaactaagtatcgggtctcatatagtttaatatnntagcttttagggagtatcgctagccaatcgcagcgcgacatgtccagaaggtgctaggcaccactggtgcctaatagcaatgctcattaaatttagatgaattcaaataatctgcaaaatcaataatttaggggtatttattgaattacattcaataaatttagacctaaccgaatctaatcaaaattagttttaaccattggatatattaactggttttctatttaatttgattgaattcatccaatcttttttagccatcattaaggtgaatttcattataaaaaaatataacacgtaatttaaagcctcattctcatagtaataaaatacaagccaacatatacaacaattattagttaatttagtccaacttaatttgtatgataccataattaaaatataacagcacaacacaaatccaatccaacttaataagcataagtcttaattcttaatagacaagttcaatacatcaaataaaaatatcatataaaattataaattataaaatatatcactcttaagtttattcttttaggaaaatgatatgcgatattttagatttatggttttttttttatgtgtaatctcatgtgtgcaggtgtatattaaataaaattaattaatatgtttttaaaaataattaaatatattttaaaaatatataaatataattggataacaattgaatcagttgggttggattgtccattggaccgaatgtcccatctaataactgattcgatctatatagattttcaaaatttgtatttaatctatctagttatgattggatatctaattttattagataggttgtaattagatcaatcggttgtaattagattgaatgacttttttgcacattcttaattaatatagtgggtgggaattactagaaatatcatcatgatattatattattttagatatagaaaggaaataaaatatataaaatttgaaaacattaagatttgtatgttacaaatgtaatataattttttttaacaaacttgtaatgtagtatagttttttttttttaaaaaaaaagtaatgtagtataattaaaaagtattaatataggtttataattttttagtttttttttttttttattttatttttgttgacattgagagaaggtttataatttttttggttgacattgctctaaaaaatgttgaacttaggacctcttgttgggagagtataatatatatctaaaaaaaatttgtcttctcaatattactatttttaaataatattctctgaaatttttcacttattaaaaattctcttaaattattcttagttatgttctttttttctatttcaatcttacttgattaacaaaaattgagttgacactgtaaatgttaatgtgacattatcacgtcaatatcacgtgtataaataaaataaaatattatttttaaattaaataatttaaaaattattaaattcaataattaaaaataacaatcaataaaaaattttaattaaattatagaacgttacataacatgccactttagcaccaacaaatactgtataagaaatttgttaagtatgtaaaactaaaatgaccaaataataattcaacaacaataaaaaaatattttcatctaaatgaaaatagaataattgtttcatgaatttcgaataaatttatagaataagagctctggttaatctaaaattatataaaaaaaaatatgtttggattttttttttaatgatttgagagtggtaataatagtttattctataaaatattaatgtaatgaaaatgataaacaaatttaaaataaaaatatatatactacctaaccatcattttcaattttttaatttgaggggttacagacaatcattaaccttcctataatctgaatgatgttttttttttttttttttctttttttgaaaatcttaataatgtttttttttttttgaagatcttaataatgtttctttatagtaacatatctgcaaattctttttgtttttattttatttaatttgtgtaatggagatagaaaaatgaaaactgttggtcccaaatccaatcaatggcaacccccctccctacttctataaagttataactactcttctcttctcttccccgcctcatcttcttctccaacgctctaaagtcaccatttttatttgtttatctatttattcttgtctttttaatggagagattaccggttgagcttcatctcaagattttctgtttcttggaccatcagaatcttgccactgctcatcaaggtcattaattttcttctttttatttgatattgttgttctttaatatggatctgaattgggttttgtaatttgatgtaaattatgccaatctcgttgactctaaattttgggttttttttttctaatgaaaaagaaaggaaatgaaattatttgctttgcaattctgattttggatggaattgtcggtttgattctactttggcgtcaatatattagtaaattttcattgttatttgtatatgttaattgggatcaaattaatagagggtaagaattagcatatgtatttgtctaattttgaccaatttatgttaagattacacgaactaatatatccatagatttaaagtcataacaagtttgttgaaatggaaatttgttgttaaccaaagtatgcaggaaatggaaggtgttagcctcagacaactatgtttggtcaagcttattcaaggagagatggggaggagatcgtgctgcatcttttgttcttggggattcaagatcatggaaaaagaagtatgaggtcgaagaccgtcttgaccgcgttggaatgtaagttggaatctttctttgtccctatttcctttgttttacaatgacatcaacttggatataggtaggcatagttttgagggaaattgtgttgttagcattgttgttgtgttgaatcttgtttagatgattgttccaatatccgattagaaggctaagttcgggtatctaaatcatgtttgaaactaggatccccgcctaactttacaatatttggagacgaagaaactatagcgattgctatttatgtaggtaccgaggagggactcaaaactcaaacttgtgggagcaaaccacatgcctgaccatttgagctactcctcttgggtgttatagtgtcaaattcatgtttagcaaaatttcttttcatgaacactaatagtatagatatagctcttctgtgtggtgaaagattttggccgtttgagcttttgtctctcttttgggtgtgattttgcaaatgatgtattttaatttgtattttaatcttggtagtgatacttagaaatacaatagttataactctcatccgatcaagatcggatggaggtattatgcttagagtgcttgttatgaacactaatagtatgctaagatctataacaagattcatatatagcttctgtatggtgaatttttttggtctttttagctttttatggatgggaattttttcaaatgctgtgtttgaacttagtatgccaagtaattaaatgctaatcttgttagtaatactcagaagtatcattgttaataacaaagaagacaatgtttgatgggatgaaagtattatattttactaggagggtgaagataatcagagaaggcgaggattattatcttgttcgccaaggcgagatccaacgctatttgggttcaagaaagtcttcgagtttgaaaagaagatcgagtgcaaacagtgacctgagcgaattacaatcctgccgtgggattttggacaaaattctattctttattggggacctagaagttgcttcaactgacaacaaacgtggccgagcgatttgaaatagtcttgatggctgtaaaagccacaaaggttcagtacgttttactgtaaacttgctctgtaatttattgatgcattcaactatgtattatgatttattgtaacccatgaaaactgattggtatagtatgtcattgtagtatgtatgagtatatatatttcaaaagtaataaagaaattcatttacattgttcattctcttcaaccattttagatttgaaacttgagagattttataaacagcaaactacatggagcaaataaacccaagaaaaatgctcaaccctacaaggacagacacaacagactgatcgaaataggactagacagatcatgctctatagatagttgcacaacaaagtagaagacatttaatagatctgacacagaacgccaacttcaatgggtgttgtccatatagttgagaggtaataaagagattttaaaatggacaccgttccccctttatatttgtaattaaaaaaattgtgatagctaatacaataaaaatggggtcaagtaggacaaattgggcaactattttagttgttcccattggagatgccctaaggctaactccaatgcagtttggattgttgtgacccatcagatggtgtcagaaggtaagctacgggtagactgtagttatgcattggagaactttaaatgtcatgagcaattatagtatctgtctttttttttttagaaaaataataaaagttaaaaactaacataaatattatattttaatgtatttttagagttgtttgcattggagtattttttttgtaaagagtgacaaaaaatgatctagatgatagaaaaaataaaatattattttttagagtgatgtaaagttttataataactttgagcattgcttacattggagatgctttaaagtatctgcagtgggcattggtgtcctttaatatttttaaataaaaaaataaaatataattagttaaatgtatgaattggaattaataggacaactatttttgttgagctcattggaaatacccgttagagtgatgatgttccaaaccgtctcgacacaaacaactatcatggtgcaaactaaactaaatggcaaaccccacaaaaacggccaaagccaatggacagtgtgacaaagcacttatcccaacaacaacaacaaaaaaatggagacaaccaaaacacaacacaactaaggatcgtaaaaggccaactaaagcaacacatccgaagcctaatccatcaccaccaaaatttgcctccacaaagccacacgcaccacccgagccaccacaatagaaccccatcaccaacaacaaagtggctcttcttccctggcaacccttctacctgatagaaccaaccaacagaaccttttcgagccccaagtccaaaccgtttcctgaccagtgaagcaagagaacaaaaccaacactctctcggccaaggcaaaggctagcagcagctgccccaaccgagagaagagacttatgtttttcaataacaattcctttttacttacttttgttttacaataaaaactagcaacactaattaaaccttaaaactacattttgccttcaatttgtaacaaggtttcaaaagatttaggagccatttatcatgtaaagaaaattaaaaatgaaaagctaatccaaaaatgctttaggtttagaatatcaccattggtgtagttttcacttacatcatatctgattaagaataaatgatattgtagaaaaagaataatatcggcattggcatacatgggtagaaatttcaattttctttctcaacagtaaatcctgaaaattgcaaattactgcactacaccactaattcacagccaaaaattaaaacaattacaaaatacttcttcttcctaactcatacttccattttccttttcgttgggcagaccactattttcttataactcctttttgtcttcttcactatcaaattgaatatacctttcaactaacaccaactgcaattcacagtataacatttttgaattgaattaggtagatggctagcggccgttaccgccattacgccatcgtcttgaaaatgaatccggtggtctgtcttttctaatctctcaattagatgtttaatggatctgattcggtgtccctttccttcattgcttcccaatcttcagtttctgtaatcagatattgtgaaaaaccataagcaccacaacagaaaaataccattccaagtaagaaagaccgaattttgaacttacttggcttttcggcgatcaagaagagcctcctctgcaagaagcatgctactaaaaggaaaatcgagcacataccgaacataaatgtgattgggaatgcactcaccttcagttgccaaaaacaaaaatagaattagtcacagtgagtttttttcaagcaagagatttatgtaaagagtattatgatgtaacatacgttgtatagtacaatgcagacgaagatattgagagggattctgaagaagttcatgatggtgcttctagcctcctcgggaatgtattgggacctcatcttcataatagatggccagaaaattccacagcaagcttcgaaggtagtgaagccaagaagcaggatgcatcctccaaatgagatgcctcctcctctctccgtggaaggaggtacaaagaactgttctatcaaataaccgatatttgagaataccataagacaaaaagagagtgaagaagggattgaaagtcttggaacggtgacttacactgatcaaaatggggagcataagtgatgctgaagcaacggcaaaaacaatctgcatgtagctctcgaccctgagagattggcgagccatcaacctagaagcaagggagcttcccaacatggaagccaacatgaatgttgcaaagatgaatccgtgaggaatgtcctcatcgttcgggcttagagcgggagtccagagaaacacaaatgtatacattgaaccctcaaacagagactgaattgccccgagcaatgcaattttttcatctgaatcacagagaagtaactaaatgagaaggaaaattcatcaaagtagaagacactggaaagagaatagtttctatcactcgtttcagattggttttgctttcaattttatgtgaaaaaactaaacaaggaaaggcttaaagtctaccagaagcaatggccacagcagcacccctgaattgggtaagcaagtccttgctctcagaaggatccccatagttctctgaccaagaagataatataaccgccataccgatagcaagaaagcacgaagcagcatcaaacggtgcaacaggtccaagagataatgagtcaacaagtagattcccaagcaaaccagccacaatagcaacaaggccattgccaagaaatattgcctttgagaatgttattgacaaccattgttgttcaaatcctctctgcagataatgtaggagaacagtgagcaaagtacaaaaggtttataaatcagatgcaaaagagaatggaagagaaaagcaacacgatccccacagatgaaactacaaacaaactagtaatcaattcctctttttacacctacattttgcaaatttggacagttatgcaagcacttaaatcagtttattaacacaggatcaatctacaatattaccaatctaacaataaacacaccaatgtgtcaacctgaaaagataaaaaccacataaaattgtaacaaaacaaatttgcacatcaaacgggtagtaatcctacaaattaataaacatgaaatgcaacaggcccttcaaagtgacaaagtaaacttcgttgttcttgatccattccatcacaaacaatcaatgtaaacattcaacgtgattacaaccacaaaataaaatacatagacaggacaaatgccccttaccttgttgtgttctgcaacgagccaggactcaaatgaggaaaacagcagagaagtggcaatacctcccaaaacacggccaaccatcaaaactctgtactgaggagaatgcttggtaatacagctcagtatgtaagtaatacagtaagtcacac

SEQ ID NO: 810 - DNA, 1284 bp, Cannabis sativa
acacacacacacacacagagttatactcatcatcaaatcctgagagaatatcttggataatagaatacatggcaagagatctttatatacaacagtaaccatgagaaagaccattgataatttacttactatcaaaatccccaacaagaagaaaatatacatgcaaactatgaacattcttgcgacaatcaacagtctttgatgctgctgccaaagcctgcaagttacagatcatgttaaatgtgtgttctatcacttgtaagatttgtgtttgaagaaatatctcagggttaatgaaatacatagtatagaagactagttacaatatggaaagaagtgtttgaacaaatatgatggggaagaatagaaaaaaaaaatatttcaagctaattacaaaagagaattgaaaaaactaaacaaaggcaaaataatacgaaaaagtttgtaaaagaaaaaacatatatgttctagagtagagcacaatctagtagtgtacttttcctcctcacattatttctgaatttaaaaaattatgtttcttatcaggagaaagaaagaacaaaaaaactggaaaacataacaaatattatatcgagttgaacaagcacaatgaaatctgcacagtacatcaagaggttttccaaaaggaattgtgaacaactaatagttggatattaggaggatttcaacaatcaattttccataaggtcttgaggcttattcacagaaattctcattcataaccaagtaccatgtaatcagttgcgccttaatattagtctaaccagtaaaattgactaggattatagaagctgagttgtcaaactcttaatggctgagatggaatgtctttaagtgagctatggtaatagtcaagagggttagttaaagaaacagttagaggtgagttagtataaatagaggggctgattaattgtaaggaataagaattaaattgtattgtttagagtaaaatttactcagggagatatccaagtgtctctaaaagcttggaaaatttgtaatcctttctttgatatcaaaaaattcctattctcaaattctttcaagaactgaattggatcaatagtgtatcataatcacactgatcattatgttcacaccctcctttttcaccaaatgagactatcaagcatcttaggaaagtagccaaacagtttattcaaccatcatgatatatcaatattcttgtactcaattttcaccacacagtaataaactgttgcatatgtataaaatgaaagcaaaagagagagagagaga

SEQ ID NO: 811 - DNA, 1753 bp, Cannabis sativa
aaaaaaaaataaaggttctagagtaatactttcatgtctttgctgaagagctctcaaacgctcaagcaagtgagaaccaacatcactacaatgagcttgccgcttctccttatcaagaactttaagcacggcaagtcctccagcggaacaaactgggttccccccaaatgtgttgaactgaattttctgtgatagtacacttgctatctctgctgttgtcaccacagcacccaaaggtaaaccatttcctatccccttaagagcaaaacaaaaatagaaaaagcaacatagaaatataatgaaattaccaaacaaaaactacatgaaatttaaaacactttgctgacattgtaatgcatttcttaagtaaaagttgcaatgtaaacaatgatgaacctttgattataaactgatgagaaaaaatcgcatggttcataaataaaataccttagccatggtaactatatcaggaatgacaccctgtgtctcaaaaccccaatagtggcttcccgtacgaccaaacccagtttgtacttcatcagcaatgcaaacaccaccagcctttcgcactatgtcatacactaatttcaaatatccaggggccaattcaactgcacctccaactccctatagtcataagtgagtgaagataagataaatcagaaatattggtgactcagcacatacatggatcaactgtaagtgtagtgaacttcaataccgacctgaatcgtttcagctataaatccagcaacatttcctgaactaccataatctaagtgatcttgaacatcttttgcataaagtttggcatcagagccaaaaactcctcgatatggatctggattcacaacatgatgaatttcaccctgcacattgtcaaaatgaatttcacatgagtaattttactatgtccagatgttaattttgcttaaatgtaagtaattacacaaatgagtgtacttgtgagaatttttagttagcatcaaattacgtcaataccataaataaataagtaaaattaagtgtttatagtcattaaagaagtttgaaaacaattgggtctcaaaacatgtcagaaaaaatggataaaacacacttcttggcagtgtgtttggcgatatatcaccttgcacgaggcaacatgctccaagaccaatagttgccaccatctgtcaatcgcaacatgttgcttggtatcaggcggcatgccacctcacggtgaaaggttgcacttctacactttatgggggcaaccaacaagaaatgataaacttgtttcaatgctcaattattatgaatgtttttccttaaaaaaaaaattattatgaatgttttggggagttcattggaactgatcatccttggatgcgctctaacaaagcactcactaaaagatcaatctattatcatttatttccttcaatgaaattgccttcttgaaagaaatcaaagacttgataaatccatattctatttcctttcataagccacactaaagtgacacaagtgtgatggacaacataaaattttgacaaagtttctcaaacgtgttcaactctattttgttcttataattgtgttctatgtttcttccattagtgtggtcatactgccacactaacaatggatgcatatcagataagaaaggaatcgtgaccagaaagagagtaaattgctgcactaaatgtcacaggtagattcatatcatttataagggtaagtgtaatagggtattggtattttatatata

SEQ ID NO: 812 - DNA, 4913 bp, Cannabis sativa
agggcttggggtggtagtgaaaactgtacataatgaactttgatttgatgatacagaaataattacatgcttcttcttgtggctacatcttcttcaaagtaaactcccccacacttaaaaaactattttggattgttgggttattgctcaaacctctttctataggccccccaaattatgtgtcgagcataataacattgctgctcgctatatatataaatatataaatatgaaaaaaataattcaattatttaaatttaccctaatacacaaacacttggcttcttttttccacttttctctttatggttggcttgctcttgtttttgctcatacccttatcattgtatactctgtaccatctcatttggcatgaaattagtttggttgtagacccacccgacaggcgtgatccattccggttctaatcattgcttgattgaacgtaattcccagttaccctcaccgtcgataagccgcaattccacagagtggaatggtattaaagcgggacgctgaaatgcaaattaagtaagacaatatatattcatgaaaatgctttaactcaacagaaccttcaacatacataaatcaaacaacatattcatataaagtacatacttgtgaggatgtaactactgtaatacccatctcctttgcaagtctataaagatgttcttcaacgtctacactcgtggcgctgccatttgaaaaaatacgaataaaattagaacaccgagaagaaagaaaaaaaaaagcctttggatttgaacattttctttcaaggtaaggacaactgtaaaagtttggggaactctcactcactttgtacactcgtcgaggattccaaatttaggcttgtggaaaaataagcgggccttgtagaaacaagaaagaaagaaagaaatgtcagaaaagaaaatgaaaaggaagaaaatggacaacaagggttatggtaaaggtgtactaaaacaaaaattaactcaccattcctaatctctgttgttctccaagagaaagaatatcctcccaattcaagttagcatcccaaccacttccctccctttccaaaagataattcaatctaacattttctagaatagttttcaattgcatgtccagaatgtttttggtgtcggtagactctttacctgaattaggaaaatcaaatcaaagttacattaaggatggcacacttcaagtttcagtttctagaataaaattttcatgaaatcacctttcccatagagctgcaatgccctcaattctgcttccctctgtgagagaggatatattatttgatccctaagcgttcccaagcaagtgtacggtcgctgaggaacatagaacacaccacaacctgacccgacctcttcagtgacatgttgggatggttgagtgagccttccactcatgatgggccaaagacctctaagagctctgaaaacagaactttttccactcccgtttggaccttgaacgatcacatacttttgtcaggtgttaattcttattagtaaaaaaaatatcaataataataataataataataataataataaagatactacaaacaaaccagtaacaagcaggctttttccaggtgatatgtcacatgtcaatttccgagccaacaatttctgcccaggggtaacaatgtcaacttcagagaagctaatggcatcctcagagtaaagatgtctcctttcagctgatgatccagcattggcattaggatctcctgtaagagcattaaatcattattatacacgaatacttttatcaataaattaaaggctgaactgaagtgtatataataaatggattatcagcacttcggtaaagatatcaagagaatcctctttctgtgaagaatgccacacaacatgtacaatgaaatacaacgtgtagatgcatagttgcagtaaatcattatagtttgaagaacagttcaagacttaccggactgtgcagcatctagaagctcttcaagttcaaaaattcgattgaccccaccagaaagttcaacaaacttccgatgcaattcgagaatgtcaccaaaagctaaaaagctctgtgatacaacagaggccaagaatcgcaatgcatgagccagttcacctgaaaaataatccatcatgtgagtacgacaaaggggaaagaaaacaatttgaaagaagcgagttgactcctaggcctaccggtttgagaattaaaatttaaaaaggctttctcttcaatttcaattgaattaaaaagaataccaatccgaactcaaatgtgaattcgtttctgttaaaatgttattactataagtgcccctacatcttaccttgagtggatattaaggctctgtctcctttgtgttccatggcatatagcaagctcaatccccaagtcacattgtgtggaagttgctttgttatgaaatcatccaatataccgaacatccacttcttcttcaaaagtgtcaaggaatgatcaagaagctctctgaatttgtattcaaccatctgtttgatataaaagcatccaaatcatcatttggagtgataaaccatcaataaatatagagtccataagcctttagaacgtagagttaatgacacaaaacatgaatgcatgcaagtacaaagctaacagcaaattgtcttaaaaaatcaagaggaaaaactcatggccaagaaaaccatgcagtaagagaggaccccatactactaaaaaaacatataaagcaatgaaataaatggtcaaggaactaagaatactgtaacaaaaaggtaaggtaatccagatgacataaatgtaaataaccttactaaaaaacattccccttgtatgaattataaagaatattgatttctttcttctttcgtcaaaatgctgccccattgtttatattcccaagtataaagacaatagggaaacacataaatgtcccaaaaaaaaaaaaataaacaaacaaagacatgggttgcagggcttacagctttttctcgagcaccacctccaaagaaagctactgattcagcatgtgtgcgtaatctttcatgcatgaacctaatatatgcaaggtgtcacaatgaaattagtcttatttgcagggcagttcaacaaaagcagaataaaaagcagaaactaattttagttcttacctgaaggttccttcaagctgttgttcttgactagccaagtcaccgaactcgggggtaacagctctaagaaaacctagccccagtaacatgtatgcatacaatataccaactcccctctgacctgttaaaagcttcattctccaggtgaaccttataaaacaaaggatattattatcagcaagataacctaatagtacataaaaacctcaaatacagtccctacaatttgtttttactaattaaataaaatactcaccaaagaatgtccacagttggcttcaccattccagtaaccaatcctgacaaatcagttgttaacttttccaggtcatgagttaatctctgatcagcatcaatatttttactagacatgttgaagacctacaaaaacagcagcatgagttatctgacaagcaaaaaagaaaaagacaagagaagagaaaatcaacaaagaaaaggagacttgaataaacatatctgatctcagtaccttgtagaaggcattctttctcagataatttgtcagtaagtgtttagtcaatcgaattctccatcccaaagcaagtctcgctgtcaagtgcctgcaaaaatattaatgtcatgtttacttccacatctgcacctctttaaacccatgatattctgtaagccacaacaaaccccacgacttccaaagttccaaaccacagagtaatatacaagaatttagctcacattttcacctgcagcattatacgtatatatatatatatgttctcctctactctttccttatttttcttagaggttgtatctatctaaattatagtaaacatgaaatgccttaatattcagtgatccaacatgcaaaagcttgcatcttaaaacagattatcccaccccaaagtcttctctattgaccacgttgtagttgtttaccagtttagaaacaaaaaaaaatcccaacaaatatccattccattaatggtaaccaaaaacgtggtatacctcaaagaaggtgcaatgaatgaagatgctgcactctgaagcacactaacaccaattaaacgaacaaaggctgccttatcctgctccagaacgtatttcacagtcgttcctgtataaattaatacacttcaataacagccttgtcctccattttaaaagaattgataaggagaaaataaataccatttaatgaggcaatacgatcagaaatcaatgttcttgatacaacaagcaaagcaactgcaagtaattgtgctccttgtttatcaaacactgtgggaatctgaaaagacacaggtaaaaggttattaaactcagttccaagtatatatactgtgaatggaagaatagaagaaatgtcttgttccaagaatggaatatcctcatcctccaaagcaactcagaacttaaaaacacccattaaaaagcagtatggctatgatgacaaagtagactagaatgtaggcacacaaatcatcagatttttaaaaccaacactagacataaaacatagatgaaggcaccatgcaaactgtggaacaataaatgagaagaatcgatcactagtgtatcagtaatcaaaattaaaatctcaccagtactctgaacatggcaaatactctcaatggcagcatccttggtgctccacggagttgtggaaaaactggcaaagaaacagcatgatccgcagagggagaagcagctatgacctcagcaatgtaagattgttgctttgaatttgagaatgcagaatcctaaacaaattatact

SEQ ID NO: 813 - DNA, 1705 bp, Cannabis sativa
tttaattttgcaaccaaactgcctttcaacataagagttgaactgtaaaaagatattaggggtttcagatttcaatttcaggggaaaaacccaagtgtatctcgtgaactcatcaagaaaatggacataatacctatatccttctgtggatgtctcatgggaggggccccagagatcagtatgaacaatgtcaaatggtgctttggccatattatcagatgaatgaaaggtaaattgatgcaatttaccaagttgacatgcatgacagaaatcaacactagaattaggaatatgaaacttttgcagaactttgttcaacacatgtttattagggtggccaagtcttttgtgccaaagatttacaatggaaaaatctttattacaagaattggaaactggactagtgtctgtaggtggtgtcaaggacacttgagcagatgtgggatgcttggttctgcaagaaggatttggaccagatgactgatgagattgtagatgatacaaaccatctttaagagtgccctgaagaagatgcttcttcgaatccttgtccttaacaaaacaaagatcaggggtgaattctatggtcacattgttgtctttagtaaattgggagatactaatgagaatttttgagattgcaggcacatgtaaaatatttttgaggtaaagaatacgatcagcagcaaaagaactgttaccaatattagaaatcgagagtttagaaccaaatacctactaccattttctccttgcctttgtaggatgtcctctgcatcagattatgggcatctggtgtaacatgattggaagtcccactgtcgagataccaaccatcatcaggaggattggaagaaaagacaatgttggcttgtggagtagattcatttgagttaggaggattgtcttcaatgcctgtaaaattgacatcaaaccttctatagcagcgttgaactgtgtgccctgatctcccacataattgacagatgattctggaattgttggaatttccacggcctctggaagaaccatttcccctgcccctgccacgattgttgttatttgaggattgtgaggttggaggtctgccattattggtgtatccggaggattgatgtttcttggtttgagcaaaatttgcctgaggagaatgaagctctaacagggcagtggattgtgtgagttcaaggtgcatttcatgattttgaagcatgaattgaacttcttgaagggtaagtttgtctttggatgtcagatttacaacaacagattcatattcactcccaactccagcaagaacataaagaattaattgttcttcagagactgaatttccagcagcacgaaggccatctgcatagcttttcattttcagcatatactcatcgatcgactgagagccttttttcgtgttctgaagcaaggacatcaggtgtatcattcgagccttggatcgagtattgaacagttgctccaaggtttcccagatggcagcagcagattcacaatacacaacatgaccaatcataggttcagagatcgatgacattaaccaggataaaagaaactgatcaagacgcatccattgatgaaagtcaggattacgtaccatgtttgaagatccaggtgactctggtacgaattgatctggtctgggaagacgacgcagtagtatttcttcaagatcgtgagctcttatggcggg

SEQ ID NO: 814 - DNA, 2124 bp, Cannabis sativa
cggcggcggcgttggcggttgtagtcgggttaagcgtgaaagagatctcagcagcgaagagattgaggttgagaaagttaattcttctagaattattagtgatgaagatgaagatgggcctaatgcgagaaagaaacttcgcctcaccaaagaacaatctgctctcttagaagaaagcttcaaacaacacagcactctcaatcctgtaattattatatattcccttctctcttatatatatatatatttcaattagtaataactaaaatgtattgtttgtgtttttttatataaatatacagaggcaaaaacaagctttggccagacagttaaatctgaggcctagacaagttgaagtatggtttcaaaataggcgtgcaaggtaaataaataaattatttatatatatatatatttatcaataccgttatatttatcagagatctatatatttatcattaaacgacaacgttttgttttgttttgtttttaataatattgcaggacaaagctgaagcaaactgaagtagattgtgagttcttgaagaagtgttgtgagacactgactgacgagaacagaaggctgcaaaaggagctacaagaactcaaggctctcaaactcactcatcaacctctgtacatgcatatgccggcggctactctcaccatgtgtccttcatgcgaaagaatcggcgccggtgtcggcgccggcgacggagcttccaagagccccttttccatggcttcgaagccccacttctataatcccttcaccaatccttccgctgcttgctagggttaattaatattaatgcaaacttatttagtagtattatcatataattaggatactaaaaaatatatatatatataaaaaagaaaaaaaaaaacaattaaaaaggcttcctaaaattccttgacccctatatatttttttgatgaagggcttgtagcgatcaagtaagagtagtcgtgtaattataattgtagaaatgaaggatagtataattactgatcaatttttacttcttttaatttttcttcttcttttcttcttttaaatatatatatatgtttgtaaagatatcgaatatattttaatgaatggattattgttatttatttttggatatcaaattttgtgttattctcttcttttttcttcccttggaattgtatttatttatatctgtggatggaattgaagataatgtgataataaaattattatatttttaaggtttaatttatgttgataatggttcagaaaaatatttgtactacagaaaatgataatttatagttgcctcgtgcatgacttaatattagttggcccaaagtggagaaaggccagtatattgccatgtatatatgaactaataaaaagaaaaactttaatagtgtttctacgtcatgtaattagtattagttaattatttgggacaaaatttcgaactcgaccaaacaaaatctgtgcttaatttgttggttaaagtcgtggacttaattatattatatatataaaaatgaaattgtcagcctccacaatcatcccattcataaacctcctcagaattaattaaataattattttattaaggaaaaaaaaatatctgagtcatgctaataatgtatatgagtcacaccgcattgctggttttattagtgtcttagaaaagaaggaaagagtggataaagatatataataaagaaagaaaagatgttgaggtgatgaataatgagatttaatcacctactatatatataatgtataataatttaataattaaatgaaggtatgtacgtatatgataatgttgaatgaagaagtagggttgtgggacgttagctcacgtgtatgtgtctataattcggttgctttagagagagagagagagataaatgggtggtgagaaggcgtgtggagaaagaaaggaatggatgattcagttgaaaaacaaaagagaaatggggcatggacttggttgtggtcacgtgacaggccatggctttaagggaaccagtgggtcataaccccacgtgatgtaccattggtcctcctttttccctcacaaaatctcattatgggatttcccatgaaagtcagactacttcctttctatt

SEQ ID NO: 815 - DNA, 4895 bp, Cannabis sativa
ttaaaagaacatttacctttgaatttgatcaacacagtgaaaagggtattcaaagaacagagctttaggagccgttaatcatggtttgttgcagccacggagagttgggaattcatcggagtatataatgagagaaggcttatctatctgttgtggagttttcttatttctaaacaaaaactataaaattataaattatttttaagggctttatattaaggttatttgtcttatcgctccctttactatttcatttgtttctatttaatctttaaaaataaaactttagcacgtgaattaattttacccaagaatattttatcattaatttgaaagtttataaaataatgtaggttaacgctgaaaagtgatcaacaccagctcgctagattgacgagatgaattataaatttaaaaatgtaatatagagagatagacacacaaaatttataatagttcaatccccaagtcgcgatagtaatgaagatacgtttaatttgtatctcacgagaattacaaaaaattggttaagtgtgaggcttgaatttttagagatagaaagtagagagagatgctctgactttatggagacttagaaaaatgtaaaagaaaaataagctagaggagctttcatttggaaaatgtcctattaaaatagtaataaaaaaagtacaaaaaaaatatgaaaaaaattactttgggctaatcttggtcattgatgatgatctaatattaaaagttgactcttgatgaaaatcgtcaactttcagagcttgaatctcgttcgtgggatcatttttgggtaatttatgaaaaaaattgcaactatgttgagaatgaattttagacttgaaatcttcataattgcaatatgggtgtgagaaatgacttgatatatctttgaaataacttcaaaaatttatgcttgatgagcgtaaacacgtgaactaggttgcatgtcaacctggatgttggggctctgttctggctccctggagatcttgtttgctccacgacatcacttgtatcttatttctaatgatgaaaaaaatgccttgaccacttttataaaaaaaatgactgaaaatagcctaggttgacaaaacgtcaacttgggcctagtgtcagccgtcaggtatcaacctgggcactaggtccaattttttgctagtagatgactctgtttgattcccaaaaatacttgtatcttaatctttggtgaaaatagagaatatgtctagaagacttcttagaaaaactctttggaaatggcctaggttgaaaaaatgtcaacttgggtgctgcgctcaacaccaagtcaacctaggtgctgggtcctagttctgacccccagacgactccatttgtttcctgaaagcactcatatcttaattgttgatgaaaacggaggatatgctcggaagacttcttctgaattgctgatggaaatggcccaggctgacaaagtgtcaacttgggtgttaatccttgttttggccttcaggttaatcagtttcgttcccgaaagtacttgtttcctcgttctagatgaagacgaagaaaatgtttgggatacatcttcaatattatagttggaagcgttccaggttgacaatatgttagcatggacgttgggtgtctagggcacttagtgcttcttcaagtgctcaaaaactgaaaatgttctaattttgattctgttacctcaaatatgtttgtgataggccttattcatgtcctaatacaaagtttgagccatttgtactaagacggacccagaaaccaaaaccctagttaaaatgtcaacttgggcattgggtgaaaacccaaggcgtccggctgacttcaggggttctgtttcgtgtatagaaaatgactcttgttttttcaaaaaaaaaaaaggtttaattgctaaagttaaaatattagggacttaattgaaataagtgatgtagtttagggaggcctaatatgaaccaataatactatacgactccttctttctccaatactcgtgttgttgtggcttaaaccctaaatctccactcaccaaaatccaatctaaaccctatccgccattgattcttatgcattatgcagctctcacgaggtaatgtttcgaagcttgtcctctccaaaatctgcaactctcttgttcgttcatctcaatcctcaattttgacaaccgaagcatcatcatcacctttcaatttatcgaaggagcttcgatggtttagctccagcattaatggcggcgatgaaagtgaagtgacgaatcaaagccaaagctcaggcgaaagggttccacagaactcgtgggagcccaaacccaacagacccatgcgagggagagctccgttcaatacccagagtcctaaacctcgtgggagaaattcagagaagagggaaaatcctttagaagacaacagttttcttgaaagattcaagcttggagctaatgatactgagtacgataaaagagaacagtctcggcaacaagaagttcccaaaccacctccaccggtgcctgaggatgcggatgagatatttaagaagatgaaggaaacgggtcttattccaaacgcggtagccatgcttgatgggctttgcaaagatggtcttgttcaggaagcaatgaaacttttcggtgtgatgagggagaaaggtactatacctgaagttgttatatatactgctgttgttgatgggttctgtaaggctcagaagcttgatgatgctattagaatttttaggaagatgcaaagcaatgggattgatccaaatgcctttagttactctgtattgattcagggtttgtataaatgtaaaagattagatgatggtgtagagttttgtatggagatgttggaagccgggcattcgccgaatgtcactacttttgtgggcttggttgatgggttgtgtgaggaaaagggtgttgaagaagctaacattgtcattacacagttaagacagaagggttttacagttaatgacaaagctgttagagaatttttggacaaaaaagctccattttcgcctttggtttgggaagctatcttcgggaagaaaccttcacagagattattttgaggtttatcctttttcacctgttctagtttaatctctttggtcatttttcctttttttggctttgtgtagataatggttttttcatggacactgtcatactattctgaattgtgaatcggattttggttggttaagtgctcttgtaatggaaaccatgttaagtggtttatgcttctgccttagtagattagaatgtggtggaccacaatgagtgccttggcttggctctctataagaataggaatataggatgataggattagctttaagttcagattaaacatcaacgaaacatggaatgtaacctattttgagaaatgaggaatggtccatagaatttctttcttgcttatccatgtcttatagtttgctgcttcaagtcatataaattataaactctcctttttgtgtgtgtgtttacttggatatttggtttatttgcagaccaagtcctctttggccttgaaaagaataattatgcttctacattaatcctgctactttggttggcaagacattaatgttctgtacagaagcattttcatcttaagtgtttttgcataaatagaacacagaatcagagaatcgagtttccttcatattgcttctaccgagttttctggtaactaaaaccaggtacatttctggatcccgataggaatatgatcagacatggatcactaacatgttttcactggaaaaggggcaatgcatatgttcattttcgagtactttgtgttatgtttccttccaaggtccctgcagaaagaaaaaagaaagaagttttttcatcttaatggtcaactgttttgaaataaaattctagattaagcctctcccatgactactcagaatttcttatcacttgactatatgtgtcctattgtatcactctaactaaaaataatgaaattaatgatactacactcaaaatatgtatcgaaatattacattaatcatatttatctttgtttcattttaccatggctgatatttggatgcacatatcattactcgaataataaacttacaaacatacgagtatagcttattatcaagataaggtggtgttcgtgttgtgtggtgtaatagtagagaagcttttattggcaacctttcttgcttgggttaagggttcgaatctaactacaactatcgttgtgaggaattatgctttggcctttgaaggcctatagcttgctatggtagtggtaaggaagtttttactggcaacctcccttgtttgagtaaatggttcgaatctaaccacagccctcgttgtgaggaattatgtttggcctttgaaggcctatagtttgctgtggtgggtcatcatgggatgggaaccctcataactggtggtaccgatgattcaattaaggtaagatgaagtataagactcctatagttagtacgtaattttcagaactgcaccacgtgattccctttttattatattatataaaaaaacgatatgatggtgttgagcaaatacaagtgccatatattaatgctcatgtcattttgaagattcggcaacaaaaacaatgtagctattcaatgcatattcgaggagggaaaatgtagttgtagttatcatgtgcacagatttgcttacgttcacacacatacacacacacacacaagattttgatttggatttggatagctcaaaaattctccatactttctttacgcattggtcacaaacacattgccaacccaagctcaagtcccttttgtcatatattgccgtttctctaagccaatgtttttttatattataaaatgtagggttaata

SEQ ID NO: 816 - DNA, 3473 bp, Cannabis sativa
atgaatctttatggttgtaataaatggacatgatatgatttacaaaatcttacgaaaatagatcgagttgggtgctggagaagagggctatagtgtagtccaagaaaactgtaaaaaatttaagctagatttctctgatttcccaaattgtattatggtccaaatccaagtataaaattactcatgtcatgttgtgtgctgttgctggttttgagattatatcgttatccttgggtatatcatatatagatagcaaaatgcaaaatataacttcttcattgatgtctgtaaaagcttcaatgtcttattctgtagcaaaaattgtgttgttgaggattgtttccaattttttgtaccttattggaaacacttgttcttatagtatctgatcatttaattgaagatttttggttgttttgggaggtttatgttatgaattttgttgggttttgaatgcaagtgtaccaacatatccttacctgtgtcttttcatcttgcaggttttcggaaacatagaagagaaaattggttttggcaaaggaatttccaagctctatgctactattgacttggagaaggctagggttggaaggaccaggcttttggagaacgaagaaactaatcctaggtggtacgagtcttttcacatttactgtgctcatacggcttcaaatgttatattcactgttaaggatgataatcctattggagcaactttaattggaagagcatatgtacctgttcaagagattttggatggggaagaagttgatagatgggttgaaatattggatgaagacaaaaaccccattcatggaggttctaagattcatgtcaagctccaatactttgatgttaccaaggaccccaactggggacgtggtattagaagtatcaaatttcctggagttccttatacttattacacacagagatcaggatgcaaagtttctctgtaccaggatgctcatgtcccagataattttgttcccaaaatccctcttgcttctggaaagaattatgagccccacagatgttgggaagacatctttgatgcaatcaccaatgctaagcatttgatctacatcactggctggtctgtttacactaattttgctctgataagagacacaaggaggccaaagcctggtggagacatcatcttgggagaactgctaaagaagaaggcaagtgaaggtgttagagttctaatgcttgtttgggatgatagaacctccattgatgtactgaaaaaggatggactgatggccacccacgatgaggaaactgaaaacttcttccagaatagtgatgtgcactgtgtattgtgcccccgtaatcctgatgatggtggaagtattatccaggactttcaagtttctgctatgttcactcatcaccagaagattgtggtggttgacagtgagttgcctggtgttggaggatcagagaagaggagaattgtaagttttgttggagggattgatttgtgtgatggacgatacgatacccccttccattcactgtttaggacattagacactgtgcaccatgatgatttccaccagcctaacttcgagggggcagcaatcactaaaggtggtcccagagagccttggcatgatatccactctaggctagaagggcccattgcttgggatgtcttgtataactttgaacagagatggagaaagcaaggagggaaagatttactccttggactcagagagcttgaagatgtttttattcccccatctcctgtcatgttcccagatgaccgtgagacttggaatgttcagctatttagatccattgatggaggtgctgcttttggcttccctgaaacccctgaagaagcagccaaagctggactagtcagtggtaaggataacatcattgaccgaagcattcaggatgcttatatcaatgctatccgacgtgcaaagaacttcatttatattgaaaatcagtatttccttggaagttcttatgcatgggctcctgagggcattaagccagaggatattggtgctttacatgttattccaagggagctttcaatgaaaatcgtcaacaagattgaagcaggggagaagtttaaagtttatgttgttgtccctatgtggccagagggtctcccagagagtggatcagttcaggcaatattagactggcagaggaggacaatggagatgatgtacaaggatattatccaagcactaaaagctcaggggctcgaggaggatcctaggaactacttgacattcttttgccttggaaatagggaggtaaagaagccaggagaatatgaacccgcagaaagaccagatgaaggttcagattatgcaagagctcaggcagcccgacgcttcatgatatatgttcataccaagatgatgattggtaagtggaaacaacttaaactctacatttaagcaatctttgatcttaatacatgttttaaaatgaattcccattccattgaaccttttcatttggataattcacagaatgtccatgtcttaaacaatttagtaaaaccaggattcaactcttttagcttgtagtattaagacaagagcaagtttgttgaaatttctatcattgtttttagtaaatcatttctgttaccaaaagttcaaattttagtttatggggataatgtgtcactccttgttgcttgcagttgatgatgaatacattatcattggatcggccaacatcaaccagaggtcaatggacggtgccagggactctgagatcgctatgggaggcttccaacctcaccatttgtcaaaccgcgttccagctcgtggtcagatccatggtttccgtatgagcctatggtatgagcaccttggcatgctagatgagtcattcctccagccagagtcggaggagtgtgtagagaaggtaaaccagattgctgacaaatactgggacttgtattcaagtgagacactggaacatgatctgcccggacatctgctccgatatcccattgctgtttccagtgaaggactaatcacagagttgccaggctttgaacatttccctgacaccaaggctcgtgtactaggaaccaaatctgactacctgcctccaattctcactacttaagtgtgtgtggttgtttttgctgctgcttgagttttgagtttatgagagaataatattaataataatagctttgttagcttgtgagtttgtttggtcttagcttggagaataatagtcatttaatcagctgggactggggtacttgtgtttatgtgtttaatgcttaattgagtcatgtcagctttatcattatgtggaatattgctgtggtgtatttctaactggcttgcatggattttaatataatgctatgagcgccaatttacaacttctattaccaaacaatgacagaaatggtgattgagtgaagacttgttagattgattatatttgttcttttgaaaatatatata

SEQ ID NO: 817 - DNA, 3257 bp, Cannabis sativa
  modified_base (3121)..(3123): a, c, t, g, unknown or other
agccgccaatatccctattaattatatgttaaaattttaatagtatctgaattttgttaaggtgttttagtgtacaaattaagtgtgatataattataagaatcttgtttaattgagtttttcagttttgagatgttttgaagaacaatttattgttttcaatctatcttaaggggtttcgggactacactatttgaggaatttcatacaataagttttaagagatttgaagtaagggttcttgagtggatcacaaggaagggtattttctagttttgtttaaattgttagctttgttacgattagtgcttgtaattggacaatatctatttgttggaaggtagctaatcttctaagaaaaacatacaattggtatttaggcttattttagttaacaaatctcggtatgttgcaaaattttataactcatgcatctgtgagctcaattgaaacagtatgagtccaacaaaataaagcatgaaacccttgaattaaaaacaaaccctatcagactaatcaatattgtattctaaggttcaaataatctttgagaaacccttagaacattcacgagctgctagggttagagattcacacacaaatcaccaagaaaattcatgcgaaatcaagagaaatagggttaggaaaatcaaacataggttaagaacaccacgattttctcaaggatcacccttacaaagatgggctacgtcctggccttatcaagctcgccactgagatactcaattttcccattaccaacatgtatggattacatcatcttcatttgatttcgagtcacattcattgaatgataatcaaagtttttatttttctgtatttttcttcttacagaaaattttgccctaatacttttctatattttctctcttacaacacgaatggacttctctcacactcgtctctctctttctctgtttctctttggatcttttctctggctctggtctaaagctctttcattgatttgggtttatgtaggattttaaagacacacacctacaccaactcacaaaataattagaaaattcaaggtcaacgtttgaccttcaattttcacacgtggcatcaaagtaaacaaccatgtttattttttaaacaccacacacacataaatgcactttactaatcaagtttcattttcttattctataatcatcatcgaataaaacaatgttaccaaactcagaggttagcaaacaacattcatgcataaattaaaaattaacaaaaattgaatcaaacagagagggaatcagagaagaacaaacaaattatcgaggttcgtccacattatttggggtacatcctctattgagcgtgccacactggattactcagtcaatcttatttctcaggccaagattgtaacaaagtttaacgattccaaccacgtctcagaaggtaatcaatctctcttgttctcttaatatttctttttctctcaacaatgaagaatcttgttttactctctaatattcttctctttctctctctcatgaaaaacttgtcaatcagtttctccatataatctgtttgatgcagtacaagcttttccttttccttgtttctcttaatgcccattcctaggatcttagcaacagccttcaaatctttcattttaaattttgtcttcaacatgttctttaagttcttaatcttagcatttttcttacttatcaacaacatatcatccacatacaacaataaatatgtggttgacatgatgattgctccttttagatatagacgtgtatcataataaactctttatgaattcatgtttgaccatgaaagagtcaattttgttgttccattgcctagaggactgttttaatccatataggaatttttctaagttacacacaaggtattctttgccttttctcataaatccttttggctgatccatgtaaatctcttcctctaactctccatgaaggaatgcagtggtgacgtccatctgttccacaattaggttgtactttgtacctaaagcaagcataaatgtaatggttttatacttagttataggtacaaaaattctagtatagtctattccttctttttgtgtgaatcttttacctaaaagccttctcttgtatctaattgggtctttacctctgattcattccttatgcttggataaccacttacaagcaacaataattagtcgttttggtttctccactagtgtccgtgtcttgttcttcttgagagatgtcatctcttgtcccattgccttattccatttttttgcatatttggattgtagagcttcttcataggagttaggctttgtgttgatgagttccatagcaattaggaaagcataagctagcacttcattccaggcattgaaactgaagaatatgtatagaatacttactcacaatcttgagtgtagatgagaggggatcaccatgacttgaacgaggtattacacatttgtctaaaaacttattttcctccatctctaagcactaagggaactctctgggaaatggatttgtgaattatcaagtcttgtgttttctagcaagtacttgttgatagaaaactaattgtcattaaatgagcagtttagacctttatttatagtgtttgaggatcactttagaaaatcaaattccctttaccccatggctgttacgaggactttaatatgtgtttaataggataaaaatattaaggagagaattggtaatgtgcttgataaatccatgcatgttcatggacgttatttcaaaattggctctatgtgattaaaacaaccataaaataactggttatcaaccataaaacaacaatttttaaaaaaactcaattttgagttttgtaactcctctccgagctacattaattcccaatgttccaacactcaaataaatgatataaaaatgagtattgtaacaatttttaatatctagattctatatttttcatatgtaataattactcaattttttacatattatcaattgtgatcattaggttacaatctatttttatatttgtaacttctcatatgttacaattttcatgtgtattattatattatatatgatataatacaatctctaacacataatatatattnnntcatattaatatataatatgtcacatttcagtctttattatatatttgttaaataacaaatatataatacttcatgtatactaattgcttcaaccaaatattaaaattgtcttagtcattaaattgcctttaag

SEQ ID NO: 818 - DNA, 679 bp, Cannabis sativa
ttttttgtaaacttttggaggataagttgatggagagctagttatgagtggataaacattgttgactctttccatttgactacattgactttcatatattgatctcttttaagctaggaaggacatcaagaacttcttacatacaaacacttcggttttttttcttctttttaacacttcgaaattttaaattaagttattaatatcaagacacagtataagttaatcgtgtgttgtgtagtgtagtagagattatttttactagtattctcttttatttgggttaaggttttgaaacttcttatagcctctcttgaagagattaaaaaatgattagccctctaaaataattattaatgactcaaaaaatctgagaaataaaatccttataatacttgattcttaaaattattaaaataatagaaagaggggagaaaaaatctacaccatagtcttattatttcaaaagaaaaaagagacaccttacaagttaaagattaaaagattaaaataattaaaaaagaaaatataaatttgcattacatatttaacttatagcatctctaattgtatacctattttactaaatatgaaatatttatttagtaatatgatataattaatatttagtataaattattaaaattgttgctaaattaaattagtgtaatcatggaga

SEQ ID NO: 819 - DNA, 4246 bp, Cannabis sativa
agtagtagtagtagtagtagagaagataggcttacaattactattagtattattggaaccatataataatggatatgaatatgaatgaagtaacaatctctttccttttatgtgtaagtagttgttccatactccataattattattactattaccacatctacatctacagtggtgggactggggaggacttgttatgtttatgctgctcatctctctagcttccactttctgcaaattattgattaagtcaacacaagatgttaatactaataatgaaaattagaggtagctgtaagaagaaattgagtagtgaagtgaacctgatttgatttgattgaatagaggaggcaaaaatgatattccaactgtagcagagcagctaaagaagcaacaacaatggaggatggatgaatgaatggatgttattagttattactgctaatgaatgtaatggtatagggcaatgacaaccactcatgtgtctacagatacatacagataaatatcatttttttttgtaatttatgtattatagttaggctttcttttgtatcataatttaatttcaaccacaaaaaatcaattgaacacgaaaatggggccacccatctaacaattataacccacaattttgacattattgccattaaaatgaccagtcaaaatcaaaattacaagtatcttttttcttcagtaaattccatattgctttcattaactcatattattaattgaaagaaatagcatttattattattattcttaattaattaaaaatccacatcatcttatattattattatgaattcaattgggttatcactttcactcccattcccaagggcattatggtaatctcacttctttcttccctgaaacgctaaacagagagagagagagagagagagagagagagagttgaattatcttctccgacgttggtattgctcatcatcagatcaacaacttcgttttctaccgtttcatgttttaggttttccttttaaaaagtagagctccattgtttgactattacggaaaaagtgggtaattttatgggttcccatacgtgagaggactgatgaggaggcgtgttaagctgccaattgcttcgcatgatgatgttgtgactctatgacaaaaaagccaccctcttttggatttttatctacttgttttggggctttgggttaggtgaaaaaaggtgatttttttttatgtttaaaacaagtacttggccaagccttgagaacgtgggttgttgttgaattagactctgaacagccgaaataagttcacaaagctccattttctctgttgacttacgaggccaacatgggttctcacggaatgcttgctacaagggctgtacagaccgagatgccggtaatggttcaggtatgcaccccaaaacctcatctgggtttcttcaatttccttacttttagctgatgtgatggttgttgtttttgcagattcaagaattggtccgaggagtcaaaaactctatgtccttggctcaggtacgtgtgcttagttagattgttgagaaatgtggattcttcattaccttttttagttttccaatgtgttattatttattataggtctttggggttagagttgagtgtgattagtttttatttagctgttcctactcttggatttgtgctttaattcgatcttgggaatggaaattttgagtattgagaagctctctagtttaacatttccccccttatactttagttaatatctctaatgaaacatgagatcttcactgatttctaggaataaagaacaacgactttgatctacgtggatgtactctcatgcgaaaatttgtgatcttgatctttgtgacaaattttagagagagcttcagtttatgatatgataacattcttttattattgcttgtgtttcattgtaaggatgtatttggtagtggcctttgatttttttggtgaataattttttttagggagttgttcactggcaaccacctacagaggcactgcacaaggttaaagagctactctgggagcctgcaattagcaagtacggtgctgatgaaggagttcctgaactcagggaagcactgactgaaaaggtatattcagctgcattgtttccaacaattatgatataatctacctctaaataatgtcattacattgaagtactgagattgctcccttaactattttacatgagaatgaatgattagtcatactcagtactgtcctgatagctattctattagtctggggaacatgacagacttgttgagttactttcttcagttactttagttttggtggattggtgtgagaagcaacccagattaggtgtactcttcaatcaatgtatatgttaccatgattaaattaaaatacaaatgacaaggctagttcagacatcattattcacatcagagtacgatttcttctatttctgatgggttaggagtttctgggtgatattcataggggtgaaaaagtttccaggatgttcttggtgttctggggtactggagttgggggttaattatttacgaggagagttaggaaccattatttgagtttggtgtcttgggaggagtaactaaagagaggagactttgaattttcaacaagttaaggagaagaaaatcagtgattgcttacattttaacaggtcttgcctcatagttttggtcgcttgttttgttacagaggattttcctgtcatggtttgtgagagaatcagtcgtctgagagggtaacaaaacagcaaatttaaggcatccttatatgtcaaatggaagattcaagccaaactttctttctcttattgtgtttactgagtaacctcttgacacatgtgaataagttctcttatttagtaaattttgcagtagagcaaattgaaaatttgtactttttctcgataattatcttttagctgattattctttttccctttatgtcttgcagttgcggaaagagaataagttattcaaatcttctgtgatggttactgctggtgcaaatcaggtgacacggaatgcacttctggatttttgcttagactaacacatctcctttttccatgtttcgttttactggaatgagttcaatgagggatatcaggctttaattttagcatcttttctttgagcactgtatttcagaagtcatacgtgaacgtgaatagttgcgtggttggtctgagatacaacgtgaacctattttgatagtaatggaacctggcaaccacttctagaaatgtggcattaacttagacattttctttgcaggcatttgtgaacctggttcttacattatgtgatgctggggattgtgtagttatgtttgcaccatactacttcaatgcttacatgtcgtttcagatgaccggtgtcaccaatatactggtcggtcccggtgacccaaagacacttcatccagatgcaggtgagaaacttggttttttttttagtttttattgttcatattacatctttgtttggattatgcatctttactctgttaatgttcagactggttagagaaaactttggcggaaactaaaccagtgccaaagcttgttacagttgtgaatcctgggaatccctcaggaacatatatacctgatcctcttctcaaggtcttgtttttctctctcacacgtagctgtgaacttctgtactattaatcagagagaaaaatcttaaaactctaaccacttgatttgtttgtttggttgtttgcttttctctgattattttcttattggcttgaacagaggattgcagacgtctgtaaaaaagccggatgttggcttgttgtggataacacatacgagtaagttagaactttttctcatatccaacatttcatgtcttttataaatatgcaattgggttttatgttggtgaaatttagtttgaaacaaactgattaagagatgagaacccaatgggaaagtgatcaatgcgctattcgttctgattacttttgaatgaagcatactgctactggcatccgaatcattttctattgtgagttttacaaattggttttacaggtattttatgtatgatgatttaaaacacacatgtgtagagggagatcacatagtcaacattttttcattctcgaaggcttatggaatgatgggatggagagttggatatgtaagaaacaacaccttatctttcatgtcttttcaacccagtgttgttcttactttgagaaaa

SEQ ID NO: 820 - DNA, 3558 bp, Cannabis sativa
ataatcaagtcaaaccatccacagttgttgtctggaaaagaatataatctgtggagctacttatttcaagttctccctttcgagagccaccaaaaaaaatttaacaaggttccaagaatccaccagtgtgtgaaccatcaaggcttgagtgcaattgccaaaccgaacttggggttcttttccaagcccctggtgtcaatctcaccagtgactgtcatcaccgactttggaataacttcgtgctggagggtagctgctagcttcccgtgatcattcaatttcgctttaaccactgtcaaatggtccacagcgtaggatcctcccactgtaaaagtgttctcgtttgatgaaaatcttctagtcacctctccaactgctgcagttctctttgagttatcaaagtaatgcacataggatgcttttaaactatctcccttgtcaccccttcagtaagaaagaatggaataagaggacttgatatagatgtaccgagttctgtcacggaaattatcaagttgaaatcaattttaaatgatgaatcaaagaacataagatcttacagaagtatcgaggctgatgaatctggcttggtcatgctaataccagcagtgtacttagtgaaattgccagaagtggtgtcataaccagcttctgcaccaaaagcaatgcttggggtaccaaaggtggctgagaaatcaaccaatggggattgattcaaagccacggctgttgctaaggccacatgatcatggaagtattgaacctcaagctataataaaaataaagagcacttatagtaactacaaatgtcaaggccaggccacatatctagtaaaagaaaaatatgttaagattccaaatcttgtaccttgcccgaattatagttaggcaatttgaaggaagcaatggcctttgtggaaggcagaacttcagttatagtaagaattgtagagacctgttaaaaggtaaaaaagagttagctatcaaaaacaaacaagtgaacagctgcttttaattgtagcactttcaacccccagaaaaaagaagaaaacatacatacattcgaatcagtgtcaactttgacatcaataacagtgttcttgtacttgtatagtgctgcaacatccccagctgagagtcctcctttcttcactgctgttgatgtcaaggcctagtacagccaaaagataaaaatttaaacaaaatgattaattctcattacccagggaaacaaaaacaagttagaagcacctattaataattagcacttaggataaaagctaaagagagaacaaatagatttaggagaataagagataataaccagatttaattttatttttgtcataaaaagttaacaaatagatataagttgccagttgccacaatccaatgatatatccaacaaggagcaatagcagaggagactcttatagtgtgtttagcagaacagagaagtggaaaggaggaaaaattagtgagactactggaattaagatcacctgtattttggtgtaaagtcaagtaaactagttaaggattcattcattatttgtaaaaacaagtgattgattgaaatgattggattactttcggggtaaattagttgtttggtattaagaccattttagagagacgagagtagacaatagatttcaaatcctcaatagtgaccaatttaatccttccaaagttaaacttttgcaatagaattgtccatgctctacggttagctatacaaactaagtttcacatgggttagaagtagggaagaaaatgggtaaataagaatagacgggcttgaatggacaattccataccactgtggagattcgtggtgtccatgggaatcccaacaacaacaattatcagtcattgggtggaattctccacgcggaacaatggcagagagccttggtaagcgtacagtggttcagtggttcagcttgattgggtaggcggtgttgttgacttgagtagggtagtctcttgaggtagactctagggttctatgtaatgcatgcacttcgacacggtaatgatgaatagatttgatatatcatatagcaacatgaacaatgctcaaatcaacaggaatattgttgtacattgttcaaggagaggattgttaggaatgcaaagaatgtcgagattcatagtgtcccctacaagtggaataagtgcaatcatgttaatgaattgtcaaaatgtcaaacgaaggtgaagggccctattaatatcacaatgagattcatgaatgagcttagatgtgtcctactctcaacaaaatgaggaagagttgaccagggcgcttgagatagtggtactccatgtaaggcatgtgttccaacgcaatagagtgaaaagtctagttggtatagaataaatggatagatgattgtttgagggtcgagtagactagatggtcctttattttaggggggattgttagtgagcaaataaagcctcatattggctagaaatgaaggagaacgtgcacatataggcatagataaatagtagaatctaaaagcaattccatttaaggtataacaatatcatacctctacaactaaaatttcttctttcacacgaacgtaacaaggaagagtactctcttttctcccttttttctaccactagttcgtagataataataaaatattcatattccttcaaactctcttttccaccaaacataacccaaaggcgaaaaatttaaaacatcatcaatcacttcctataagctgacaaataaattttagtaagtcatctactgttttatattcaaagtcatataaatcaatcaaagaggaaacttcagaatataccctctaacctatttattgttaaataaaaataaaataaaatgagcagctactactctctatctactaagtccaattcttaacaccaaacttccatttcaataagcatcaaatttggaccaaaatattttgtcgcaaacattacaaaaataagtgatttcctatgcaccgaactaaccaacaatgatctttataactatcccccaaagtaaaataaattgtcagaaagcacactacatcatatggtgtcaagttgtatcttttgaaaaacatcccacaatgtcaacatatatatacagagcaaaacacgaacaaatcatctaagataggtcacccaaaaacctaattacaaaccctgattcaatcaataataattataaacactattcacaaaagtaagtatttggcttagaaagtttgaccgaagtcgtaaaagaaaaagaaacaaatacgaaagtgttgcttgcttaccacgccggcatcactgtaggtggaaatggaaaatttctgatcggagttataatccttagttagaagatctaaatccaaagtgagaacaaccggtttcagacaaaatttgaaatataaacaaatcgaatcaaaattgattggacatggaaaaaggtgtagtaagagcaagagagtagttattacctttagctttctttccgatttcggtgaagagtcctggtcccttgctcatctttgcagagagagttttagagagaga

SEQ ID NO: 821 - DNA, 5744 bp, Cannabis sativa
tctgggtctaggtctagggtcccgagtctgagtccgagtcccggtctcgggtcccaaatcctgggtttaggtccggtctcgagtcttgggtctgggttaggggtccgggttcaggtttcagttcgagtttgggtccggtctcgaaacatgagtccaagtccagtcctgagctcggatctgggtctcggaacccgagtctgggtttggtcccaggtgcaggtccctagtccagtctcgggtgtagggttgggtcccgagtggatctagttcaagtccaggtctgggttcgggtttgagtcttgaattaagtttttttttttttaatatattgaaatcagatcaaatcaaatctgattcgaaaaaaattaggcagggcgaaataaatttgatcatatatctaataagtatttgaatgtttcgaatcgaaacttcgacctaatccaactaaatagatatttttgatatgcatacttaagatggaagagaaacattctctaacaaaacattctcagttttgttaaaagatatgtactttccttgtattccttatttttattaaaacattatcatagtttataaatatttttcttactcgactaaaaaataaatcataattgttttctttcaaagtgtttaaaactatataaattgtcttttttaaaaaagaatatttctattttatttcaagtgacatgtctttcaatttttaagtatacaaaaatatataaaagttagtcaatgtgattccttaagaaaactaaggagaagcattagaagcattctattttgtttttctttttcatccatgtgttttccaccaacttctctcatagtatataagaaattattagattactatacaaatatttttcatgacacgagttctataaagtgccaccaaataatcccttaaaaaataaccaccaaataagcaagagctttcgaatgatttacctataatataagcctcaacagatgccttttcggtataaggtaggttgtcaactattaacaccgacagacaactaaccaaaatcaacagtttccagattcatatgttgtttatggctatacttctctataaaaagtgcatatatatatttatataatttagagagaaagaggactggtttcaagaatgtaatcattctaattatgataggagattggaacaacaaattatgatatcatgtcttctaacaaagtaacagacagtacccacaagttgaaatttaatgcaaggcaaaacagagaaagcttcttacttgcaccgaacttgaatcactatcctgatcaatgttggcaagtaagaaggaacaaaaaaaaaaagagcaaattaggaaaaagtaacaaaaaaaatataatagaatccaattgactgcctctcaagggtggtggtattgaatgtgtctgaagcccaaggcctcacttgaaccgaaccgaacaatgttttctttctctatgccacagcaggcatgtccttgagccatgcatccaggggcttaccaatggagtatacaatgaagccgatctcacgcagcttttcggcatcaacaacgttcctgccatcaaatacaaaggcgggtttctgcatgttgtcgtatactttttggtaatcaagagttttgaactcgtcccactcggttaggatgcagatagcgtgagcatcctttgtggcctcataggcatcccaaaccacgctgacttgcttcacggtggtggggctcattggctgcaggtgaagaggatggtcccagtcgaattttttcattgcaaggtccctctggatctggtcctctgtcacttggggatcatagatgctcaccctggccttgtcacccaatagacccttgcaaacatcaatggctggggtttcccttgtgtcaccggtatctttcttgaaggcgaatcccagaatggctaccttcttgtttgaaacggtgttaaacatggaggaaacaacgcggttcacaaacctgttcttctggtaatcattgatcttgatgacctgtttccagtattctgcaacctctggaaggccattgcattcacagatgtacacaagattcaatatatccttctggaagcaagatccaccaaagccaacactagcgttgaggaacttgggtccgatcctggtgtccttgcccactgcatatgacacctctgaaatattggcaccagtagcctcacaaagagctgacatggcattaacagaggagattctctgggccaaaaaggcattggcagcaagcttggagagctcagcagaccagagattggtggttaagatacggtcttcggggacccaatgagcataaacatccttcaatgtttggatggccttagctccctctggagtttccctgcctccaatgaggacacggtcagggtgaaacaaatcttggatagcagttccctcagcaaggaattccgggtttgacaggatttgaaatttgattcccttgctgttgtgggtgagaatcttttcaatagcttcagcagttttgactgggacagtggatttctcaacaacgatcttgtccgattttgaaacatcagcaatcatacgggcagcactctcccagtaagtcagatctgcagctttgccagctccaagaccccgagtcttggttggtgtgttgacagagacaaagactatatcagcctctttgacatgtttctcaacatcagtgctgaagaagaggttcttgccacggcactgcttgaccacatcatcaaggccaggctcgtagatgggaagctggtcactgttccaagctgcgatcctgggcacagagatatcaacaacagccacctcaacagaggcgcacttatatgcaatcacagccatagttggccccccaacatatccagcaccaatgcaacaaatcttcaccattttttctcttctaccactctacaacctgtccaaaatgaagtttcatatacatcaaaaggacaataaaaaaagaattcataatgctttaaatcaaatattgatcacatacactcaacttcctattaaacataaaaactcaaatggtcacccaatacattttcccagatctagtctcatgtaggactcaaatctcccaacccttttcttcccaatattcaaacaacagctagaagaattaagcctcaagataaaatcattgataaatattcattccaaacttctagatatctaagtaggagtgagttatatgtgtacatcaaagctgacaagtctagattcaggttaaagacacaagctaacataatagagagcaatatatatatgatctcacaagagatcaactaaccattccagctaaagggtctataaattgatcaaccataattaacacatcagatctagcacatcacgaaggaaaaaaccaacaaagaacaattttttatacacaaaacagtgataaaaccgcaaattctaatgtacaactaataattgaatcagatccaattgccaagtatcacgaattatactcaaatacaataactaacccccaaaacaacgttgaatcacaaaaaatgaagttagatctgcattctcatgacataaaaaacaaaacccattataagaaagggaaaactcaatcctacaaaagcaaatctaatatgaatcagagaccaacacagccatttctcattctccccaataccgacgtggaaaaacaaaacaataaaccataattcacacaaaacccaacaaatcacagcaaaaatatacacaaagatatgaaatttaaagcttgacagtaacattacctcctgaaattctttgctagttaagttttttttggttctgaacgagagaagagaataagaagagtctgaagaaaaaaaatggttttgggttgtcttaaatacccaatgtatgtccaagatctacccctctgattggtcaaaatgacaattaaggacatgcaccgcttgcttttgatgtgaatctctcctctcctaccaacaattaattcttttttctcctaacttaattaatattggattcttataaaaaaaaattaaaattggatttgtctaagaaaaaaatcaaattaaaattagactttaaaaaaataaaaaataaaaaagacattataccatttggcaggtgtataaaaaagggtataatggtaaatcaaagtttagacgcggtctaaatgatggggttgtagggaaattacctaaacacccttgctaattgcacatggataaaaaaagtcaaaagcaaattttggaataatatgaagaaaaaactcagcttcttcctctatttatctttgcaataaccatatttattgattcttttagtgattttattttgtaacaaatgtgacacatttaattgattttttttaattaaaaaaagtaattttgtcataaaaattacattatttattagaaaaatcacagtttttttattaaaaaacatcacatttggaactttcaaagtaatgtaatgaaaaaatttcttacattgtgcaatgtaattaatgaataaatggatttttttggtgggatatcattacttataagaatggatacatgcccactttgatcacatacttccaagtagtatggtgatatttttgttttcacttaacatgaaatgttgactttgactttaaccaaataaaattgaaagtgactaaagatatactaatttgcaagacaagtgatttatttttcatttttctttataaatttttgaagtaatatcaacatttatttgtaattgtgcattaaggtaatgatacatttttaataaaagtgttaaagggtaaacttcaaaatcaagggatggagttgcttatagattcagaaaaaggaattgttggagtaattttgaagccatttatatatttagaaaaatggaagaccagagcttcaaaatcttgagtgatgatgactcataataataccaacaaaagcagtagcaactataataatatatattaataaagaaaaataaatatgtatattttgaaattagagctgtgataaatgaatgaaactcattgtgaaggaagtctgtaaaaacatgtgaaagcataaatataagaactttatactccattttacatattgttgaaataaatatagagacctcaatttatgatgttgaagtaaattttgaggtgacaagctttatggtctaagcttttaactctaatctaaataaatcacatatattaattaaattgatatgttaactctaaatttatataagtgtgatgcctaacataaactacatgtctttttgaatttgtattattgtttttttcttaagatgaagttcgagggactatcactaaaagtgattttttttttttttttttgagatggaaagtgaaaatataatgtatgctcttacatccaataattagaagcattatttaatttttctttctcgttaattacttaaaaaaatttctattcaaaattattatccactatcactactgccatttctttaaattagtctcagttttatgctatgtcagattttttttttattattaatatagaattatatgtttatgcatgataacataagacggaccatgtgttgcaaatgaatattaaatggtaaaaataatgtattttatgttaataatataataaacattagtggttgataatattctctcaaaaaaaaatattatataactagtcgattttcacatattgaatacgatgcatcttacattttaacttcttttatagcattattatcattc

SEQ ID NO: 822 - DNA, 2336 bp, Cannabis sativa
aattatcactataaatacaattattaaaatctgacaagtttaagctatagtatgttctttgattttagaggacaatttgactggtatattgatgatatacaatttatgagcttttaatgcattgactatagtgtgtgtgggggtggagagcaaggtctcaatgacttcacatcattcatgtaggttagcatttaatgtcaaaaaattaaataaattgaattagaacttataataattgcgtattgattttcacagttatgttcgttcaagtggcaaatcatgagaactttcttgtttagcattttcctttgactgtggagttgaaattggattagaagagggcatactaaagcttcatatttcagtttttaagctgctactaattgaactttctggaatgtggagtttttctttagtaataatgcataatgctagtagaaaatttataaggaaaaacatcatttagcttttctgtgcatcaaggacagaacgcattgattctccaactgagttggaaaagcattttttttttcttgacttcttatcaacattgtgtacccttctttgtctttaagaggcatttcctagtattcatggtttatgtggattttatgttttgttaccttgagtcttgactgtaaagcttcagtttcttacagagaaagtgcagcaagttaaatctttggagatcaagtgcgaagaatgtagtgagaaaaataagttgtggcgtagtaaaaatggaagatggtttagatgatgagacatgtgagttagtgaatgggatagaattctctattggtgataatgttgatgcctaccttttcacagcagtaaagaacaataacaaaactgggatacttctcttgtctgatgtttatggatttgaagattcagctactagagattttgcataccgtgttgcttgcaatggctacaagtaggtaactttgatgattggcttccaacatcaaatcctttgctttgtaatgttattgttgtatagagagagctacacgttgtaggagtatattttctgaaactactcttgtatgataattcttgtgttctttgaataaaaacactgcagtgttctagttccagacctatttcgaggagatccatggggaaagcatcgaccaatggctatgtttgaagagtggatcaaaaaacaagaccctgagagggttgcaaatgatattgacatatcaacaaaatggatggttaatgaatttttggctgcaggaatctcaaagaagcttggcttaataggattctgctttggtggtggcaaagtgatcgaggtgctcgcccaagatgagggcgcctattttggtgttggggtctcgttttatggcacgatgatgaatccatctttggcttcaaatgtgaaggttcctgtgttgttcatttcaggggacaaggatcctctatgtccagttagtttgctagaaaatgttgagaagagaattggcagaggatcaaaaaaggtagtatttaagggacggggtcatggctttgtacacaggccagagtctcctgaagaagatgcggatgcagagcaagctttcaccatggctagaaattggttatatgatggcttggtggaaaacaactcctaaatgatgtatcacttgtgtatattcgttttatagtagtgaaattgtctacaagttggtcataaaactttactatttttttgggggggtaggcatgttttgagttcaatttttgttgttgcttttgtaaattagtggttacttgttgctcaaagctattccgaagtcactttcatcctacttctaagttaacattaccgtgaaaatacatacaatgaagaaaagaagaaatgaatatcctaaaaagtaatgaagaagtgaatatcctaaagagcaatacctacttttaactgttgacgctaaaaagtggtcaacactcgctcgctagattggaaagataaaatatgatatgagtagagtaaatagaaagacacaaaatttatagtagttcacttcacatgtcgcgatagtaatagagctacgtcggcgtgttatttgtttttatttattataatactgttatagaaccggttctattttaattataattggtttgagttattttgtgttatttatttttattcattatgtttcaaaactagtactatttcaattgtagtcggcttgagtaattttgtattatttgattttattaattatgttatagaatcggttttatttttatttatatctgagatacctacttctagtgacttttccagtgattttttcgacgacaatgaattttccgataattttttccggcgacaatgacttttt

SEQ ID NO: 823 - DNA, 2054 bp, Cannabis sativa
agagagagagagagagagaacaaggcaaagcaaagcaaagatcataccattcaaaactggaaaaaatttcttacacaaattaattgtgtgaacaactcgaggttaatatgaaaatgggatttgaaaatcctaaagttagatacagaaacagaaacaagaagtcctcaagtaaccaaaagtaaaataggataaggcaactgtaagtttcccgcatcaaactcaaacaccacaatttgcctcaatccattcccatgaccatcgttgaggtctttaacaatctactcaatacaagtgcttggtgtaatttatgtacagatcaaccaacacactcaaggatccaagtaagatgatttcagaaaatggtgcacaacattggttgcctgaagtggttaggtgggtgagaatgtctgacactgtacattgtgaatacggaatagggttaaagccccgaaatgtatcttataaaaatattaacaataagtgtcaatgcaactttcgacatggcatatttccaatgttacgctttcgaccccatggacaaaataacgtgtttattaacatgattacatggacgtaagcatagcctagtggtcctcacaataaagagttttcaagtttaaattaattagattgattgtagaatgatataaaacgcacaaatacatacacatcttgctgtattaaggtatagtaaaatacgggcaaaatattgaagtataaagaatagatacagaactctaggaagtaaaacttgcaagtcaatcaactaagaaaaaagctagcaaaaacgaaagctccatgcataagttcatttcaacatttccaaaagacatgtaagtatacaacataaaacaagagcaactctaatgtaaccaagtgactatctaacgagcaacaaacaactgcctaactatgattaagccattcatgaaaaacagcaaaaatattcttccatttcaaagcatgccaagtgctttcacgtaattaaatataacaaacgttaaactccattaagtatatcatttctataagacacaaagtagccaaagacataattttgcataaaaataataactctaaattcctctaaacctctaagaatccgtaatcatctattcacaccttaatcaagcacctaagaacacatttggtcatttaaccaaaacccaagtatctcaaatttctttaaagaatttaaattaacgaaggtcaaggaatcagtaatataatactccataaaatacagtagaattagatagcagaattagccttctcaccattagatcctgatcgctttccacgcttgatcctctctagctgtaactgcgtgtccatgaacatccgcatccttcgaacctccaagtccttcgcaaactgcatcctcttcttctccaactctaccatctgcctcaatttctctgcttcaactttctcgtacacttcaccaaacctcgatatcgccctagccaaactccgtaaccctgcaccatctacactctcgtcatcactatatctctctttctcaacctcctcctcctcctccacgtcctcttcattctccaaatcatcttcatcctcctctgcctctgccgcagcagctgcagcagccattgcagagtaattcctcctgaaaaacccctcttccggggctgcagaaagggccggtcgcttctgtcgcagagccactaaagcggaactagcaacggttgccgcggacgaattcttccgatacgaagatgaagaatgaaggggaacagcgatcggcggcgacggcgatagagaaggagagggctttttctggttggaaccaattaaggcatctagacgatcgaagaaagtccaggatgaagataaggccccattggaagaggaaaccctagccttctcaaccttatacttctttttaatggtatcgattcggttcttacactggacatcggtacggtgggtcttcttagtatggccatggagagcgttgacagcgtcggccacatcttgccaatccttctgccgaagattacctctgttgagctcgagatagcggcggccccatg

SEQ ID NO: 824 - DNA, 2592 bp, Cannabis sativa
gtgagtgaatgagaaatggagagagctggcgtttaaagcaagaacaaacaacaagagcaattgcttttacatgtgtgtttgtctgtgtttggaaagttccagaagaaaagtagggccttttttcaacttcaaatctcaatctttgatgagctgggcattgatctaacttgacactttgcaaaaattaataataagttattagttgtttaattaaactgtcattgttttctccgtctttcttggagagaaaaagatcgccaaatgctcatcgatcaaatcaccctacatttctactttttcacaccctattattatgtttgttccaagaacccaacttttttcttcttctctcaaaattatacccacttcttttttcatcttcaatggcgtttctttctcctatttctctctcccatgacccacctacttctctcattgctcctcgcaccatcgactcaacccaagttagtattgcttttcttttcttttctatgcttttttctttctgtgtttgcttatctttttcttggttctgtttgtttacgtgtggttttcttttttggcgtagatctttggttctaagctgaaatcaggggaattgcagcatacccagttgagattaacggctaattccaggtgggttgctgaaagatttttactttttctgtgtttttttcaaataatatgatgtgggttgctctcatattctttgctagttaaataaaagtatgttgtaatgcatgaaggttggagaatttaatttgaatgtggtatgttatcatgtgaggactttttgcgattttgaaaccttttcttttttcccaccagaagctcaatcgtttgtgcagtgcaaatatgagagaatatttatatatataaatatatttgtctaattcaactctgctacggctaatcagtctaacttttaatggcacagtaaatttctactttttttttcattttgaataactattataagtctgagcagttagctgttcatggtggttgtggtggaggtggtgctgcaaatttatggattacagtttttattagtgagattgacttgatggaattccttgggtcgtttccttggtttgtgtggaaagcttctgaattatgttgtttcatggtttgtacagaaatgttttgcaatataggattgtgagggcgtgcaatccttggattgacctcgagagataagaatgttttcttttgatgtaaacaatctgtgaaactctactttaaagatttacttgtaaagttgtttttagtttataatttgcaggactactccaggtctaactatgagtgcttcgagggaaccaccggcgttgactcaagaacacagaaacaacaaactggagacagtagtggaaaccgaaagtggaactgatttgtttgacaatttgaaacgtcgttttctaagcttcaagaagcacaaatacatgtaagcatagtctctttttctttttaagaatgtcttttatttaaacaaaatcactactgttgtctaactttctgatcaatgtttcaatagggaaaacttagaacactacgagcaacttgcaaagaatcaagaaccgaaggttgtgattaatttgattgattttctacaagcctacactattatgatattcttgcattgtacataaggcttatgttctggtgaagctcggtattgaaaatagtaactttgtttactgatgatttgttgaacagttcatggtgattgcttgtgctgactctagagtttgtccctctgcaatactgggattccaacctggagaatcatttacaatacgcaatattgcaaacctggtgcccccctttgaggtgtgcaacatattttgtagaattatgtgtggttcagatctacttgtgcttattcctacctatctttgttttctccactgtgttttttctcattttgttttctgttttcaatattttgtagaagggaccatcggaaacaaatgctgcattagacttttcggtgaatactctaaaagtaaggtttcttatttaatatatattgttatgatgtgattgtagtgttcttactttgaattgatttctacacatttctagttaccaatctatagtgatacaggaaatgtaagctgataagagctgttttgtgtatatgtcctcttttcatagcttttatcttaggggtactactttcacaataacattggtatgcctagaaaatctctaagaagtctttctttctttcttttggggctaaagtaaaatgtcatttcttttgtaggttgaaaatattctagttattggtcacagctgctgtggtggcattcgtgctcttatgagcatggaaggtgaaggggattcaaggttcaattttcttcattttctatttcatgaatttcggctgttatgtagaaaactagttatgactctatgtctgattcttttaaactcttcatcagcaacttcattcataactgggttattcatggaaagaacgcaaaactgaaaacaaaggctgctgcttcaaatctgaactttgaccagcaatgcaaacactgtgagaaggtaattaaagccacacatctattagaatttttttaa

SEQ ID NO: 825 - DNA, 4440 bp, Cannabis sativa
aaaattatctgtaatttcgtacacaattgcccgaaaactttcaaaatgttgccatttttttctatggctttgcctatgagaagatctacagggtccctcaaccggttccaccacttgtcgagtaatttgaatcttgttgtctgtggttaattgtcttattttagtctggtttattttggaggattacctttgcctcaatgggacgtgtatttatatagttttcccccatttctgtggtgcagtttctgtcagatttcagatatggcgtctgaaggtgggaaaagctttgttaggagagaccgtcttttagacattgaggcacaggttcggaattggtgggaagatgcacaggttttcagggctgaagctggtgataagccacctaagcctgatgagaagttctttggaaatttccctttcccatatatgaatggttttttgcatattggacatgctttctctctctcaaagttagagtttgcttcagcttttcatagattaagaggtgccaatgtgttgtttccttttggttttcattgcacgggtatgcccatcaaggcctcagctgataaacttgcacgtgagatccaacagtttggaaatcctccaaatttttcaaatgctgttgagcaagtaaccgaggaagtggaggcagaggatgcaaatgatggtgcacctccggaaaagtttaaaggaaaaaagtccaaggctgtatcgaaagcaggtggacaagtttatcagtgggagattatgcgtagctttggtctccctgactgtcagatagcggaattccaggatccatgtaagtggttggagttctttcctccgttggcaatggaagaccttaaggctcttggcatgggtgttgattggaggcgtacctttgttacaacagataaaaaccccttctttgatgtctttgttaggtggcagatgaggaaattgaaggccatgggcaagattgtgaaagatctcaggtacacaatttattctccattggacgggcagccatgtgctgatcatgacagggcatctggtgaaggggttcaaccccaagaatacaccgtcatcaagatggaggtgctgaaaccttttcctcctcagttgggtgtgttggaggggaaaaaagtttttctggcttcagcaacattgcgacccgagacaatgtatgggcaaacaaatgcatgggtattgcctgatgggaagtatggagcttttgaaattaatgatacagaagtactaattctcacaaaaagagcagctctcaatcttgcttatcaacgatactccagggtccctgagaagcctacttgcttggttgagctgactggtttggacttaattggccttaagttgaagtctccacttgcattcaatgaggtcatttatgctcttcccatgttgaccatcttgacagacaaaggtaccggaattgttaccagtgttcctagtgatgcccctgatgattatatggctttgcaagatttgaaatcaaaaccggctttgagagtgaagtatggtgtgaaggatgaatgggtcttgccctttgagattgtacctatcatcaatattccagattttggtgataaggctgcagaaaaagtttgcttggatcttaagattaaaagtcagaacgaaaaagataagttggcagaagccaagaggttgacatacttgagaggatttacggagggaacaatgcttgttggggaatttgcaggacggaaagtccaggaggcaaagcccttgttaaggaataagcttttagaaacaggtgaggcaattatttatagtgaaccggagaagaaggtgatgtcgcgttctggggatgaatgtgttgttgctttaacagatcaatggtacatcacatatggtgaggaagaatggaagaagcaagctgaggaatgcctctccaacatgaatttgtattctgatgagactcgacatggatttgagcatactttgggttggcttaaccagtgggcttgctcacgttcatttggacttggaactcgaattccttgggatgagcagtttttagttgaatcattatctgattcgactatttacatggcttactacaccattgctcacctgctacataatgatgacatgtacggaaccagtagatctccaataaaacctgagcaaatgactgatgaggtttgggactttttgttttgtggtggcccatatccaagatcatctgatataccttcgccgcttctcaacaagatgaagcaggagtttgagtactggtatccatttgatattcgagtttctggaaaggatttaatccaaaatcatttgactttctgcatttataaccacacagcaattatgcagaagcaacactggcctcgtggctttagagctaatgggcacataatgttgaattctgaaaagatgtccaagtctactggaaattttagaacactccgccaggcaatcgaggaattttctgctgatgctacacgattctctttggctgatgccggtgatggtgttgatgatgcaaattttgtatttgagactgcaaatgctgccatcctaaggctgacaaaagaaatcgcatggatggaagaagttctggctgctgactcttctttgaggtcaggccccccctctacttacgctgaccgtgtctttgcaaatgagatgaatattgctgtgaccacgactgaacagcattaccgcaattacatgttccgtgaagctcttaagactgggttttatgatcttcaagctgccagggatgagtatagattttcttgtggtgctggaggaatgaaccgggaactagtatggcgttttatggatttgcaaactcgccttattactccaatctgcccacactatgctgaatatgtttggaaggaacttttaaagaaggaaggatttgtaattactgctggttggcctgtggcagaggttccagatctaaccctgaagactgccaacaagtacttgcaagattctatagtactgatgagaaagctgcttcaaaagcaaatttcaggttcaaagaaaggcaataagaagggtgcacctgtaacaacatcaactgaagagaccaatctagttggcttgatatatgtcaacgaacagtacgatggatggaaagcagagtgcttgaaaatgctaagagacagattcgacaacagcacacgcacttttacttccaatgaggatgggttgatattggatgccatccaaaatagtcctgttcgtccaaatgacaattttaaattaacccagaaggtttgtatgcccttcatgaggttcaagaaggatgaggcaattgcactaggggcccaggccttagagctaaagcttccattcggagagatggaggttcttcaggagaacttggacttgatcaaaagacaaattgggcttgaggatgtgcaagttttgtcaatcactgatcctgatgctcttgccaaagctgggtcacttgttagactgattcaccagaatcctccctcccctggaaacccaactgccatatttttgccaaggtaaagttgattctttggtaaatatatgtatcttttgtttttgggaaggttgtatgaatttatgagctgatgtctgtttcatctgctgttattgattgataataggtgttaagaagctgatgaggatggtgatgttgaatgagttgcatttagaactgcaaataaggctattcaagtataggtgatgtctgatagtcgataaagttcattgatgatggtggaggaatgttggtataaagtgaagcaacgcaaattacaatttttcatacgaatcaacttgtgatcttttagaaaaaagattgttggactacatagtgtctttattttatttatttattagagcttttctttttgtctagtgtccgctagagcaattttaacatagttttcatcttttttgtgttctaaatatcaaaccataaattttccctatttatttccaactttaatatctggattctggaccccgtatttatttatttatttacttttagaacattcacatggagatcttttgtggggtctcaactctcatgtcatcttcaattaccaacaaccaagtgcgtgtaatggtacttgcagtgaaaacctcaaattccacaaatgccaatttttgttttggtgagtagatacaaagctgtaaaatttgaaactaataaatctgtaattaagaatctgtttataaatatttattacatataaataaatgaatataatatgatagtgtttggaaagtggcgtgtcgtcttaacttaaagtaatctaattctactaaaataccttcctttcttggtcttctaaagccaaacttatttgttcctttctttccttctcgttaaaagacaaacaaccataaacgacccaagcaaaccaaaaccaaaatcaaaagcaactacctttttcttcacaactctttttt

SEQ ID NO: 826 - DNA, 2541 bp, Cannabis sativa
  modified_base (218)..(226): a, c, t, g, unknown or other
tatcatatcattcatccaattctcattgttctaaactcaacccagataaaaacaagcaagaagcaacaacatccccggaataactaataggtacgtatacactgaaaaagccaacaaacaaactaacacacactctctctctctctctctctcaatcactgacaaatccaaaccacactatatcatcaatgatatcatctctctttctctctctctcnnnnnnnnnatatatatatttatatatgtgatatatctagaagcacttcctgtgaacaatggatggaccagattcatcatactctgcctttgaaatccacatctgcagtcaattcagtagataaaattacaaaaaaaccatttcaacatgtgtaaaaagaagagaaaaagatatgagaagaaaaaaaaaaacctgctggaatgtgctgagtgaagccaaaatagagccaccaatccaaacactgtatttcctctcaggaggagcaaccaccttgattttgacactgcttggagcaagtgcagtgatctccttgctcatacgatcagcaatcccagggaacatggtggaacctccactaagcacaatattaccatacaagtctttccttatatcaacatcacacttcataatagagttataggtagtctcatggatcccaggagcttccattccaatcagagatggctgaaacatcacctcgggacacctaaaacgctcagctgcgatagtgatcacctgtccatcaggaagctcatagctcttctcaatggatgagctgcttttagcagtttcaagctcttgctcatagtccagagccacataggccagcttctccttgatgtcacgtactatttcccgttcagcggttgtggtgaatgtgtaacctctctctgttaggatcttcatcaacgcgtctgtcaagtctcttccagccaggtccagacgaaggatggcgtgtggaagcgcatacccttcatagatggggacggtgtggcttacaccgtcaccagagtccattacaatacctaacaacaacaacaacaacagtatcaacatgaggtttcatatcgaaatcaattagcaacatgtatttaattcaataaaagaaatacctaacaacaacatcaacataaacatgaagtttcatatcaaaatcaattagcaaggattagattctaatacctgtggtgcggccactagcatagagggagagaactgcttggatggcaacatacatggcagggacattgaacgtttcaaacatgatctgagtcatcttttcgcggttggcctttggattaagaggtgcttcagtaaggagcacagggtgttcttcaggagcaacacgaagctcgttgtagaaagtgtgatgccaaatcttttccatatcatcccagttgctaacaatgccatgttcaatagggtatttgagtgtaagaatgcctcttttggattgagcctcgtctccaacataggcatccttctgacccattcccaccataacacccgcatgccttggcctacccacaatgctaggaaatacagctcttggagcatcatccccagcaaaaccagcctatcaaagtcaaacaaacacacttctaattcttgttaagatcaactctaaaattttataaccatcaatgttaactctgtgtgacagagatgagagaattatgattgcttaccttaaccattccagtaccattatcacaaacaagaggctgaatttcctcactttctgccataattagctgtaattactaattacccttgtgtttgtgttcctgtggatgtgatcaacagcaacaagtggaaagaggtttcacttaaaaactaattcttttttagcttagttaccaattgattggattgaataaaagtaacaactctagaatccaagaaaaatctcattttcatagtcatgtaatttatttaacccatataaagaaaagcagtgtaacaaagcatcagcctttggaatatggaaacaaaagtgatctatttattattctacatgaattgaattgaactatatatgatgaatcacacaaactaataatagcatggaagttgagaagcttacccagccaagccaactccaactacaactgagatcagaagaagagagagaggaacagctaaaagaattgccttttattttcttcctaagaaagaattgcctttgttgctctgcaaattatagagcttaaaagtgaagcaaaaaaaaaaaacacatcacttgccaagttgacaatcaccaaacactatattatgcttttagaatgattaaagggagaaaagtaaaaaagagattcttctgccctatacacgaatgcattattatttttctgttaagagtattatttggatttgtgaaaaaaagtagtattattgaaaaagaagaaaaaacaaatgggcctgtgaggcctactagtgttggggcctgtaaggcctattagtgttgagcctgtaaggcccactagtgttgggctttgctagtcttctcttcactctaccaaagacgagagagagagagagag

SEQ ID NO: 827 - DNA, 2270 bp, Cannabis sativa
attttaaattttatttttaatatcttaaattatttaaaattttctgaaataaatgtggaaaataaataagaagtgatgctctctaatttatatatggatatagacattcatcattaaatattatgcaccaaagaaagaaaatttctatttgtataaatgattgacatcatctacatgtatatatatcaatcataagataggagtatttcattactccctctttatagtcctcgattcacccataagattttaattatgagaaagcaacctttgacctgcttaacttgtaatagtactaggttgagttaatactaataaagtcttgcttgtagttgtaagtcaatgtctcagcttggccgcgttttcgtgtgattattaattttttcttttctatacatggcttgttaatttagcatttcttttagccagtagttatatcatcacagtcatgtatatatattttgtatgataaacgtttatatttacataaaatgataaaataatctaagagacgtgtacatgattctcaagtatgacatgaattactaaatgattccgtccatctcagtcaaaataacaattattgcaagcctttaagaaatgagtgccgggggtccatttcactttgctgtttcaacgcatttttttttttttttcaatgtatacttgatatttcaatcttaaactaacttacctctgttttgacagacttaagaaatgggtgccggtggtcgaatgaatgttcctccaggctcaaaaaaatcagaggccgaaagccttaaacgagttccacacacaaaaccaccattcgcacttggcgaaatcaaaaaagccattccaccccattgtttccagcgctctgtcattcgctcattctcttatgtcgtttatgaccttaccattgctgccatcctttactatattgctactcgttacatccccctcctcccacaccctctgtcttacctggcttggcccatttatgggttcatccagggttgtgtcctaactggtgtttgggtcatagcccacgagtgtggccaccacgcctttagtgaccaccaatggcttgacgataccgtgggcttagtccttcactctttccttctcgtcccctacttttcatggaaatacagccaccgtcgccaccattccaacacaggctctcttgacaaagatgaagtctttgttcccaagaaaaagtctgccatgaaatggtactctaaatacctcaacaatccccctggcagattcctcactctaacaatcactctcactctgggctggcctctttacttggccttcaatgtctcgggccggccctatgaccgttttgcatgccacttcgatccatacggcccaatctactcggaccgtgagcgggcccagatatacctatctgatgtgggcattctcgcaatgtgtttcggcctttacaagctggctatggcaaatgggcttgcttgggttttatgcgtgtatggagtcccattgttggtggtgaatgggtttttggtgctgatcactttcttgcaacacactcacccatcgttgcctcattacgatacatcggagtgggattggcttaggggagctttggctacagtggacagagattacggtttgttgaacaaggtcttccataacatcacagacacccatgtggctcaccacttgttctccacaatgcctcattatcatgccatggaggccacaaaagctatcaagccaatacttggagagtactaccaatttgacggaacaccagtgtacaaagccatgtggagagagactaaggaatgtgtttttgtcgaagctgatgaaggtgaagtcaaaggtgtcttctggtacaacaagcttcgggattgaattagtaaacacaaacgaatttcgtaactgaaattgcaggtgggatttggggaagttcttattttgttctttaacttgtattgttttacgctggtttagttcgtgtactttggttagctttagttttagctgtgcgttttgattttcttgttcgtgtctaattatattttatgtggacgtggaccccaaaaatgatgggttaagaattattaaaatggagaaaagacaaaataaatatgatgagaaagatgtgtagttttgaggtctagttggggttgtctttgaatgtgtcttgtttctcggcagaaagaaagcgtctactgtagtttacgagagcattggtttagactgttggttcaaatcaatttcctctgcttgttctcattgaaataaaattgagt

SEQ ID NO: 828 - DNA, 1416 bp, Cannabis sativa
agcttcgtttacaatctttaagtattcctcaccgtaacttgtgaacatatgagttgagtccaattacattccctaagtatttattcatacacccacccacccaccacatattatggaatactctagtttgatttttcacgtgatatgtcttattgtagtttcttcattaattactctatcttaaaataatgcaagaaaatgaaaactacaagccatgttcatgatcacataaactaaataattacattaagggaaataaaactaatgttcacccaggcaaaccatatatatttttatgtttacaatttctctttctttaaacttgagtgagtaaaaataacaaatatcaagcagcaacaaacttctcattttttaagttagttgctttagatgtattaagacagatacacttgaacactagcagttttcatcaactggcatactgggcaagcaccaataaaggcatcacactctttacataaacacaaatgcctacaaggcatcaacaacatggagacctcccttgatttgcaggctctgcaagtcatagtgtcccgagaaccctggttctttggaagtgaatttattgttgtgccgggaatgcttaacatgttgctcggatcaatgtaggagacagcgtcgtcgatttcgctgtctccaaatccttccttaccttggtctgctgcaccttgtgaaatcgcctgctggagattgctcttcagaacgttcacgactgactcgttgtattttgctctatagtgccaactctgagcttccatagccacctgtttcattctctctactagttctctgttctttctgtttatgttctcaatttctgcatctttctcgcgtagtttcttgctcacacctttttcgatggcagtaagaaatgaagcaatgtgtctttgcttcatgtcccttaccccttttgccaattgctcctcctgtgtgaatagggagttagaataaaaatgataaccgaaatgagaggatttcggaagtggttggagggtatttattattacctgtattttcatgtactggtcaaactcctctttctgccgatcaagctctgttctaacattgtccccaagggagtaaatgattgcaggtgccccggtcatgcttccacttgcagaagtaacagtcgagttgcgctcatcatcatcatatgataatcttaaacctgtcgatacagggtttgggtttggaatgcttcctgaacgatcagcttcatcttgacaaacattataattcaatgaaatttgaagcttttgttgcctagagatatcatctatttccctgcttcttttattaggccgaagcatgggagtcatgtgatcatttccgaaataatttactggatcaacaccacatccattcgcaactgcaacataatattattcacaagtt

SEQ ID NO: 829 - DNA, 858 bp, Cannabis sativa
ggtctcctctccgctcctcccggatccttatcagtctcactcaaacacccactttcttccgacaaacgcacggcggccccggcgccggcgccgccgttctccggcggagtcaggtggctaaatttaagaagaaagtgtccttgtctctgcaaaaaatccgttcaagttaaagaaaatcctgtacggacaatatcggaaagtcatatcccgataccgcaaatagcattaccaccatcgccgtcgccgtcgccgccgcctgcggcggcggagagattagtacattgtagtattaagtcaacaatggctgagattagatctggtacaattggtaataatactaatttcgaacagaattggggaaatatcaattctcatcatcaccatcatcatcaaatgagaagatcgttgcagagtaataataatggaaaatcaaatattgggtttacttttccaattctgaataatcaagcttcatcatcatcatcaacaacaatggcggaattcgaagatccagctagagattcactcgagatattcagtccaccatctcatagtaatcgaatatcattaaataataacactcgtaatttcactttcttaactagtcccacatcgagaatgagaacactcaacgccccctttattaataacaccaccaatggtcaaataagtaatattacttatgtcgacgtggacgacggagcaagcgatgccagctcagatctattcgaaatagaaagttttacaactcagcaaacgaccacaactgaatccacaacgaccacagcggctcacccttccatgttccttttcaaccgccaacggcgagattccctcgaagaagcggccgcaatgcgg

SEQ ID NO: 830 - DNA, 8562 bp, Cannabis sativa
aaatagtttgttgatatagcactgatgtggtattaatcaggtgtaattcaagagtctagatgaaaattacgtacatatataaagatatcgtctagtaacaaattttgggaatatgtgtttgcattcttagatattatgtttgtaagtttatcacctataagctcaatttcagcggacttgagttacttgaatagacctttgtagtgcaattataatattggcttgtttgccatatcagcaaaccatttaaaaaatgaacgaaatacaaatgaagagtcacattcgcaatggttgctatagttcgtggacattttttctagagaaaaaagttgagggggcaaactctagaaatgtcatagtttaaggggataaaatcctacgtatcactctcttttctttaacagaagcagattgttaaggactgaaaaagaataatttacagaaaaattggaggatacaatatcccgctaaagaacaaagaaaattgtaccaagattaaggtatattttcacaagagtgatgctaaacattgaacttgttccacataaaaattgcatacaattttctctgaagatccaactttatcttcccaaaaaaatactccacacagtagttatcatcattaccacccaaatcttttggtgtctttaacgattgcttcactatcttggtacaacttttaatttatatttacatctaacctccgttatgcagaccctcttttgatttttaaattattgaatgctcaatataacaacatagaaatcttctgattacattatagattcgcatgtatactagaaattcacttacattgtatgcagtatgcacacatgtatagatttatattatacatatttatatgtaacaacctattctgatactgtattctagcagcttttactttctacttttctagaatttcaacacaataatatgatacaccaaaatcttatccataatccattacatattattataaggataaatataactattgtataaggatgacacagaaattgatcataaggatggatataactaagatgagaagtaactgactggtcatgaaataatatagttattatttttttttttcagtgcttgctattgaagtgtgaactagagaagaaattatcaactttcacatttcaagaagttgccacttcagaggataatatgttggtcaagcatctgcaagatgagcttaggaactatgtaagttttctgcttattcttacctctgtctaattgctagttggtcttttgtgcttttagtttataatgaatgattaccattatgaagtcaactaacatccacaaattatgttctatactggtacttaagtatttgtatacctgtttcctatcattttataaaatattagctatgttggtatttctagttctatatcattgatgttcacactattttactcagtttctttattttatttttttgggactagtaatgtgtaccaaatttgattcaaatggaatagaaaagaataagaaggataatattaaagtactaattgaaatgcatgaaatttgagaccttggttctctttccccaacacaaagctaagcttttagccaaaatatgcatattgcctgcctttcattctttccaataacataagaaagcttggaggtagtgtattatatagctagcacacttggtggacattataaaccataaacatggagggtccttgttcgaattggagaccactgccttattatattgcaaacgtagatgcaagagtcaaagagatatctcaagggactattttagattcttaagatcttatgttttgaaaacaatctcgatgttattctaatggtaagtgtggtagtcaaggaatatagaagcttccaaaagaagggtatggtattcaaaattgattttgagaaggcttaggatttctaagaatggaatttttgtgattttcatttaataagaaggatttttggaggaattggattcatggatgtctttcttcagtatcttaatgaaggtcccttgttcaaattggagaccacaaccttatttgattggaaagataaatgcaagagtcagagatgtctcaagggactattttagattcttcaaaggagtttgtgtcttgaaaacattcttgatgttggtctaatggaaaaagaggttgtcgaggaatatagaagcttcgaaaagcagggtatggtgttcaaaattgattttgagaaggattatgttttctaagaagggaacttttgtgttttgtatttaataagaagggttttggaggaaatggattcatggatgtctttcttcttaatgaaggctaaaatgtaaatttaaggggattcatgatcttggacaaggaggtctcttatttcttagagcactcacactagacgatgtataagtgccttttctttattttagagtagagacaaaggtaaaaatggacaaaaaggtgctacatcagtagctctattataaagaagcaaatgaagaatgcaatagtgcttctctacatgtagcaaagcactatatattctctaaacgtatgttactattacatataatattttattctttcaagagtactttaacaatgtaattttattcatattttaaatttaataatgtgatagtatataaattgaaaagtatattatttaagtaatacagatatagaatatagagaagctgatgtatgacgtaatgtaaaaatttgaggtaaaatagagatagataggttttggtgttgtattttaaagaatagaatagagaaacttataggattgctcttatccttttactttagttgctagtatattggaatttcctcattttaggttttagagtgggaagggtagaaattaaagtcttcatctacaacttaccatttatacacttttaaagaatctaaggagaaaaaaattatatgtttctttcgtaagtcttctaatacacacacacatatatatacatatataggggttatatacctaataggctaataccctaaactacaaaataaatgtaataaacgcaataaattataaattagttacaaatcctataaataaggaaataatcgtaggaattgatttatgttatttgttaacactgcttattgatgacttgcttgttaactaggaaatcaaatactctctcaattaaaccctttgtgagatcaacaaattgtttatccgtataaacatatctagtgctgacaattcctctgtcaatctcctctttaataaaatgatgaaacacttctaggtgtttagttgtcataatgtatagggttatgtgcattactgatgctacactaattatcatagtaaagctgcatgggggcttcatattcaatcttcaattcccctaagtttaatccatattgcctctcatactttatgggccatggctttgtactttgcttttgcactgcttattgcaaccactgtttgctttttactctgccatgtgaccacattacacgatgctattatacaatacccaaatgttgactttctatcatttgttacctagcccaatctacatttgtaaacacgtcaaccttcctcttagttgtcattttgaagaaagattttttcttggtgtttgtttgagatacctctaaattctatatacatacactgcattgagatgtccttgatatgggtcatgcttatgttgactaaccaagcttgctacaaaggcaatatcatgtttggtatgtgagaggtagataagcatccctaccaactgctagtacttcccttgtcaactggacttcctttaaacattttcttcatctctcaagcattcctgtctcctgtaagagatcaagtgtgtgttctttgggatacaaaaattcctcttttgcttctaccaagttccattaccagaaaatacttgagtgctctgagatccttaacttcaaattcttttgccaacatttctttgattaggatcaactcttcagtatggttgtgagtgacaatgatgtcgtcaacatacataatcaacactgacatttaccccttttacaagtataatttctcggtgagtggacagtagcaacaatagcctttttgagtaggagaataactaaaggaaactatcttgatggcttgaggatcaagtttactcctatgttgggagtgaacatggacatggacaaagccagtgcaatcaaaaactttgactagcagagtatgtgtaaaaacatgtaaatagagagactgaagagtagaacacagtgtcttgaactaaagtggtctattaggaaaacatcaccccaaagatattttggaatatacctttttaacataatggcacaggctatttctaagagatgacaattttttcttttcactaccccatcctgttgggggtatccactcatgagctttgatgaactatccattctagagaagataaggattgagggtgttagtgaattattcagtaccattgtttagtacaaagagtgagactacttatatggaattgtgtggaacattttggaaactttgtggaagttttggaatgcgtgataggttttagacttttttttttatcaagaaattgaattctattaatcacaaacaaaaaagattacacaccagccactcacggcagcagcaaagccaaaaaaagcagcttcaggaatctaacattttaactaagttcctgtccttttctttccaattcagctgagagtaaccattgactctatacataacctcctttttttttaatacataacctccttttttatcctatttacaatcacatttacattaaaagagcatctattaaagacactagcattcctatttaaccaaatctggtatatagtggctgagcagcaggcgactttagcatatactcctttgtccaagtcctcaatccaatggatcgagtcttcttaatcgagaggacaagtacggcctaaccaggtttgaatcagcttaacaacatgaatagagaaactacacttgaaaaaaaaatggccatgattttcatctgtcatctcacaaacagggcatttgcagttgtccaagtgaggaagcacctgacgtaaattatctacggcttttcctccgctacaagtgagggtttcaataacatgtcggggggaggtcgttctaagaccagcgacctctttctcttttaaaaaaaaaagcagtttgccattgataacctgccaaacaatgaaccgatgttttggcacactgaaattgttccaagcaaagctgtgatatttgaccttttcaagatcgatttgatttgtataaaaacgacctatcttgagcttccctccatgcccagcattgtcaatggcttgctgagaaacttcctcacaaaattggcacaatttgcgccaataccaacttgaattaagattaagctggtagctccagaaattttggccttttaaatagaccgacttgacccatttcacccacaaggtttcttgttggtgacttatacccaaatgtacttaccaagcatagctttgttccaattgattccatcaccaaatcccaattcgccaaagatttttggcaagcagactttagaccaggatgtgagatgaaagttgcttctagagccattgtttccccataagaaccataagcaaagcttatctatctctttgataatacttttaggaagcaagaagatgttcatccaataatttcgaagccccaaaagaattgaatttataagctgacatcttccggcataagaaagatgtctactcgcccatgaatggaggctaagtttgatcttcttgattatcactccacaatcctccgctttctatttcgttggtctcatagggaccccgagatactttaaaggaaaaagcccttcttcaaactgtaagatttgaagaagatagacctagatgattcgtgtgtgatcattaatgaatgtataatagaccaatgcttaccatgagaggtagtgattttttgaggatgctcataagtcattgtgaataatagagaacatactagatagtggacactttttttgaagaaatgaaacacgagtatgtttagcaaattgacaaactcacattgaaaatcaacaacttttttatggataaacaaagaaggattataaatattaaaaacttaggtgtccaagtcgacaatgtcataacatatttgttcaaaaattcgaattaaaaacagaattagaaatggaacttgaagtcaaatactgcaaagaaggctgctaattttttggatgatgaaaaaaataaagtccgttacaaatactagcactacaaatcatcctcctcgatgatggatcatgaaaatgacaagagattgacacaaatttaacaagacaatgatcatcaaatgttaatttgtgaacaaagattaaattctactttaacgaaagaacataaagtactgatataagaattaaagcaaacaatttaatggtgcctattcctgcaaaaggtaagtgtcatctgcaattttgacactcgatgtagcagaacatggacaaagagaatcaaataaatgagttaaacctgtcatatgtctagttcgatgattcttgatgttcggaaagcaatagagaaattactagtgtgcaattgaggctctatgagactcaggttcaggcttagatttcatagatgttttactcaatagtgtgtataaatgctttagctaatcctgactgaaagaagtcatcaggagaatcaatattatattttgagtatggtaggccttgtcattctgatgactaggaggccagtatggaggtttgccatttccctggagcgcgtgtgaccatgctatagtgatttcaccaaggtcagtcacccgtacaattaggtcgaaggtcaagattggatcttccaaatgatgatgttcctgactttgagacaagtgacgagctctctatgggttgcaatgtaggagtggtgggcatgacacgacaatgtgcttgtgcttcttcacgtatgaccttagaaaaatattattcaatgtaaaggagaacgactaacaaaatagcccctgacttcatcacgataattgtttaacccaacaaccccatctttttctaactattgctgctggagtgtggtgcaatcagcacacaatggtgtggtatctaaggacaaatgtagttcctatgataggttttgtaagtctggaaaatattgggtaacagtgtgattaacttgtttgatatcttcgagtttggtgtggatttcaaaaatctgggaagcaatccaaggttagagcacatcttagcctgttagtagttttgaaaaataaatacctacagttgattttcgaatccatcgaattaataagccaagcaaggtagtggagtaagttaaaggaggttctattctaaacttatactctaaactacagaataaatgataataaacacaataaattacaaatcccataaataagggaataagcgtaggaattgatttccgttatctgtcaacaacatttttttttaaataatcataatttgtcctctcttttgaagtttttgaaggtttttgttgtattttcatgtttaaggattagatgaatgtaacacttatgtatatttgccatctccgcttttgtgtgtttccttcccctattcttattttatctttcattaatacaagtttgttttcttttttaaaaaatgtatagaatagaaaaaaaaagggacctagaacctcacaacccccaagagcatggcaatactttaaataatgtctcacttaaattatgatgcctttcctttatcaagcaatgcttccatatacttcttggtgcaccatttcccaagctaacaaactcttcacaagttctgctatatccacacaagtagtaggagattctctattgtttcacagctcgacaactcttagctcctttcttatgtcaaacaaacatgaatctaattagaggtctatcatattccatttaattggaccaaatagaaaatacaatttccatgattatgcgagtaatatattcacaattcaagaatcaattatgccccccatgaacgtccagatatgtcactaagaaaactatggtactagtttatccttctttaagtgctgattcaagttcctgcatcctctagatcattggtcacgtaggtcgctgccaaataagtaaacttcttattagttgttacaacactttattgagattttctcctagcactgtagcaggtaaagagttaaagggatgccaaataagtattcttttattagttgttagaactctttgttgagattttctcctagcattgtagtaggtaaagtgcatagggggcttatcattacccattttcggcctaactacgcaccttgccatcaaggtgaaacttacgaaattgatcttcgatgttttagtaatcttcctaagtacatcacatagacctagggaatttgttgagcttgcttttggatgttgtagagttggggtgaacatccaacatgtgatttggttacactttccattccaagacctagagtatctgttgagcctatttttggt

SEQ ID NO: 831 - DNA, 6655 bp, Cannabis sativa
gtgaatctcaagtctcttgaagtgttccgaacgcctgactcggaaaccaccgccagtatgtctgttgaactcaaggcgttgcacgagttttgagagcaaactggaatggaagctgcaaaggctgtgtggaaggctttattaaatccggttacctgcaagcactgcgagaagcacttcgatgatggagtttttatgtgttggaaatcaaacaaatttgaacctcgcctccacttcctgcctgatcctgaggccacaatggtccagttttgggaaaagaacaaaaagttggaggaggtcttggctgagcggagaggtcctcgtcttccacccagacctgattagtttatcctttctcaccttcctcttacttatctccccctcaagacaatattttaatttttagtttctattatctttatttttctgtcaggggagaaatctttatggccttaccccaggcctattattattatgtttgggacatcttatattttaagtactttatctatctgctatacctatctttgcgtgtatgtttatgccttagtaccccccttaagtgacttaaaaaggactttttgggtcacttagcttaaatttgtgcgagataatgcacataatttgtctaccacatgttaacttacaaaatgtaaagatgaaattgaatactgagctcctcactaatggtagtatttttggagatgatcagcactccaggcttaaggtactatggatccgttcattcgcttcaacttataggtcccagagcctatttgatcttcgacttcatatgggccttcccaatttggttcgagtacccccacttctaaatcttgggaggccaaaaagatccttcttaggaccgggtcaccaatggaaaacttcctatttttgactttggagttgaaatattttgccactttcttttggtatgctgccatgcgtatttgagattcctcctggagctcatccaccaagtccaatgcttcttcaatagggcttgattcattgctggattgtaagtagttctcctatgggagggaatcatagcctctaccaggaccatagcttcgcactcatacaccattaagaatggggaatacacaattatagttctcgcaatggtcctgtaggcctataatatgcgtgacaactctcaggccaattgtttttgtaggtctagagtttttccataaggatgaccttaagtatcttattgacggcttctgcccgtccatttgtctgtggcctcgcgaccgtagagaagctctttatgactttgtgtttgttgccgaagtctgtgaattcatcacaatcaaattgtttaccattatctgagactatcttgtgaggcaacccatatcgagacacaatgttctttataacaaacaccaagactttcttggcagttataatcttcataggttcaacctccgtccatttcatgtaataatccaccaccactattgcatatttaaccccaaattttcccatggggagagacccaatgaggtctattctccacaccgcgaagggccatgggctagtcattaaggtgatttcgttaggtagggctcttgggatgcttggaaatatttggcaaggatcacatttgaggacgtagtctatacagtctttcttcatggtaggccacaaataccattcccttaatattttcttagagaggctcgaccctcaggttttatctccatagaatccttcatggacttcttatacaatctatctagcttcaagatcgaacacacaccttaaatatggcatgctcagcctccttcgataaagaataccatcgatcatcaagtatcggtgagcctggtactgcacctttttggacatagtcctttcttgaggcagttctcccgttgttatatacttgacgatatggtccatccaacttgacatttgctcgctagtggctgcttcctcttttggcctaatgctaggctccgtgcggtattaattggcaccacccccagcttttctaccttgctgtctgatgctaacttagccagacaatctacatggatgtttttttctcaagggatccgctcaatcttgtaatccctgaattcttttagcaattccctaacagctgaaacataagcggccattttttctctgcgagtttggtattctcctgacacctggttgacaaccagttgcgagtcactgtatacctctaccctattggctcttacttccttagtcaagtttaatcctgctattagggcttcgtacccagctttgttattagaagtcagaaatgtgaaactcagggcggcctgtagtcttagtccgtcgggggatatcatcgctactccagctcccaacccattcttatttgatgcgctgtcgacatatactttccacgtagggtcatctaaatctagcatattgaagttagcctcaatttcattgcactccataatgaaatctacgagcacctggcctttgatcgagacgtgggggatgtagtgtatgtcgaattgacttaaatacatggcccacttgagtagtctcacagaggcttcaggtttctacaagacttgtcgaagcgggtggtttgtaaatactttgatggagtgcacctgaaagtatggcctcaactttcttgatgtaattaagagacagaaagctagtttttcggtcacggggtatcaaatttcttcccctatcatgtgtttactaacgtaatacattgggtgctgaacttttccttcttctaagactaatgttgtgctaactacgttttcagagacggctagatataaatataagtcttctccatgaatgggctttgacaacactggtggttgggccatgtgctgttttagcttcttgaacgcctcctcacaatctttgttccactcaaagttttggcattttttcaagatgttgaagaatggtatgcacttgtcaatcaaacgagagatgaagcgactcagggtagctactaacctggtaagtctttgtacatccttgtgtctccttggggatggcatactcaacaaggcccgtattttttttgggtttgcctctattttgcgctggctcactataaaccctagaaatttccctgatttaacaccaaaagtacacttcttgggattgagtttcattccctagaactgggtttgccaaccattccgagtaatacccatcgcgaataaagatgtttgacagcatttaatccacctctttttctagggcgttagactttactggatctagcagatgccttttttgttgcactgggggcatgtccaagttaacattcaagatgtgagtgattacatagggacttatcctggccatgaccccatgacaccatgcaaacacgtctgcagatgccttgatggtgtcaataatcttgctttgttcttctagattgagactctcgtctaggcaaataactttagttgggtcctgatcgcatatcgtcacctctttaatatcttccatcgactctaaagccgtttcaaaaccaatgcaaagatccaactcgtcttgccccaccgatgatcagatgtattgcaacattataacactatctcgcctctccttggttattccaaactgttcctattctagcctcctgtgtgggaaacttaaggcacgtgattgctttgaagtcgactagggctagttggcccaggatggcattgtaagcggtggggaaatctaccaccataaaggtgcaatacttgaacgtgctttgtggggtgtccggacatagggtgacagggagtctaaccttttccatagggatgagtgtagtcccgttaaatctcgtgagttgtgagccactaggggaaaggtctctgtcagtgagtttgatggctgtgtaagcctctttgaacaacaagttcactaaacttttattgtctaccagtattcttgccacaactttgtttgcgatgggggtctcaatgactaaggggtcgtgatgcgggaaatgtactggcttagcatcctcctgggtgaaggtgatgggttgatccataagtcttggtcattgagcggggagtttagtaatttcccatacctcaccctcatgctccaaagccctagcataacactttagctcattcctcatggttccctctatgtgaggacaccctgagatcgtgcgaccgttccatttgtctagggaggttgttaaggtacctactgatggggcgtacccccaggaggtatctatccttccactgttattgtcggtcccccttgaggtgcttggatcccagtttgtcttgggttcagatgtggcaatctatttttgatccactcatacatgtggcccaattgaattaaactttcaatttcatccttcaaattttgcacttgttagtggtgtgactgttatcgttgtgatagtcgcaccttttactaggatctctccaggaactgtctctgtacaaaggaagaggtttctagtaatgagtattttgtcaggttgtgaagcatacttgttcctgagtatctacaagctccgtgtattgcttatactgaggcatatatcatctccttttcctcttgtcctcaggtcgtgtgctaccctaggaggatctgttgctctgagaactttggggtgctcttgccatactcgtggctggtgcggactgagctgggatttgcgcgttcatctcagagagattatttgcaggcattcccaagttcgactgagctagagcaagagtgaggttttgagtatatctttgagttactgtactttgcttgtctggggtatgatgaggaggacaagtccatgaagctgtgtccctagcatgtatcttggccctccagttaaataatacctgccataggccactatttgtgcttcttccaagttgatgtatttttggaccctcttttgaaagtcttggagactggccgccccttcttgctacaactcgttccaaaaaggagtttcggtctagatcctagcttggagtagtgctagctgctgtccatcgtcaacttttttggtttttgaagcctcttctttgaatctcattatgaagttctttagggtttttgttggtaattgcttgatgttagtgagggcactcacctcaaggttaattttccttgttgccacgaactgtcgtctaaagctgacttgcaacttgttccaacaatctacggatcccgtttctaacttcttgaaccattcctcggcagatcctcccaatgttaacaacataaatacttcacgtcattattgaccctcatgaccgtcattacttagttgaatcaggacagatggtcaatggggtctatgtctcctgcgtatattgttatctcgggcattttgaaatttttaggcagttttgcctccaggatgttcctagcgcagggttcccgatcttcacagtcagactctgagtcatcccctttttgccttcgtgaaaccttagcaatatcttttcagaggattactaattcaggcaaaatcccttcgtttttaaggctccctccaacactggtattgcttgcttctttttctctaagtgattcatgaggtcaccgtgtttattattaagcttctatcttaggtctacaggggatgctgcgactctttctacctctttccccaggtttatgatgcacatagatgcttttttggtcctctcgatcctgagggccagtgctcactctagggagcctgcccctttgcggacctttccctttcaaaaaatcagagcggactttttgcgaaccctgagcctttttcttcttttcagggaaagatgtaggatttttctttgggcacccctctgagggatatcggatagggcttggttccctattcttatgtatttgggtacttggcggggactcttcgtgtgcttctcctggtcctagaggcatggcctttggatgtacgtggattccggccatttccatagctttcttcatggcggccattatctcttgcatccttctattttgttcaatctgtgcggccagttcgtcctcatgatcagccgccttttgcctcagagccagtagttcagtataactgccatcatcataagcatcatacccttcttgattttcttcatattcattgtcatttgtttcatcttgctcttctgtgtctacatttactcgtgaagttgcttcttcgtcacttggattctagggatcttaaggggacgaggttggcgtgtatggttcctagttttcaccattgtaccttgaatcccctattgtcgttttttgagtaaagcttcctatagctctcaatgaaagcaccaaaatattgaccgagattttcagtaactagatctttaatgtaatactaatagcttaggaagagttaatgcaaacatttttatgtgcttagggtattaatgagccttagtccacgagtctttgttattgaataggtgggtatttattacagagaatatttttttgttctttatttcgatcccctcatttaatttcgttgagggtatttatagcaattgtaaggaagaagaaaggtcccaattgtactaagtgccaactttggcatgcacaagttcccaaatctacgaaatagggcatgcataccctatgtagtaggctgcctagggtttaggtgggattagccctcatcctttctgttggatattattttacc

SEQ ID NO: 832 - DNA, 1139 bp, Cannabis sativa
ttttgattttgagatatgagatcaagaaggattattctcaatctagaacaaatcagtttaatttgtagccactttttataaaacattggagcaaacaataggccgataatcactcacattaacaggacatttacttttcggaataagagacagcactgtggagttttttttccttcaaaagcttccctgaatgcaagaatgacaagacaacatcacaaacttcattccccaccaaattccaattatattcttggaaaaaataacttctaaatccatgaggtcctggaaccttgtgacctggaattttccaaattaaccaccttttttacatcatcctttgtaaaaggagacaataacatttggctctgtttagcagtaagtttcggtcaaaattattctgccattcactttttttcttgttctattttggttccaagcaagtctttatagcacattaaaaaatcttcactcacctcttaaggtttgtcataccagtttcctttcatatcaatcaccgagtacatactattggcaatcttatgagcacgaatactgatatggaacatggaagtgttttcatccccttctttcacccaatgaagtttttccttttggtgtagaaaagacaaaaacaccttgtgagtcttcataattctgccaagaacttattttatgcaagataagtgtgataacataggaggagggggagcacctcctgtgcctcatggatactttcaaaattctcgaggaaccagatggcatacctgtgacggaacaagaaataggggatccaaagtgtgataacacatgaggaggcagagcacctcatgaatataattatgagttggaatgtaaggggtctcaacaaactcgatatcttcaagtggtttttgttgggctccttggaactcgagtgaaagctcaaaagttaggtaatctttatcaagtaatgttttctagttggtatttttcatcaaataatccttggcatcagggaggtaggataataattagttggaatccgagaatttttttcaattgatattctgaaatgctttagtcagattatgcatttgaaggtttggaaaataggtaacaaggattccttcttggttacttttgtctatgccttcaatgat

SEQ ID NO: 833 - DNA, 4667 bp, Cannabis sativa
catctaaggccttattaattttgaccggtagctggaacacggacatggtgtaaatcgggacagacgaaaccacatttttgataagcacagttcttgcagcctgagatagtaatctcgctctccagccttccattttgcttcttacattatcaagaataaattcaaaatccttgggcctgttgcctttgataaaaagaggatttcccaagaagaattcatcaccattcattatatcaaatccaaggcttttggagatgagcattcccaaagcagagttgcaattcctagagagaaggattttcgatttgttactattgatacattgccctgaccaagagcagtagagttgaatggcttcctgcaaatgagatataccaagaagatcagcttctataaagaagatggtgtcatcggcatacataaggtgggataccggggggctgtttctcgataattggtatcctctaatcaaccccatctcttctttagctagaaccaatctagagagcacctcagagcagagaataaacagatagggcgaaagcgggtctccttgtcgtaatcccctgtttggagagaaagatttggtaaggcctccattaatcaagacctggaagctgaccgtggtgatgcattgcataattagtctgcaaaaatggtcattaaaaccaagagacttgagcactttctccacaaaaggccattccattttgtcgtaggctttggacatatcacatttaataccaacaaaggcattctttctttggattctgcccatatcgtgaacaatctcatgagcaataatcgagttttccgcaatccatctcccttttacaaacaccgactgaaaaggagaaataatcttatccagaaccacacggattctattagccaggatcttagcaataattttatagcatacattgcaaagactaatagggcgaaaatcatcaaatttgcaagcattaggcctttcaggaataagaacaatagaggttcgatttacctcttttgtgaatttacccgaggcaaagaattcctggacgaaattgatcgtttgtaggccaacagtctcccagtgggttttgtaaaatttggcggggaatccatcggggcctggggatttgagggaaggcatctcccacaccactgctttgatctcttcagaagaagggatgtcaataaggctagcattttcctccagggagatacagggaggaagaatagctgagaagtcctgatccagtctcggcagagaggaggaaaaggagtcaataaacttggttctgaagtactccgtaatactttctctgtcctcaatccagttacatccatcctccaagataccccagataaaattccgttttcttctcacaatcaaggaagcatgaaaaaatcgagagttgcggtctccgttttttagccaaagctctctagatttttgtttccatatagcctcttgtcgagcttctacctcatcaatttccgtcatgaccgcactttccaattgtaaattctcagggctagggactctgttttgaacttcagttaggagagcctccaacatggccaacttcttcttgcaaaaaccaaaatgttccttgttccatttggtaagagcagaggcagttacccggagcttggagcaaaggatgaaactatggtaaccattgaaaacctgcgcccaagcctgctggataacacctttgcagccctcatccatgttccaagcatctaggtagcggaaaggagccttgaaatcagccacatccataaatgtgtcaaggacaatagctgaatgatcagaatgcctaatcggcagatttctggtccccgcctttgtgaattgcgagatccagtttgtagagcagaaaactctgtcgagtttttctcgaatgagattgttccaatcttgaccattagagcaagtaaagagggctccaattccttcaagatccaccactccacagtcgaaaatgaaattccttaggcccctcccttccagatcagtaaccggtctgccccccaatttatcgcattggttcaggacagcatttacatcacccataaccatccaagcatcattaagttcaccgactatatctgtcattccctttcaatactcgtctctgtcatctcttctcggaggggcatacacaaagcacccaacccaagctttgaagttatggtcttcacccacatgagcgattatttttccaaggtccatggagagaatctgaatattccagcccactttccaaaagagagctaaaccacccgcagctcctgcagccgagactgcaactccattattgtaacccaatctttgccaaataccttccatgttctgactcgtaacttttgtttccatgagaaaaaccacatctagattcgtgctacggattagactccgtagcgaattaactgcctggggtttgccaagcccccgacagttccacgagagaactaacatggagatttgggggacatggattggcccgcctcctcggcctgagaaaaatcctgttcactttgagtggacacatcagagagcgtgttcgtggggttgtcgacaatagattctggttctcctgggacaggtagttcgttggaagaccgaggaatagcatcaacactctccaaaccatagttcaccaaggtgggcaagttcagtctaacagcatcatccaagggagggtcaccacaacgtcgtttccccgcatctggtgaatgggggcccaagtcattagaaccccagttgtcacagtccaattccatatctccaaccctccttttcttgccagagcaagagcccaaagtagggatgggctcatgagaacttaggcccactagtttcttcctagccatgcctttcatcctttgtcttgggcctgtctctcttttgttcatagatgggcctagggaccctttgaaaaccattgccagctgttcaacttgagccaaagagggccctgctgagatcaccccactaccttcattcccttcatagccactgacagtactgatgggacaggtggcaacattcccttcaactttttgcatgggcatcatggtgctgttgctcacgtcctcaccaccctcttgtacggttgtaccttcagggatcgtcttggaatttgaaataaccgtttcagatatcgccgccccccgtcaccggagtgccctcctacctccgtgtttcttaacgtctcttgatgaatttccgttcctatcagggccggttcaaagttggtggccgccgcagccgtttgagccgacccacttgcttcatcaccgttaacatgccccaggttaagctgctcaagttccatagcttcctcagccgcctgaataagctcaaaacagtgtttcggtctagacccataatgaacccagggcccatacattgggacggtgtggttgaaatcatcctgaatcatccttcttttctttcggcattgaggctcttcatggcctattatcccacatctgtagcataaacacggcaaattctcatatttgaagtatccccagagacaaactccttcctccattgggaagtgaagccccaccaaaataggcttggagacagggagttccaccctcatacagatatattcagcagtagggaatccgtttttccacatacggtcgatgcttatgagaccccctattcttttcgcaatcgcagtggcattattagtagtgaagaaacggggggaacatcatacaccctgacccagatgggaaagttatcccagtttgtagagctccatctaccatcagcagtgataggtttgagggctatatggccaccgtagacagcccaaggacttcgatctatcacaaactctgcttttctttgttgcttaaacctgagggtataaacatccgtttcttcctccttcatgctccacccagagtagagcctccatttttgggccaggacagaacgtagcaggcctttgaaaattttccgtcgagagaaaaccttgcccaccaccgttttgaggacaaaatccttaccagcttcatcaccttattccagagatagttgaagcgtttctttgtcgatgaattcaacagtttccttgatttcctttccttttgagctcgccatatcggagaaaaacccacatgttgatcacaaccaagcagggggaatagtcttgacagacaagacacagggtaaacaggtacccgggatcacgaaggatcactatgaaaaccagaggagctagaaaaccctagtgtacggacagagagtgtacggagagcattttgatgttgtttatctcaagagtgaataaattattgtgtatcattttcatgaggatagaaacagggccagcccaatcgaggttcgtacacaattttaaaattgagctctttaaaaaaatcgtgtacattaaaattataattctattactaacttttttttaaagattcgttcataaatttttaattataaattttttatttatgtatatataataagaaaaaaaaaaaagtaaaaaatagaccttttctttaaaaaaaaaaatgggccttaaaaaatgggagtcttgtgcaatggcctaagctgcgcaatacttaggccgaccctagataaaaatatagttttattatagcaatttaagtcgaaaaaaaaaaattcaaaatgacta

SEQ ID NO: 834 - DNA, 2756 bp, Cannabis sativa
catgaagactaatcttggagagggcatgatagtcatccgggaacatctttccggactcgactatcattccacaagacaccttcttagattgatgacagtgagtaaacaagttctcaaagataacgattgcggaaacctttttatttgaaggaactataccacatatatatttttatggataaaaatccaaaagatgaagaaatattttatagtgtaattgttgacccttttgttttaattaaattaagaaatcaagagctataaatttgtctacaaaaggaaaaggtaggttgtacaactacaaattcattgatcctaaggaatgttctgagctcttattactagttgagctacctctccaagtgcttcctcctttctcccaataaaatcttatttaaacgcaatgtgacagcctaggtgaatgtttgtattgtagctaatgataggaattttattattattattatcataagtcagtagtagttagtccctgacacttttttgggttcaacaatgaagacacccattttagtagctggctaagaattcatttcttgttccttagttggatcatcaattaagttaggtgatcactaactcactcaacttaacttgatgaataatcattgttcatatcaaatatgaatcccaataatgcaatatagttatagatactcgtacactatttttttttttttttttccttgagacacttaaaatttataattacactacaaaataacacaatagatataaacatatactcatgtgttatttaaaaaatatatatgggaaggaaaaacaaaaaggtggaacatgttgaaatgatgagatgtacatatatatattacatatatatatagggcatgagtgtataattatatgttccagctccacttccctgaataaattaattctgtacaatttcatttcctatagaattacaacattttatataatcattttttcatgctgtctggacaagttcactttctttcttctgttcaacttttggagaagacgcaattaccttcactcgaaatgaagcctgctcataaaacattttatttatttttaatttatgtttagaataattaatgctgtctgtatcaattatattatatatgataaaataagctaatatatactcaaagatcagttcttttttctaattattatatatattttttaagttcacaatatatggtatgtgaaacaaatttcaatttaaataaatgtgattaattagctgaaaaaaagtatattgtttcgatgcaaaaaatgttataatagaattatgtactaactactcaccttcttgtctgaaccaaactcaataacatcagagggtcgaatacgagttgggaaatttggaggtattctgtaacgtctcccctcattactgcaaattattttgaaaattattgtaaataaatatattaatttgtaaagataatttcaaaaatggattcacaaatttaataataataatcaaactgaaataaagtctttttagaatacttactctgagacccatgtcccatgttcacttctcaaatcggtcaagaaaaatgcaccatttttgtaattgattcgtgcatgtgtttttgaaacctgagataaaattaatctctccaattaatgttatttttaatataaaaataaaaatttgacacaagattttttaatttagagtacatattattttgagaattgtttttaaatttacggtttggattactccgtttccaagtgggttgctacgtgaattttgattgtaatttaaattgatatattggttgctatgagaatttttatatgaattttcgtaaaaatacaaaaaaataaaattgtttagaaatataaaaatgaaaaaaattccatattattattacctggtcaaaaggaagagtaatggatgttgctgaaacgacgtcatcacttggtgtttttctgaaaagaaattggattatgatcatcattatattagtctaattaatgaaattaaatcaaatatattaagtgttacatttaagttcttgttaattagagattaaagaagggtatgctttttgttttgtacccaattatgaaggttttgttgtcatctctgtttaaacaaatgggttgtgatgttgcactattgtttccagagggcagaagaaaccacctacaaaaattagataaaaaaaaagtacaaaaatatattaaaaatagaaagaaataataaaataaaaatgaagagtaatgatcaaagacacatactctcctttcatggcccgttctaatgcatcatcatcttcaaaccatttacgaagctgatcatttgcctacatagatatttgtttttaacaatatcttatgttaatatgacaattataataagtgttttttgagggtctgaaaatacatagatagataagatagtttactttatctgagagcctacaactttgtggtcttccttcaagttttgagctgaaaaataacaagtaaaaataatgttaaaataaataggaaacattgctaatttgaataaaagtaccaatatatatacatgtatatgtagagaagagaaagtttacctattaccacctaaaacccaatctaacatcaatggcatagctatgtcgatgaaaaatcttccaccaactcttccgggatgtggtatcctaaactttgtcaaaaactgcagtacaacaaaagctacttgtaattaatattaagaaaagaagctcaatatgcttttccttttt

SEQ ID NO: 835 - DNA, 3752 bp, Cannabis sativa
aatattataatgagtttaaattaaatatttaccaaaacagagatagacagattctcaatagatatgaatcatgtcaaggaaaaatggggttgggtggtgagagtgctaggcgcactcccagacatctgggtcccatcatcatcatcatcaccatcaccatcatcactccccttcaccttcttctccttcttctccaacccaaccccatttctctcatttcccatatttccatctttacttctcctctcacaccatttttctctctaaccttaaagactcaaactttattcatcaaaagctctgttttttttttttttttttttttaatgaaaggaactcttggtcttctgggtagctcttctaatgaggagtcatcagtgggaaaagtagtagctgatactaaggttgaagaagagtatgtgggtatgtcatctgaagttgagtctgatcttgaactgggtttggggctaagccttggtagttgtgttggtgggaaatcatctaagccgtccacttggggtgagtgtggtcgtattttgatggctaaggacttcccttcttctcgtggaccaaactctcgtttgactaatattaagactggttctgttgctgttgggactaaaagaactgctgctgactctgtttctcaagatggtggctcttctcctcctagggtcaggtattgacttctctctttctctttctgtttggttactgggaaaattgaggaaaataagcagttgggtatttgaaattgttaccaagattatgttttgatgatttcattatgatttgtgctgtgaaaacagtcaggttgtgggttggccaccaataagagcttcaaggttgcacaatcaatcaaagagttcaaggacaggtgaagatgagaagttgattggagaaaaagaaaaatccaaggagggtttgatgaagaagaagaatattaataataataatgatgttaatggcaaagaacaagggcatcttggttatgtcaaagtcaatatagatggtgtagctatagggaggaaagttgacttgagtgctcactcttgttatgaaactttatcccaaactttggttgacatgtttttcaaaccaaatttgactgtcaacttgaatggttagttacttagttagttaccagttaccactaagcttttggatgatctttctttaatttgttattttggtattgactgttgtaaataatgtctatttagggttaaatggagagaaggagcaagcagcaaaatcttccaagcttttggatggatcttctgagtttgctttgacttatgaagacaaagatggtgattggatgcttgtaggagatgtcccttgggggtatgctaattctctttagttatactaatttactagataattgtagtttcatttctttttaacaatgaaaatatgagaaatcgtcgatccaaactagctcatcatccaccctgagtgcactatgttgtccatggaagataattgatcaatttagtatttgcttatcatattgcatctttctcatttttccattttaggatgttcctccgctcggtgaaaaggctgcgaatcatgagaacttcagaagctaatggactcggtatgttaattcgcagttaatcttatgtttagtttcgatttcaagcaattttttagctcaagtcaagttggattatctattgcagcagctccaagatttcaagaaaggaatgaaagacaaaggtgcaaaccgatatagaatgattttctactttctttgttccttttctttataatgtgccacagtttttacaacagaagcaaagtagtagagaagttgatgagatagtgttttgctgagattggtcttcacaaccagttttatatgtttgctctctcttttttttttttgattttccaaatatatttttatttcattttggtttaaaaaccactctttggttcttcttgttgtctttaatcttcttttttatggtgaaatattagggctatgttagtttttacttttacaacttcatatacagtgctagcagaacagcctgcttacttggttaactgctggttttctcatactgtaaatattggagtatctttatatatatatattatatctctagagtgttttagtttgttgaaagaaacatcttggtgttgttttgattattgttaaaaaaatcctattatttttggttgtgttttatattttatttactcttttattacatcaaaaattacatctagaataaataggatttataaaactcgaactatgactcttgtaaagtttttgtctttgcaaagatttctttcgaactataaaaatcgttgcgaatatcccctatagttgcattctgctcatttctttaaataatttgttgatataacactaatataacattaatctagttaaatgaataaatagcagtctaatgataaataatgagagtatatatgtgtattcttaaagctactatttgtaaatttgacgccattaaattggattttaggtaacttgatttaagctattaaataaattaatgtactgcaattatacttataatttatacctatataaataaattattttgaaagatgatcaaaatgtaactggaggaggatatttttaacgatttgcataatttaggaagaattttcgcaacaagaaagaaggtaaaattttattagggtaaaattttatagcagtcatagtttagggtaaaaattctatttattcttacatcatagtttagggtaaaattctatttattcttacatctttctataaactagctaagaaaacttgccttttacagcaagtaatctcatagaggaagcttaagtcttgacaaagtttcaaactaaattggaaaattttctattaacaaatgaatctcatcatgagaaaagggtataaagaagtttcaattttttttttgtttatttattttgatttattgttggagatataaaataaaaataaattattttattttttatacttaatattttggttgtttaaagaaaagtattaataaatatgaaatatttaatattgagaaaataacaaatttaaaacaaccaatttatgtattattgtagattagattgaacgaacatctttttactacttagtcgtttctattagtcgtttctacatcaagtatccaaccattttttcaaaatagtcttattcgatctcaatagaagaatcggtattttattactaactacaaatacgttataatcaaggattactatatcaatcactatctacttcaaaaatcccaaatgaaaagagaaacatttacatgaaaaattgttgtccttgctcatgaaaaattggacaatgttgttaattaactttatgcaatcataacactttagacctctcaagctaatttctacccaattcaaggaatagttagtggtaatggctttaggcataattaccttctttttaaatgattgtgggacaactgtattttacaatatatcaaaaatttcaagctctttttttgatttgatagtcatgctttcttgctggtttccattttatatttctcaaagtaatttataaagtttcactcaaaacaaaattaggttattacttttcaggacatgaccacattctctcaatttggccaaagtgaaagtgaaatttgagtgactgaaactcacttcagtaagattttctttctagttcatctaacttcaaacaaaccattatttgttatgtatttcttttt

SEQ ID NO: 836 - DNA, 2284 bp, Cannabis sativa
ttatttatttattcaaccttggttttgcaatatactaagaacatccaatctttgatcatcactaaggtgagtaggaaaatcaaccatgaaaacaactctcaaatcacctctactttttccttgatctttagccaaaggcataccttggtttggaacaatcttgacaaagccagggtaaataacatcatcaacaacactcaatttcatcttctcaccacccaatagaggaatggagattttacaaccagttagagctttcactaaaggaattctaatggcgaattctaaatcgtcttcttctcttttgaacaattgatggcgtttctcggcgattatgaagattatgtctgctgggaaggagcctggcttctcattccccattccttcaaatgtgatctttgttccctttttccatcctggtttgacttttatggtcaacaattcttcttcttgtactattcttctatttaaatcaaaaaacaattgtatttagaaacttattatgtatcataaacaattcaaactgtatttccaatccaagcatatatgagtgatttttttaactttttcaaattcatatagatttgtatattataaaaaaaaaatagtagcacttatattattacgtaaacattatttttttttttttccagaaaaaatatttattttttgagaaatttaatggaagtgttatttttgataaaatttttatacttttcatttaaatatatatccatttacattttttacagtattatataaaaattacaagaataccacatgaaaataacatgaaaacaatataaaaataatatacaaaaaataaaaaatcaacatctaaacaacaacaatataacaaaagtacaacataaaaataatgtgaaaacatcaaaatactaaataaatcataaaaactataaaaatatttaatattctatatatacgtatttttataattcatgttttgttatttttgtatttgtatgaaataatccctttttcttttcttccaatgggatcacacttgagatgagacacacctcgtctaacaccatctctacatttttcgactaattgtaaaaccattttgttaaaacttataaaaaataatatgcattttataaaaaaaacattataaaggtcctactttcaccaatttctttgttattggcaaattaatatattttgatgtcatttggttaataaccgaaatcctagggaaacttatgcgcgaatatggagtttctatggctttggttattagctaatagccaaagccatagaggctccattactccttcgattatcttttacacctttcgttttgcctggaatgcttttagtttcgaattttgttaaaatcgaagttaaacgacctgaaaattaaagctaaaggagagtattgttgtagtgtattctattaaaacttcttgatactcaacactttctagatggggatattttgtaaaaaaatatcattttcttaaaatgacaaattaatttactcaatttgagcagtctgttttacgtatataaaatacaaaaataacataaaatcaaaaagaaaaagagaagagagaacaaaccctaaattattaatgacgtctcgagtgatcttgagcttcttttggcagccataacacaactcttcgagagtgcactcgagttttttctcaatgggtggtggtttcaacattccagaagagttggagaacataataggattattattaatggagctatgtctactacttggaattttttcaaaaaaattaggtggtggagatgaagaactagaattacaataataataatccatagaacttttccttttagggttagtagtagaattattagggaataaataattgtctgcactttggtgtttatacatattattgttattattttggttgttttgactattgcatctaaagctatgattatgaaatgatcctgttgagctcatacttttccggttctcatttttctgtttaatatttttgttaccgagatcctgaaaaataaaataaaaaataattttttttattatatatcatcaatcagagttttagtaattaaataaatactagtgtgattaaaatttattaaaaaaaaaacaaaaacaaaataagattgatcgtgatgatcttccacaaaacgtgttagaaatttttgatatcctttaaaaaaaatctaggcatcttaaaaaagaaattaggacattttacaaaaaaattaaaattataagatcattaaaataattgtttgggtatgatcatgt

SEQ ID NO: 837 - DNA, 1388 bp, Cannabis sativa
catactatgttcttgatcatgaaatccaaggcctttttggaggtgactgtgttcattggttccacctctacccacttatgaagtattcaatgacaactatggcatatttaactcctcctttcccagtagaaagataccctactaagtcaattccccatactacaaaagcccatgagttgctcatgaagcttatttctgtgggcggagctcgagggcctttagcataacgttggcattgttcacacttctagacgtagtcgatacaatcattttttatattgggctagaaatatccttgttagatgatctttttgataaacttggtccaaatgtgtggtctctgcaaaaactttcgtccactttatggataacaacacttacctaagtcccggctatgcatcttaagtatagcatggatagccctcttaaatacagtttttcatccatgatgacatatctgaaagcttggtactagattttcctagtggttgttctgtctgcgggtagctcttcaaaacttaagaatttgttgatcggacctatccatgaggcggagtggtctatgaaatttacccctagtgcttgagtacttggcacagagagttgagccacgagaaccacttcacattcctctatttttgcatatgttgctaacttggccagcatatccacaaaggcattttggtccctagggacctgccgaatggtgtcttttgaagtgctgatgtagttcaacagctttggagacataagcagccatcttttctctttttgtttgatattctctagatatttggcttacaactagctgagagtcactataaacttcaatatttttagctctgacttccttggataggtgtaaaccagcaatcattgcttcatcttctgccttattattggaggtaacaaatttgaaccaagagaactctatagttggagcccttgaagggagattagcattatcccagcttcaatacctttctcattcaaggatccatgatcaacgtaaactttctagacctcttattctggaattggttctttcgaattgtcatttattttgatgcattccacaatgaaattggtcagggcttgacctgtgattaagattctcggatgacaatgtatatcaaattgactaagctctatatattgcatacttaagcggtctccctaaggaatctagtttttgcagtacttgccaaagaaggtggttcgtgagtaccttgatggcaagggcctgaaagtacagtcttgacttccttaaggctatcagtaagcaatagaacaacttttctgtcatcagacacctggactccctactcagaaatctcttgcttacataataacctgaaagttgtaccctttctttttctcgcactaag

SEQ ID NO: 838 - DNA, 576 bp, Cannabis sativa
tttattattatgatgtatgtaatgcactcattcatatcaagcttcatttaactcagccatttgtgtcatcttaacaggtttttttctgaggccctggagatcttgtttgcatatttgggagagttgcaactaagacaacattccataatactcaaatgggagcaactttttcatttacatttgctgattttgatgatttcgatagtcaagttgaagctgttcttctgagatcaattagttttggggcagaaaacactaagagtgccctgttacggtctgtaagcttcaatggccgtgagtcagaacctgtagaaactatattgaaatcttatggttcagccaagtttgtattagaaggctctcttagcttcaaggggaggagagaactggagagtatgttgtccttcaaaacacctactgcaagttttgagaacgaagtgtttggtagaacaataagctcaaagattcgagatctcgaagatcaattgtcgaaatcagataccttctctgaagaaatatttccttctccagtggtggaaccaggtaacaatagataccaggcagcattaaagttac

SEQ ID NO: 839 - DNA, 3492 bp, Cannabis sativa
tcgaaaaactatttcggtaaaattaatattcattcaaaaatgggaggaaatactgttctaaccaactaaactcaccattacttagtatttcggtttttattccatttcctttatttgattgcaattttaagtattggaatccattacagcagaatgactattccttcccaaaatgagaggaaaggtcattccaaccaactaaacttagcattacttagtatttgtcgattttcatttcttttgtttggttgcaatttaaagtattggaaactatttcagtagaataatgactattacttgaaaaatggaagaaaagacagttccaaccaaccaaacaaacttaccattacttagtattcgttgattttccttccattttctttgttcggtttctaaccaagcaaacttagcattagatggtatttgtaagaattaaagtaatgatttgtttgttttagttgagtttagtttactaaaagttatgttatcattagcagctttatgaatcaatgagggatgtgacatgggcgttatttgcaagcagaaaagctctaaatgcaatcacaataaactaccgaaatggttttgttcaagcctttcatagagatcacagaagcaacaacacattctacatttactctgatctttcaaattactcaataagtgctggacaaaactatgatgcttcccaaatgctttcatcacaccaagtatggaatgatcaatccatacatggaaatttctcagccatatggtacaaagagccactcgatccaatcacaggcgataagttgggcaaagctaggcctatcccaccagaggatttgatcaatatcgccggtctttcacaagttcccgatggtgtagcaacatggcatgttgcagtgagcaaatactcaggttcccctatgctttcagcagcattgcctgttatggatgctgctaataagagcatagtcgccgttgttggtgttaccaccgccttgtatagcgttggacaacttatgaaagagcttgttgagtttcatagtggccatatttacttaacatcacaagaaggttacttgctttcaacttctactaatgctcctctcttgagaaacacaacaaaagggcctaaacttatgatggctgtcgattctgaggacgaggttattcgaatgggggcaacttggttacaaagaaaatatgggaatgagtttcctcctagtcatgaagttcatattgagaatgctcagcttggtaatcagcaatattacattgactcatttttcctaaaactaaagagacttcctctggtaatgattctttcgaattttgtaatattatttctctttgtttggtacttattctcaattttttgtaacttgtaactgttattaatgcaggtgggtgttataattattccaagaaagtatataatgggaaaggtggatgagagagctttgaaaacattggttatattgatatctgcatcattgtgtattttggtgattggatgcatttgtatttttatacttactaatggagtatctaaagaaatgaaacttagagctgaactcattagtcatcttgatgcaagaagaagagcagaagcttctagcaactacaaaagccaattcctagcgaatatgaggttcgccttttttgtttctttcttagatttttactcttattgttgggccctatttatccaacttcactttaactctcacattagtatgatattatccgttttgggcctagcctgtaagaatttatttttggacaccttctaaaagtcgtcatactaattgaataggggacttgagttgataccccacatcgattaagtatgagattggttggtcatactaattgaacacacccttctctcataggggctagtcttgagttatttgattgaattagagacaaattattaaagacttgttagtattatattgtgtttcatagatgagaagtaaatgacaatttttttattggattgatgacagtcatgaattgaggacaccaatggctgcagttattggattattggacattctaatatgtgatgattgcctcacaaatgaacaatatgctacagttacacagatcagaaaatgctcaacagctttgcttaggcttcttaacaacatattagatctcagcaaggtgagttatgaatacacaaagttgatatgattatgccttagtatcaatgatgatatgagtattgaaatattttatattctatatattataggttgaatctggaaaacttgtgttggaagaagctgaatttgacttaggaagagagcttgaagggcttgttgatatgttctcagttcaatgcataaaccacaatgtggagactgtcttagatctttctggtatgactttttctgttttcgataaatttgcttggttagaaactttctatcttagaaaatcaaacacaaatttgtacaagatttaacaatgttgtgtttcttcattacatctagtctaatcttagaaactttctatcttagatgacatgccaagattagttcaaggggactctgcaagagttgtacaaatatttgcaaatctaatcagcaattcaatcaaattcactacatgtaagtaaacttaagaattaccattggtagcaacttagcaagtgtgttacattccaagatttcattgtttcgaaactcatttcgcagcgggacatgtcatacttagagggtggtgtcaaaatttcaatacctttaatagcacagggagtaagttccctcatgaacataagaaacaaagatgtgcacacaagatgaaactaaggcatcaaggtcatcatgcaagggaaacacctaagaaagacaacaaaaagattctttggtttgaggtcgacgacactggctgcggtatgaaccttcaaaaactatctgtctaccacatgaaatgggctctttttctttctttcaagttttctaaattgtgtcattggaattttgtagggattgatacaagtaaatgggagtctgttttcgaaagcttcgagcaagcagatccctctactactagaacgtaagtattttaaattattttcattctagttgagcaatgaatttttctgtatctaactctctaatatcttgtttcaggcatggtggtactggtcttggactctgcattgtaaggactttggtgagttttaagtctaattcttcttaaatgtaagattagacatgggaaggaaaacttagaaagtaggacgacgagtttcattttttggcaatgagtagagtaactcagcatctcaagaccaatcttgaaacggatatagcagctctttttggctcgctattgttttgaaccgagtgctctataaccaatgaatagacaaaggaatgaaactttagtttaatgtgctcgaaaccaattggtaataagtagagtaactgggtttgttaattatattaacacttttgttgttgttgtcaggtcaataaaatgggtggtgaa

SEQ ID NO: 840 - DNA, 3026 bp, Cannabis sativa
aacaatgatgtttaatgtatgttttggatagtttataatctatgtgaatgtttaacaagagaaagaatggttgtgatagatgctactacacaaatatgccatttcttcaatacaacaaagtaaatacatttgtaagttggaactccgagtctcttaccttatcaatcaagcttcatttattgcataattaaaggctttactatattaagaaaactgaaacagtgatgtattgaataagtacctcaggtcggtcatgatcaacatgttccaatataaagcactctgcatcaccacttttgagtgaaccttcatacttaattatgaagtttttaccactgaaataaatagtatacaagagaatttgtaaagttttgcatagatcatattcaaaattgtgagcgcttaacaaagttattgtccgaatgattacccgaagcgctcaagcattttaagttcgttagtgacatgatgtttttgagctttaccatgagggcctgaaagcaaaaccagtcatgaattatcctatgattcctatcattaccaggtactccagtcaaccatttattgaagcgaacaaaacaatggttccaatcctagtctcaagacctgacgttaagtccaaagtataatatctaagaaaataaaacttacatttaatagcacacattttcccatcactaattcttcgggctctgtaaacaatgccataaccacctggatagttttgagcaaaagtccagaaaattacacacaaatatcatattctttagattatcagcaacagaatcaaaaaaatatatgatcttaatacctgaaccttcttcatcctctatgagaaaattgtcgaactgagggaattcctttttctccaaattgttctgcaaaaaaaccaaaagagttcttgtgagctctttcttattaactaaagagattatagaaagacaatcaatggttctcaaactcacctttaatgacatagacgttggatttactgcattttcttttccgttattactgttctttgagttatgctccccagaatgacgcttctgatcacttttacgggatattataagtctactatattttgatggccccaaaagcactccttgttgtggaggcaaattcttgctcatgcgcttcaacttaatatatgatttcacaggttgcttctgactggaagaattcccagatactctaatgttggtgtgagtttccaatctatgtgttcgctctttgtccattgccgaaatactcaccagattttttaactccttaaaacgaacagttttttctgtatctcctttttcctcatgatgatcaatgacacctttgttaccactagttcctgctatgttttctgcaacatcttctatgtgatgtatcaaacttctgcaagaatgagcattagaaaagccaccctctaatggcaaaccattacctattttatcttcctctccgtcaaatgtgagactccgacacactccattcttagatccaacagcttcgtcaacatctgctttcttgattgataatgaatcatgaaagttatcaggcaaaggtaaggtctcaatgtagttgtgtgccataatttgatcctcttggattggttccagaacacccaaatttgattctttatttaccaagctgcaaggcaaagttgatgtatgtacatatccagaacactcctgctgctcctctaaaacgtttgtcccagcactaccctcatctctattgtttgtcccagcactactatgattaaaaatgtttgtcccagcactaccctcatctaaaatgtttgtcccaacactaccttcatctttcccctggttaccattcatcatggaatttttcgaaaactcacagttggacccaagaagtaaagggacagtagctttatctttattacaaatttcctatacaaatatcatcaacatgacaggggacaaaaagaaatacaacagtcagacagagaaggacgaaacagattcgatccacaagccattaaaacacaacgcagtacaacttcaactagactaactgctgataccaaattcaagaaaaaatattatgacccaatattttctttataattagtgaaggctccgacgaatgcgagtagcatgtaatacaacaaaacaaaagttatacaaatgaaatcaaagatgaagtcaacaacagtaagaacctaaacaaaattattaaattttgaagaatcaatcatcataaaacaatgtgtgagaaagtattaccttaatttcagtaggtaacgacagcataagttgatcgttttcccctgccattaagtcaatcaaaatcagataaacgaaagagaaaaaaaaaacagaaaacaaagcttaaaagacaaaaggttagctcaataccttgatacaataacctccttttagctgccgagaacacaaccggatcaaattccttttccttccgcttccgaaagtaggtcttaacgtcaaaattcaaatgcttgttcgattcgttgaattcaattccaaacagcgaaacggaacccccaccaccaccggactttgattttgacgcaaactctaccatggacgaaaccaccgccatggaaacagtaacgagttgattatccaaaagaataatcggcgagttagggttcgagcagaggctcccaatgtaatccggcgtcgcatcgaacaactcgcacttcgaagaaagctctccaagactcgccggccggcctatgctcaacaaaatcgccaagatatgccacgctttctcacaatctgcggcggtgtttacaccaggcacttgttctgagcagctaagatcgtaatttgacatagcttatctcaatcaaaccgaatctttctcattagaaatcgattatctgaaacccgaagttcgatctggaatagtgtgaaacttgaaagaccgaaacgatatgatcacatgagaaatgtagcaatagtataactgtttggtagccgagaaaacgcaagatgggaaaagaaatggagagtttgaacttttttttttttttt

SEQ ID NO: 841 - DNA, 971 bp, Cannabis sativa
tagctgtaagactcattttgtcttatctagtaattagggcaacaagtagaacaatagaaatgaatgattacgatcatgactttgacttgatgagattagtaccattttgacaagaccctattatatatgctatatatatactcattgatattactaccttaatctccccgagctagtgattgtaagtgtagtctctgctaacctagctcacagaagatcccaaactatgattggttgaatatctcaaccactacacttatgccacgtgtcaaaaacccattatacgaggagtaataaccaatatacaccgccaaaatccaatacacacaacttaaaatatatattatatgtttcaaaaacgaggacctaataataataatgatgaaaaagaaaaaacaacagaagagaacagaacagatccttttacagtctgatcataacacagaaaactgattaataaaaaaaaaaaagagtgtgtgtttgatatatagtgcaatatttatgctaaactctttcactctcttttactctctctctctttgtttctctccatgcatcttctataatcagctaagtcagaaaaacacagataatctcattgggtcgtacccctttgtttattttgacccattttcatgtaaaactcttccttcatctgtcaccctcttatatcataacttgtctcattagattttgattttgatcattaagaattatagtccaataataattatatatatatacttatgtaattatatatgtatataaggaaactggtataagaaagaagagagtaaaggaatcttgtaatgcattatgaatgaaagtagtgaaaaatcattagtgtgatgacgtgatcaaaagattcgtgtgtgtctatgtgttttcaatatacatttatatgaatatggtaaataataagtaacataacattattattactgcttaaacaagaaagccctatatatata

SEQ ID NO: 842 - DNA, 2694 bp, Cannabis sativa
ctaacataccattaggcagacttttttacttaatggatatttttgtaaaattcaaaaccttaacaaaaagacaaaacaaaaatgttaaattcattttcaactgattataccaagaaaaccaaattgagaaagaaacacaaaatctaatcttattaatatcaattctattcccacacctttggatatctcgaaaagtttcaaataaaaaccaaatctttatttctcttcattttccatttccatggcttcctcttcttcttcatcacccttctctctcctcctccttctcctccttcttcttcaccagactctgttaacctcctcagccaatctccacagactcaattcaatctcagaactttccactctttcaccaaacgacactacaactccacccactcattacttccaagtaacaaaacccattaacctccccaaaaccaaaccctgttcccacctcgtcctccgccatgatttcgctttcacctatggaaaatcaccagtcttagcaccttactccccaccttctcactgcccatctcatcagaaattctcaaagatcgttcttttatggaatgccacttccaaaggaagacagttcgatcggatttttggggtttggcttgatggggttgagcttcttcgtagctgtacggctgagccaagaactaatgggattgtttggagtgttgagaaagatgtgacaaggtactattcattgttgttaaacaagaatcaaaatcaaactcttgctgtttatcttggtaatcttgttgataaaacttatactggtgtttatcatgtgaatgtgagttttcaattttatccaattgaggaaaatttggttgatgggtatgattcttgggctgatttagtaatgcccatttcaagaaatttgccattaaatgatgggttatggtttgaaattaagaattcaactgattttgcattgaaagagttgaaaattcctcagaatgtttatagggctgttcttgaagtttatgtttcttttcatgagaatgatgagttttggtactcaaatcttccaaatgagtatattgatgcaaataatcttactagtactcctggaaatggtccttttagagaggttttagttagtattgatggtgttgttgttggttcaatatggccatttactgtgatttttacaggtggtgttaatcctctcttatggagacctattactgctattggttcatttgatttaccttcttacaatatcgaaatcactccttttcttggggagattttggatggaaaaagtcatgagattggttttaatgtcactaatgctttgaatgtttggtacattgatgcaaatttgcatctttggttggataaaaagagtgagaaaactcaagggcaggtttcgaaacatgttagcacaccgcttgttgttagtttggtttctaatttttcgggtttggatggaacttttctcactagcacgagccggtctattaagttaaccggatgggttaactcctcttatgggaatatcactactggttcagttcaagatttttcttaccaaaactcaattgtgatgggaaataatggaaatatgcagattgtgagacaagacatacatttcaatgattctgttcaagctgaaaattctcaatctttgcaagttcattcgttcgaatcgcttaaaaagttctcacttttcttgtattctgacacctttgatcaaggcaataagacttatttatcgatttcgaatgttagtttgggttacaatgagaagaagaaatctaaaggctctgctgattcgggattcgaaaaaagtagtcttaagaatcatcagagtggccaaggaaatatggttgttaagaacaacttggttgtaagtggaattgggaatacacaacaagtttacaagtacaatggagttgatttgtgttactttagaaacataagtagctcaaattatacaattctttatgataatgttggaagtaaatgcagcaaaactacacagcttcataatcacagaggtcttgggtttcatagactatggcctattcattctagaagagtttcactttggtctggtttagttaactctaagcctaaaggaggataaatcccttttatctatttctaagtaagtttttgttttttaagatgtttttgaggatcctacaattgggttctccaaataaaagtgtaagcatacatagaaaatattaatattattgttggatttgtatttgggtaaatactattttcgatcttgtgttttgtaaaagttattgattagattttctattttgttaaatgaaaaattagatgtatttttcaaaatagtataaaataatatttattgtcaaaataaaacttaataataagttgatctagatgtattatgataaaattggttacattttgtagattctttcgtattaggaattgttttcaagttggttatataaaaaaattattgaaaattgaaatcaatgtcttatttatattattttggaaaaaacaatgtctatcttgtcatttaataaaacagattgtccaatcagtcatttttataaaatacaatattcaaaatgatattagggagaataaatctcttttatattcttcttctaagttctaagtaaggtttttttatgatgtttttgaggatcctacaaatgggttttccaaataaaagtgtaa

SEQ ID NO: 843 - DNA, 1181 bp, Cannabis sativa
agagagagagagagagagtaaaacttaatacataggattccctacgacaaactaaaaaaggaaaattaaacagaaaaaagattgagagaatgagtgactcaatggaggttgtgtttttgcgtttggccccattggaaaaacaaaaaagaaaaaaaaaatatattaaaaaaaattcgtacgttgaggacccttggtggcttgttttggttcaggtcacattcttcttcttattgatcatctttggagttactttcataggcaagccttgtttgggtacagggaaagggccatattgtatcccatcatcatctcctaacacttgccacctggtaattttcaaagacatgaaaagtgttaacatgtgtggtgtacaactcagatataaacaaagttactagcaataaattattaattatatgcagagtcatttttcttgtgaatatatgttgtgtgtaactatataaggcttatttaatttaagcataacaaatatccgtacgtggtgtaaaacgtacagaaaggaattggcaaagtggcttgtgacgacgtggcacaaagtcatactcgtatgcgtttctttttcttttgtctcaatctaatcttcctaataatatcaatttatgcgtacagctgtggaacctaataagtttatgtcctttagcagcggagctggcctcatgatcatatcaacaaaaggtcaaagctaattttggtattcattagatctaaacttgtttctagaagatatttttcgttaatataaaagaaaaaacaaaaataaaaattataaattaaaagttaaccgaacatgaacgtctaggcacactcgtgatccgaatatacaaagaaattatacacgcacgtagtacgtacggtttcatcaaaaaaatatacataaccctggatgactatatcacgtggaataataattttcttttagtgtttatttcatttgtgaagaaatgaaacgttagtactcttccacgtccccaatatacataattggagtgggggccaacgaagtatgatatttcggatcaacgatagggacaggaatctatgtacgtaccaataatgtacgtatcagaatctctctaagtctatgaaaatactcaaagtctatgaataattttcccataaacatatccacaaatatagatttttggcagatttttttctcc

SEQ ID NO: 844 - DNA, 2044 bp, Cannabis sativa
gtttcaaacttcaacatattcacatgaataagtaacactaattaagtgggaacatcaacttttgttagtagagtaaacaacccatctctataaacaagccttcgaaagaaatataatatgaagagcatataacctgtgtgcaactttgtttctttatttatagatgtgagaaagaagaaaaaatgaaacgcataactgataaagaaaatgcttattactgattttgatccaacgctaaatgactttcggtcggctgatcctctccttgctcttctttctgttcaaccaccaaaaatgtcacatgtagtaattctataaaattagactaaactaatttgttgtgctgttttggatatctgaagtgtcaaactttttctcaatcagaagcaagtgaaattctttggctttctcagtcaacccaaaatctgtaaatgcattcaaaaccataccacaggcagcaatatcgaaagctgtagaagttgattgcttccattggtcaataacttcgcccacttccttcaaattaccaagcatcaaatatgaagaaagaatacaaatatagtttcttcttgtcatcttctgcttcgtcattctcaaagatttccatatttgatcaattctgtctccgttccctagaccagcatgtaaaattatgagaaaatcatatgttatccactccctttgtgtaatacctttctcagctgaaaccaaagaattagattccccgtttgtaaaatgacctgtagaaatatatattttagcaagatttatgtatctctgccaactttcatcacagccaggatcagatctcatttcatctaaaatccgtttaacttcatcaacattcatagttgcagcacacgaacttatccatagattgtaagtgaagatatcaggtgtgaccttctttcgtttcagttcttcaacgactaaagagaccttctccacttgtccaactgaaatgtacatcgtcatcatctcattgtatgtaagggcggtaagggacaagtctgaatccttcattctctcataaagactctcagccttctcagtcaactttgctccagcataagaatggaggagagcagtgtatgtttcactagtttttgaggtgaggggaagaccttcaaagtagcgctcagcagcatcaataccgaacacttttgtcattaagttgatgcggatagcatagtcagaaactgatacttcaagcttatcatgagtaaccatccattctgatatctgcaagcttgtacggaaatttcttagatcagaatgcatccaaatatacataacattgttctctaccattcccccaagatgagagtaaaggtaatagtgctgacaagagacataatgtgtcccctttccccaacaaaaggttaataaaactcactaagacagcgtaatattgttttctaccaagtattctgtgacagcagagttacagagagtgaaaaaaatcctaaagacagaagtttatgagtcacagcaactgttacataaaaccttatgagtgaatgaatctgacatgaaagatggattccatgtgaaaccatttcttgagtaactcttacatagatatgtgaaatcatatgaactagaattatactaatgcaaccttctaaaatgttttgaacaaagataaagcaagctgatgttgggcaaagattgtctttaaattaagaggtttatgtactcgagagtctactatgccaagtaaataataacatctctctcctcttaagcaagatctgatattctgtattgtgatcaaatgttcaacaaacttcatcttgcgcaaaccgaagtattgataaacaaaaaaggagaatttcaatgaaatcaaactcataagttaacaatcaaggcttcacataagggaaaagagtgctatcacaagccattttcaactactttcttttgcttctcttctgggattatcctaatggcatgccactattttagttctcaaattaagttacatatttattgctgaactatgaagcttaagaaaaatgaagatttgagttaagcatttgca

SEQ ID NO: 845 - DNA, 1956 bp, Cannabis sativa
tgcagtgtttgttggagcacatgtacaggttctacatcttatcttaaggagagaatgcaatagaaaaccaactgtcttagtttttcctgtccctggaggcccccaaaccaatttaacagtgttatgatgattacattctctagtctcaaaacagctccaaactgcagctttctgggactcattcaaatctgaattgctgagactggccttcatagctgaatatgcatcactgcatttttcgtcagcacaacagagagtacaattttctgcctcctgcaaaaaccagatcgaagttatgcttgggaataatagaaagaagtataaaagatcttaagttaattaacacacacacacacacacatattccacaatgacataatgatgtgtaagtgcaacataaaagcaagcaaagggtaactatcttacagaaaatgggggatgcagaacttgtttaatgaggttcatatttcctgtttctggatccgaatgtagtgcattccatatacggatatttgtagtcatgttcatcagcttaacagcaaaaagggtttccctctttctgtttttacccatgttttcttcaatcagaataggttttgacgacgaaattgaaagtacaagacaactagactcatcccttaaccatctatgctgcacaaaagcaatgaggtaaggtcttcttggccgatccagatcattgatgcattttggtcttacatttgttatggcaatgaggtctcctacaacaagatcatcatcctcatcctcatcctcatcctcattgtctttattacttttcttcttttccttaccatagttcaattgaagaatgtaaaacaagtcatgaggaagttcaaaatcattacttggttcaatatccacaatttcataacagagtgactctgacaaagttgctaagtttgaagacagatccgatcgagtttcttctataagcggagtagtgaatgattccaagtattcacttgttgaagagaaggtttgaggaatctgcttcacctgtgctccccaacaagcttagatatttcaatcataaaagtattcaaacttatcctcacataacacatacagatcattattagctataatgctctcactagaaaatgacaacaacagctaaaacaagagtactttgatataaatacatatttataagaaaagtgaaaactctacttcattccaggatggaaaagaaaaacatctcatattatatgaaacaaacaattgtcataattaaaaccaccatcattaatcaaatccattaaaaccctttttgtgtaactataaacttacataatattacctgggttttatagagatcattgtttagaacatcttggatggaccaagaaaagacataatcgattaagctgcttctcatttccattactgttaactagttgaccctttttcttccaggtatcttcgtacagagctataaggcaaaagaaagatgagtgagagaaaataatccaaagatgacttaccactgaaggaaaagaactctaattggaattattcatacatttttataacatacaacagttactattaatacaccactactaagcaatgttctcctttatgaaaaccatgaaaaagagacactccattatcaaaacatgcttttttgctttacacatgggaagaacagaaacacggattttaagcattggatcatagaatcaaatgtctttttctttttcctaaaaaaaaaagatttgcaagttgactacattcaattgacagtaacatatgctattaaatatatatatatatatatatgggaatcttagtgctaattatacagtggtttataaaatttagaacttaccttagttagaacgagtagtagtcatttgaaaaggaccaaactctgttcaactattcatatttgcgatgtacaaataaaaaacacagagcaaaacagtagaaatg

SEQ ID NO: 846 - DNA, 1288 bp, Cannabis sativa
gccgccgcaccgtgtgccgccgctttctcaatcaccgcgaatctcgggagattccctctcctcgccaaaactacgcacccgctaacattcacccctgcccgtcccagcgcacgatagtcctcatccctgccaaaattcacaaacaccgccttagctcgcgacaccgaaccggacggcgagtaagcgtggtacggccgaacaacgccgtcgagtccgatctttcgcgtcccactccgctcggaaagagggaggtcggcgcgggtaccgttgctaaaatgcaaggagagcgaggagtgagttggataagagagaagggcttcgtaagggacggaatgggagtcgaagcctaaccccttgaagtggttgaggacgtagttggctgtttcaatggagggttgtgttccggcaacgtgagggtgcatggtaaggtggcgtaggtaagcagcgacggtgtcgtttgaggcggttgagaggaaagtgtggtgaaagcggagggcattttgggaactcgagagtggtgatgatggagagtgaacgtaatgcagtgtgtaaaaccccagaatgcaaaggagaatgatggaaatgaaggtgactaatggtgatggctttccagtaaatatcgtgttgtgattggaccaaagctgcgccattttctcgggaaacaaacactactactacaaaagaatttttttttgtatatataatctaacataaacaaatatagccgaatagggtttcttaataaacaaaaaagaagaaaagaacagagaaaataagaaaacacaagagagtggaagacagagatgagagcaaagatttaaattattgttaatttctaattttgtttttttagattaataataaataaataaattacatttgatcttagccagagttgagaaagaaaggtacaatctgatgtaatggtatgtatgtacaaacatcgaagcagcacaatctataattaagtgtatgatccaatttattttattttatttttctatggtcctatccaatggatgtgatttaaagaagaagaaaaaaaatagcttttgagtttggtacgaattatattattattatataaaaataaaagagcatgggcatattaataaaaaaaaaaatatgtgagttgaaggagtgggagtgggagtgggggaatatgaaaggagcactgtattttgtatagtagaaattaataatgtggagtgagtctagtctagtctctaacttttagtccgagaaaagtgaagtggggtcacagtagtagtacacttgtactctcctc

SEQ ID NO: 847 - DNA, 2929 bp, Cannabis sativa
atttaaaagattgtttcagcatagtaacttattaacaaggtatggtagaatgaatactcacccaatgagattgcactgacaaatattgtaaaggctagaatgaagatgatcaacgacgcccttccaaacaaaataataagctttcttacaatgtgctgtccaatgaaagccgcaacagtagccacagcaacaaagtaagcagctgcaaataaatcacatcacgttttagtaaagtaccatattcggttctgctgtaaaggtgttcaaaagaacaaatgaaaattagataatgatcaaagaagagtatatgtaaaggacactaaccatagggaactggaaaacgttttagaaggtaatattctacaacagacatagaagaggagaacgtcattgcaaatgtggctgttgcactcgagacctacacagaagtaaccaactaaattataactgattcaattgcataattatcaaataattaactctttaaggttgaatgctattttgcttttactatgctagggaaaaactcaatccccttacaagcaatactatatagaattcctcttttgagatcatcccaaatattcataattcttacaagtgttccattatagtccatcccaagccctgtttatattttgcatagccatgttcaactcacctgagggggaattcccatctccaaaaacataggacccataataaatcctccaccgagcccaagcaaaccgccaactactcctgcaagtaccccacaagcacaatagataaccagctggtacactcgccaatttgttccctcatctccctttgatgcaattattctccgtcccttgtataggctaactgcctcatatgttgatactccaacagaaactgggatctgcagacagtgacagtcattgtttaatgagttgttaagttttgaagcttaaaacacaattctcttttattaggattcgaatattattgatattcatcacataacaaaatattacgcagagaaactttctcggaggaaaaaattagccacaacatgtgttagaagaaatacctgcattaagttgattacccaatatgctactgaacaagtagatgtatattgctgcaggcaacagggaaaaattatttatctgctagcttcacaatttaataaatatcattgtagcactaaacatataaatgagatgtttaccttgccgatttgtaatccaaggaatgatacccagacaaaaactagaagtccaagttccttccaatacacattctcaagaactgtgacctgaaatgttttgattgatttagctttctttcacaactgtctagccgaggaggatagatctttgcgtaggaatacttacctctactttgtcattgttcctctctgactcattgcttggcccagcaggaagagccttgtactctgcatctccaccattactacctaattgatgaagacaaatacatagggaggatattagacatcaattacgagcaaagaacagccagtaatcttttgattatattaatgtaaccatatataaactcaccttgtgatcccaaacgcttagcagcctcctaaaatttcaatgcaaatagttagaaacattggtatttgacgttcatgataagtgaataaaaaagaattgaatgattttctcagctcatctgatgacttcatttccaaatggacaaaatgaagcacatacacttgattatactgtaagtgagattaccttcttcattatggtttcctttttccacgtttcaacacccttaaaaaatgcctttgtagatgtgcctgtaagtcaacattatagtgaggttatttactaataccattactcatgaaccatttcaatttctttcatttctcaacaggataaacaacaaattgattcatcctttacctataaagagaacaataagcaaaacagtgaccatccaatcggcaaagaccacattgaaagcaacaccaatactaattcccagcatgagcatcggttgtatgagcaatgccaaatcatagtcaataatgggcatatcaagagttggatgccttagcttaaggttatagtaaacagttgaggcagcagcacccatgatcatacctgacaaaacaattagagtgcaaagttggtgaggacatagttacgaataggatgtcaataaaatccttcaaagaaatttacagtactaaaggaatccataagtgccaatcaaagagctcaaacttgacaacatccagacttaaaacttctgaaaaatccacaacattgctcattatctaaaaccagtagttaagaaactttgattccagaaaaacgtcaactggtttaaaagttcttaggaaacattgagtaagggaaacacaaatttgaaacttcccaatcaaacagcatgtataaagatctttccgtacttcagttaatattttttagcgtactagaaactacatagcatatataggacttgcttactcaagaatttaaataagatccatttagtattccgatagcattgtaaactgcgttaaacgacatcatatagacaacttctacaaagactcaagagagaaagaagttccttacatttggaaatagctgttgctgattttgcatcaaagccaataataaggctaagcatagggacaaaaatgccaccaccgccaactccacctacacttccaaaggcggcaccaaaaaatccaattatagaacccagaacaattcgccacccaaatttcatgtcctgtacaacaaaattcacagtagcccatgttttagttgaaccattaggaaaaaaaattatgtctttgaatagaaaaaattatcataataaaaacaataatcatgccctgaacagtaaaaactaccgtttacctgttaaacttgtattttatgtattacacatcttaaattttaaaaag

SEQ ID NO: 848 - DNA, 6125 bp, Cannabis sativa
tttgggccgaggttcggaattcagggtctaagtctgggtctgggtccgtcgtctgggtccgtcgtccaggttcgggatccaatttcaatagtctggggtctggggtctaggttccatggtttttaaggtctaagtatgtgagcaaacatgtaaaatgtaatatattagacagaaaaatattatttttgaaaattaaaaactacattgtgatgttttttgttttctaaatttttaaaactcaattttaaaaaaaaatggccgaaccactccatacgttttttttttcttttattattttgggccaaattgcgaatatggggcacaataatttgggccataaggaagggaagtccaagacagaagagagcctgtattggagttggagggggtatacggtgggtttagcatcacaaccattcaccactgttcttccctgcagtcgcgctagcccccctgtttctctcttaaatctctgccccaactacttttttcaggtatgctcccaacaaaaactataaaaaacccaactttgccgcttttctatataatctatccgctctttagttaagctttcaatctttttttatgagttattattaattttctggttcagattattattatatatgtttatgtgagagtgttaagcaatggcaataggccctgcttcgtctctgtttcgtgcttatgcttctaagaaacacgtttcaaggattagggtattgctatgtaatcaatatctcgctcaacctcaccctttgctaactcaaaattcctctaagactccaccttttcgagtccaaaaccgttcttttgttaagggtttgattggtaaaaagtgttttggattactttcccaaagagatatttttctgggtagtgatggttttgatgtgaaacccttttcttcggttgtggatgatgtggacgaagatactaatgttaaaagtgaaggttcagtctctgaatttgatgctgatatggggcaaattgttgaccttgataatgaaattgggggcaatgtgattgcttgtgattcggttatttccaatgaacaagaagatgatgatgattatggtgttgatgttgaaattgatgagaattgtgattctggtatggttgaattggagaagagtgagggttattttcatgttcagtatcgtgatcctgtcgaattgtatcgagagcttcgcaatgctgagaagggcgcgaaacagagacggtctgattgggatacactcaaagaaatatttaatttgttgggaaaatcaggttgggcatctgatcaagctcttgccatttacattggcaaagcttttttccctactgctgtgcaaaaatttagaaactttttcttcaagaaatgctcagctgatattgccaagtatttggtaactcttggcccatcagatgcagctgttaagttcttgttcccaatatttattgagttttgcttagaagagtttacttctgagatcaaacagtttaagagtatgattcaggcagctgatctcactaagccacacacatggttcccttttgcacgagctatgaggcgtaagatcatataccatgttggtccaaccaacagtggtaaaacttataatgccttgcaaagatttatggaggcaaagaaaggtatttattgcagtcctctcagattattggctatggaagtttttgacaaggtgaatgctcttggtgtgtattgtagtcttcttactggtcaggaaaagaagcatgttccattttcgaatcatgttgcttgcactgttgaaatggtttccacagatgaattgtatgatgttgctgttattgatgaaatacaaatgatagcagacccacatagaggttatgcgtggactcgtgcattgctcggattgaaagctgatgagatacatttgtgtggagacccgagtgttctgaatattgttcgtaaggtctgttccgatactggtgatgagttgtgtgagcagcattatgagagatttaaaccattggttgtggaagcaaagacactcctaggtgatcttaggaacgttcggtctggagactgtgtggttgcattctctagaagagagatatttgaggttaaattggctattgagaagcacactgatcacagatgctgtgtaatatatggtgctttgccaccagaaactcgtaggcagcaagcgaatttgtttaatgatcaagataatgaatttgatgttcttgttgcaagtgatgcagtgggaatgggcctgaatcttaatattaggagggttgtattttataccttatcgaaattcaatggtgataaggttgttccagttccagcttcccaggtgaagcagattgctggaagagctggtcgaaggggaagccgctatcccgatggacttactaccacattgcatttaagtgatctagattacttgattgagtgtctgaagcaaccttttgatgaagttaagaaactgggactctttcctttctttgagcaggttgagctgtttgcaggaaaactccacaactcttcattctgccagctacttgaaaaattcggtgaaaattgccgtcttgatggatcatatttcttgtgtagacatgatcatatcaaaaaggttgcaaacatgttagagaaggttcctgcgttatcacttgaggatcgattcaatttttgctttgccccggttaacatcagggacccaaaggctatgtatcatcttctgaagtttgcttcctcatatggtcagagtattccagtcaatatttatatgggcatgcctaagggttctgctagtaatgacaaagagctcttggatcttgagactaagcatcaagttttgtctatgtatctgtggttggcacaacatttcaagggagataattttccgtatgtgaagaaagttgaagcaatggctacagatattgctgacttattggggaaatctcttgttaaagctaattggaaacccgaggcaagaaatgcagggaaaccaaagcctcaacagaaggcagatggttatgaaaggccattgtcactcattaaacaatatgatcagtaagttttactaataaactttattttttccttacttgtttccaacctggggcattatgttgtttgattagtcttacagtgtagagttttatattatagctctagtttagctttgtatttcacattcagtatgaagatacgtctaagctttcggcttgctaactagattattttcagttgtttcttaagttgatgatcatggcagactgcaatgtatttattcgatattttactaaatgctttttaaaaatattttggtagagaatggaaagattataaatgtagatcatatcatattatgaaatagttgttataattcagtttacttctcatgttttcatgtgatacaaataaaattattttatttttcctctttacatcttgggatgttaataaattttgtggtcatgcagggaaagacacgaaaggttcctacaacacaagccgtcagagaaagtgattgcttagcttgttgcaggtaatttacttcacaattgtttgtttgacgctcaaagttttgagtttgtaactgaaatgattttttaaaaaaaaaatacaagtaactaatgttactgaaaccttaattagtatagactcatttggcttgattgtaaatgtaaggcattaatggaattcatgttgatgaaattggacaaaaattataattttattaatgttgggtacttataactataaattattaaatttatgcttatcttatgtcactattaaccttgaaataaatacgaactcatttttgatctgcaggagcttattatttgtaggtgactgattcaatgttcacaaccaatgaaactgagcgtagcctgtaatgctgtattttagttttggtgaggagagaacatactagcttgtaaagtgaaatttttgtagtcaaaatcttagatagagcataacaacatgagaccttagtatttttccatcagcagactgtgaatgctgaatgcaaaagccaatgttcactagacatggtgtcataaacacaattttgattcgcaagtactagagaaaagatgttatttatgaagatcagagataaacggttgttgttcaagagtcgatttttgctaataataatactgaaacagatgtaattggaagaaacgaaaaaccatgcattgtaaatgcaacatgaaaaggtacatttttcgtttctagattcagtatacggtgcagtgctatatatataaatattataacagatctttaattccttaatatttcctaaacctttgtaatataagaagggtatgaactatgaaggtcccttcaggtcggttacactagtattatatagtaacaccataacatggatcatgatacaaaaggcatactaaagaaacagatccgaaaacatttttgcttgatggaatatccaaaaatatcaagcaaaaaatacctaagaaccgaaacccgggggcgacaacgagtatcagcaatactatatgttaaacttttctttcttgggtgcaatttacagcttaaggcgcaccacattctatctttacctttgtttttaatatatttgttttcttacctttctccgcttcttggcggaaacaagtattgatattcatcttgggcaggcttcaaagcaaaataaaaaacattgttaagagttataaattcgaacatgaataacccccgaaagaaaatatgtggtggaattagaaatacctttattaccttcttcgtatgtgagtacgatttgactacgatcgacaactgggagtaaattgatactttctacttctacatcacacacgatacacttgtgtgaaaaattacgagcagccaaagaagccttcattttacagtcggagcaccacaacaagtgtcgacaaggaaggttggcccacaacaccttacgctgattgcagccaaaacactttccttcctttatacttgccttataattctgcatcaacaaaatattggttatagcttaaaatgaaacgaacaagtgctataactgcaacaacaaattattcttctgtacttaaaacgcaaaacgctcacgctgtagaaatcatattctcgaagaaagtagactgattggttgtttctttttctggaaatggcctccaaaaccagatgtcgttgctgaacagcctctaaatactgtcccattttgtcattttgtagccagggacgaaagtgaaagagaggatcttccttcaagaactgtacgaaacttggttgcacattaaacggtgttctagtctgagatggactcaaagcggaggagaagcttttgaggccttcaccaacattttcatcagaacttgatttagtgtcactgtcacctccatttttaattgactctgcactaggtggagcattgggtgtggtaggcaaatggcatacttcttgctgttgaggcctggtattttttggtaaaagaaccatgtgatttgcaattccacgtcttccaattggtacaaccttaacacaacaaaggtcagagaaacatttgataaagtcgctgagcttagagtaacctatagaggcgtggtccaaatccaagccaaatttatccttgaaatccttcttcagagatgagagagcatattctccttcccttggctgctttgataggttacgtaagaagttcgggagccatttcctgaaaatctttagccaagtaggcacttttttattctctttaacttctttgcaacaaatcgtggtttgtccagaaattaatttattggcccaagaacctttctcaggcaagtcaccatccacaatcttctcacgggatatctgtgcttgaggttggcatttaccatttttctcttgactgtcttgacgagtcgagactttctgggggcaattttctaaaatccattttgggacaacgcttttaatttcgactaccttgtctgatatggtgacgtaatgtgcttgaacagcagccagaacggatttctcatctctgaaggttacaaaaccaaagcctcgggaatgaatatgagctcctgtttgtgttacaagaactaaagcatcttctactggcccaaacttttcgtcaaagaacttgcgtaacgaatctgtt

SEQ ID NO: 849 - DNA, 4621 bp, Cannabis sativa
atcttttgagttcaacactccatgaacaacttccaaagaaatctcctttttgccatatttgatgctgttttgacatcttggtagggtaatgacaaagatttgagcactacgattgcttggttatttttatctactttttgtttaatgttagctaaattaacaattattttatttatttcttttgagagaatcaacaattatttcattaaacttattaatattttcaaccaaagatagagaagaattcattcttaatccatatatacatagctgttctaacttagctcatatcctttttgctcttattagttttcttttagctccattggatatatacgtgatgatggtataatatgccatactccatttcatatatttcatcttacttattttctactaaaagtttcatttctcccatcacctttgcaactttttggtgcacaagcatttccttaattttttttttccatagttcaaagtcatttgattggcatctttttttaaattgtgttctcaaaattcttgatgaggaagcttgcttataaagaattttgctttgatctgtagaaaatataaacttgattcttatgttgaagatcacaacctaacaaaacgaaacatagttaagtaaactaaacacaaagatgattgtgcagttgcaagatcaatgtgatcttgagcctactctaatttgaaaatactcactacttttcattgatcctagaacagcgttaccaaatactcgagctacaagataaataatcacaacaagtttctttttagtgtaatctctcaacactcaagaaactctcaacccagagccaatacttttaaatagttgtgttgcttcatataatttccctattctagcgcacaaactctcacttcaagctgctttaaataggctattgaatcaagtatcgaaattgttaagaataaccgttaagttagtttggccaattaacatagtatagaattattgccgcgaggtagccgcagcaaactcttacatggagcatcccttgttttgggcaaggccttgcttcgtggcaataattccctttgatcccccatttttttttaaacttgttttggtcataacttttaatttcgaactccgttttagatgtttttacatcgttggaaagcttgttacgagctctattacttggtttaaagttggagtcctaaatttgaatatttattaaatgtgattttggaattaattctattttatataaacccgagattatgactaagaataccgacattttctcgagatcacttatggacttgaaattttcctcacactttgaaattcaggtaagaaagctaaccttgcacaaagagtatagtgtagtagcgcgcttgtaaattatgtgaatacttagttagaaatgtgagttaggattatcaccctaaagtttccatttctatgcatgcaatacataaattaattgagtatatgtaggttatgtgatcaagacataattggattagattccgtgaccaaaatcgagaaaaaaccctgataagacttcatataataaataaatgtgtgagtgtaattaggatgcagttgcatcatcataagcgcggtggtgtgttatattagtgcagtggtacgattatctacgcagttgtgtattaagtgtgatatataggctatatgtttcatttggggttcaattatgctttcttgctgggccttggctcacaggttctttgttgtataggtaagggtagagcaatgtcaagctagccataagtttgatagttttgatggtgaattgtacatgttccgatcaagctagaccataagttaaattgtttttgttcacttggctcattggatcccgattaatggaattagcagaatgtaatcatgacatgtggcgtttccttaattagggtgttacaatgtggtatcagagcgtcaatattttaaacttcctgaagattgaccgaacatgtataatcatcgtcaaagacaatctcgactcatggtgcagtaagtgttgagagtaaatacttatttgcatgtgattaaatgtttactacttttagtaatagacaacatatgagcatcgagagaataattttatttaatgaaaagtatagttataagttgtgagtaataattgttatatataggaagaaattgtacttgttaatttagggttttggcatgaagtgtgtaagtgcgggattggtgtctgactcgctgggattgttgaatttagggttatttgaaaaagaatggaccttaataaatcaactagatcacagggtgggcttgtagagcatgattttaatcaaaccattctaccgacactgccaatgcctccgtaaaatcttaaggataatatgagcttgaataatgctaattctcttaccaactggcagcagatatttaccgaaatgtgagctattgcacttcatcaaagaggaagagttgaaccagattagccaaccagttcaaacagctttaatagaaccagtgattcttccaattcttgctccagtggtagctaaccctagaataactctacaaccacatagggattcaatttttaaaaggtttgtcaagttgcaacctccaacattcctgggtggtactgatattatcaaggcagagcagtggatgagtatcgtcgcccgtatcttggataacatcggagtagttggaattgagtgggtcaactgtgttgatttcatgtttcaagagcatgcccacacttggtgggattcagtaggtcagtctcaagacctcaacattgcgacatgggaggaattcataaatctgtttgaaaaaaagttttacatatcgccattcgtcaactcacatggaagaatttttgaaactaattcaagggaacatgacaatagctaagtatatgttggagtttgaccatttgtccaagttcgctggtaacttggtaccagcagaccttacccaaaaataaaagtaagttacgaggttggatgccataattagccgacacttgaagattactactgatcatgatactttgtataagaaagtcgtagagagagcacttaatgccgaggaggcagagcaataaattaggaaacaggatgctaaggatgccagtacgacatcaacccccagtgttggtagtaacttcagtaagggaaccggtggcagcatttcagatcaaaaaaggaagatagagaatttagatcatcaaggttgaattaagcgatttcgtggaaatagaagcaaccgtcaaggtcgtggtgatacattcaaatcatactcgaagtgtcctaagtgtaagaaacaccatcaaagtgaatactgggctgagatgaactttcagtgtcgtatggcaggctattttatcaaagattgtcctcaagctaagaaagaggaaccaaataagagtaataattagaattcaggacgcttatttactgtaactcatgtgacgttgacgctagttcattagttgtgacatgtcagttatctattaatggttttttttatacggtgttatttgattttagaactacacactcaagtagggtaatagaaaattttcataaacttctcgatatttatgctttggggtttggaaccctgttaccatttggataattgatatatttactagatggattatatctttatctttttggattgatggctgtaagttaaccacaaacttagtcgaatcataattgtgtcacttcgacataattttgggaatggaattcttgtccaagtatggagcaacgattgattgtaaatggaagatggtggtgattgacctgataatgctaaaccaattgtatttgtgggtacgatacaagaatctcgtatacctagaattttagctttgaaagctaaggatttaatgaaaaaggagttgcatagggtttctagttacatttgaggatattggaagacctataacaaccagacctgaaaaatacgaggcttgaatgtgagtttttggatgtgtttttggatttgcctatattacctccccaatgaaaaattgagttcgccattgaattagtttcaggagcggaaccagtatctaaagcaccttaccgaatggctcctgtgaaattaagagaattaaaggttcaactacaagagttactcaaccttggattcactagaccgagttttttttccatgggatgcttctattttgtttgtaaataagagggatggatcactacgaatgtgtattaattatcggaaattgaataagctcactataaaaaataagtaccctttacctagtatagacgatccgtttgttcaactaaagggtaaaacagtcttttcaaaaattgacctttgatttggttatcattagttaaggatcaaagatgaaggttttccaaaaattgcattctgtactaggtatggacattacaagtttttagtgatgtcttttggactcactaatactttgacaatttttatggatatgatgaaccgagtattcgaaagactatctagataagcatgttatagttttcattgatgacattttggtgtactcagaatcaaaagaaaagcatgaatgacatctcagattagtactacaacgactgcgcgattacaagttgtatgtgttgg

SEQ ID NO: 850 - DNA, 1726 bp, Cannabis sativa
ctattttttaaccacacctctgtagacttccggcaccaaatacttcccttcctaaccatgagctcttttaaggttgtttggatctctgtctcttccaaagatgaaagtgtcatatagaggtttgttttgaacccatgttaatctctcttctatctcattgatcttttgatcacaatcctcaaaggtaccttttttaattccaccgatgtagggctctctttgtatcattaagctttttcataaggctctggttatcctcttggtttatagggagtcaagcttgtttgatggcttcaccacaagaaggttctctactccaagcttaaaaaaattgaaagatttataacttccttttgttccatcgcatgtatcaacaaggatgaacccatggtacgagactgaaataggagaattagtaaccataacactaggataggcagtgatccattcgcctaagcccactgctttatctagtctctcccttataaatgccccattaaaatgaatttttcgctaggtaaattgacaaactttgaaacctaggtcgacactttcagtattagggaggaaatcttgcaaaaaacttgtatcatgaagagtcactctattttctcctcttttctcccatggacgagcaatgacattcaaattgcacatcatcaaccaaaggagagaacaacctgatactttctgagttaaagatgcccaaaaatatattttttctaaatcatatggtcttccataaactgcaaataacatccatcttacaattttaataggatcccacacaaccgcttcaacccagtatatacatttacgaccttcacgcttatatcctaattttaaagtaaagtgaaacctccagcaagttcgatcgctgggatagtatgcaaattttgaaaaccaatagcattttcaatatttctaatcccctccttttttgtctttctttccataaaaaaatatactccaatttgtatcttctagccaagcttggagagcttgggttgcctgagttctaacttcaccccaagaattccaagataagaaccacatgggggaggaggggacttgataagggatgcctccttgcccaattgagattttttaacttcttgctacaatatcaaccagagtattatccacataagcatccttttgcatgtcatttttcttatgatcattgctctttaattgaaatggaattacctaattattgattgatttttttgatagttcctttaagctattgaacctccttttcgtctcttgtaaaatcttttctttgtggaagagctcccagcctcgtggtctgatctttcagcaacaaatttagttacttctagagaaggaaagaaattaagggttcctccactaatacctccagagccttgctcatcagcatttagttgaatcactataataacacacagacacttaattttctcttttttgggcccaccaaaccttgtcaacttttggagatttcaatattgtcatgagagattcttctttgggcctcattcttattcatttgggcctggtccaagagctcttccactactcctagaagatttgaattcttggactaggaaacaaaggtggcttctggatgctgatatggagtccttgacttacacatttcctcatgtgggatttccaccagttggtctctagtgggcccaatatcaaccataaagcttgaaagaactgttggaaattattt

SEQ ID NO: 851 - DNA, 7822 bp, Cannabis sativa
aagacttattatttattcatttttttaattctacaaactattattttaacaaactgatgttaataacataatttattcaaaaagaaatctcaagataaaaaaataagaaaaaaaatctcaagatagtaacactacatattgaacacgtgcgacgcgctttagcacgtgtgagcgtttgtttttgacccggtccattacgtaaacactgacagttctaactaaaaataaacacaaattattattttattttacaatatctatacgtgataattgctttaaatctttacctttttttttaacgttgtaccttcaaattatcatctgtaatttttcttttacatatatagatattaataaagaactttatattgtttgacaagattaatctataattaattagttatcattatgataaaaatcattgttatgattttttttttttttttaaaaaaaatagttaaatttaaaagttaaagttgccatatttgagtttggacccttaaatttgacaaaataagacaaaacgacttttctagtatttgttaaaaagaaaaaaattggagaaatttgtaacaaagaaaggtcgaaactttgactaaattctgacaacgcagagagagcgacgacttctcctccgtcctccttctccttgagcagctttgagaaaattctacgaagctcaaacctttatccatccatgtaattttggttaatcggcattttctctttccaatttcgtattctgtgactcgaaacggaagtgttagtagaagaattgaaaattgaattgtgaaacggagatttgtttttcggtttttacggaattcgattcggtcaacgaagcaaagtgtgtagcctgtaggtgatcggtttacgggattggttgtatgaagaagatgtttatggaagtttgaaggaatggagatgacggaacgaaggcgaagactcatctcggtggtttcgggttctgctttaatgtggttgattttgttgtttggtttgttcagaaaagtgtatgctaattcagaaggtatgttacattattattagtattttgttgattttagttttattttttgtgctgaaattttagttacaaacttacgaggggatgctgtttggtttcctggaaaatgaaagaaaacgatgcgttttttttttttttttcatttgataattttgtggtagtatgtgttaatgtggtcaaaattgggtaattgtgatcaaaataggtgatgccctgaatgcgttgaagaccaacttagttgatcccaataatgttcttcagagttgggatgccacacttgttaatccctgcacatggtttcatgtttcctgtaataacgacaatagtgttactcgagtgtaagctttgtttactttgtgacatggttctttgtagacttgactttgctcatatattcaattcatattgagatggtgatattatattattctgtttttgaactcatccagtgaccttggaaatgcaaatttaactggtacgctggttcctcagcttggtcagctaacgaatctacagtacttgtgagtcatatttttatttcagctgagttaaattcggtttagttttgcatgaggattttcaagttttaatgaatttttacaattctgcttgtgattttactacttgtggcctggtcaattgactggttactggttaggtgtgtgaacatgtatgtatgagtgatctggctttgaatcccagtagatatttctagttgaaagttaaaaaaaagggaccactgactgtcttgtctgttcatgcaatggatatgcgcttgctgtgtaaaaatataatactaggagctcattgaaattctgatcctgtttaggggaaacaaattctcatatcacaaatcacatgctttattaatgaaattctatgtcaggacattagtgttcctgcaagaggaagctagagaggagtttatattgtattctcgaagataggaagatttgatggggagattaatcagaaatatttcacggaatgtttgtttttaagagagtaaaggtgcaggacttttacacaatttttctagagtctaatcacatttggaaaagttttgatccatcaaatgttatagtttcagtatggttgctgctacaggaatgccttaggtacaagaggtgatatagaaaaaaaaaaggcctttttggtctttgtctcttaggtggtgcattttatttaagcatggtggagaatcagtggatcatttgtttatgcagtgccacatccctttacatatatggttaaactattaaatgaggtttgattgcagtgccacgacattgttctccatcttcaatttagagttgtaccaaataccactacatcatgattcatgtgtcacgattgggatacactctcaatattttcttcttgcttgtcaaatttgttgacagggaactttatagcaacaatataagtggaaaaatcccagaagagcttggaaatctgacaaacttggtgagcttggatctttacttgaacaaattagatggtgtgattccaaccacattggggaagctttcaaagctacgtttcctgtatgaatacgcatcctttacctacatctatttttggtagccttggaatgatatgacaatatgttttgctcttgttttatatatgccctatatcgacttgagaaaggccgctttatggttaatgtttctattgcttgtttaataaatttcggtttacttgctcttttgaaattttctttttgattcatatatttctgaataatgggtcaatactcaatagtgtagtaaatatgtcttatgatttgtcaaattgtcaatctttaacatagatgaaattggcactgagtttttccctagttatctacaatattctggagcataccaacaatatggaaggtatatatgtatataaatataaatatatcagtggagatatacattgttgtttgtttctctttttcctccattgaattgattgctatgacaatattagtagtaatattatgctcacaatactattactatataatattcttgtttaaatttttttgtttctttcatttataaattgcgattaggatgaataagctttactgtgtgtgattgtaaagactaatgttttctgctctgtcgaacagccgtctcaacaacaacagtttgacagggactattcctcgttctctaacaggtgttgagtcactgcaagtcttgtaagtttatttgatgtattaataaaacaaaattaaagtatataattttccttcatatgcataatgctaggatgataacagttttgtcttaccttgtgagatgcagggatctttcaaataacaagctgtttggagatattccagttaatggttcttttacattatttactcccatcaggttcattggaaaaaatttattttgaaataagcttctgttagttggttctttgacataacaaaattcagttctgactgcaaagttgatcttttgcagttttcaaaataataaactaaacccgctcccagtttcaccacctcctccgatttctccagcagcatctggctcctcaggtgaagtgatattagttgtttcttattggaaatggtccttccttacttttcatgccacgtgaatctcaatggaactattaaatttaccataatggattaccccaatttcaggctcatcaattgctagagtttatttcttctttatttctatctggtcttctgtttatctacttgatagaagggaggtagaagagagagtgcattgtagcttaatttttgactttagtgacttgtgcactgaattagtgatcaagcactgcattagggatcgagacttggaggctctttacctttggatatggcttcttgagacaggttgtgatgtaggacaaagggaaacttacagaagagaattactatagaaaaaaagaacacgaaggcatacaagaatttgtggaaaagaatggggaaagatgaagaattagtgataaaatagaacaaagtgagagcaatctcaatgatttataatcccataggcagtctgactagtaatgaaaaatgtattatgattagaaacaacaaatctcaattcaactaggaaataaactgtaggatttgaagtgtacgaagacactaataacacaataaaaaaacatagaaataataaaaacagttctctaatgatatctaatcatcctagtaatataaattttcattatctaatattttgcatcatttagtttctcaacatttaatctggtgaatattttaggtggtagtacaactggacctattgctggaggagttgctgctggagccgctcttctttttgccgtccctgcaattgctcttgcctggtatcggagaaggaaaccacaggatcatttctttgatgtccctggttggtgaattactaaaagtttcattttaattagtaaccgttttttgtaaatggtgcatgcctctcacttacctataattttcacagctgaggaggatccagaggtccatctgggacagcttaaaaggttttccctgcgggagcttcaagttgctactgataattttagcaatagacatattctaggccgaggaggatttggcaaggtttataaagggcgcttagctgatggcactctagttgcagttaaaaggcttaaagaagagcgtacccaaggcggggagctacagtttcaaacagaagtagaaatgatcagcatggctgtacaccgtaatctacttcgtctacgtggattttgcatgacaccaaccgaacggttgcttgtgtacccatacatggctaatggaagtgttgcatcttgtttaagaggtactttattagctgtgtatgtactgtggcttaatttccgttttacttgtttagaaatgcttttatcttcttttttgcaagctgttcaagtttcatattgccacatggtttgttcaatgcttttacgttggaaatctgtgtcaatggtggtcacaatacaattggaaagtgcagcctgttctgaagttgtggcacgaataaattgtttctgattatgacatcatgtgtctgattgagaagacacatatcctttttaagtgtttccttatactccaatgctgcaccataggtattagggagtgcatggtttaggcagctgatagagattcaatttgtaagcaacaaaattaggttgtttgaacactatcaatataaaattcagtttacatgaagcctataggttcttataccaaattgagtcaggaacaacaaagaaaaagaagataggaaaaaagaatgaaggcatgaattattaataatctaataattcattaggttctaaaatatttaacatcctcaagtcaatttgaggatagacaatttcatttagggagctggcagagattaacaagaggcacaagactatctgactatatgatggaattgctaggcctgctatataagattcacttacactagaagggggccaagcaaacaacgggtcaagggtacttggtcatttgagggctgagctggtggtagtttgttaaggggtggtttgggtactgtttaggccatatagtgccttgagaagctattgtttgggttatgcgagaattagagtaatctctctaggggcctacgggctctcttgagattgtaattggttctttcttattttcaataatacaattttctagtgtttggctagtgttttgctactgctttattgctctacaattactgctactgttttttgtgggtatttactactggattgagttagtacttgggtcttttcactaaaataaccctaatcgatagaattatattaagatcctacttatttaaagttatgtatcccatactatgtatcttagtacataccaaggcaattcaaagacgatattaaaattgctttatcggtatgctagcagcaggtacaacttacatgtacagtatactgaactatggtgtatcatttttaacgaaactactttctctgatggaatatattgtggatgactgcagaccgccctgaatcacagtccccacttgactgggatatacgaaaacgcatctcattgggatctgcaaggggccttgcctatttgcacgatcattgtgagcctaggattattcaccgtgatgtcaaagctgcaaacatattgttagatgaggaatttgaggcagttgttggagattttgggctggctaaactcatggattataaagatactcatgttactactgctgtgcgcggcaccattggacatatagcaccggagtatctctcaactggaaagtcttcagagaaaacagatgtttttggatatggtgttatgcttcttgaactcataactggacaaagggcttttgatctagctcgtcttgcaaatgatgatgatgtcatgttactcgattgggtatgaacttgtcatcttcttcaaagctttaacactatttatgttatgttgttttcttcatggttagaatatggctttatttataagtatgattgttagtttcattcaatgtttataaaaggtttattacaggaaatagcttgaaggttaaaactttatcttgcttgccaaagtttcattcatgtcattaaaatccacagaatatttatatctcaatttttgaatcttaggtatgccattttagattactagattttttggtttttcctgaaaaaaaccttagttttatagtggcatagtacaacaccttgcaggcctgcataaactacctttattgtaatttttcttttatttctaaaagtaatatctataaatacacacacgcagtgcatgcacgcacacacgcacacacacatatatattagccaatgctataaaaatttgtatttccttaactgcggatgtattgatagaaaaatccaactttaggactaaatttattggctgttatgggaaggtgaatttggtgtttgtggtatctcacccttctgatctcaagggaagctttatcttggcattgtgttttctttactgttgtatgcgcttgatgtttcttttccgtcttttccctttgacggaatagcgacattgagttctataatttctatatgcttcaactttacaaaacacttgtgtctaacatataaaccaaaaccgtaataggttttgatactataagagtctgtcttgttttcataaatggttcacgtgaattgtgttgaaaattccacagaatcaatctgattggtcaaccaatgtctatatcatatggaacatgtctaagaccagttaacatcagttcaattttaacataatgaccacttgaatccatatcttgtggttattaaaacaactttttttttttttttttgtgtatgtactttattactgccatctacatttagttctgtagtgaacttaatgtgactcctgtctaccacatggagttttgtacagagttcattattaacttctttcatgcttaaagaagctttttcaagtgatctttatttgattttccgaaatcatctttggcattacaggttaagggactcttgaaagatcggaagttggaaacattggtggatgccgatctacaaggaaattatgtggatgaggaggtggagcagctaatccaagtggctcttctctgcacccaaggcacagcgggtgaacgtccgaagatgtctgaggtagtgagaatgctcgaaggggatggattggcggaaagatgggaggaatggcaaaaagaggagatgttccgccaagacttccacccgtcataccatccaaatactaattggattgttgactctacttcacacatccct

SEQ ID NO: 852 - DNA, 675 bp, Cannabis sativa
tttttttttttttttttctgaggaaagcagcctgctttgttagtttggtgtttatggttgaataaaattgttccgttgcttcaaaaaagaaaaatgaccttttgttgttaatttcaaaagtacctctcttgaaaactaacaaaacaaacaagtttttttctaaacataacaaaaattgttgagcatatctagaaacacaataacaaaaatgccaaacttttttcttttcatttttcttcttcatatgtaacaaacatgttttctctacacaaatttggttgatagcgaacaagtttctagtacccagctgagattttcacacataaataaaataaaccaacgacatttaagtatacagatcaaaacaaggagccttcataacattgcttgggccgtaagtaagaaagaatttagaagcagccaaggaacttggagggaattttcccagtggcacggtacttggcagctgtctcctctgctttgagaatctcttcaccacggatagcttcaaccgttgcccttttctcctctgcttgtttatgaatctcagccactttgttcttcattttctctccatactctgcctttctcttctccaagttttcctggtaattatcaacttgattatgagcttctaatatatgtattcagtttcagtgaaattggataaagttt

SEQ ID NO: 853 - DNA, 5286 bp, Cannabis sativa
  modified_base (2260)..(2263): a, c, t, g, unknown or other
ggtttcctctttcttatatattgagtactcactcattctcaaattcaatcattctacacttctaccttaataattacccagatttatagtataatactatagttattatataaaatttaattaaataaccaataatataaattataaaatcatataacattaacaagaattaagagtccagaacggagaaacatacatcggcagtcagaggctcgccggactgaaccggccgctgggatgagacctcgccggagaagaagaagcagtcgccgccgctgggagtttcttgaattcttttaaggtttttttggtcgaatacttactgaatacagataacagtgaatggtaatagtgtactgtacagtgaaagtgaaaaaaaatatttttattttttaattttaagttttaaattttaataattaatattattatttttaatataataaaaaaatatttttcattttttatttactattgttcggtttacaggttagaacccgattaaaaaatacacagttttaaaatacgaattcgatacccgtgtggggtattttcgagttggacccgacccgattacacgggctttcaattttttagtttttttggcagacgattgaggtgggtggtcgggttttcaattaattttatttgattttcttaacaatctgtacataaatttctataaaccttccttacagaaagaaaaaaaaattgtaaaccttccaacctgaacaaactatccaaattaaactgagataacccgacaaaaaatacaaactaaaaaattataactcgtccaatctttatattggacggattgaaaataataccaactcggccaatcaacctgaactaacccgatcaacccaattaagaaaatataacaattcaatgtaaaaaaaaatattagtgttcagtttgggcaggttaacccgagcaaacaccaattcattaggtgggttaaaattttaatttttcttaattgcacaaattgtactttaacttttataattccgatattatattgaattgaataaaatataacgtaaactgatcgacttacccactagattatagtattagtaatagtgtctagtagtggatgagtcttttcttctttggtctatgatgatggtgatgtcttaaaagtcaaccaaattgaccccatcttactcatttcatcaaagtagtacagtaagtaatctcagttatttgtaagattagcatataaaacattacccttcttttcttctctttctcaattcagtttcatcagatctcagaaaataaataaatgtatatattcacttgtctttacaaaccaattcacaagtcagaaccagaaccaatgatccctgtcctgcctcttaacaaaactttcaatgaatctaaaacaatttctacccaaacaattacatttcatgtattcgagctcagaaactctactagctcgagtctagcttgcaccagggagacgaccagaaccggtagaagtagtagaagaatgtctagagctacctttggattgctttgctttaactttcattgcttctatcttctccaacgactccaaaacatctttcatcgaggggcggtgtttaggttcttgttctagacattttaaagtgagttgtgctgcttgaaatgctgccttgggaaggtactggccctccatccgcacatccataatcgtattcaactttctttttgaagacagacatggcttagaccagtccacaaggttatgctgcccgctggggcgtcttgagtcaagtgctcgtaaacctgtcagcaattcgagcagcactacaccatagccatatacatcactcttcacatacaaatggcctgttgcatgaaaacaccacaaaaatgtcaataatatcattctatttgttgcaagacagaaaatcataaagccttttcgtatttgttagaaatgtcatgtgatcacctgtagcaatgtattcgggagctgcataaccgtaggtgcccataattctagtcgttacatgtgagtcgccaccagatggccccagctttgctaagccaaaatcagcaattttggcattgtagttctgcacaacacaaatacaaagagaagagttgttaacataaatgcttaggtggtatttagttggagggaataaaatggaatagaaaggaaacaacttttattctattccattgtttggttttatttaaagtactggaatgtcattcttattctagttatgttttcattcattccaaccaaacnnnncttaatggggtgtttgttatgtgactttgagttggagagaagagagtagacttagagggaatataaaactcatgcgaataacattactaccattttaatttaaaaagtgagacctacttaaaaacacaaatcccttgtcattcaaattttatttaaattttacattatcattcccattaagtctaaacttaaccattgttgaatagaaagaaagaaaaaaataacgaaatgttcaactgtatttattgactgaggcactatagaaagactaataatagctctaaataacatgagtttcatgcctctttcatcaatcaaattaagtataatgctccattagtaactacctacactcttacttatacactacattctaattattcctatatgtcttgaaaaatatgttagagcatagccataaagaattgggacaaaagaggctttagcagaagaagaagaacaaaccccatcaagcagtatatttgaagccttgaaatctctgtatataactttcttatccgaagcatgtaggaaagccaatccccgagctgctccaatcgctatttgaagtcttctttcccaagatagcggttcaacagatggatttcctactcgacaaagaataaattcatagatttagcacaagtacttcggaccaaacacatttaaattaagagttttcttattagctcgacgaaactgtacttctaaaaagatggttctccaagcttcctttctgcataaactcatagacaagaagcaactctttgtcctcccaacagtatcctaatagtttgaccaagttgggatgagaaagccttcccagaaaatttatttctgactgcatttatcagagcagaataatatacattaaaaactaatacttttagaagaataaaaaaaatgaagggctattgtggtttaaaatgataaaagaattcaattcatattataactgacattctaaacatctttaccaaactcactaactgtttaaaaaaaagaaaaagaaaagaattttgatcaatggtacccaaactaacaggtcatgtaagttggacccttgtctacatctgatgaattctgcataggaattaaagacaaactaataagacaaacataaaaaaggctaagatatgccaatcctagtaatagcctaacacatgcaaatctggtaaaagtacacatattattatataggctctcaagagtgatgaaatggtttaagtcaatgattagttaggtaaggaaattgagattaagtacctgccattcctgaaaaccttgcatgctttcagagttcaatttcttgatagcaaccatcataccagtaccaacttttgaaggagccaaagtcttctcatcaacccaacctttgaaaactttcccaaagcctccttccccaagcactgagtcagctttgaaattcttagtgcaagctttcaactctgcaaaactgaacactctcaagttgggtgactcaagaaattggccatttagaaaagactcatccacactcccacttgcagcctcagaaaattgactctttcccacgctgctgctgttggttgttccagataatacaatgttcttactgtaattactagatgtccctaaaagaatgccacacaatgcaaaacacaatcattgggattttggggttttcaaccaaaatttgacttgactcaattattcatctaattaagccaaacatagatgtatacccttttgcaaatccaaagtaaaaaaatcatcaaaatacacaaaacccagaaaaaagtttcaaactttatctttttataaagaaaaaaaaaagattcaaacttgataattctggaatggttgttgtactacctggactagtagatgcaaagttagtactgggagaaggatcaccaccagactttcccaagcagagacccatttgcaggtaacgaattctttcttcttcttcaactctctctctctctctttctatttctcttactttgcaaataagatggacatgagtggtaaaggctaaaggggttcgtggaaaaacaaaaaggaagaaaattgatgagaaaatgaagtagaaaaaaggtggactttttatatatataattgtttgttggtatatcttttgtagttgggtgcatcgtagttaccatgaacccactttgtggtttcactttcactaccttgtcgtctactgcaaaattactattgattgattcaaaacataacaaaatatttggtttggtttggttgctgaggtttactgtttctgtttctgctcatgttttcactttcagttgtttcaaaggtcaacgaccgcggcaagtggaccccagaagaacacaaacctttgtaagccttttaattaataatggaataatcataacaattaataacaacccagattttgatgacaaatatagaaagaaaaacaatttcattaaaccgaccagaaaagaacaaccttaaagagttaaatggattttgaacacgcacagatcttactcggtttcacatatacactcaaaatatattacaatatcttaaaagaaaccaacacaagattaaatttttcatccttaatatttacaccttgttgttatcttaatgctgcagcattttatgactaaattcccataaaaattcttacatgagtaattagcaagaaaatattttaaggttattttgaattattcaaaatattaaaattagaaaattttatcaagttttgtcttatgcagttgttgatgtagttttttagtggagaatatttaacgagtaaaaaaaaattcaaagagcacaatttaataattataataattttatttcaaaataatcatactttaatatctctttacaaaataattagtatccttagaaaaatactatattttaattatgtaagtgcaaaaaaaaaaattattgaatcattatatttggtacttggtagtacttgaatgctgaaagagaaaaataagttcattcaactcttccaaagactgcaaggaattttttacttggcacta

SEQ ID NO: 854 - DNA, 5128 bp, Cannabis sativa
aaaaggagccatccggcgagtccctccaaaccaaagtatcttgactcgcactggggagagcctcaatattgagaatagttgagcaaacagaaggtaaaaaccagccagcaaggagacttggatccaaggcccccctcacagaacagagctcgctaagcatcaccacttttggttgttgaattcttggattgaaggcagctttatactcctcccaagtgagccccggaatccacggagagtgccaaacatcaatatttcttccatccgccataagccaacaagtttcctgacgaataagattcctagacaccaaaacaccgcgagcgaatctggaagccgagttcgggagagacaaactccagaaggaatcaccacgcttacaatacttagcccgaaacacacggcaccaaagagagtcagaccctctagcaagacaccagccgagtttagaaatcaaggatagattgagatcaaagaacttcttaatccctaacccgccaaactctttaggcttacaaattgagtcccagctagttagcgctagatatcgagatttgtccacacaaccaatccaccagaatttcctaaccaacttgtccaattcagagcaaagactcaaagggagaaggaaagttgacatgggataaagtggggtggcagacaccaccgatttgatcaaggtggtgtgactggcttgggaaagcaacttgcaccgccaaccttcaagacggttcttaactttttccaccacaaagttgaagtcccgactcatacttttagaaaagaagaccggatttccaaggaacttgtcctccaaagtcataggccgataccccaaggtagatagaatagtatccttaatatcatcacgcgtattagcagagaagacaacagaagacttgtcagaattaatgagctgtccggaccacttgccataagtaaggagacattggataatagtgtcaatctcagaagctttggccttgcaaaacaagaatgtatcatcggcatacatcaagtgagaaattggggggcagcggggacttactttgaaaccatgaatgaggcctctaccttcggcctggatcaacaaacgagacagcacttcactacatataataaacagaaaaggagataaaggatcgccttgacgaagacctcgagatggagagaattgtctgagaggacccccattaaggagcacagagaaagagaccgaggatatacttttcacaacaagctttctgaaatcatcaccgaatctgaaggcctccataaccttatcaataaacttccattcgagacgatcataggccttagacatatcaactttgaggccaacaaacccggatctacccttctttttcttaaaagagtccaagatctcatgagcaatgatactattctcagcgatccaccgccccgggacaaaggccgattgaaaaggagagataatcaaaggcaagacaacacgcagccggttcgccaaaagcttagcaattaccttataaacaaagttacacaaggaaattggacggaactcatcaaacttacttgctccattctttttcggaataaggacgataaaggttcggtttaaggacttaacaaactcccccgtgcgaaagaactcgataaccgtgcccacagcatccttgcccaccgtgctccaatgggcccggtagaaccggcccggcatgccatccggacccggggacttgaggggggccatagaccacaccactttacggacttcctcctcagacggcactctagtaagctccacattcatctcatcattgataaccggaggcaatagatcaaaaagatcctggccaatatcgggatgcgaagaagagaacacttctttgaagttattggtgaagtaattacctatctcttgtcgggtacgcaaccagaaaacaccatcatccgagaccgagcttatgaagtttcgtttcctacggatgactgtcgaggcatgaaaaaacctggtattacggtccccatcccgtaaccacagttcacgggacttctgtctccaaatattactttgccgtgcggacacttcctcaatctccaaaaggatgtcagcttccaactttagatttaccggggaaggatttcgttgttggacctccaggagcaaagcttccaaggcaaccaatttctctttacaaaatccaaacacctcacggttccacttagataacattttcctcgtgttagaaatccgagagaccaattggaagcttttggctccagacaccgctaacttccaagcatcctggaccacggttttgcaagaagggtcactagtccaggcatctagaaaccggaaaggtttatgataattctcaaggtcatggagaaggtccagaacaataggggcatggtcagaataaataataggcagcgcactcaccccagccttggggaaaagagtaatccaatccggagcactaatcactcggtccaatctttccttaataagatccgggtgctgcctcttgttcgaccaagtgaaaaaattacccacacaacctaagtcgacaccaccagagataaacaaaaaatcagacaagaattgaaggtctccgggatagacacggtttcctccaactttatcgccattgtccaacaaggcattcaagtcaccaagaaccacccaaggcagagacaagtgagtgatatcaagggcaagagactcccagaacgaagctcgatcccctcgcacaggagggccataaacaaataaaccaatccaagaaggcacatttaaagtattatcaaatcgaaccgagatcagatttttttccgccttgagtctagaaaccaccaccccggctttccaacacaagcataaacctcctgaagcaccagaagcttccacaataatggcatcaaagaaacccatttggcgccataaaacatccatcctggccaaattgagctttgtttccatcaagaagagaacatcgggattctcccgtaagaccaatccccgaagggcagagactgtccgagcctggcccaagccccgacagttccaagagaagagtttcatggggatttggggggcatgataaggcccgcctcctcggccattggaaaatcctgcgcactatcaatattctctcccaccagagagtgcaccaagagaggaactcgcgcgtcagacacacaagagtcacccactttaacttggccatccaaaacagcaggagcagaagcaacaagtaaactcgaatctgtcactaactcacctcccgaagtaatcggaggcccaccaagccgacttggactgagaggcacctcactaacctcaattccccccgtcaaacacactcttttagggacaatattagtttcgctcggggaattatcatctgcctcaataatgaccgcactcccttcaccgaagacatctggaactctatggttatcaagaacagcaatacagtcattccccgtgctctccccggtaaagcccggttcgagatcagagatagaagacactttcttcctcttattgccaatttgaaggtccaaatccctatttgaaaatctaaagaccggtttcttttgaattccttttgggccaatcaacttgggccttttaagttggtaggtggacttggaccgggaacccacacactcatcattggtgcaacccgcaccgaaacgaaccggagacaagtgtttttgaaaaatctcagcaacacgctcaacatgttgagtagggaactgaagatcaacatagtcattgtaggctactgaaaaggccgtatcggatcgttgcctaggaactccctccattcccgtcgggagaatgtcttttctaactgaaggcgcaccaccattctcaccaactaccaagtccacagtaaccccagagggaggggggggagcaatatccaccataaccttagacgccccctccatcacagaattagttgagataggatcacctttagcactagcactacctccaagaatagaatcatctttctccaaagctttaatatcatggatatcccccacctcaaggagggcaaacccattctccagtttagagccgtcccgtaaccacggtccaaacagaggaacacttctaccatcatccaccaagaccacacgttttctgccagaacaaacatcttccatatgtcctatgacaccacatttaaaacatacaataggcaatcgttcatatttaaaatagacccaatgttttttcttaccatcatcaagggaaatcccagggatcattgggcagagaatattgatacggactcggaatcgcagaaagtcccgaaccaggatcccattcttcctcaccttgtcaaccgagatacacttgcccaagcgagaagccattttgccagcagaatcgtcagttaaaaaaggaagaagcacccccagcgccttaacccaaatatccaacgatgagagatccgccgaggcccaaaccccgtcctctggcatcgctgagaccattaaaaaaccatcgcaaggagaccacggcccgttgttaaggattcttttaacctccgccggagaactcaaccgaaatacaaaggttttagttttccgatccacctcctgaaacttccagccactttggagtctccacatcccagagagaaccttcctcagagtcccagtcgagagaggcttcctggagaacaatctacccaccaaagaagactcaatagttttcagagctgcagcagaatcaggggaaatatgcagcgaaaaatcatccagggagaagttctcaacttcctccaccgattcctccaaagacccaaacgaagcattagccataagagcagaacagaggggatgtgaagagggaacgagcaaccaatgaaaaccaagaacagaatccagaagaatgcacaaattttcgtcaaaaagaggcaatagaaagacgttatcagcaaaggaattagaagccaaatacctttgctcagcatgaaaagggtaaaaaagccctaggaccactgcgaaagggtctgggggtagcagaccactacccctgtccgccgtaccggacattcaaatcgtacaatacaggacgccactacctgtatcgttatctctctcagttaaaagttaaaag

SEQ ID NO: 855 - DNA, 5579 bp, Cannabis sativa
caaaaatactattttttgcgctttcttattggtgaagcattgacttggcttcttcctttggagattgtagttgctaagggctataattttatgtttgtggaatgcgactcaaagattgtaattcaatactctcatgggacatttttctagatgagacattgataattatattagtgattgcattagattgttaaatgttttcccgagttataattttactaaaatttctaaatgttataattttttttttgaaagactagacattataattttgttgtcatagtgtagttgaaaaacattttatgtaataactgaagagggtttaattcaatttatttataaaatgttaatttttttaaccactcgagactaattcaaatagctacccgtgtgtataagtgtgtatagggagtgttatgtatatacacacttcaaaaaaataaataaagtaaatttgaaaaaaaagttaaaaaaataaaacgtacaatttggttttgctttcactgagcggcgtcgtttaagagcctttcgatgttggggcctctgtcatctatctatctttcccacctaagctcatgacaaataaactagaaaagagaaagccctaaaactactgaaactctctcagagaaccccgatcaaacaccatcgtcttccccagttgggtcgatcaccagatcattccgacttcattagggatcctagaagatatgatacccctcagctatctgccttctcttaaacctcctttcgcgtaatttgtatcagaaaaaggtgagcttttcgttttcctttttttttttggctgtaatttatattctgggcaaccaaacaaaccctagtaagattttgacggaaagtgatggatagcacgaactaaggtaggtttgttatctgggttttgggtgttttggttacaatgaactgaaatcgagctatttcctagctcagttgatcaattggaacataattcgatcactttgttaaattttgcgtctgctagtattttttgcatgatacggtgtcttaaaggtgcttaaattttgtgttcttctactaagaaggtcagagcttgagttaatacagcttgttttttttcctccgtgttttgattgaattgtagaaatggcgtctccccaaaatgtagaaatggaggcagcaaagtttctgcacaaactaatccaagattctaaagatgagcctgctaaattggctacaaagctttatgtggttagtgttgtagtatatcatcaatttaattctcttcctgcatttgtttttggccgcttcttattttggtaacttgtgtgtatatatatatatttataaatatatcagatattgcaacacatgaagtcaagtggcaaggaacattccatgccataccaagtaatatcaaggtattggaaaaatgttcttcttaagatttgactgtggttcgacacacatgtacgctgtgctgatctgaattagttcttagtttttctccataaattctgtagtgatttttcttttttgtaattgtgcttttgtgatttttttttataaataaataaaaaaatcgaggggggcttgagccatctccttctgtgtgtggctccgtacctgtttatgagctttcttgcttaaatattacttggtcaagttgtcatttggaatcttccaaccacatcacgtgtgtctgattgtttcaaattatcttgctttaagggccatggagactgtcataaatcagcatggtctagacattgaagctctgatgtcatcacgcatgtcttcagctggtggatctcagccatctgatgctgcaatcactcagtttggaggtaaaatacccttaacataacatctgttggtactcctaggtttctgctgaatatgattatcgtataatcgcagtttgttccttttagatctcatacttaattgctggaacatttttatgtagggtcttcccaaactgttggaattgcaaaagattctaaaatgggcttgcctgaaaatgaagtgtcgaaagtagatacctttgcttcaagtagaccacctgttggtccaagtagtgcaggacatgaatattttcaaggacctggaagtcatcgaaatagtcaatctttagatcatgaaagtccatctagtatggactccaggtctgccaattctcagtcacaagaaaggcgtgattcatcaaattgggacaagcaggcgaatcaaaaggatggcaagaagactactactaaaagaaagaggggtgatacatcggtatctacagaaccccataatgacaatcctcagcaacttgactctcgtaatactgtagttaacacaaggaaggggaaaatgagcaagatggattcttctcctggttttgcaatcaaagctagtgaacatgctaattttaatattctccaaagtagcagtcaaatggaacaattttctacattatctggtagcatgagaccagtgataaggtccaagcaagagagtcaacatttaatggaaaaacagttggattcagcaaacacaaacaattcaatgtctcgtgctcccaatttgaaataccctgatgaaacagaagtctcctcttctcataatcccttgtcacaacagcaagtaccttctgctgcacatgatattatgggtgcatggaatcaaaacaaaactgggttgcagctggacaaatctcagattcctcgatttccatctaatgttgctggcaatgcagaaattccattgcagtcagctgcctcatctgctgggatgggtaagtgcttagaaagttgttgttggagctattaatttttatgttgttactttaagtacttgttttgttcgaaggaaactttggagatggtagatataaacgaggatgaagatgtggtgcataaggcattaatgtttggactagtgtactacgacaattgttattgttatttttcactggagatatcttgattgaataatggatgtttcaaaaatatttattttttgtgtgttaaatttattttgatgtagtttccattaatagtatatagttgaaaaaaatttaaaacacaaagtttattttgtggatcctgaaaatggctttggtggaaattcaggttctttcggaaaggttcatggagggcctactatggcatctggttcatttccaaccacagaacctgggttcacaccaccactgcaatttggtggctcagttcttgccactggaaaggttttggagcatgatggaggaagttcaaataagttagccgattcagggaaacttgctcaggtatttcattttcctgtcattttcactgtagtctaacaaggatatgatgcttaattgcccatttgtgtttgtgttggatctctctagttacaagagagttggcaggatagaggttcttttagatttcatttctttttctttgtgcagctatttttgaaggtttgattaaattctcctactaattacctagttgtctaagttactaaaaatcatgcaaaatgcatgtcttagcatgatgtttcattgcatgacaaaactacatttacaatttgtttctctgcaatagaaatccaaaattgtaaatatagttttgtcatgcaatggtctgaggttcgagtcactcctggtacctacgtagcaagtgccatagttttctagtcccaaatattgtagggttaggcagggatgctagttaaaaaaataaacaaacaatagctataacattgtgttttatcacaaccgttcctcttaattctcttttcacttgactaatttttatctatatttatttttcttgtggtatcattgttttattttctgctttgtataattctgcttgtgctatgtgatgcttttttgtaggctggtagacagaacagtgtatcagaaatgagtatgcttcgaaacgcaggacctagagatgcaggaaagtctcctgttcttccgtcccctgtcaattctgggatgccttttatggaacaacagttgaaacagctgagagcccaatgccttgtctttttagctttcaggtagttataacacggtttagcatctcatgtttcattggagaaccctttaaatggaaaaactctctttttatggagttctttcagtaactattttgttaatgtgcagaaatggtttaatgcccaagaagctgcatcttgatattgcactaggaaatatttttccgaaagaaggtaagtaaaaaatgtttgcatgaatttgttgtttttgcttttgttattgaaaattttaaattttaattatgccttcaaaattcaggtggtagtgctgatggacctcgtaaggagttaatggatcatagaggaaaagtgacatctagtgagccaaataatgcgcctgatatgatgccatttggaagaatgaataatgcaaaggaaactgataaaatccctccaggcactttgtctactggaagattccaagacattgattcctcgtctaaagaagcgggaaacatgaaagctgaggataaaagtggcccggcttttgaccagtttttgccagaagaaagaaaatatcttcaaacttcaagaaaaccagatgttgaaacacagacttctgaaattacagcttcacaggcttctatgacaatggcatcacaacatgattcttctggtacaaggagtggtttagcttttagtgttcctggggacaaagtggaaaatggccatcagctagctggaagggctaaccaagctgtctccttaatggctgcgaataagcatattaacccggagattgttaactggaccaccgctggtaatcatgatgacgtttcaaggggagttcttccatcatctgctgttcagcatgagttggtgcctgaaagaagagataatgtacaaagtcagggtcataatcttagcaatattagtggttcagggaatcatcactctgataataatttatcttctttctcctcaagagatcactggaaaccagtttccggaactgacaataatcatcacacagtacatcttgctaatatgacgccaaaacaattatcacaaggtgaaagccatacctctaagagtatttatatatcactaattctgcttttgttttcagctacagtcatgatatgggtgataacagtgtatcttactggacttgtattactgcagaacaagtacaggaagatagcttggtgcctgatgtaccaccttctccaaagtacacaatgtcagaaaaatggataatggatcgtcagaaaaagaaattcctggatgagcagaaatggattctaaaacaacaacaaacgaagcaaaggattgccacatgtttttacaagttaaaggtttgggcttgagacagtgttgaacttcttatacaattgactcaattgcaatttttttctgtagtctcgcattacctgattcaggcactagtttcatttttgtgcattttaaactggtgaataaatacccttaaaaaattgagaataactaaagatgcatgattaaaatgtaccatctgggttagatgctcattgtgtatatctagaatgtacaaatacattgtgcttctctacttaaagattctctctctctctctctct

SEQ ID NO: 856 - DNA, 1193 bp, Cannabis sativa
  modified_base (1096)..(1097): a, c, t, g, unknown or other
ttaataagaatggtaatttaaattttgtcttctttctccttattattccaactcaatgacatagagagatacccttataagttataattcatattgagtggttggcgcacttaaagtaatgtgttggaccattacttcttacatactaactatgtcaccatgatctttaattagcacataaattttatatgtataacactacattcatcttaattaaatatgtttagatatatatatatatataatacgttagtttaatgtgtttttttaattaaatattaaaattttagtaattttctaccataaaatttagttaaaataaacaataaataataatatataaatattcattatttatttatttgctatattatatttatatatatggtttcagaaattgtactcagataaaaggatggagaagatggaactattaaaagggctaactattggaaaagatgaccaacctcaaatttcaccattagaaatggttggtattgtggatctataatctttatgtatatatattccattttattattttttgttcaatttacatttttatataaatataattaataataatgcatggcaggaagtgttgttaatatggggagatcatgatcaaatctttcctgtggagatggccattgaactcaaagagtatgcaattaataataaatctatatatatatatatattatactattgctatacaatatatttaattatttattcttattaggttatacacatgtagatgtagtggttggtaatgtaggtagagcaatatggtaaaattttattcttcaaatttgagtttatagtatataagacatcaaattgtggtattattcaaattagggtgatttagggtgggctttattaaaaaaatttgtgatatttttaaaaagaataatttgcagcataaatatctaagtttaaccctcagttgcaaataaatacctaagtttatttttgacgataataatacctaagttataatttagaacttttgtaggaacatgtttgttaagttttaagtaaattgtcacatggcaatttttgatcggtcaaagtcattaaatttttattnntttaaaaaaaaaattaatttaaatgtactaataagaaaatgacactgacttaacttttaactatcaggtacctatagagttttaaaaatataattt

SEQ ID NO: 857 - DNA, 2506 bp, Cannabis sativa
ttatgcagatctccctaactagcatttatcacactagtgaataattgatacatgaccctgttttttctgaagaaaaatttagtactcttacccaatttgttaaattagcccttctggggttcaaaaccctcaacctcttacacaaaccacttgagctagactcaattggcacatatacatatactctaagatgttccatgtgtgttttaattttaagtgttaaaaaggaagcaggcatggcataccttaatccctgcagaaaattgatcttgccacccactggagtactgaaaaatgaaaatcacccaaaataatgttcattaggtctcaggttagtacagtatataagaatagatttgaacatgataagattgcaaactgtaattactcacttcaaatgctgaccatgtacacatttcatgcttatctgcaaagatccactgatgcttcccactcactgccacttgtccaacaatcctgtaacaaccaaaggattaaaatttaaaactgatctagcaacactaattactttttgcactaagggaatatccactattatttaccacatttacaagtttgcaaataagaaaaatacttagtgaaacaagacattacccttccccaagagaatatacatgatacgacatcttagccactgctaacccaagggggtcatcgtgcaacctttccactgctggactatgttcctcactcttgtcatagtaagcgtcctcccaagttaacaccctaaacatcaaccaccaaaatcaaaatgttaagcagattcaaaagccagataacaaccatgatcagccctattcagcttactaaacattaaaaaaaaaaagaactttttgaagtgccattaacacaaactaaataaagtaacatactttttcgggtaaatgctatgtttgatgagattaaatctatcaaaaggaagcttgtgtgcgtgattaaataacttcacaagttaaatttctctctatagggtgcttttacacacaaagccaaaattattcaattcctttcatttttcccacttcatttcttgacaagcaaacaaaaacaaagtaaaaaacattaaatgaaaaaactcacattcgagcacgatgcttgagcttccaaaacacggcatacttccactctgaatttaaacagaggctcctcagtacttgctgtaaatcggtacccatatctcttccaccaaaaagtaattcttttcaccgatatccccactaaacagaacccccccaaacaacccgaaattaaaaattcccctaccaccttaaaatatttttcggcagaaaattccttaccctaacttcccctatatgagcctctaccggcttgctttctccgtaatccagctctcggttttattggcggtcccaccgtcggtaacaacagacgatcccttcccatcactcacaacacaaccccccacttaatcaaattccaaaacccccaaaaataaaaaataaaacctaaagcttcttcttttttatctataaaacaaattcaagtaaacaacactcaaatattccactacagtaagctccactatattcactacacttgtccatttctttttcagctgattttttttcaattgtaaattaattacagatacgaaaaaagagaaaagattaaactcaaaaaccttgaacaagcctggtaacgaagaagaagctcgattaagatggaaaaatctagcttatgtccgacgacatggatgatccgaaatgcaatgaacttgtataatcaattgatccagacttgcagatacgtacgttgatcttacgagaattcgactatgaacggttcagatttaacggcagaacagtgaagaacaggcgatctaaaaaaggtttgggtttgacaaaaaagaagtgaaattcaaaggctttagagaataatgcagctttttctttcttcttctttctctggttttctagagagagaaagcttcagtgaatcaatggctttttgcagagaggagagagagagtgaaacactttatataagtgaaatttacctaaggaccccttctttactttatattttaattgcaaatatgcccttttgttttacattatttatgttttgccccgccttagatgctacagtgcgcacccctcccacagtctaaaggcactttgctattttgcgcatcgtgcgtattttaggagctttgattatttttgtggtttttttgtgtgtgaaatgaaagatgaaaatcaataaagggtcacactagagagtaggagtaaagactattggaaaagtttcactttccatacattcttatctattttagcattgaagatagatttttaatgtatttttctataattatatatcatttaaaagaaaattaaataatttatagtgttgaaaataaaattaaaatattttattatatgcttaatttttttttaactattcaaatatgaaataagttaaattgggtttgatttaatttcatttttttttttgttttaat

SEQ ID NO: 858 - DNA, 2686 bp, Cannabis sativa
aagaatatttattaattaaaattaaagaaaatattaaacgaaagatattgagagagaaagacatatacaaggacaaaaattaatattaaaatatttataaagaatatataaagcacatatgaacataaattttaagacttagctattataaaatggtatagagttatttatgtattttgtattttaaatttttattattttaattgttttcttggaacatttctagttatgaatttatgtatgaacaacattaagaattttgttataacgttaaattattaaattattttatatttagtgcaaactgctcatactgcattctattttattttagtagctatctttacatgtataatactattcagtaaagtaaaaaaaaaaaaattaaaagcttcaacggagtaccaaaaatatgttgtattgttatgtgttagcacacttcagaaaaattactgttcaaataatgttttaaaaagtgtactaaatttgacacaaaatataacattgtactaaattttgttcacaataaatgttactttttctatctactataataccactaattatttatttttattttgttaaggaaggatgcccttaaaagaagagaaaatttttgagtttacaagggtcatctccaatccagatagcagcttcatctaaccccaaaaccaattttaccaatttgtgggcaaaagtattagcagagcccttgacatgcgtgatagtgacattgggaaagtgagataaagcgaaattaattagcctgatgagattgacgaacaaagagatgtcttccttgggagccaccaaagcgtcagtgatggacttgtagttagtttcaatctggtgaatgggaaagttctctttgatgcactaatgaagcggaaaaaggagagacttttcttcaaggatagccacgtctccaccaccagcaagagagggagcaacagcagcgaccacttcgccatcgctattgcaaatgaccccacttgaaccagcagaaggatgattcttcgagactgtcgcgtcagcattcaacttgagaaggccttgtggaggagtccaggtagtagctacaggagctctggatccagtaaagggtgcaacgttctccgtaactgaaattctgtagtcaactaaaaagtttcttgcaagatccaagatagcatgagtccgatccgatgagagatatcttatatccttgttcttgttatgccaaacaaaccaagtagcacaaagaaagaattcgacttcttctttgctaagattagtgaaaatagtgtagataatatcatgaaaagacaaataatttgaagaaaatataaaagggtaaaaaattgtacatttccaaactcttcgaactctcttgcaaaaaaacagggcatggcaaacagatttagtgtcttgaccacaacgggaaggaacacaaggaagattgaatgatcttcatataggccagattcttgttcgtcggtaaagttgaattggaagctctataggcaaaatgcttaatctttgaggggaggttaaagtgccaaaggcatttccactagggggaagggcaagaggaggaaggaatgtcaggagagaaagtagatgagaaagttaaatggtatcccgatttaatcgagtaagttccagattttgtgagtctctaaataaggttgtcttcggtgggaatgggaggaaggagaatgactaaaatgtcatggacaatgtaaggggggtaatactggttaagacactttgtatcctaagtcatgttatcagagatgaaagaggccaccaggttggagataggattattaagaatgacttggctatggccaaggatctaattattataattcatttttactaaattttatttatcatattactattatttaaataataaaagaatgtataatataatttttatatattatcaataaaatattaaatgattattataatcaattattttctttcttattttacattttgttgattgaaacacaaatattaataaaagatcaaatataacacaaacttattttttgtgccaaatttattacaaattttaaatttggaagatggtcttacaaactcatttttacaacttttactctaatttaaaattttacctcaccaattacaatttcgaaaagtaacctctcacctcatgattgtaagtacaacaaagagcatacgtacaatgaactattgtattgaaaggacaacatcactaacaacagattttagcgcaaaatacatgatataagttgattctgtaatgtgaaagcatcagaaataggtttttccacaataaatcccttaaaaaagcaaataacactataacaggtccattacatagtacatacatataagataacaaggaaaagcaacaacaatcaagctcgaggatgttaatatatacatgtgattgatgttattcaccaatcactcataaacaccataaataatagcagcaaggttagatctcattgaacatggccaatttacaactggaagggggctaataaaagcgatttctccccagtccaatgtaccgataccacgatggctgtgcagcattctattctcgcttgccattgcttcaaatcccaattttctgttctttcaatcttttaaatgatccagagctaagcgagctgcaaatacaaacctaagaatagttaaa

SEQ ID NO: 859 - DNA, 1584 bp, Cannabis sativa
ttaacagaatagttaaatgagtagtaacggattaaaagaaattgaaaaattgagtatttatgccgctatttttagaatttgggtatttatttgcaacaaaatcaacaatttaagcattaatgccgcaaatttccctatttaaaatacacttaattagttaattgtaaccagtccaatagtaatttaattcattcttattgaatttgatgcacatgacaattaacttcattttgacaaatctttttttcaatagaataataagatgcttgaaccaattttaccaaggctccaaatccccccctcttttggatgaaaggtttgaatgtatcaacctagttaactctattattctgcctcttgtttccactctcactctattattttacattggtgttgtgattagttatgtcaggagtaacttctaacttgttattactgcatgcctcaagctatgtctgatagagagatagttaagatagcaaatatactctgttataaaattatatttaaacaacaactgagttaagatagcaaatatactcttaaaaatattaacaaacaattaagttctgaaatataactttcctctccctctctctaatctctctcctactctacatcctctctagtctccctccactcttccaaacacggtgttagtgtaagaatttagaaaaggcttgcattatgagtctcacttttctaaaaaactattatgatacattttcttaatctcgtttttttaacaagttggaacaaaatatggggcatttagatttgtatagagactcaaactcaattacatagttctaataccagtacaaatcccacttgtttacaaatgtgaatagcattagccattagcaatgtggagaaatcaattagcctcaaaaattgaaccaaaccatacatcatacaacacaatacaatattaattaaggcttcaattcaagagggatctttgctactacggagtctgtaaataattcgacctctagtagaatcataacgactaacctcaacattgactctatctccgggcaatattcggataaaactcttacgaattttcccagatatgtacccgattatcatgtcctcattatccaatttaattcgaaacataccgttggggagtgactccgtcaccagaccttcttgggtccatttttgctgctctgagctgtccttagaccctggagcctttgccatcaccacccctaccaaaggagtacgcttcccacaaccaacccagcacaacgggctctgttgccattccgggaagttggctgaagctgctgagattgggatcaatgtcgtagagcttctcggccctagaggaagatggagaaacgcctgctggggcgtgccggagctccacatgtttttttttaaatggttttggagtttgattttgttatccctggttttgtgtctctctggtttagaaagaggggagaaacggatagaaggagataagcgttcgaatagttagggcttatttatttattcatttattttcttctaaaatgtaaatcaaggggtattattgtaaatgtaattactaaataactataatttctt

SEQ ID NO: 860 - DNA, 5828 bp, Cannabis sativa
taagattttcaaattttcgtccttaaattttccaatcaacctattaaaattcataatgaaaggcattaattaattctttttaaaaattatgacatggttacgtttcacattcattggttgaccgggcccacccacgtgtaatgcaacgttgagttgataagcccatgaatcatgattaagcaatagtggatgtagggtattctcattttacggtggagcgatccgtacataattatttccattgctcataaaatataggtaataaaatatttaggcgccagcgaattgtaagcgatatcgtattgtaatgttcgctatattttcgattttttttttttattgaatactttttggtcggaaaatattttttgtctttaaaatttactttcttgatttatgaaattacttatttacccccaccacccacagtaatggaaattataaatgaagttttgagactctgaaagctgtttagctttttttctactagggcccccaccatatttgtattgtcaattgccatgtatagtgtatctaatctagtgaatgagtaataatacagtaacttactgaaacaaaatgttttatttttggccacaaaatgatcaaccatttatatatttattttacgtaaacgttctataattataattaattcaatcaagcagaagtttttaatcaataaaaaaattaattaaaaacctctttagttgttaaaactaaaagtactaaaaagggtaaatacgtaaaaagaggagattccaatttcctgcccaaagagtctttgtcccttagatatagctcttcactgtcgtttttagaggtgagagccactgcttgtgcctttatggaggccacgaatgtctaaacaagtcctccatcttcctcagctgaagtacaaagaaataataataaaaataaaaataaaaattttagagagagaaaatcacagcaaagacataaacaagcttagagagagaagctcaaataacttttttgccttttcgtataaataaataaataaataaataaatatataagcttccatttcacctcattttaaagaaaaaccaaaatcataagcttcaaaaaagggcaaaaatcccctctctgtgctttgtttgcttcctattatcgtcttcttcagttcgtaaaaactctgtttctgtttaaaattattctttgttcatctctattgccgttgaaatttaaaagtcacctgtctcttgttctctccgatctgactcgccgagttccttctgcttctgcttctactcggttctgttctcggatgagttagcggagaagatcgccgacctcaatcgatatggtaacttgaacaaagcatctagtttttcattgattgattttatttatctattgtttttaattataaatttgccttattggttgattgatttctttaactcctttgctagttgagttgaatcggttttgatgtgtttctaggagtataagtatgtgattatatttctaatttttgaaaaatcatgatatgatatacaaactttaggaaatcattggcgtatagaggaaatttgttgaattttgttctctttagctttttatagctcacactatgttccaatttcattcctattttatctttgcattgtcgaattataggtcttgaagctgaattagaactttggtaataggattgtggcatagaatcaatttaatgtgaatgaattggttttattgccaatatcaatatgcttttagtatttgtctctcgaaagcaagaaggcattgtactatgtaacaactgtgacccagttctaccatcaacttgacagctttgagtagacacttcagctggtttatagtagcaattataatttatttattttgaaatgttggagagtaagcttttcgctttcatgataagctagattaaaacaaatacaagtcagtgtatcagaggcactatcatgatgaatgagatggtgattagtttactaggttagaaacaactagggagggagcggtacttgtatttgttttctgcgaaaaaagggatcttggattattttgtgttcataccatgttgggaaccgtggccagttaattgtggctcaaattttgtagtcaaggactagtggcaaaaggaaaggagagaagataaggcatgaatagcaatgttgatacatcatttagaatgttgtagctatatgtagtatggcgttcattttttttcttcttttctctgtaagtttggacttggcgaataatttgttaattataatgttgagtgtttatcaagcactgtgtgactccaaattggctttttctgtctctttctttttcttataaacaagctgcatcacacttgttcattgaaattatcatcactataataacagtataaccactaaattttgtaatatataaatggctagtttagccattggtacattttttttttaattcgctctttaaatggaggatttttttttttcgtttcttggtagtacattatacatgtattttgctttgcatttctaatacttttttcttttcaggccccgccagttaatataattgttggttcccatgtttgggttgaagatcctgccgaagcatggatcgatggagaagtttctcgaattgctggtgaacaagttcatgttcattgcaccaatggaaagacggtgagatacacccaccacaaatttaaagcataattctgttgattaatattttttgtaaataaaggatctctataaaatatgattgtttatgtcatgggctcttttcaattcatgatgtactagttcatgattcaacttaacttgttgctgaggcaagttaggaggacagaaagctaccataaatactgtaatatatgattgagtctttggtgttattattctcttgacttgtatatttttttgtaggttgtcacaaatatctccaaagtctttccaaaggatactgaagctcctcctggaggtgtagatgacatgacaaagctgtcatatttgcacgaaccaggagttcttaataacttggctgcaagatatgaacttaatgaaatatatgtaagatgcttaaggttttcatttcatattcttatatgctgaattattttttgacaaaagaaggaagaaagatgttgatatgttattaataatattttaccccagacatacacgggaaatatacttatagctgtcaatccatttcaaagattacctcatctgtatgatactcatatgatggaacaatataaaggagccgcatttggggaactaagtcctcatgtttttgcagttgcagatgttgcatacaggtgaaattaaatatcctttacaatccccttttttttcttctcttatttagcttgatctatatgggttcattattatctatgacagggcaatgatcaatgaagggaagagcaactcaattctggtcagcggagaaagtggtgctggtaagacagagacaacaaagatgcttatgcggtatcttgcatatcttggtggtcgatctggggtagaaggaaggacagttgaacaacaagttcttgaagtatgatagagctatctttattgggttaaaattatagtcattatctacttattagatcttccaatataattaacttgtaactgttgcctgaagtgttagtctgcttgatttttcagtccaatccagtccttgaagcatttggcaatgccaaaactgtcaggaacaacaactcgaggtgattatctgtttgtaccttgagttttaatatggttatatcttactaaaaacgggtggtgctcatatcaatggttcgactttgtgtgaatactatgaatgtaacctatgaaggtgtactttagtagtagttgatttctgtaaaataatttattttaaggtctatataggtacgttgctaataccctctttttttttgcctctgcctttactctactgcatgccattttctacctggaatgatgatcaaacatgttaagtggataaatttgattttttaacagttgttctattgttcaaaatatcctccctgtctagcatactttatttttgtaaaacctcaactctgccaaccctatcactttgcatcaaagatttctgtaaaataaaaactacgtttaatgtttgtaaattttgctttcttgggttcaacatattcaagtaacctattttactcatttgatatttgttctttaatgctacagtcgttttggtaaatttgttgagatccaattcgataagaatgggaggatatctggggcagctgtgcgtacttatttgcttgagagatctcgagtttgccaagtttcagatcctgaaagaaattatcattgcttttaccttctttgtggtgctcctcctgaggtagttacaatcaaactttatgtaaaaatttcctcaaatctttctaggccatatactcactgatactgcatatgcatgtgatgatagagtataattgattatttgtttattaatttttttactttcagtatagagagaactacaagttaggaaacccgaaagatttccattacttaaatcagtccacctgctatgagcttgatggagtaaatgatgcccacgaatatcttgcaacgagaagggctatggatgtagtgggaatcagcgaggaagaacaggtcatttttttgagcaattctatcatttttccttatgttgcattaagatttttgacacaaaaacttctctccaggaagcaatttttagggttgtggctgcaattttgcatcttggaaatgttaattttgcaaagggagaagagattgactcttctgtcattaaggatgagaaatccagattccatcttaacatgacagcagaactgcttaggtatacatttaaatcactcttgcatgcagtgcagtttcattgttacttgatgcttgccttttgatattgttatacttttgttaatttggatatatggtaggtgtgatgccaagagcttggaagatgcactgattactcgtgtaatggtaacgccagaagagataatcacaagaacacttgatcctgttgctgctgtgattagcagggatgccctagctaagaccgtttattcgcgcctatttgattggtacatgactctttcttttctatgtccgtgcatcccatgttgcatgtatatctgttatcaattacttcaaggactaatagtaatgtgcataccaaatgcaaataattcatattactaagtgtgttttaaaatgaatgtacattcaatattctgattttgacaatttcatccgtgtacaggcttgtggataaaattaacaattcaattggtcaagatccaaactcgaaatcactaattggagtccttgatatttatgggtttgagagtttcaagtttaataggtaagctgatttaatttagatactatatttcatgtgagatttggatttacagctgaaaactttccacactaaacagttttgagcagttttgtatcaatttcacaaatgaaaagctgcaacaacactttaaccaggttggccgatatctgtgttttattctcgcttcctattatgaagtaatttatcttgatctttatgtctactaattatatggttgcagcacgtgtttaaaatggaacaagaagaatatacaaaagaagaaatcaattggagctacatagaatttgttgacaaccaagatgtgctggatctaattgaaaaggtgacatatataaacattctattagcgttagtgttatataaaaagatcattgaaagatagtgctagatatataaaattaatgtttctatagtgtggcagatactcttttcat

SEQ ID NO: 861 - DNA, 1576 bp, Cannabis sativa
aaatattaaaatttggaataaaagtgattaaggtgcatgggttccatctcaaaaccaattagcaataggaggagtagcatattcatcttacatatgagaatttatttccacacattatcaatgtggaactaactgtaatacaccctcctcgtaacatttgagcctggaaggtgtatgtataacgagcgaccttgaagagacataagactgaatgtgacatttgaaagaattccacaacaaagctaaatatcagaagaacatttgtagtaggtgtatacgtcgtcggaaaatttatggattttgaaactggtcaaacacctccaacactggaaactagtacatattggccgaaaggtcacaaataaaggttaaaggtgaaacaacgaatgtttttagtttgactcgtctttttggactgacggtactttggactcacaacagatcataaacagatctgataccacattagaattttaagtgaaagtaattaaagtgcatgaaattctatctcaaaactaattaatattaaaaaaataaataattcattttatatataataatttattttcatcatgtcagactaactagcgaaagagaaattgaaaaataaaagcttttgagccatttaaaaaaggatgagcaataacaatctttatcaccatctttatctttatggagacaaaattcaaatagactcatcattacaaacatgttttgtgatgttcatatgcagatcttgacaaccactactaaaatgaaatgaaatggatttgtccatagaagcgctgaccatacccaaaaagttattattttaagaattattaagatttaattaaaactatactttaatttatatatctccttttatatttgcttatcttataatatattataataaattcctgccttcacataaatattgtgggctagaggccaatgacacattattcttcctatatatggatgagttgagataactcaacacgtagatatagctgttgtagtgaccactatccaaacccatttatgcgcatatatatttatataaaaacagagatttccacgtttcttggcttaaaaagccgagaaaccaagttgacttgagttttaattactcactttgtagcatgcttcatttgttttgcccacgattattgactttgaagattcatatttaatgatattagtaaagccagtcactttgtacatgttgaatatttgatatgaatcacttgattcatcatgatatatcttagaaatatttccaggaaatgtcactaaataattgtcggtcctcggcgccaagtcgggtaattaaagaaaatatagtttgtcaactaaaattggtttagttttattttattcaattattttaaaaaataaaattccaataatcagtacccaatttgaaaataattcttttgtatgctttaaattaaaaataattttatttgaacaaattaaaaataattcatccacaaaatgttcattgaatcccacaattggaagggatattttgcatggctgaaaatcaatgtcgaccaagcttgctcattttcttatttatatggatttt

SEQ ID NO: 862 - DNA, 1759 bp, Cannabis sativa
caaaagctacaccctctcactgatatgcctttatttatatgatggaagcaattacaggagtacaactaacaaaacagaaaataaccaacttttaaacagtaaagtcctaaccaactttcaacactaacatagttcacactaaattaagtctagttcacaataaattaagtgcaaaattagttcatcaatctttttgaaaggaatatagttcatcaatcttacgtgatcccgaattaattaatggattatttcaaaattataaataatactattatattttcatttgtgacaaaaatacggccttggagaatgcctaccaaattacacgtgattttcttttcattttttggcatggcaaaagtacattaattaataatcttttttttttttttttgataactacatcacttcttgcttcgattctcttgcccactccaatacatgtttatttgctttttgtgcctgcatgcatgtttcatccaaaattagaagaagttgttctattgataactttgaaattgaaattcaaaaggaaaattatgaatttagatgatgccatgtacctctttctcccaatcacatcgaatggtaatgatggccaatattaaggtctgaactgctgtccctccaaatatcatgccagcccaaatcccctgttaattgtgttttttcatattttgtatataggaaatattagtctataagataaacaatctctttattgaatttcgcatgttaataatttaatatataactaaataatgttactaattaacttaccataacaccttggtggaatccccaccccatcagaaacccaaacggcactccaatgagataataacaacctaagtttatgtatgccacatacgactgccacccagatcccacagccactcctgtaaattaattaaggaaattagtataatttaattaattaaacaaattaaactcaataagtttaaaaaataaaagattaccagagaggacaggttgaacactgttgagaagaatagtaaaggccaagaggagagagagtttattaacagcttcaaggacagctttgcttgaagagaatatcaaggcaatttcattgtggaaaatcataatcaaaacccaaaagaagagccctattactattgatgtcacaactgatactatggtcgcaaacttggcccctttcccatttccagctccgagctcatttgcaactcttactctgaatttaatacataatgtatatatacattcaaaataattagaaaatttgttcaaacaaaaaaaaaaaaatagaaaattgcaaatcaaagtattaaaaaaaaccacagcctctcatttgaaaaaattaatttaatcatgattattaaatgaaattaattaaaacataggaattttttttcatatttagtattatattatgttataaattcaaagcaattagaaatttgaatcaacatataaaattataaccagtctctccctgtcaaaaattaatttaatgattcttaaaataattttattaattaagacacaagaagaaggttttttgttttctgaataattagttaatttatatggtatttaataatttacactatgttgtaagtatcataataataataatattgagagaatttagggcaatgtgaaattttaaaatataataataatgaaataaatggagaaataattaaagagtgatacgcgtctcatggatacgtgtaccgagtaccgaccacaaaatgatatgagatgctag

SEQ ID NO: 863 - DNA, 1557 bp, Cannabis sativa
agtagagatattagttttgtcagaatgtttggggctattttttcactttgattgttgatctaatagtaataaagatgagaaaatatgataataacattgaacataattatagtttaataatatttttatatttttttattcaagaaaagagacttttcattaatcacaagcaaaaacaaaaccaagctctacaaggaaacccgtgaaaggcctacacaaaactagccccaaacataactttcctattaaactatacagtttttgtaaaaaatttcatcactagagttcaaattccttttaaaaacactatacaacctataacgaagtaacattttaattttattaactatacacacaacatattgaaaagatcctttaaaaacaaacttgttacaatttttccaaattccatacacagttgcagcaaggagaaaattattgacgtaaattactaaccccttcctagtagtgttaatcctttaggtccagcttttgaacttctgaggccaggtaataatgccagtcacgtgaagatcaactgtatcacttgagaagataggatacaatcgaagaatagatgagaatggctttcactagttgaatcacaaacaagacaattgaactctcaattggaacacagaacttgggaagcaaatctcaagatagaagttgagaattcaaggcctgccatagtataaatctatgtttaggaatactcaatctacactgaacattcttttgatacacaacagtaggttgttgcacttttctgctgtagagtttggaagctttaaaattaccagtttgacttgtagcaagaatacatttttttcgctaaaattctttctcaaatgacaaattttgccaatgctaacttgtatcctacttcaacttatatcgccagaaattagcacccttcaaatagattgtattaacccatttcacccataacaagtcatgcttttcaatgatatcccaaatgtatttagccaagacagctctgttccaaagagggccttttctaaaaccgaggcgtccaaagatctttggaagacaaaccttctctcaagaagctaagtgaatcttgttcttattaccttttagcccccaaagaaaacctctacaaagcttctccacctctttaatgatactttgaggtaacacaaacatgctcatccaaatagttccttaagcctaagagaatataatggatcaattgcacacgaacaacgaaagaaagatgccttgtttcccaggttaggagcttaagcttaatcttcttgaggatgatatcaaaatcttcaaatctccatttggtaggtcttaaagggactcctaagtacttaagaggaaagctaccttcctcaaactgaacttcgagcaagatggactcttttacacctgtaggaacccctatcaagaagacttgagactttgcttttattggcctgtaaactagaagcatttctaaaatcatctaaggcaattttcaaatgtctcactgcttgaacagtccccttacaaacacaagattagatcatctgcaaaacacaagct

SEQ ID NO: 864 - DNA, 4768 bp, Cannabis sativa
ttttttttttttttatttctaaatatcaacaaaattactatttcatgttaaaaaaatataattttattaatagtaatctgcaatctaatggttatatctttctcgttgaaaacacaagcaaaattgaaatcagaaaaaggagcaaattaattggttgcatgattcctgaatcgttttacaaaagaaacttaaatagactcagatgaaaaaaattacagcatcacggttaatgttgagaacatttatacttaatttacttcaccgcttagaagatacaataatagattaattgcagctggttcattcaacctcttagcttgagcatttaacttttgtgtaaggtacgtaactgcaccactaacaaccccttcagccacatataacttgttattcccatccactagcagcaatttgattgcgagacattgaagaacaaaaagacgaaccaacaacgaaataaaacaaaacataagtatatcacatagacaacactaatagcaataggaagattacaaatcctggccaagccacgcctaagcctagagagaattggcaagcctgatcgaagaaaaaaataacctcaactgacgaagaattcaggttgaaaaactctaacacacaatatcaaacaacttaattttcacataacaaaataattacttgtgacattttaaatgtaacggaaacaattttaataatatgttaattttttaatgatattttatatatatattttgcattagaatttgaatattataaaattatattttctattacttcttttaaaatacactcttatttatttattttttattttaaatttatagaaaataaaatataaaattagatagattgaaaggacaaattaaaactacaactgccaataataatcatgtaactaaatgattctttagttttgaataaaagttttgaactaaaaataaatatttataagtaattttaatgatgattttctttacacttataagctataattgtattcacaaaattacaacttataattgtctcttaacaaattttcaaacgctctttttcattagtacaattctatttaaatttattcaacacaataatctcatgtgaaaagagtgtatctatcaaaagctttcattttcttagaaagaaagataaataaaacatacaagtcactaatctaagctttcctctctttctttctctgccaaattcattcaaaagaaaagggtataaagaaaagagttaaccaatgaaaaagcatttctcttatttttttttttcctttaatttacaataataaacaaagaacaaaatctaagttgtattgtatatatggaagagcattatattaaatataatatatgtcgtccaaatccaaatccaaggaatcacgtgcagatcactcttacgttactgggttggttcatttaatgggccgggcccactaccagtcagtgaaactggaccgtccaataatggtactcccactcttgtttttaggtgtggagctttccacactatatactatgttcctctcttctgtatctatatctatatctatactatatccattacttatatacagtttttgtctttatcttcaagactcagaatatacgtagttttatactctcagaaaatacgtataaccaaggttaatgatgagagagagaaacaacaaagcaaaccagtgaagaagaggagacaagtatttgagaagcctttgctcttgtgaactctaagccacaatctttgatacattttctgattttagagaaagaaaacacatatacaaaagggtttctttttttctttatttcctccgcatttgaaggctccctcaaacaaaataccaggtgggttttcaaaaaaattcttactttattttatgggtttaagaaatttgtttgattctttgtttcttctgatgtgatattggatttttaaaaattggttctttttttttactttcgatcatcttagtttgatcttgacttaggctatttttttattatttctttttttttttttgttttttgtttgggtttagattttcttttttgtttggggctgattttgggatttaagtgagtgattatgttgggctgatgattcatctgttgttgacccatttgatgcatttgaagtagggactgactggttgatcgaaatggatttttggtatctgatcttgtacttacttcatcctttactcttttttcgcatgcaagttcaaattaacatctgggttttggggtacagtacaataatcaaatgatcaagtgtgctttcatgcataatatttcagatggaactgacattgttggtttttttagatgggatcaacatacaattgattatagctttatggtctcatagcttcttaagtggctttacttggttttccttttcattcttactttatgctcatataagcagttctgatcttgaccattgggtaaatgtttcttgagttcatctccatttgtgcttcttcggattgccttaaatttcactatactttggtgaaagtttttgtagttatgctcccccttttcccccaaaatgaaaaagaaataaatgatcttggggaaaattatggttctttattgggtattaaggaaagccatccgtttctttaaatttatatttgtgtgttcaattagttctaatcttctatgttttgttgtttgagagttccattaatgtttccattggtaggaacccttttggtattgcaagttcctcttcatatattcgcttgttttagattctcatttcttaccttttgtatattcatttatatcatttagctaactaagattttttcattatgccttgtgctcattgtttatagtttccagtcattatttatgcacttactttcaagtctactcctttgcaatatggagttgtctattttatgataagaggactaaggttcatagattgtccatgatttacagaaatggccagatgaagaacatgtatgcatgattatctaatggctgaatccgattcagagtccgatgcccagtcagatgtgtcgagcctgaggcatataagcagctcacttttcaatatccctggtttctttgtggggtttggaactaaaggttcatccgaatctgattcaatcaggagtcctacttctcctcttgatattggagttttttcaaacttaaggaatcctgtaagtcttcgatatactcgatcatcatctgaaaatggacataaaaagaagtggaattgcagtaaagtagtaggccttggcattgtcaattcacttgttgataatacaacaggtggcggtcttgatataccaaagcagaagaacatacttttcggaccccaagttaagactagtaccactaattccttgaaactttaccatggttcgctcgattcttcgttgaaatccaagtcactgccaacaaactacattgcttcaaggctttctgaaaccaagtatcctagtccccatttggttagcagcagtgttgcctttgataatgaaattccattaaagcctgaaccattagaaaatactcaactatgtttctcggattcaactattccttcttcactggtcagcttgacctacaatcacaacttgaggtctgaaaacttctgtccagaagttaaaactagaatgagttcaccatcagtaattggctcaacaagttcagaagtgaaaaattctttggatatcaaaacaagtactcttccaatacctattgagcccagccagggatttgtgggctctctttctaagaaggagatagaattgtctgaagactatacatgtataatttcccatggtccaaatcccaaaacaattcatatctttggtgactgtgttttagaatgtcacacaaatgagataaacaattttggcatgaaggaagaactgggagtcaaatcacctcaagaagctaataactcggagggattagcccctattccttctgatgaagttttgaaattttgtcactcctgcaagaaaaggctggaaactgatgaagacatttacatgagcaggtttctccttctcatatgtctatagaaatcttcacttggtgtttatattatttttagtcatacctgacataaatatgtattcttctctcaacagaggtgagcaagccttttgcagttttgattgctgccccgaggagatattggaagaagaagcggagagaagttaccataattctgcaggaagctctcctggttcaagcttccacgaagatgtcttcttgttgggcatgcccgttgccatgtgatggatcatcgacaatgcttttttcaggtttctagatcgtccgttgataagaagtgctgtctgtgtgattttgttagcagccatggatgatcaaaaagcattttgttgttttgttttttgcttgttatgtctccgttttcaaatattattgatactgttaagttatgagtagttgcagtagtagcatagagtatctctttatggatatgatgagactcagaccattttgctatcttataattttgttaagatgggttgcaagtggctatagaaagccctggctcttcggtttttcgttcgtttttcctggcctcctactgttggttaggagttgatgtagaagtttttgaacctgatgagcttattatataatgcatgagcatattcaataacatctatttgttcttatgcaaaatgctttccatcccgattgaaaatgtctcccgagccacgctgggaagcttttgcgggtctgctgatcaatcc

SEQ ID NO: 865 - DNA, 1703 bp, Cannabis sativa
caccatcaaaatctttgcaaaactttgattgcgctatttaatcgtctactggaagcatgagcatggaaattttttgtatttttatcaccgcatcgcaaccaatccactcttgatctttgttgccaatatgtctcctctagtgataaaagctcgtccaaatttcttctaatttttttcagttcttgcattatgtcattatcccttactgcggaattattcgggttcgaatagccctatgaacttatgtaaattaatctagatgttgtgttgtaattgttgaaagttgcattgccattgatcatttacaaagcaccaaacaagcctttccttgattcactttatgccttcttttaatccaagtataagggtctccttcaaaaggttgctcatttagataacaattgtcaaggactcttcgaaaattatccatttgagattcattccttaaagcacctccaagtttatttttgttcgataaaatttcgttgaaatccccaatgaccagccatggcatcaagggagcaatatccttacatcgttccatgagtttccaagtgtgaatgtgattttgaatttcaactgcaccattaaatgcagagaagtgccaagttgatctgtcatcacataccatgtaacagtcaaagagatttgcattaaagtttagaagtgttacatcaatattatcattctacagtaaaagtaaacctgcacttaatcctactgtagggtcttcaagtccattattcaaatttaaagcttgacgaacacgagaaattgcattatttcctactttagtttccataataaataatacatgaggatattgctctttatcaagcaaccgaagatggcggaatgcacttagattccccaaaccacgtgcattccaattgacgattttcatggctgaaagcagggatggaaagcagcctctgccaagttgtccatggagctagaatgatcaaaagcaaacctagaaacattcttgtttgactcttcttcagtggacaaaactgaagttgaggtggtaggtttgggacccctacattgattgagagtttttctcacaggctgattttctagctatctctagcacatacagtttggggaaaaaatttccttatcatcattaatagcaatagtgctactaatgatcgagtctgagacaagagaagaaatggattgcatggtaactggtattgaagtatgctgaggcatatttatgaatagtggcccctatagataagttgcaacatagcataatttgttaccaacacttggcatgtacaactcagccaaagtagactcattgggtgacgaagtggctggcatagcattgtatcttaaattggtattagcaagattaaattcagcaggggtagtatttgtagaacatgttatggtagtgactgcaaccatattatactcatgagtttcatcatgagtaccagcagtagaaaacgaattggaatttggaattaatgttgaattgttggtgcaaaattcattgttgtagttgttgcttgatcattagattgcgttgattgcttattagtacagcctacattcagagttgctggtgtgaaagtcaatgttgtggttgttgcttagttattaggctgtaatgattgttgattagaagactctccaaataagagcttcttgggttgtggttgttgtagtggaagagagggaatggtatt

SEQ ID NO: 866 - DNA, 2853 bp, Cannabis sativa
tgtgtattattttatcttattcaagacagctttcctttgcttgcatctgtggttaatcgatgaataaacgaagacccatcaccttggacaaccaaattggggattagctgtggtgggctctctctattatgggacccttgatcattataattaaggaaaggattattattattattgggaatactataattgtactcaacttgatgaagtgccgccttctttgctagatgatgataatgattatggtcatcatcgaatccaggactacctctatcaaatattattgatgggtctttgatgatgatggaggatgatgatgatgagccacattgtctaggctgtgtttggtagaaaactttagaggcaactaactccccatctttttcttcttcattattgcccaaatggtattggtgcataacccagttagttttctcaggcttcctttgcctaccgtagttggtgtatagaactaagatctttttaaaacccttcactcctccgccaatgaatacaggccttgttttacctgttttatgccatctcgtttcgcttccatcctcgtctgtgttaaccttcctacgttttcttgtgccagttgtgtaagcctttgaaggtctgtgaaagaagtgacgaatttgcccatctttacttactcctgatccaaatatccaaataaaacaaacacaacactcaattgtacattttatataatatatatattgatataaatgtgcgaagaaattgaaatgtattatatatctctctcaatacaatacaaaagttttaaaggcggttaagtaaacttagtagctaagtcacaatatttctcaagtgtttaattacaaataggcatgaacgcgcggtcagatatatattatatatgtttcacatacttcccgtgtaacatacaaaaatctcactatgtgtataaatattttaaacaaacattaaaatagaatataaagtattatgaataaacaaactgtatacatatgtatatatataaatattatattttctgaaattaatattctgcattattccagtcagtaaaataaaagttattgtatgccttaatgtgacacatcttgttaatttaagattcatacatatatgtatttaaatgcgcatgcaaaggggatcttaagctaattaataatagggtatataaatataatatgcataaaataaatatataatgcttaatttgtctacgttaagaaattaaacctgaagaaaatgataggttttaatttggagttatttgagggtgaaagaaagagaagaaaaactaggatgaagcagatgttttatttgttattatataccaaaaaagagaaagagtattaatacatccataaattatccgtttctacgcaataacacaattaagtatagtcacaccccaatacacgcataaataatggattttgtacgtattagtttttatgtttcttgtaatttcacaccaacaattagagagacgtaactccaaagatccatattaatatacttaatcaatataaatcactatccaattttaaggattattattataataataataataattattattattaggggtttttttcaattttacatttcaaaacaattttttttatatttttacaaaaatctacatatataataacccacatataaaaactaagagagcaacttaaatcgtaacaaaaattcacataataactcacataaaaattacaggaggaaccaccagatcaacccaaactacaaatttaaaaaaagaaagtaagaaaataatatatatatatatataaagtaattccacatattattataggttaacggtcatgtgtgaattttatatacttaactctcttatttttttagtatcttataaatttgaaaacaaaagtaaaattaagagatgttgccacagaaaaaaaatagagttaattcatgtataaaaattaaaacatacgaggttcaccaccaattattctatttgttattatatatttcaataataaaaaacttgagtgttataattttctcacaaatttacatatatatatatatacaaaatataatttgaaacttgtttaggttgaagagattatatgcaaaacaatagtgtaaaaacaagaatccctttgatatatattaggtgttaattaaaagatgttgcactcttctaaatttctaatcaattacgaaatttagcaatggcaataaattattagaaattgttttgtgtatatattgtacaaacacattaaactaaatttgacaatattgtaactaatattgtacgtgtactctatttgatttaggtttatatagttctctcgtaataagatcaatgaagttctataaagagaaaaaacaatttatatatccttattattctgctggctccacaaatttataaagtcatataaaaaataaacttacatagcgtttaattggagaattaaaacattagttatttaattaatatataattacctggaagcttttctgggtgagtgtagcaaatcccattttctccttcaagtgttggtatgaattcatcaatgaggggatgaagcttacccgaaatatctgagtgtacttttgcctctaaatgctccagtatttcttgatccgtaggatcaaacttcacacccgctggtagtcccggtaaatcatgaattcccgcctgcttttaattttttttttttttgagaaatatttattaataaaattaacacaattaatttggtagatgtgtttatgtattactcaaatattattcacaaaataaatatagataaataatcaacaaattaattaatttatacacacaacctaattaacatctag

SEQ ID NO: 867 - DNA, 1580 bp, Cannabis sativa
cataattagcgagcaaagcaaatatatttcaaaggttgggattctcatcgtgattcctttcctgatggaaggttagctttaattcatttgttgtatgagttttaagttgttttttgatattgaacttttagtactaataaacaatttttcagtaacattcatcatcttcgagattttatcaagcatgtatacttggataggaaatatacttcagaaaagagtactagactaccaaggcttagattggtgaggtttatcttattgtttttttattagattttttgttaatgttgtgattaggagaaggtaaattttgtagagtttaattcttgttttctattttttgaagagtgacaaacatagctcaagtgaaagtaggaaggttaataattgtggtgctgaattcaagagttgtcatgatgaggacaagtttgaacaaacttatgctgaaaaatctaatcatttaggaaaatgtgatgagagaaatattaggtattactatgatgaaagtcgaagtcctcgatactcgagagaaaattcaagacatggaggttatagaaggagtcctgtgcggtttgagattgttgatgacaggttcagggatgagggatttggaagccgtaggttttcgcctagcgattcaaagttaccgaatagaaaggggaccgcgcatagttcttgctcgccggttgcacgtcctataaaagagatattaggagagaatgttcctactctacatgttggtgagaaagtgaaagaaagtaataagaatcatgttgatagttctgctaaaaatcaagtaagcagtctctttgttatagttttgttttcacttttggatatttatgctttgttaatgcaacacttaatgcaattgcttaatttgcattagcctattaattctgttgtattgcttcaagttaaagaaatgtgattgttaacattcataaatgtagttgtgtctttttgtttggtttgcattgaagtaggacactcaattggtgtctttaacattagttttctatggattaacattttgtgctagtgtgatataacaaatatattggtcattggtggatggaactagtgtagggtaagtatacttgggaaggtgaactagttgaggatagcttaagtggccataggaagatgcgtgtgtgttggaggtcttgggttcgattcccaaattatgcaatgtaatatataaaccgctaaaatcaaatatatatatatatatggaaaggtaagaagaatgatgattttgtatgggcaatggctcttggaagagttggggtctcttcaaaaactcattgctaagtggttctattatgttcaattaaacatcaatgatcacatttacctatttccttctattctcaaattctctctaattttacttattcctaagcagttaaagtaaggtgggtacttcaaatgatcaaatatgtggtttgctcttcttaggtttggcacctcctgagtacctacatagtaattgttatagttttctggttcacaaaaattgtaatgaaggagtagtggataagctagaatagggggcaatatagagtggtggggtc

SEQ ID NO: 868 - DNA, 1798 bp, Cannabis sativa
tctctctcactcttttttagttctttctttagtaatcttgaattgaataaattatccattctctctctccatctctctttctctgttgaagaaactcccaatggcatttgctgacaggtataaaaattgttactttactcttgtaatcccagaaccaaatctattttcctttcaagctgttatttttattttatttttctcacctttcaaaaaaaaaaaaaaaaacccacttcttgattgttaatagaatcatatgtcagtgaatgaatggctggaaagagcacttgggttttatttatttattttttttattttggttctggtttatttattaagttatttgtgtcttatgatcttgaccagtacctttcttaattttcagcttcccaatatcttggagcactatatattatatgtactacaacttatttacttgtttacttactcattatttattattattaatcaaaaacaagcaaaagcttgaccttgactttctattttgaggttattgtttaagtataatctttttctgcaactgcattttgagctttcttttttgttttaatttattatgttcatcttctctttcttcttttgttgtttatgtttttatgacattcctaactaccttaaagaaatttgtcttaactgagctggtaagctacttataattaaactactgtggttgttgggttctattattgtataatctaaacttgtcattttcttcctttgttgaaaatttcacaaccataaactcaataaggaaattttttctcaattggtttgctcacttaatctgtttacttgtgttgttgtaaagggactagattaataattactattaatgtctatgttgatgcaaaaaaatttaagtactaatttgtttccctttataggtgatataataaacaactaagaagctaaattgggtgagtcgttaagatcaggagaagctaaagtagaagaagaaattgaagaaaaagttaagagattttatggactggaactcgaaagcaccaccttcttgggaatttactgaactagaacaacaaactttctccaacttaggcacagttaatggagattataataagattatcagagaggatttttcagtagatttgaagctgggacaagtgggaaattgtagtaataatgacttagtggatgcaacatggaaggagtcaggggttccaagacatgttccttcttcttcttcttcttcaccttcaggatcttcgaaacggtctcggggttcttacaatggatctcaaacggtttcgtgtcttgttgatgggtgcaatgctgatcttagtacttgtagggattaccatagacgccataaggtttgtgagcttcactctaagactcctcaggtcacaattggtggtgagaaacaaagattctgccaacagtgcagcaggtatggattattgtgttttttgttcattaaacttaagagtttgagagatggaaactactcatttatggcattgtcatagttctagtgagagttttgaagtcatgtcttgttgttaaattgagttttgtggaaatctatgcttcatatttgtcaatataaaatcattttcactcagctgaagtttctcacagcttcatctgctttttttcttaggttccattcactcgaggaattcgatgaagggaagagaagctgcagaaaacgtcttgatggacacaacagaaggcgaaggaagcctcaaccagagcccttctcgcgctatggtagtttagtgtccacttattcaggttagtcactctgtttttcata

SEQ ID NO: 869 - DNA, 4510 bp, Cannabis sativa
ctcttcaacaccttcatcatcgtcaaactcttttttccttctctgtcaatctgaaactgtatcccagtcttcctcctcccaaatagtttcccctcactcttatatctcatatccatctctttcttcctcatcatctactccttttgtcctcctatcacaaatgaataccccatgcaaaccatagccaaatatagcattcaaaaactaaaagttctcatggcatgtattcttccaaccattgtgaagaaagcccttgaaaaaaaaacttgggatattgttatcttactcccggcaggtaccctattagttgcaaatggatattagttgtatcaaattatgtccctattccactgaattattgagattgttagattcaaggactttgtcttaaaaaaaattctaatatggatgaaagttcaagggcataatttagtacatatcaaagtttgagggacatgatttggtagatataaagtttggagagcataatttagtatataaacaatcaatggaatagtaaaattgaatgaaattagataaaagtccttaaatttaacaatctctatagtttaagaaaatttctaacggcaaaacaaattcagagagtatgatttgttacatatcaaagttcgcgagaaaaaatatttaagtttacaattgtttaaaaggaaaaaagaagtaaaaatgtaattttttaagagtggagttggagaagagaggaaggagggaacaaaacaacccacatctcccgctaccgtcggacctccgccgctcactctcttccgccaccctcaccttcgccttctaacttcttcaaacgcgtaactctccaacttctatttcattttttccatttttgttttttgtattcttttttgctttgtacaaaacttctttgaactggagatttgttcccttgcacattcttcaatccagagttttttttttcctttagtattttcatatttggtaatgcatattaaatttgggatttcatcatagactgaaaatatgaacaccttattttttgatgcataccatgtgtttgtaaaaatgactcattggaattttgttgtgtttttcttctttgtttttccctttatttatttattaattaatttttaatgtagacatatgtatagatatatttttatctttatttatagagcctaaaatacaatgtttgttttatgttgttttggttagttttgagtgattttatgttcataggcacaattctcacataacatttttgcactgttatgtttttagagttttgtactgtctccatgttcttaactatctttgggtttgcacaatttcctgctatgtttgactttaatttggtttgtgctatctgtgttttcattgtgagtatatgactaatgatcatgatgagttttcttggatgataactcctccacctttcgtgtaacaatgttattttttcaaaatttcacttctaagctactgataaaaaaaagtttatggttgtttagcaaagactaaaaccctgaattgaagccttaaaccctcattctgcagggagtaggaatgggtttctttgatctcaatataccatatttggaggccttgccgtctgataaggctactcggatcaagctagctactatggccatggagctcggttactccggagttgcttacaaccgtaccatcaagggtgtgatgtcagaacgtgatcgttgctccattccccttcttactctctcttctctcctcaagctctccccctctctcgcctcctctgtctatttccaccgtggcctccttggtgtaccaaacgcctcgccttttcgacagtacacgcgccttactgtcaatgctgatagtccctctcaagctcaggctctcaattctggaaatcctattttgaagacttacgatttggtctctgttaggcccttgaatcagaccatcttcgatcaggcctgcgaaagattggaggttttgtgattttcctatctctttggttgctatttgcattttaattatgaggtgtgtttgttttctcggaaaatgaataacttcatttgtgggtacttctcgcaggtagatattattgcgatcgacttctcagaaaagctgcccttccgtttgaagttgcccatggttaaagctgctataaaggtcttattcgcctttagaaaagttgaaaaaaaaaaattatgtgacataattatatgtatgacatgcttgtttttttcttctccttctgatgcagcgtggtgtgtttttcgaaattacctattcaaacctcattactgatattcaagcgaggaggcaaatgataacaagtgctaaggtgaggtttaaggaagttatttgaaaataatagtgtaattaaaaatagtttataagaatgttgaaattggataatctcagtttgaattatattttttccccgaattttatcatgtaaagacttggccatgagcttgagcaacagtttgtttaaaatcattttttgctagtttttgataaggtatgttgatatgtgttttagtttcatattattattttgtgggattcatgaaatttcagtttgcaccattatgtgattgaaatttcatattattaggacactaaaggctttacagtgtcagaacttgatatgtcttttttgctaaagttgtgcacttgtttacaaatttagtgatgaataggaaggtttgttatcctgatgacaataggattgctatagctgttggcttgcattatttgtggttcagctatttgcttaatagatccacatcctgtggtggcttagggattattcaccatgttcttgaatgtcaatatcattgctactcctacaaatgttgaagctctctcaaacagggcctactcataatcgtatattcattttaggttgaagtcagctatgcctatatttactgattgtctatgttttatgctgctcaactttcagttacttgtagattggactcgagggaagaatttaattatctctagtgctgcctcttctgtttttgaactaagagggccatatgatgttgcgaatttgtcatttctgcttgggctctctcttgaacaagctaaggcagctgtttccaaaaattgtaggtatgataacttgcaaaggcttctcatatatgttgacactatgttttatgaccttggatctttatacttaaactgtcttgcagggctcttataacgaaagctttgagaaaaaaacaatttcataaagatgccatcaaggttgaagtgatatcatcaggagaacaaattgaatctgataaaccctggtctagtgacttgtttaaatgggatcccatctctagtggtgatggggatttgcagttggaggatcttgaaaagtcttttgctgcttcccatgatgtatccaaaaattcaaaagccattgatttcagttccattattggaagtttaccttcacatggatttcaagttaaggatttgatatctggagattcacaatcacatgataatagcaaaaatgttgcttttgttgctgaagcaactccagtactagattcaacatatggagacttaaaacagcacaacaggcttgatcttcctaaaccaagtgcaacttcattttatgaagcccgatttaagcaacaatcctttggaaatcaaaattctcaagttttatgctctactgatacagacagtttgccagattctatagacattggagaattgacaacagccatgaaggtagaagcaactaatccaagtcagcccgctgtagatagtgatttgattcgggcacaaacttgtgattcaccaaatgagtatgtaataaacaaatctgatgttttagattccgcttttcgtgttgactataaggaagagactttgactctttccaaagatacagatcttcctgctgttaatgaagaacagaatcttatagtttgtgatacatcatcagaggcaatagatgatctgatgaatgaggacttgttaaatcaagaagaatgtttgccctcgaataattcggctttacacgaagaggaacaatccgatgaacctgggtttgttccatttgtagaggataataaaccagttgcaaattgtgaaccattagatgaaacaatggaggatcaaattgaggcagaatgcagtcatctttccattgttaaatctccgccaggtataccttctttatgaattgttattcagtttgttacttgtattgcctctggaagaacaagttttatacattcacccaaaattatgtaattttctgtctgagattatttaatttcatctaatgcaggggaattgaaagcgaaaagaaagatgcggcgtcaagctttgttacttcctctcaagcacaggttgagtacctctccttttaagaaaaagtctcgtaaaagcaaaagaaaaagtaagcaggtttagtttttctcttttcatctgcattgtctattgacaattttcattattcaaatagaaaattttgatctgagtatcttgcttctcttgtcctgca

SEQ ID NO: 870 - DNA, 1051 bp, Cannabis sativa
tgtgtgtatagagtggtaccggcaacaacagagatacccatgtctctatagcgatcaacaaaaatatcgacggtgtctttgaatgccttgtgatctaacaacaacgtcgttatatcttgaaacattattcctgtacatatatatatatatattatatgatactccacgtgtttgaagaaagttctaaaagagataaaaagaaaaaaaaaaaaagaatatagaataatatggtgtaaagaaacaaaaggttgtgtagtgatctgagctgagctgaaaggttgaatgagctcgttcagctcatatgagcaaaacagttaagtaataagataactaaaataactgtataactattatttattaaaaaatagaaaaggaatttgacagaaccttgtttgggaaagtctgggatgaccctaatagagtctgatatggcttgaagccttggatctcctttgagtccattttctgctgcaaacatcttcaatttcactttcttcagctgcctctgtttttttataagtaaatgctactcaaaatcactcttttggaggagggttttttttccttacccttgttcatttcatagatgccaaggccttgaaattgctccctcaatttattgacagattcataccttaaaatggaaaaagaaaattagctttatttggtatttctcatttttctttcctttccaattttcaagaagagaagagaagagactttgttgagttatttactatcttttaccctcaacgagaaaaaagagaaaaaaattggtataaaattactctgattctcatttctcatttctcaatatgagaaagagaaaaagaaagaggagagagtaattactatgggtttttgtttggtcattaaatatggtggccatacccaatataccactttcgaagatacgttcgagattagttcatcattacgcgacccttttgcacgtgtactacacgccgccttaatcactctcttcagattatcaaagattcggttcggatattactcatattaatttacaacaacagtaatcacaattact

SEQ ID NO: 871 - DNA, 645 bp, Cannabis sativa
ccatggagattgctgggaagctttcgttttcgctgctgattcagagatcatcgctttaagttatggggaatcgctcggattagccgagtcgaattgggaatttttgttttgtttctaaatttgaacgagatcgtggttgttggttttgttgttaggtttagttgttggttttactgagctctgatctcgaagattttgtatttggcgccgtctataccatttcgggaaaccaggataattgtctccgagttaaggatagtgctgtcccctctaagcttatcactatctttatttttacttaacaatttaagtacgaaagctcaaagatttagggacgtggaggctctgctaacttctgtactgggattcagacccatttgattctttcaagctctgaagcttttttaagagttacaagttggtcccaaggagagaaacaacttagtttaggtctggtgttttgaggtgagaactgaaaatggctatgtcctgcaaggatggtaaaccgggactagataacggtaagtatgtaaggtacacacctgagcaggttgaagcccttgaaaggctctatcatgattgccccaaacccagttcgattcgtcgccaacagcttataagggagtgccctattctctctaatat

SEQ ID NO: 872 - DNA, 4372 bp, Cannabis sativa
caccaacagggatggtgctcctccttctcatctcctaaacacctactcacaacagccaacaacacttaaccagcccttctccttgaaactcgacagaaacaattatacattgtggaaaacaatggtctcaaccattgttcgtggtcatagactacatggttacttaaatgggactaagatgtgtcccccagaattcataccagtgacaggcgaagctaagtacgaaggagaacttgaaacaaaccctgaatatgagcagtggatcatcaatgatcaattgctcatgggctggctttacagctccatgacagaaggaatcgccactgaagtgatgggatctacaactgcagctggtctttggcgagccttagaaagtctctacggagcttactcaaagtccaagatggacgaaaccagaacgttgattcagacagtgcgcaaaggtaccactcccatggcagagtacctaagacagaaaaagaactggtcatatgttcttgcattagctggggatccatatcctgaagcacatctcgttgcaaatgttctgtcagggttggatgctgaatacctgtccattgtagtgcaaatcgaagccagactcaccacaacttggcaagaactacaggacatattactaagcttcgatagcaaaatagagaggcttcagactctcaattcaagcaacaagcctcccagatcctcttctcctcaagcaaatgttgctgccaaaagcaactctggaggaaattttgcaagtcgtggaaggggaaccaatcaattcactggaaatggaggacgattttctggaaatcgtggaagtacaggaggacgttttcgtggccgtggtcgcaccaatacttcaagaccaacttgccaagtttgtggcaagtatggtcactctgcagctgtttgttataacagattcgatgaaaacttcatgggatctgaccccaacaataccaactctggaaacaagactacacagactaatcacaatgcctttgtggccaaccctgaagttctcgaaagcgatgcctggtttgctgatagtggggctagcaatcatatcacctcagatgcatctactctaaaccagaagcaatcctacggtggtaaggaaaaagtcacagtaggtgatggctctcaactcaatatatctcatattggtagtggtagtttggatactaatgatggtaatcaattaaagctgttagacatgttgcatgttcccaaaatagccaaaaacctgattagtgtatccaagttaaccaatgataacaatatactaatcgaatttcattctgatatgtgtttggtgaaggacaaggtaacgcagaaagtggtgctttgaggagtgcttaaagacgggttatacagattggaaactcatcaacaacctccattttctgctcatcacagtcagtttcaagtcacaaataaacttcagtcagagtcatcgagtcgtcctacttgtttttctgttaattctaggttcaaacagccaagggctgataggagttctgtatctaggcttaatgtgtggcatagacgtctaggccatccttcacctagaattttaaatcttgttttagagtctgccaatgtaaagaaatctaagaatgaaatgcaacaattctgtgatgcctgtcagtatggcaaagctcatgctctgccctataaattatctaacagtcatgccaattttcccttagacttaattcatacagacctatggggggctgcaccagtaacctcaaatggaaattatagttactacatacatttcttagatgatttcagcagattcacttggctatatcccctcaaattcaaatctgaagcacttgatgcattcatgcaatttaaaagcctagttgaaaacaaattcgatagaaaaatcaagtgccttagaattgattggggaggtgaataccatcctttcacagccttggttcaagatcaaggtatagaattccaacactcttgtcctcatacttctaaccaaaatggccgagctgagcgcaagcatagacacattgtggaaatgggtcttaccttgcttgctcaagctcaaatgccattaaaatattggacagatgcattccatacacccgtgtacttaattaacaggttgcctacaccagtgttaggcaacaaatctccctatgaagtgctgtaccaacacaaaccagattacaagtttctcaaaacttttggcacagcatgcttcccttgtattcgaccatattagacacataaatttaaatatcattcattaaaatgtgtcaatcttggttatagcacttctcacaaaggttataagtgtctcactcctacaggtcgaatttacatctctagggatgttgttttcaatgaacttgaatttccattcaagcaaggttttctcaataattatcaaactccacaacctgttatcattcatagttcaacatggtcaacacttcctttttctaccattgatgaccaaaatcaatcagtttccagatctgttacaactcagtctgcaacaacccccaaagcatcaccaggatcttctgctgttccaactccttttccaaatactgatcctgactccagtcctgcagaggaggataacactcaaaattctctgcctactggtaatcttgatccatactttgataattttgatgattttacaattgagcaggaactcgagtcagaaccatccagtgaaacacatactcatatccctgagccagaaactgaatctcctcaacctacccttgccacagccttgcaacccactcatcaaatgatgactcgtgccaaagctggcatcttcaaacccaaaatttacctcagttcagccaaaaccataactacctatactgaaccagaaacagtcgaagaagcccttaaacacccaggttggaacaatgccatgaacacagaagttgtagcacttaagaagaatggaacctgggtacttgttcctccatctgatgctcaaaacctggttgggaataagtggatttttagaataaagctaagagccgatggcacagttgagagacttaaagcaagactcccaaaggttttcaccaaagaccagggatagattatggtgaaacctttagcccagttattaaaccttcaacaatgagaatagttcttacaatttctgtctcaaaaggatgggacataaggcaacttgatataaataatgccttcctaaatggtgtcttggaagaggaggttttcatggctcaacctcaaggatttgaagagaaagggaaagaaaactgggtctgtaaactgaataagtcactctatggcttgaaacaagcccctagagcttggtttgacaaactcaagaacaccttgattgactggaaatttgaaaattccagggctgacacatctctgttcttctacaaaacagggaaaattgtgattttggttcttatctatgtggacgatatcatagtgacaggaaatgactctaccagagtaaatgagttcatagtcaagctcaatgaactgtttgctctaaaggatctgggacaattacactttttcttgggcatagaagtgtttagagacagcactggtttgtacttgacacaaaccaggtatattgaaaacatattgaagaaggtaaatttgggcaatcttaagccgtgacctacaccaaatactgcaggcaaaccactgtccaaaaatgaaggtgagcaaatgcacaacccatctgtgtacagaagcattattggatctctgcagtatctttgccacaccagacccgatatagcatactcagtgaacaaactgagtcagtttttacagaatcctaccatagttcattggggtgccttgaaacgtgtactgagatatttgaaaggcacaacaaccttaggactgcacatcagccgctgtaacaaccttaacctcactggtttctcagacgccgattgggcatgtttccctgatgacaggaggtccattgcgggctactgtgtttatttgggagaaactctagtgtcatggtcgtctaagaagcaggctgtcgtctcacgatccagcaccgagtccgagtacagggctcttgcaaatgtatcagctgaaatctcatggatagagtccctactgaaagaactaaagttttctcttggtctgccatcaattacctggtgtgacaacattagtgcaagtgcactagcttcaaatccagttttccatgctaggacaaagcatatcgaaattgatgttcactatgtgcgtgacaaagtattacaaaaacaacttgaagtcaagtacacatgatcaagttgcagatttgtttactaaaggcctatccaattccagattctcatttctagttgacaaactt

SEQ ID NO: 873 - DNA, 623 bp, Cannabis sativa
atatatatataaaatggcactgaagttgcagaaaattcctttctaaaattcaagagcttgagcttaagaaaatttgacggatgccaaatcctggctttcttaggaaaaagaatcaaagtttcaagttatgtactgagaaaaatgaacaggaactagatgcttgattacaactttagtataaaattataatacaaacgtaaaaacaacattaccaacacaattgaccttcggactaaaagggtcagtagcaacttgttccttgtagctcttaaatccttcaattatcacctacaaccaaattaacacaaatattaccatgaaaatctgaaaaattaaatgaaaatgaaattataatccttccaggcaccagatacccttacctgctttatgtacatggtgaaattacaacactatcgaacctttgtgaaagcaaatcacagaaacaaaacacgaaaaaatgttatcaatcagtagtagaagttacaaaatataacaaatctcaaattctcagcttaaaatccctaatctctcccatgttcacttacaagaaatctaagctcactacaacatttctaaaatttcttcatatagtaaaaacaaaaaaaaatatatattaaatgtaa

SEQ ID NO: 874 - DNA, 4592 bp, Cannabis sativa
ttgcaattaaaatgagtaacatcctaatttatgtgtgtttcaccataggagaatagaactcattgtaaccaatcatttctctctgtgtgaatcctcttaccaacaatctagctttgaacattggctccttaatcccaggaattccctccttgtgtctatagacccatttacaactaataactctcccatttcaatcatttctaaccaaaatccaagtcttatttttcttcataaaattgacttcatcttgcattgcttgattccacttagttgcattattaaaacttatggcttcttcatagaacattggttcatctatctcttaccaacgtatagtcctgagcatcatcttctagctccacttcctcttcttcttcattttctacctcatcttcattagaagctatttctggattagtagtacctttttggttgttttgatcttgcatctccacatgaaactgtaaatcttcttccgtatgagtgccttcatcctctgagctattctttactgtgtccttgtagtatttattttcttaaaaattccaaccctttctcacaaaatatttttgatattcttttggctcaatgcctcacaacctgtagccttgacaccctttggatatcctagaaaaatatatttatttgctctaggttcaaattttccctactttatgtgtgcataagccacacatccaaatactcttaggtgctcataccctgaattgtgtcctgaccaattagagttttgaatccattactgatgaaaggcatctatttatgaggtagcatggtgtaaccaatgcttttgcccaaaagttctttggcattcgtgatagaattatcatacatctaaccctttcaaggatggttctattcatcgtttctactaaaccatttcactcggatgttcttggtaccgacttatgtttagcaataccactggacttgcaaaataggttgaattcatcagcacaaaattgcaaaccattgtcaaaccttaacttctttatctttcttttagattaattttctagcatagtttttaattccttgaacttactaagagagttattcttatttttcatgatgaatatccaaagatgtctagaataatcgtctataatagacagaaaacaccttggtccacctcgagacatagttctagaagggccctataggtctcaatgtaagtagtctagaattcccttggacctgtggattccaactccaaactttgctctagttgcctcacaagaatacattgttcacagaagcttatctcttgtatctgatccttttcaaatacaacattttttatgagaaccttgagtcctctatagcttatgtgaccaagtcttctatgctagactatggttttgtgtactgcatctcttgacactacattttcttgatcttttaatgtattttcttgcaggacataaattccatttactattgaccattctataatggtcttgtctcccctaattactctcagtttgcctttttctactctgaccacacaaccatcttgatccaacattaatattgatatcaaatttcttttgatctcaagtacatgcctaactttatcaagtttagtaattcttccattatcaattttcaatcttattgagccaaccccaatcatcttgcaatacctgttatctcccagttcgacaactccacctataattttttgataagaacagaactgatcttgatcaaggaaaatgtgaaaagagcactctaaatcaagaacctagctttgttgaatacttgtcttggataccaccattacactagcactgtcataaccactatcttctctgtttgatacaatgtctgtatttccacttttcttcagattgtagtcttttaagattggacaatattttctgagatgattgaaagaattataaatgtagcatcttcctttgaatttcgatccaggtttcccatttcctgttgagttttgtcctttgttcaccttcttgaagtgttttcttctaaccagcaaaccatttacagtgctttcctccttcatctctgactttctcttgatcactttagacattagtgttgaatgaactttctctaatgtcaaagaatccttaccataaatcatggtatccacaaaattttcatacttctctatgggaagagaatttagaactatgatggcctagtcctcatcttctactttgatcataatgttttctaaatctaggatcaccttgttgaaatcatctaagtgatcttcaacatccttccccggcaccatttttaaagagtacaacttttatttcagaaataacatgttttccaaagattttgtcatgtatggactctctaatttggcctaaactccaatagtcgtactttcttttgagatttctctaagaaatttatcccctagactcaacattatagcactatgtgctttatcaagaatttcagtcttctctttttcagacaatcattcaggtaagttttcgtctcctaggatggtcgattccaacccctgttaaaccaaaagggttgtaatcttgacactccacaaaccacagtcattctttcctgtaaacttctcaagatcatacttggcatttcccaatcctttctgctgctcaatcagactcttgaatcttttaacttcagatgaagaccttccgccaaagtttaagattcaccttcaaacagtgtttctttgataccaattgttgataatgccatgatctcgatcacggggaacactctcaataacatactctagagtaagtacacacactgcagagaattgcactcacagaaattgaacacacacaagcacttcaatggtgttttaacacaaagtaattcttgaagctcttacagcattttattaatcttagcaattgtgttacatgagggattaaaagaatgatatcagtcaagtctatttataaacttgactctttacaaccaaagaataaattttaactaacccctagtgtaaaagtcatcactgacaactagctacttttaattgaattacctgtgaagaaaaaataacaggttcctttagcatttcttttcaataattggatattcaattaaacaagggatttataaataatgatgaaaaaaataaaaaagtggaatgagaataaattccttttcattttattttatagacatcaactaaacatacactgaagttttattctatttctatatattatcaatctaaaattaagtgtaaccaaaataacataccaagcaaatttttgcttcttaataggagaatttcttaaagaacatataataacgtgtgaaatagaaccgaccgccaaattcagtaataatgtgaaactgaaaattcaattacaatctcatcggtttggatttttcgatttttataaacactctcctataataacgttgagctgatataataaacaaaaaataaaatagtgtcctaaatttttatcatatatctcttttttttaaaaaaaaaaaaaatcaaacttcatttattaattagacaagccataaatcccaaagtaaggagaatatacatatatttttttttctttttacagtattcatatatacatgatatttattaagaattaatttattgtacagattcatgctcaaacatgagaattgaagactgctacatagtgtccggggacgattgtgtgtcactaaagagcggttgggaccaatacgggttagcctttggaatgccaaccaaacaggtcataataaggcgtctcacatgcttatctccacaacaagctgtaatcaccttaggcagtgaaatgtcaggtggaatccaagacattagggtggaagacatagtcaccaccaacaccaaatccggtgtccgaatcaaaaccgccataggccgaggcggcttcgttaaagacatctatttcagaagaatgaacatgaaaaacatgaggcatgtggtgcttatgactggtgattacaacactcaccctgaccaaggctacaatcgcaaggcttttcctttggttcgtaacattaattaccgtgacattgttgctgagagtgtgagaatgactgcccagttggatgggatttccggtcacccttttgatggactttgcttctctaatgtcacggtttcattgtctgccattgctgagaaattgcagtggaattgtagcgatgttagtggtgtttcgagtggtgtggttcctaaggcttgtgggcttttgaaggaccagcagaagactaattgttactttcctaatgatgtcttgcctattgagaaggttgtgctcaagaagtgctttgtcaaatgataatcattaatgattgtttttgagtgtttaatttgtgatatacgatataatgtttttttttaaaataaataaattaatcataatacttatatgtggttgtacatgattcatatttataccatgtgtatgtgcgtgcattaatacatgattcatttttagtgcttttatctaaaaaaaacaaataaataataaataaattaataagatgacagatgtttttagtgaaatatattaatgtataatatgtatactatccagtccaccattgtt

SEQ ID NO: 875 - DNA, 2830 bp, Cannabis sativa
acagctcaaaaaaaatataggtgaagtaactcacctttacaataatgaaccatttgtggcagtacaaactctgattattgatacctgtcttacatttttgtatataaccaaatgttgcaaaatttgttacttacccttttgagttttgatgcctagaggtgttttggatcaaacattaaacttaaaaagaggtcaattgatgcagagacaaaatgggttgaatctatctgctatctataaaaaataataactatgaggcttctttgcagtgaagcctgttctgcagattcacatgatgtattatctacattggtgtctatcttgatttctttgagaacttggggtttttgcacatacgaatgcttgaaggcgttacttccaccagttcatcttcttgaatgtactcgatgcagtcatcaagactgtaggtcagcggggtatcgagaatgactacaaaaaagagaacaaaacagggtaataagaggcgatcgaattgagagtttgcacttgaactagatcaataaacgataagaatgattcacgaaagctacctgtttgttctttgtttgatcgaatgttagtcgcagcctttttcttgcagacatttagggacaaatccccgggcctttgatgaatgccaataatctgacctttgtagacatccattccaggagcaatgaacatttgtcctctatcttgtgaactagaaagggcataagaagtgcttgttccctcttcgaaagcaacctgaaaacaaatgtttttaacacgaattagagaattgcgttgttaacagtaatgaaaccgagcattgaaaagaaattaccagtgagcccaaatcccgagtactaatatcaccagcccatgctccatagctatcgaaaattgtgttgaggattgcagtaccgcgagaagctgttagaattgcatttcgtagaccgagaagtccacgggttgggatcttgtatttaagcagcgttgtgccttccgacctagcacacgaaagatcacattatcagctcatatgtaacactaaaacaaactcggtataaagagaagtgaagaagacgatttcttacccaaccccttgcatatcgaacatctgacctcgcctttttccaagaagttcaaccactgctcccatgtgtacttctggcacttccacagtggcaatctgcaaccaataccattagcataagaacaggtataaaatagtttcttctactagtaaagcaaacagggatatggtgacattacctcaaatggctccaacactttgtcatttacaactttgttgataactttgggaggtccaaccatgaattcatatccttcccttcgcctagaggaatggcgaaaatttagagaattgcatgagaataaaatgaaaagagcaagacacaacatgtatatatacttacatgttttcaatcaatattgtaatatgtagggtaccacgtccactaacaatgaatgtatctgctgtttctccatcttcaactttcatagccaaattacgctcaagctcacggtatagtcggtcacgcaagttcctactagtgacatactttccctgtatagtaatgaagaaatttatggccatcagttaagtttacaaacacataagaatacaaacacaaattactgacacattgcaagatcaatcaggctagaagtaagataaatgagtattcttttgaaaagaaaatcattgattggacaaactttttctatagattgtataaagattagctttgataatggtgtctgtactttcacctcccgattcgcttgcataaagatactcttaagtaaaggcttagaaactttatagacaacaaagaacaacaggttgataagacatgtgaagtgttaattactttgtaaaacttacctcacgaccaacaaacggtgaagtgttaatggaaaacgccattttaactgtcggttcttccaccttaatggcaggtaatggcttcccagacgatttatcagctattgtctccccaatctgaacaatcaattcaattcagtgtcatgataataagatcatgtaataatttcaactaacaaaatctgttaaaaagtaaataaaatgatctaagaaggaaagaaaaaatagagaattataataagattatgtaataatttcaattaaacaaaagtaattatagaaaatcgtcacctgaatatcgttgattccacaaacagcacagatatcacccgcttccacgctttctacaggagcccttaagaatttgtcataaacaaaaagctcacttactcttgcaaatctgcaagaatcttctgaggtacatacctagtcgaaattcaaaccatgagaaaagggagaattgaatgtttcttttctatgaaaaaattaaatgcattcatacaaagccataataatatatattcttaaagaaaatggcatgatgttcacaaataacacaaatattttaatccaagttttaagcatgtatcggtatggaaataaacttgggcgtgcacttaagaactactgcaacgagaagaagattaacaggaagttacttctcaccttcacttccatccctttcttaagagccccagcatgcaagcgcccaatagctatccgtcctttatgttcatcatactcaatatttgttacctatagaatatttgaacaggaataaaatacaagagactataatatggatgcactgaagaaactataagaaaaattatcatgattaagacaagcatactggcttcatccaagttttgttaagtgtcaaaccaaacttcacaaattcagtgtattggaaaatctatctattaatggaatttc

SEQ ID NO: 876 - DNA, 6643 bp, Cannabis sativa
  modified_base (6413)..(6421): a, c, t, g, unknown or other
  modified_base (6484)..(6484): a, c, t, g, unknown or other
gacccccttttcttcagttgaaaaaaattaaaaagaaaaataaattgtagtgaaagaaaaaaaagaaagagagtgaaaatgaatggatgagaggtggcaccaatgagaggctatagaagcttatccactatcaaaaatctaatctctccatgatccaaactatatccaaaaagccatttcccttcacatattcacaaaagccaaaaacactcaaaaaccttttgcattgacacattaattggatttacacaacacaacaccacaacaccacacacacacacacaacaacaacaagaatggcttccacttcttgctttctccaccaccatgctctgaccacagcagcagcctcagctcgttcctcttcatcctcatcacaacgccaatgcaatatcagagccccagctcaactagtgtgtcgtgcccaaaagcaggggacctcaaacgacgatgattcctctgtcgtttctcgtcgtttggctctcactgtcctaattggtgctgctgctcttggctctaaggtttcccctgctgacgctgcttatggagaaactggtatgtagaatatatttatagtaacactttgtgaaaagtgttatgtataatagattataattaatttaagaaatggggtgatatttggtttggtttgttttgtagctaacatttttggaaagccaaagacaaacacagactttttgccgtacagtggagatggattcaaggttcagattccatcgaaatggaacccaagcaaagagagggaattcccaggtcaagttcttagatatgaagacaacttcgatgccactagtaatctttctgttatgatcatcccaactgagaagaaatccatcactgactacggttctcctgaacaatttctctcccaggttaattaattaattaacttatgtaacaacaacaccaacaagtatagtttctaaaattcatcaaactaaaactaaactgattctgaggtttgtttgtttatttgtttgtaggtggactttttgcttggaaaacaagcctacttcggcaaaactgactctgaggtactcaattttattttccattaatacaaaataggatcctgaaataattttttgtcaaaataaaagttaataacaatctgatcaagaattgttatgacaaaaccggatacatttttttacatttgctcgtactaaaaattatttttaagttatttatattaaaaaaaaaattatcgaaaatcaaactcaaagtactgttttgtactattttaaaaaatataggatcaaatttatcattttacaaaacaaaaaatcttataaataattttttttaaaacacaatatccaaaataatattaatcctatatatttttatatataatgtatttatattaattaaattgatttataatagttaaaaggaaaacttgtataaaaccaatatcaatataacaatttatactcataattgatttgtaggatttatgttacttaatagttactaagccttaaccttaagattgagttttaataatttggataaattattaaacctataatatataaatatagcttgaaccaaattcaccacaacaagggaaagaacactccctctatactcaaattacgtggctttttcaaggaagattatataataagttggtaactaatgaggttgttcaatactatttatcaaaatataattagcaaaatttaatttaaaatatttttaaagaaatgatccaacatcaattattaaattataatatgcgagagatctgattagaaattacaaaattggggtgtgtgcaatgcagggtggtttcgactctgatgcagtggcgacagcaaacatattggagagctcggccccagtgatcggcgggaagcagtactacaatttgtcagtgttgacaagaacagctgatggagatgaaggagggaagcaccaactgatcacggccaccatcaaggatgggaagctttacatttgcaaggcacaagctggtgacaagaggtggtttaagggtgctaggaagtttgttgaggatgctgctggctcattcagtgttgcttaattttattttcaccttttttttttcttttctttctttttaatgggattaatgaatatcatcatgatgagtttgtatatgtaaaaaagaaaaagtaccaattcaagattgtgatggtgatgatatgatgatgatgatgatgatcatgcatgagcaatttttagttttcttatccaagttaaaaagatcataatatgatcatatatatcgtttagtacttgatttatctttttgtactattttccttttattttttctttccaagtctttcttaggaagaaacgatattggtttaaaaatgttttgaggatggttattattttggaggtgtattaatgatcttgtgcataaatatttgttattgttgtgttgatgaaaactttctatcttcatacattcaagattaacacttccaaggataacagagtttacttgttaatgttcttagttaatgtatttcaagagagcttgtaatattattaagcttttgattatgactgtgtctttaattagttcttttaatttgctttgaatagaattttgtgtgtaatttgaaatggatttgagggaagtttcatatagaatgaaaacatgatacttactcagaaattcagaatttgtatcttagaagtatacagagaaatactaaaaaggcacactagcactactataaggtgttatatcactaatgttgtaatataatatagatcccacttatttcattttaataataattatagatatcaccgctaactatttatacaacactatctcgtctatttatatagaattaactactcaaaagtcactaaatttgatccattggattgacccaaagtcccatttcccataacaatggtgttgcttattgtttgttagctcaaaaggttaaaacaaactagattcaaaatggtgatgacaacacaaatctttttcatgctttcttgaaatttcgtagaatgcaaaatcgaatttattcgattaggtttatgtctggtgtttgggttgataatcctgaagaagttagtgcagctttttctagagttttattaacaattattggggactaaaatgaacagtagaagatgagtgttagctctattgttttgggcctattctttctcctaccttgatgcagaagcttcaagtagatttcacttttacaaaggtgaaggaagctatcttctcgattcgaatgaaagctcctagagctattggatacaacttcttctttcaagaaaattgggatttggtgggccatgatgtagtggcagttgttctctcctttcttcgaaatgggaaattactccgaattaaatatcaccacaatcactctcattctgaaagtcaagtatcctgatgttgtaagtgattttagacctattgcttgttgtaatgttgtttataaaactttcacaaaattgatttgcaataggcttagaagagttcttctaaaattaattgctgaaaattagagaggtcttgtgcatggtagatatattgcttataacatcctggtttgccaagatttagtgcgccattatagatggacgaattgtcctgctagttgtatgatggaacttgatttgaggaaagtttgagtgagatttcattaagtgtcctccagattttattcaattaattatgatttgtgttcaaactctaaaattctctttgataattaatagctatgcatggaatttttgaattcaagagaggtttgcgtcaagatgacccatgtcccctttattgtttgtggttggaatgaaatatatgtctcgtattttgctaaaagtgggtattctacatgagtttaaatattatgagcgatgcaagcttttgcgattgagtcatttatgttttgcaaatgatgttttgttgttatgtcataaagattatatcttgataatgttacaagggctcaagattttctcaaacacttttagtttgtaacctaatgaagctaaatctattatttattgtagtgggatgaaagaagataaggtgcaaagagtggtgaatgcttttggtttttccaaaagtaccttgctatttaagtatttagggattccaatttgctcaaagaagaatactgtgttggaatgtcaaagtattgtggagaaaatggttcaacaaatcagaatgtggagcactcacaatttatcatttgcaggtagggctactctcatcaattaagtgctaattgtcatccattcctattaggctcaaattttgatttgccaaaaaaagttttgaaagaagcgaaatcaacttgtagatcctttctttggaaaggtgtagcagcaggtatcaaactaggactagtagctcggactcaagtatgtacctccaaatattttggaggtttgggattttagaatgttttgaattggaatgcggtggctatggagaaatatgtttggaaaaatgctacaaaaaagataatttatggattaaatggatccatagtgtatatctccataataaggattggtggatctatgttactccacaagataatagttggtattggaagaagattgtagatgtcaaaaattattttaaagataggatggatattacctcgttgccacatgtaaatatagtattaaagagggttatcatactctttattctttaccaaatagagtttcttagagtaatgaagtgtggagtcacttgagtatgccaaaacatagatttattctttggttgatagttcttgaaaagattcgtactagaaccttgttatccttgtttaatcatagtattgataagacgtgtttgctttgtgggaataaagaagagtatgtgcaacatttactctttgagagtgtttatagtgcaaattgccttagtaaattgaaatttgacttggatggattgctcgcactcataggttggatgatcttattcatttgatttgtaaaactaaaagaataataagtcatttcaaaaagcaactttttactgctattttggcaaccttagtttatcatttagagtgtgagaaatgatgtttataaatctcaaaaagtgtgtcaaattgctcataattttaagagaattctttctggtattatatataaagttttttgtgttatgcctagaagataagaattagtttgatttgatttgtaatagagtttaggagttgagtattgggggcatacggtatacagtatatggggtttagattttgtacataatatttgaaacataaaatttattaaaattaatagattaattatgttttgtatttaaatatttgaatactttttttttttgaaaaaaaaaaatttaatgaatttgttagtatatataattaaaaacattagaacatatcagatgtgaaaaaaataagcaatctacatattttaatattgagatttagaaaaataatatcttattattcagatgtccattcagatttagaaatccgaatcttaaagaacacaaatgcactctaaggcttcaataagccaccaacaatcaaacattagaagtatactaggtttccaaacattaatagaaaagaacatcaaacattaattctatttcaagtatattaatttaaatttaaacattttttagaaaaatgtattgtccatttataatagaaatgataagtacaaatacaatctaccgagaaaatgaacataggcccaaagttcaaccaaaaattctcaactggttctcttgctaaagtctagataaaaactttgctaaaaatctcacaacaatgaggagaaaccaagtttctttgagcaagatgcagacaacctaacaatcaaaatagcatcaacacattctttcaaaaaattaagagtgaccaaaatactcgtctagttcaatgcaaaacatcaattgcaattgtaaatactataacaaaacacaaacaatccctgaaacaaccgaagcaaatcctcaaaacaacacaacctaataaccaacactaaaaaagtcgaccaccacccaagacctctcctttagctgagactgagagaatgttagaaagatacgtcagaaaatcctaaatttctagagagaagggggagaaaagagttttagaaagaaatttaaacacttttggtgaggtagcaaaatattattataagagtaaataccattttagaatctgtattttgcaaaagttactgattggatcctctgttttgttaaatgacaaaataaaccatgtattttccaaaataataaaaataagaccctaaactttttttttcttaatataaccaacttgacaattcctaacacaaacagatataaaaaatgtaaacagttttgtcataacacctttagatcagattattattaaattttnnnnnnnnnaaaaatcagttcaggatcctatttgtaccattttaaaaaatacagggtctattttatcatttnacaaaataaaaagtccaattaataatttttacaaaacatatggtccaaaatgatatttaccttattataattaaaccttgttaatatatttttggaatcaccttgtattttacttatactgtataattctaaagtctcccaagtttgggttgccttggt

SEQ ID NO: 877 - DNA, 1461 bp, Cannabis sativa
gtcacccctgaccactctgatacttttgttatcataagggaacttcatgcaaaaattcttgatggaatttatgaccctaaaatcaactaagactgggcaccctagggtggcattgtatgttgtgggtcaatctacaaccataaaggtatagtgcttgaaggtgaaaatgttattttccccttttaatgtgatcgggagctaaatctttcccatcatcatgagcacggctccattgaacccttggagttgtatgggacagggtgataatcatcctctatcatcctaattgcttgaaatgtaaacttgaaaataatgttcactgagctcccattgtccaccacgaccctggaaaccctctttttagcaatctgggcctctgtgacaaaatggtcattgtggggaaatgaacttgcctagcgttatcctccgtgaaggtaataggcaagtttatggtttgcggatgttgcctcagtgattgcactaaggcaaacttctccctttaactatctaatccccttaagtacctcttctgggaatttctcatggctcctgcaatattggggcctcctgagattatggccacatgtccattaatgtggggtggagatagacctagaggatacatattctctagtcctagagctatcactgtcatcgcattttttagctagcagagcaagtagggccataagttatgatccaggagcttgaggggagtttactccttgtggagaatttatagctccctactatcctgaaacaagcaattgtctatgaataaccccccctatctgagatagatagttgggatttgaatccactggcctaggtgtctgactctagccagagtctcaattttatcctttaagtagtcacactcattggtgttgtgccctaaatccctgtaatattcacacctttgttttctatctctcttatgtttcccgctgaaggcatcctttggggtttctgatagtggtctgtattgcatattgctttgtagacattttcttgggtatccactaaattagtgtacttgttaaacttgggttcaaattctttcctcaatttctttgaagtttcactttgactatggttcatcccactcctcttgctccaggaatggttcagcttttgttctagagcttctgcttgtggttgtgattgttcgggagtgatgcttcatctagttggcattgctccatacctagaaaatgagtctgggtaggttcttgtctggatacaaaaggttgatagacagtcagagtatattgagttctaggaactgaaagttgtgggacaaagcttagtgaggatgctaagggtgtcaaagcttgagggactccaaaagatcgcaaataggtatattcctggttgatgataccttgtgctctaaacataaactcagacaaagtctcaaccctctgtacattttacgtcatagcaaagagcaaactgtaa

SEQ ID NO: 878 - DNA, 1879 bp, Cannabis sativa
tatccttcaaagatgagttgaatttcttattcaatgtaccattgcaaggatttttagttacgtatataccacatataggtgctagggagaaaaaataattattttcacttttatatttcgttttctttattatcctatttaattcagggcttatctaaacaacctattgtggggagtataattttattgagttttgaccaccaaaataacttagtgcacataaaatataacattagtactataataccataaaaatataaaataaataaagatgcaaagccactgttgtgaaatttttattgatatctctttgtatatgccatcatatcatgctcatccctagactatataataatcatatataatattattcatcgagcaaatgagctaaaaataatagtaaagatgaaacttgccatatgcttatcgagaacaatacaagaaactccaaaagaagcctaattaccaatctctgaacaaaactcaattaattaacatccatattaattatgaaatatatatagcctcataattaatataatctaatttgtaatgaagtccaatatatgataatgaccgactatatatatatatatagctaactaattaagaggcctcaaacaaacttgaactccatacttaggctttatggtaaggactacaacaggagcatggcgataagtatctgaaatggtgaagctaaacttagagattaacatggccaaaattgtcttagcttccataatggcgaaaccttgaccgatgcaatttcttgggccggaagcgaatggtatgaatcgaccaggaatgtatgacttggaagcaaatctttctgggttgaactcatttacatctttaccccataactcctcactatgatgaattgcaagcactggtatccatatcgatagcccctttgggataagaagatccccaagctttatgtcttcaaaagccattcttgggagtacactagcaggaggatatagcctcagtgattcgtttattaccatatttaactgtccaaaaaaaaaacatataaatatcatcaaaaataatatagtataagtataataatatatagttttaataatgatcataattatataggaccactgcaccacacacacgaagcctgaagctttggacggagaatgagaatatatttatatatatttctatggtacaatgataataaaatagcatatcatcataagattggcctttacacacgtctttacacttacttgatctccatttgttcacagctaggctctgcttatgagagtttattttcgtgtactagatttttctttgtttaggctatgttttgtctaatataaaattatactgccttatctatgacttatatataaatatttatatatatttagtttatactgaaatgggttaccatgaactttagtcctcgactagtcaagggtcccacacacactaagaaaacagacactgtaatgtgatttatcatattataatttactttccacaccgatcaaatgattagcagcagtgaagactgaaaagttataagtctgtgcacaagttgaaagtttcagaattatctttgcttagagagctagtgcttaattttgtacattatatacttttcatttctttaattaattaagcaacgatccctaagtttcagatagtaccgtctaatttataagaacaatagaaagtaggaaacatttcttagtggacaatatttttgtacctataaaaaaaaaatgggtatttttgcccactcttgcctaccacattttcccccaaactctataaagttaagtcaattaccaattctagcaaaccaccaaaaaaaatctccacctctctaacttaaaaagaaaatactaaa

SEQ ID NO: 879 - DNA, 1176 bp, Cannabis sativa
taatttaatatattaatttttattgaacatcgctaatcagtactacttagatattattggtgccttatagcaatgctctaaaaataaagttacataacttataacattcattgtattgtgctcactaacaagcaatttttttcaaaatctcaaaaaatattaagttggaatcttattaatgctcttcattctaaaatatcgagctacatgaaaattagaactattcctatcgttattctagaattatatatgagattttcactcacaagactttacgagaaccatagataaatttgaattgagaattttagagtttttttttttctttttttcgcatcaataatctaccaaccttaaaattgaaataccaaatcactctcacttgtatacccttacaagtcacaagttctttagcatcgtttaggtaaatggggcaaatttatataaaacataagcatattttgcatgtcttaactttgtgttacattattgtagctaacttatatttcatatttatgttgttcaattatataaattattatttggcaaagtggtagtggaatataattgcttggttccaattcaagctattagaagtcctcaaccaagcaattagaagtccttttaacatgatttttgcttttggtcttttggtgaacaattgtaaacatttacttgctaatttaagatatgttgcttttatttttgtaaccattcttcattttgggctactgctaccatatacactaccagatttagtgtagatactaaatcgacttataagtttattgtgtgtgtcggtttaggaaattaacacttataccacgtacgtatgaaggaatgtcttgcaagcataggcatcagttttaaaccgatacttacgagtgggaaatctgtttagttcatttgcattggttcaaaaacaacgtatgtaagaaaaaacatcaaatctggacacatcgagcaattaattccaaacccaaacaatacatacaaacaaatctcacattatatatacatatatataagggagcagaatatctacttatacagcacagattccaaattgcaatataaaattaatatttttacatatattttcatttttatatacacaaagattatttattacttatgatcatgatgactatctattacagagaatatattttctgt

SEQ ID NO: 880 - DNA, 1592 bp, Cannabis sativa
agactcttttgatttgcagggtagggagaagagccgctggctccatgacaatggaggactgagttatgggattgatcaagttctgagaataaaaccgaaagggacaatccggataggacttgacattggaggtggaagtggtacatttgcagctagaatgagagaaagagatgtgactgtcatcacaagctcaatgaactttgatggccctttcaacaacttcattgcttcaagaggcctgattccgatccatgtcagtgtctctcatcggtttcctttctttgaaaacacactggatattgttcattccatgcatgttctgagtaattggattccagacacccatctagagttcatattctatgacatctatagggtactaaggccagggggacttctctggcttgatcatttcatctgcaccaggccccagctgaaccaaacttacatccctctaattgaacgtgttgggtttaataagttgagatggaatgttggcaggaatgtagaccgcagaatggataagaatgactggtacttctcagccctgttggagaaaccaatgagctaagtttagtagctttctatacacagcaatatgctctatagaggcatcaaaagtatgactattctgtcttgaagttctaagatttgattggttatggtttttttagctttcaatgacagatctagaatattagacatcaagaagcaatatggaatttcaagagaaaaaaaaaagggaagaatatttaaaacagaaacaccatggaacatggccataaatttgaatgtaatgactgttatggcctatctgcttttctctgtaattatacacagtgtttctctacaaattttctttctaataacaccaaaagtttaaaacttttgttaaatattccattacatattttggttccataatacaatacaggtcctgataagtacaagaaaaaaaagtttctaatgaaagtagctgccaccctcaaccagtcaattgataccagtttaaacattcattgactgcagctatactggcggaggctactaccttggatgtggaaagtcaccactatatggaaagaactcggggttgtaaatatgataccgcatactagcatcttcataagtttctgatgttgctattgattcagctctggggttcacaccagctagctgcatgatgttctctatctctttcactacctctcccattgtaggcctttcagctcctgaatcttcaacacacctcaacgccaagtcgacaaacttttccaaacctttaagtgctatgccaaagtcaacaatagttttgtctagaatttcatgaaggttgtataaatcttttgtcttatccataggcattcgaacctctttgacgatgtatttcccttgctctattggtcttcgtcctgttactatttctaacatgactactccaaagctataaacatcactcttctcagttaactggttggtcatgtaatagtcaggatccaaatatccctacaccaattccaaacaatatatgtaaagatcaattctcaatgtcgaatgtgaattcatgctgacatagtacataaatacgcccc

SEQ ID NO: 881 - DNA, 2265 bp, Cannabis sativa
caaacctatcgccagatgaaagccagagaaattgaagcaaacttatttaactatatcataacatcaatagattgaatcaattgttacaaaatctattgcatagtagttttattttctataaataaaacatatattaaaagacaaagtttaaaccaaactagtgaacacaaagatgcaacttcccttagaaatccaacagcagcaactagctcagtacacgcccaacaagccaggcgatcagaatacaaactatcgaaacaaaatcaaaattcttaaacagggaaagtcaataataaaattacggaagggactcgatcctgaaaccacgagccaccaattctgatattggaaggaataaaaatgaataagaatgagaataaaaatatgaataagaataaattagaataaaatttaaaatgtataaaaaaaaaattataaaagaataattaattttttttttttatatatattatattagaatagtctttcttttcattttaaaatgaaataatcatactactaaaatggtagaaaaattattctaatactttaatatgcaatcaaacaaaaaaatagaatgaaaattatttatttctatttcattctatgaatttcattacctccaaccaaacgtcacattattttcttttcattctattccattatattacctctaaccaaacgccaagttgaaatagttgatttttttccctaacggttgatttaaaacgagaatcacaatactataatcattagcaattaaggcgtgtttatggaaagctacccttccaagctacataataattagatttgtgtgtaattaattatagaaataaggataaaatacacaggcttgatatatttatgtgactatgtaattacattttaagtgacatttggttggaaagaatgaaaatataaaaatagcaatgagaatgagaatatgaatatgaatagaataaaatttaaaataccatacaaaatttataaaaaaaaatatttttttctcatcatacattggaataatttttctttctatttcaaaatggaataatcattaatccactaaaatggtggaatgaccattctaatactttactatgcaaccaaacaaaagaatagaatgaagattgtttattttccattgtattgtattttattacctctaaccaaacgcctcttaattgtataattggaggtaattgaaggtttcaattattctttctaattctcacactactccgagacctgatggtttctcaggttgttttttccgaaagtactggaagacagtaggcgcagatttttgtgctacagtgaaggacttcttcatttctggaagtttaaatgtgaaacttaattataccttcaattgtatgattccgaaagtagaaaatccagacagagtggagcaatttagacccattagtttgtgcaattttttgtacaaggtaattgctaagattatctctaatagaccgaggcctcttatggataagttggtgtccccagttcaatcagcctttatccctgggcgttggattgcggaatcctccatcttaacccaggaaattattcacaagatcaagtctaaaaaaggggtagggggattaatggctttgaaactggatatgcataaagcttacgacaagatggaatggagctttttactaagggttctctatgctaatggtttcaatgaaagggtctgtaaccttataatgcaatgtgtcaaaactgtatcctactcagtacttttgaatggcagccttattaagaagattgttcctcagcgaggacttcggcaaggcgatccgttatcaccgttcttgttcattttgtgtcaagaagtcttgtcgaagcttattctgagatcggagtctttggggaaaattcatggtatcaaaattgcgaggaacgctcccccaatatcccatcttatgttcgcggacgatacgattcttttcgctagagctaatgagaaggaagctgatgaacttttgaattgccttgccatctatgaaggatggtcgggtcagacctgtagtaaacataaatcttcagttttactctctaacaatatgaacagcagtaggagagcatctctgttgaagcatctcaaggtgactcaagcaagtggggaagaacgacatcttggcaatccctttgttttcaagagaaggagaagggaggattatgagaagctgaagtatagcatgaaaaagagaattgaagggtggaaaatgaaattgttatcctatgctg

SEQ ID NO: 882 - DNA, 6595 bp, Cannabis sativa
aaaaaaaaaaaaaaatcagaatggcatgttctttgccctatttgtaggagtgtttttatttgtgtatgacgtgttttgttgacctatttgtacgagtggttttttcagtatggcttgctttttgccctatttgtaggagtgtttttgtttttgacacgtagagaaattataattgtttacattgtagtaacagaataatttattttctagaatagtttctaatatgacttcttagagaagggcctgagaaattagcaataaaaagttttttctaaaaataatgcaaaagattaagtaaaaattattaagtgtaaatccttaaaatagacttatacaaccgatatagtaagatcaatacaaaatacaaatattccatttccatgtaactaaaactctctttttattatcgtatacttaatcaagtgacagaaatgggcaaaaaataaatcttagaataagtttgtagagaagaaaatcgattcaacaatgcaaacatcaaacattttacaggttcaaagttttgtacccattaattgtgcattactattacttataagtttaaatttatatctattatagaaaagataatgaatatttagaatagaagcaatacacaattatttggaatgaatcctaaaacgataaatggtattggtttgtgttgtagaataattgtgtcatttcacacaaaaattattaatttgaaaagtcataataacatgcaaaagaaaacaattagaacaaaatattgatcaagatccaatcacagaaatccagagagagtagagtttttaacccacaaaattaaatttaacaaattaaaaaaaaaaacatttaaccaaaaatataaggaactttgtagcaatacactaaaaagtcactaatttatcataacactatagacccctactaccaacctaagtttagttaaaaattacagcaatagagtggacagaccaaacgatcaaaacaaccaaaaacacataaacatccaaattctcaccgatgcactaactctgaggagacgttttcgcaacaccgctctgttgggaactctgtgaagctgccggtgcaccacttccgtcagaagcgtaagccggcggttgtgaatagccactgccatatgaggcattattatatggtggaacctgtccataacctgcttgaggcgctgcaccgtaaggtggaccataccctcctggctgagaagctgctgctgcagcagcaccgtagctagatggggggccacgctgggagcttgaatctggttgagcgtaaccgcttggtggctgggaatgaggatagctgggctgctgagatgcttgactgtaccctgcagcacctggtgcggtgggtgactgagttgcttgaccgtaaactggggcatttgaaggtggctttgcttgaggtgctccataaccagagccatagccaggctgaggagcaccaggttgagccccgtaaccagcttgtgaagttggtgggactccataacctggctgagtagctccttggggtggatagcttcctgggcttgggctaggctgctgttgactagcattgtatccttgttgaccagctgaagattggccaggagcttgggttgaatccccttgggatccgtacgaggcagcatgtgcttctgtcgaattgctcgcaccatagccagcagcagaatagccttgctgatcgtatgaaggctgctgaccatatccagattgaggtgcatgatatccaccgtaaccatcttgagaataaccttgtccttgctgatagccagaagctggaggctggccataattgtagccagaattatcggctggagcagcagagccaccttgtgttgcttgttgttggccatagtaatcataactacctccttgagcagcttgctgagattgcggtgcacctgattggtcccaattggattggtagccaccagatgcttgctgagggtagccaggataagaagtctgtggcatattatattgtgactgaccagaataggcaccaggttgcccgtagccataaccgggttgttgcattggaggagcaccccctggtggggcccagcttgaaggtggtcgagcttgataaccttgctgggaatatcctccagacattgaagaatttctagcacgattctgcaagaaaattgtttcacaataacgaaggcgaacattacatgatgccagaacatggaggcatatataataatataaacagagcccaaaacactatagcatataaaacatatacaaaacaagggggaaataatacacatgaagaggcaaatatatatccatacagtgatcaatcgataccatttactgtattagaagggtataaacgcctacataccgtactggttcttgaattaaaggagttactccgcagaagcccaccctctccttacttgaagtgaatgggtagaaaaaaagacgaggctatagaaagcttttacattgataaagaaataatgttgccatgaagcaacgagttcatattcaagtgcatagcattgattatcttaagatgatatcttatgagttaaaattaatatttacgagaggagaataaggtgtatgcatcctagattttcattatgtctaggattagaagaaatatgtcatacgattaattaatacttcactcagtagaggctaagaaattagtgttatagtcataactacattttaggaagcatccaagaaacacatttagagcataaaaatagttggtggcatatacacaaggaataacatgacatacatacatacaagatattcgtatatatgcacatattaagagagcatcacaaagattaagcaagaccaaactgattaagttaaatttgcattctctgacacaaccaaacagaataagcctatccaacaatgccactacaaaaatttcagctgaagggaaaaaaaaaactgtttcaaaagaaaagaaacaatacaccagcatgaaaattacaacaaaaccaagtagtaaaggtataaaaacaaaacataaacatttgtactgtatttgtagatgaaaaatcatcaagaaccataaacaagagtaaagaaatactgataaaaatgcaatggatagcttcatagctaactataatgaagtagagtaaaaagaatgaatggatagcttcatagctaactatattgaagttaaagtaaaaataatgaatggatagcttcatcgctaactatgatgcaatagatggcaagtcaatataagatataaaaataactaagagggcaaaacatcctatagaaaacagtaagaaaagaaaaataaatgtattgagaataaataaattaaaatactggtaagaatgcatgtatagcttcatagatgacagacaatgtgatagactaacaatagatataacataccatgactaagagtgagtgaaaatcctagttaaaatactaagattagaaacaaatgtatgtgcttcaatagacaaagcacagggcaaaaggctcaaactgtaataacagaataaagagtaaaaacttctcagaatatttgatagaactataataactaatcagtagtcaccattgttaaccttgaattcccaaagaaccttgaagcttccctcgacaatatcattactaaataccagaaatggatttagaaccataccagagtgatgctgagggaacaccaacagaaagaattccatgttggtgtcaccaatggtccaataaaaactaaccctacaatagttcccaaaaagaatatcagtcacatgatatgatacaaacatataaatattggatggttgaacaagctataatcccaacgatcaattgcttataccaagaatattgtaatatggactcatatatacaggtgaaatttaggaatgttctgaaccgccttagctatgaaatctaaaagagaaagacaaacctgactagcaaactcaacctaacatatggcttagagaaaactcaattataatagcaatcactctgcaatatatctttacacagtataaactatattgaagtcaacctcaaatttctcatagccacactccctatctgcatgagccatctaccaggagaactgacagatgtagagttcaatatagatggcacgtcaaaggaccctgcagcttgatagtctgtatatatagtgttatagcataatctaaaaaataccaattatacccaattggacaccaatggatacaagttaccatgctaacaagttcctaactagccatcctttgtctgctaaataggatcagcagtaaaagaaaattccaaatcaccagactaattaaaggaagaaaaatcattataatggatctatccaatcctcataaaataggtaaaattcatctgtcgatattagtgccaataacaaaagtaaatttaaagaatgctcgaccatcggtgtctaatgagcttagtaccatctaaagatagttaagctgaattaagaagaatatgaaaaaaatggcagataagccttcttcaaacgaagaaatatgtttcattaaaaataaatacaaataaatagttatttaaaattcaagaataaaaataaagactaaatttaaaagaaaaccttgatgaaaaaatgcagaataatgtgagaagaatatgatatagttaaaaaaaattgacaggggcccacatatagaggatatatatatataatacataataataagtaagccatatacacaactaaaacaaatactttacttaaaagaaaaccctcaagtcctgcaacaacaaaagaacaagcaatagcagtgcaaaatcttgataagacatgaaaatccatacaacagcgcataatgtagaaacatgtaaagcttttgaagcacacatcatatgacttgagactatggagataataaatataattgtttacttaaactgacaagtattatacagacaataatagcgaacaatccatttcaatacatagtaaaaaaaacaacaggtggttagataattgtaattattagagccaaaatataaaatgagccttaagacaagcttaatcattgataaggcaaagcaatatataaatattaaaagcagtaaaacatgcaaatccagtagctttattaccatagaaaaaactaaacaagtaatgcactacatatagcaagaagttacttggcacatggtccacaacagacatatatatcaaacatacctcactgataacttcattaaccaacactttagcactttcaatttgttcactggtcccatctatctgcaatgtcctttcatttgatgtatcaccagggggaagatgcaaaggaatcacctaaacagacacaatcatacaagttttattacagatctatactagcagaaaaacaaatatacagacttcatgtaaaattaaaaagcagtgagtttctggttgtcaacgtcattagccataactgaaagcagaaaagaaaaatgatgcattatgaaaaataaggatacctgaatacgagctccagtccgagcttgcatattttttattgtttctcctcctttaccaataataagaccaacctgaaaattgctctcatgtcaacaggccatttcaaagaataaaaatgtagcaggccaaaattggtaaagaagtttgacataataccttattattaggaattttcattgtaaattgatcagatccggattgactacctgccctccgagtaaccatgccctgacctcctgaacctgattcagcctgataaaaatacagtagaacaaaagttacagcagaacaaaagttgcaacatagaagtgataacaggttaaccgatttcaatattctgtagtaaacaacacaaaaaatagagactttgtgtatgcatagtaagtaaaagtaatgttaagcaagtcatgatgcatgttcaagctttataatgataatccaacttgttgagcctactacgattttgccacaacaataagaactttacgaatagctaacaaaattcagatacccatcaatgaaaaaaatgataagcatttcaaaatagagcttttgtatgaacagtaagtaatggtattgtttttttttatgaaggtaagtaatggtattgttaagtatgtcatgatgcatcttcaagctttataataataatccaacttgttgagcctaactggggttttgttataaaaacatgaactaaaaaattcagacaaccccatcaaaaaaatgcaaaactaagatttcatcaataacagaagacaataccccagcaagaacatctgttatcaactgttcagcctttgaaatttgttccggagtacccataagctccaccatcctagtcgaagaattcaggtccgcatccatatccctagtaacttgaatcttggctccagactgaagctgaagatactttatagtctcaccacctttacctataattacaccaaccctaccatttggaatctcaatcttcttactcgaaccctgaaatccatacgaaactggtatcgaagactgcgaagacaaagaaccttgttgtcccttataatctgcatataactcacacaaaatcacaacttggccaatctaaaaaacaaaaacaaaaacaaca

SEQ ID NO: 883 - DNA, 1077 bp, Cannabis sativa
tctttcttcatgatgtcaccattgaaagtgtattttataatattaccacattattagactgtatattctaaattctatttgaaaatattgtaaattacattatcaaatgtgcaattttattttcaattctgaacttagaacatctttggagaaccaattttagtagtttcttgacaactatcatcaacaatcaaatcaaaatcaccacccaactcaggcaggcctattaagcatagattagctacaactatactataatcaaattcaataacatagttctcctaattcaatacacaaaattaattttttacatgatattaaacttgcgcaatagtgagctatataatatgtgtaggcattgctacgtagtactcatggtacttagcgaaacatcacactataattagttagcaattttttataatatttatttaagtaaaacaagtgagattcgatattgaatttaaccatattacagctctcaaaagtattaaataccatgagtgccctttagcatttctcttattcacctcaaagttctattttctttccttaattttttcaagatatttagattagtcataattttctttttccgtcttagttggtttgttgtaatagttaggctattccaccaaacttttcttaatttattttaagctaagaaaatttttctctactatacttatatccacggactagattttcaaaaagtaagtactttccaataaatttatttataacattatataatatagttatttagaatatttacaaattttaataaaattctaacataattttgtaaattttttttactctcactacaaattaatttatagtgcgcaatgtgtacttttgttactttacatgcctaatatttaatgggccatgaggtgagcttgttgatgtataaaagagaatagaatgtaaatattattaaagatctttttaacgagctcgatcaacaacatattttgacgattctattgagtctgaatatagttgataatctgttttctagtctaaagagtagcatcatggtttttactcgtgcatacaagttgatacaagctc

SEQ ID NO: 884 - DNA, 3657 bp, Cannabis sativa
tggattgatctattgcaataataaaaaaatgggagattttttcaatttttttaatttacaattttaagacctaccatttttattacaaaattacgattttaaagttctaaaattataaaaataagagaacaactaaaaaaacaatccaaaagaaaaaaaaaaaaactcccaaaaactataaattaacttaaaagaaaaaccaaaaatcaacaatcaccccaactataaaacaactatgtataaaataaccaaaaggaatatcattattgaagtgttcatttttttttgtaaataaaaaaaaaaataatcataaaaataaaaaatatatatattttttgtaatttcttttttaaatttttagtctattatagaaaattttctaataaaaaaaataataaaaattagtactaccatactaacctactaaatattccacttaaatttctaaagaaaggacttcaactaaggctggtcctgggggtaggcgaaatttctaaagtcaggacttcaacaaggccgaccctgagagtaggcgggctaggcatgcgcctcaagcccccgaacgctcaaggccccgaaattgtaaaaaaaaaattaatacatagataaagtgttaaataagaagaaaatataacaaaaattatttggtgtagttatgagggattgaacttttgacctcttaagagattttaaaattttaccattacactaagcactaaaactatcatttttataatgcttaaactatagagaccccaaaatttaatttcgcctcaggccccatataccttccctggacttcaactataaaaggccacttcaactaaaactttacactaaacccattaaccacgtatcactaactatacaacaaaaaaactattcattaactcatatatgataaaacaagtaaaaaacaaacattaatacatgaaattatagattatttaaagaatggtgaaatttgatatagaaattattatgacatacatctaccaaagtgatcgatagtgtcatcaacaagtcttttacaatcttccactttagaaacatcagcaacaatcataagcacatcaggtgaaccaatctctcgagcttgttcaacaacctctcgaagctgattttgtcttctggccacaagagccaaacaagcccctttactcgcatactcataagccaaatgctacaaattttattaaaacagaggaaaaataaaaaataaaaaaccatgtatatatatttacataatcaaaataattggagaagaaagaaagagagaatttttatgtacctcaccgattcctgaagaagccccagtaattagaacaacttttccagaaatgttctcactgaaaatagagttgaaaattgactgaaagaacttgaagaacataaaaggtgggtagaaacagaggagtgaaaagaaggtgaatgttggtgctgacaagttcaaaagcttgtgaattagttcaaccatggctaaacctattaatatttattattatttttgttggaaaaaggttgtgtagtgaattttggtgttggtatatataagtgaagaagtagtagaagaaggaagaagaaggtggtgtgtggaggtgttgcatggcaaggatatgacacgtagaagagtaaggatcttattttgggttgatccaaacttttgagttagtaactaagaaaatcacttgaatacaatgaataggtgtcttgctttcatgccttgatcatttcatgattttatccgcttttgaaacggtggataagccttctatgtaacaatttgcggcgaaattctatgttttaatttttatacataattttttttgataaaatttctttaattttttttaaaaaaatttaacactctaattaaatattataattaaaaatttaaatatttattagtaaatatatatgtattttattattattattaaattaaaagaatttttaagatattgtacttttaaattaatttatttgtacttacgtataatgtcttcgaacttatcattttgtgtgtgacctgcttaaattttcaatttattatattatttcatgtgatatttaaatttatattttttcatatagtgtgtttgtgtctcttggacttgtgccgtatcaaaaaagttcagcccttatttaccactctagtttctagaacgatttatcgaaagagctatgctcgttaagtcaatacatatacaagtgttgttttgagctagagtttttttcttcattaaaaaaaaaaagaagaactggttctctttgcctttaattaaaaggcgatcaaatttatccatattttgtatttttttttagcttcttttggccaacccatttatttttcaaaaagagaaaacacacacttcttgaatatacatacataaggaattaattagttatataatgcaatccatgcatatcatattatatataattatcatagagatattacttcactagtgacatgtctgaaacaccaatgaataaaaaaaacctataactaatctacagtactaataatatggattttctccaaacacattacttattttacatataacataaaattatcttcttcccaatattaatttatacatgcatcttatatatagtccattaatattcaaaatcatcactagaaagcatttctctagcttcaaacaccctttgtttgttgacccttgcaataaaatcatcagcccttttcttcaaatcctcattgggcaaataattagtagttataacctcatcatcattatgaaaatcctccaactttttctccacaaccacaatttttttctcatcatcatgtacttttgcccaagtgatcattttcttctcttcttcttcaatgcatattaatttcttttcctcatgaggaggagctaaaactacttggtatttgataatttgcttagcactagtgcttatgtactcttcatagtaagagtgatcattactagtactagtgctaataattggagatgacttattattttgtgaggatgaaaagattttggactctccaataagggcaacaataatgagatttcccactatgaaaacaaatttggagctaaaaaagagtgaagggagttttgggacatacacaaataataagacctccattgaagaagttatgaagggaagccatagagggctcaacaagtatagacttgctattgttgtcaaggcatagaacaagagattcttcaaaagctcattctttctatatttgttgattgccttaatcttttcaagcttgattgggtccattttgatgggttttttttttttttggtttcccaaaatggattggaaatatgggttatggagtaaaactaatgtttggcaaaaggactaatttttttagaaggaagggctcaaggcctagataaaatatacatgagggagatttcatctgcctgaccatataaaaattcttaagactgccttatatatagtggggatattggggtcactttggtaattataaatattaataacatgatatactatatagttattttgtatggggaggtgactttttttaaaaagcattaatgggagtttagttattgctcactttgtattttaggctacactttactttcccccttcttgttactttattttttttttttttaa

SEQ ID NO: 885 - DNA, 7847 bp, Cannabis sativa
cgttttgggctataaacaaaaatatctctaaataccatatatttttacataatttttaatgttggttatgtaacatcaagtgttaaaattgtgttgaccaaacatctaattaacaagctttggaggctgaaaaaatcttaaagtattcaaaagctagtaatgttgtttgttttgaataaaatcttcattcttagattaaaaaaagagttaattatacaagttaactttaattagttattactgttactataaaattaacttgtgttttatcattcatttcaaccttctaaatcttaattttctcttctctaataattcttgtaaaataattgctatgtagtttgcacggttaacaattcattttcaatcaataatttcttttttaaagttttcgctaaattttattgtgctcgaaatttgtttacattgtgttttgttttctgtattctggattggtgactgtagttcaccacaaatttactataaaatcaatgacatgaaagaaaaatacaaataataataataatagtagtatatcttaattcaaattgaaattactacatgcatcaaatgtaaggatgaaaataagactggtaataagcgggatattttaatacctattctcgcttatatccctgcatataccttatcggggcgatggaggagattctcactagaaccggtattactgtcaaaaaaatctatttatttaacgtaaataaaaacaataaattatataaaatatcatatatactaataatttaaaatatacattattatctaaaataaaataaaataaatataaaaatttactaataaacttcaaaaacacattgtgtataataattaataataatattataaaataaataaaaaattaaacgtccccatcagggcgggagtattatctccattcctgcaccgtttaatattctgggatagaaaattgtccctattaccgctccattccccatttaggtactcacgggacccatacccacatgtcaaatttcattccctaatcaaatgcatctctttcagtttttatcatgtttccttgtagtctaagcaatgcaatttgagcttccataacctctggctgtgattgaataccagaaaagaaaacctgaatattattcttggcttccaaccaactcaatccagggtctttttctagcaccattccttttatttttctcctcatttcagaaacaccattccactctcctgtggctgcataaagatttgatagcaaaatatgtgtagcactgtcttctgcatcaaatttcaaaacctgctctgcagcatgaattccaatactcagacttttcttaatcacacatgaacttaacaaacttctccacaactcaacaccattttcactaaatggtgatttcataataatttccattgcctcgtctaacaatccagctctgcttaacaaactaaccatgcaacaataatgtttaggccccggcatgatgcccttttgctgcatataggtccacaaaaacttcccattttcggtcaatccactgtggttgcacgctgagaggagagacagaaacgttacttgatccgggttcatgccatgtttttgaatctcatcgaaaatctcaagcgcctcctttgccattccgtggtgactaaatcctccaagcatggagttccaacacttcaagtcaggattcactgcttgagaaaatactgaacatgcagctttgatgcttccatttttggcatacatatctaccaggcttccacaaacagacatttcggcttcatatcctgtttttatggcctgggaatgaatcatctcaccttgtttcaaaattgtaaggtcagcacatgcactcaaagctccactgagagcaaagctatcaaccttgtgtccttgttgacacatttcgcaataaaatttaattgcattgttcccttctgccaatctagcattacttgtgatcatctcagtccagagaacaacatctttctctgagattgaatgaaatactttctcagcagattcaggttcaacatttttgaaatacatggacacaagtgtactcccaacaaaaacactcttctcaattcctgttttgatgacttcggcatgaagaggtttcccacagccgcaggctaagcatccggctgttgcagaaacaacagctgcaaaagtgtactcatcaggtttaacaaatgaagtagcctttaactggacaaacatatacatagccttttcaccatccccattttctgtgtaaccagaaatcattgtgttccatgaaaccaaatctttgttttccattttcttaaacagaacaaatgctgtttcaatgtcaccacaattgcaatacatgtcaagcaaagcattctgcaaagtcaaatcagcttccgagttcgaaacaatgaaccgggcatgagtaatttgcccaagttgataatcacctaatctgctacatacctttaaaaccattgcataagtgaactgagtaggagcaactccagttctcagcatatcatcaaagatttgaagaccttcattcaccatatcattcttcaaactcccataaataatagagttccaagcaataacatctttatcaactagccacccaaaaacttttcttgcggattttaagtccccacaatttgagtacataccaagtagagaggtttgaacacgttggtcatttaagtaaccaaatttcacaacttgggcatgaagcaaagacccaatgaaccaatcttcaagcagagaagaagcttgaagtaagctagtgaaggtagagccattagctctaacacattcaaaccccatttgggtactcattctcaaggccgtgacagcatgatatggggcacgtgaacaggccgaaatgagtgcgttgaaagatataacatttctttgaggcattttctcgaacaccttccgtgcatcctccactgaaccacatcttccgtacatggacatgatattgttgtacaagaaaggtgattgccagacggctgtcatggtggtgagcaacagagcgtggagctgacgcgcttgattcagcgaggtaacggttgtgcatttttgcactagagtagctaaagaagacgcttcgtacaacataagccactcgaacactcaaaacgattgtcgttttgatatcgtaaaagacgaaatctttgaactaattattgaaaattgaaataagcataaatatcagaaaatgttctcttcccgcctaaaacgcagcgtttaatgccctcttctcttcccttcctcgaattctctgaccggaaaatgtctgaaagtcagtactgttcccggctttgccggctgatcgaagattctctccgttcatacagggtgagcattcaccgttcaagtttctttcagtgaatgtcttctttgttgatatacatatattttgcaggaattggaagtgggttcggtgacgaaggagaaggagaaagagattctattgtctctatcacaggttcggtttagatacatatatataatttttgtgtttaccagttcaagaaatttatggtttcagtttaattttaggttttccgaataattcagctctggaataaagagcttgattctgattccgacaatgtaagtctctcttttgatttagaaatattggttttaatggcaaggatattcacggaatggaaatacttaaaagtttagtctttgtgataaacagggttctgtggagagattggtttgtgagattgaatgcttggatgggtgcagctcacattctgaggaaattcaatgtctgtcccaaatcgtagttgacttggtaatactctaagcttgtatgtaatcaaccaatggcaggctttgctcattatacaaagtattttgtaacactgtcttcatgaaagcttttggaactaaaacaatttgcttggccaagagtggttgcggtattttctattcgaaaatcagtttgaagattaatatttgaggtggctttcagttgataagtcttctctacaatggtgtctgatgtgagttcaattttgtgtttcttgtcaggtgtatttgctgaatgtcaatagtcaatatgttcgacatctggggagcaatgttttgcttgttgcttcgaagcttgtggccgcatctgtatgttacaattagcatgcttgaaaaattagcatcacttatcaaactatattttttcatccttatctgcaaattttgtgtagggaagcaactgggaagcttttattcaatgtttgagtgtttgcctctatttggggatcagcaatttgcatactgatccctcagcacattcagtgattggagctgatgattctaatagaacttttttaggttttgtacttgttataaaagataagttgaaaggtgttggctggtctgcattggctggcatcattcgagttttacgctatagcttgaaacacttgagtccggaggatgattttgagctcatttgttcattctttgatagtatcaattctagtctgctaaatgtgccgtgggactcaattaccaagatatttgttgagtcagatgttgctgcttctaaaagctcaatcacagaaggttcgtttgaaagattcatgtttctaggaaattttgttcagttcctgtgttccttggtggaacaaagcagtggcatagatactgcaggtggtgctataaacaaacatccagttattttgttaaccattggccttgtaccgaaactattaagttggagtactggaaagcaaggggataatgtcagcaattacatcagatacaagttattggtatgattttatcacaaatgttcaacatgctcaacatcaaagtgtgaattcagtggagttgatataattctttaaatttatgcttttcattcatattaattgtccttcggttctttgactattgatacgatgtttatcacaatttcaaaaaatttctttgctgtggtaaatcttccagcccaattgggtggttaggatgcatttgcttttcatgcttaactgtctgtagttgcgactttctgtttctgattttcacctgcttatgttatgttgagattcaaatttgtggcctattgagtaccgataaggctaattaaaggttacagtactagtagttattactaatcatgtaaagatgggaatatttcatgtaaaccattgtcagatattttgtatatgttcctgcattattccatgtaatttccatgtattctccgaatcggggtgctgcttttgcatctggaaacctggtttgtgataaaaatgaattttaatttgaataacaccgattgagcaacttactacaggtgttgatgatcaggctcagtgtcccaacttatttgaacttctcaacaactgtttcatggttgcaactagtccataattactttggcgagcttttatgccaacccataaccccacttgagttggttcagaatgacagtctacaaggatctccatttctatatagtatgtttgatgaagaagtcagtaatgtatcctccctgcatgtaaaaagacgagctatatttatttttctaacgtgttcatttagtctgatcaactataaaggtgatacgattaaagaatgtacttgcacatctcaaaacttgtgcttgcctaatgaatcagagttagagtgttgtggaataaagagaggttttggagagctttataactggcttcaagggcaggtaccaactgagattaatctcaaccagaaattgtactcgaagaagtgtttggatttcaccttatccttccttcgactatacttgcatgaggtttgtgtattttaagttaagttcttttctggagatttttatatctaacatattatttgatcaattcttttggtatatattcaataaataatgtattggtgtgaaaaaaggatgaacttgttttctaagtacgtatttgttaagtattatttataggtttcctatgttcacatttcttgattattttctcatttttctgaactgtaggatgatttattattcagagtgctcttgctactgctttctgtaccttttcctgcagagacagagtaagcagtagagacaagacatcctggtttattccttcatttccaagcagtaaaggattgttttttaaacaacctcatttggtcttttacaggtttcagaaggaaaaagaggcttctcagaatgaaaaacatgatctgatctctcacgtttcaaacgtttttaatcctgtgcacttgttccatctatttctttctgaggcaagtacatatttgttaatctgtagtaaatgatcaccatatttattataggtattgactttatgaatcttatctctcagttacactatgatcatcaagtgcttctggattaccttatttcgaaagatacaggaataagttgcgctgagtatcttttgaggtgtgttttcctttggatctttttctatcctcactgatttttgaaattattatacacatgagaactgtagttgtattaagctcatatgatttcattattagtggcaattgtttgcaataaaaccttttgtggactttctcttttccactataaattgttttatctatatcatttcaaatgatatctaatgatctaaactaaacagcctaatcattagtctagtagcttaaatgaactttttttttattcttctcaatagggaaatacttattttgctattattctggcttgcagatgcttgcgcacaatttgcagttcttggcatttttttgtacagttctcagcaaatggacatcatgagaatcagttatcttacaagaaaagaaaagttttgcgggacaattcaacttctcacgatttggaatcttctgtacctgaagataaaagtgtggagggattcgatgaagggtcgaaatctggtggtacgcaatatcgccttgcagcaaaaccatacaagaaagccagagagtgtttgctatctcttaaagtttctgttgaaagtctccataaaaagaatctctttccttacaatccgaaagttctcttgaagaggtgcttaacttcactagcattctggtaaattcaggatcctttaaggcactgtaatcctcacaactatgctttcactatttttgcttgtgtagattatggagatttgaggagctctgtcttgaggaagataaacagtacctctaaaagaatggagaaacaaaatagaagtgcaagcaagcaacaataatgctagcagagtatcatcctataatattaaagttgcaacgaaacaagatattgcgtgagactctcacgaagtgttgattaatggttccatgtcctatggatttttgtttgcttttgttttcttgacaatggatgccaaccagaccaaactgccaacatgagatctttgaggtaaaaaatcttaggtgacaattgtaaattcttctttgaatgctttatgactttttctttctttctttctttaaatgtttcttacactctttagcaggcttattgttgtggacatgattaaaaaatactgtttcacctaattggaatgtaccatttgaagatatatgtgggaaatatgacccgagggaacgtactaagatatatcgaaggtttaggtctatgaaattaagaccttttcaggtgaagggaatgaccgaagggaagtttggagatggaccttctgcagagttcttttcttgagacctttccgtatatcgttggcctccatgtagctgtaagggtgcacatttgtgttggaacatgagcgggaccaacaaccacctgtgcggggataaggtgaattttgttttgccatagagctttgagtttgggccgccatggaagagctcttactggttaaca

SEQ ID NO: 886 - DNA, 1212 bp, Cannabis sativa
atttagtttcatttaaaataattttttaatttattgattgaattggatttatatttattagtcaaatagctaattaatatcattgattgaaaattatttggatttatatttattatagttgattttttaatagtatctagcaaaaaaaattacgtgttctacattttaaatgtattggtttcaatatagcattgattgattttttattttttttgtatttataattttttttctttctttcttttttacgtgtccttaatttgtcaactttaattttcgtttttagtttttaaataatatttttgctatataagtgtatttttctttccgtatttttttgacgcggtaaatagagttacacataattaaccataaattacaattgactgtgaatacttctcgaattaggatagttcatcatttaaccaaatgacatgttttgccaaaaccataaattgcagtattcttatcgcgaaccatatgaaataaaattgccctaagaaatttaaaaaataaaactataacgtctacaaacagcagcctaccacattgaaaaaatatatttccattatttttctctccgtattttgttctatcctgatgttaaattaaattaattatttgagttttaattcatatttttagaaaatgcttgattaattatttttttaaaatatcaaataaataatatatattgattgtttactctgtttttacttaattataatattaattttatacttttaagataattagttttaaaattaggagatcttttgtatggtggttggttgtgccatggtaactaaatattttacaaaattaagcacttaaaaattcaaactattttaacaactttaaactaatatcaacaatctagttaaaaaaaaaaaatcatcattggaacacttttaaagcaaatttattagccaaatctttatattttatagtcttctaaacatcactttcaatcgcgatcaatgttattttttttcagcaaaaacttaacaattttttatatatgaacaaataatgctctaatctaacacaacatatcaacctcatctcagaacctctgaatttcatcaccaaaacctctcttatcttgtttggaaatcccaatgaattcggaacagtgtaggccattttctctggtttcacaatgtcagtctttttcttctctctgtttgaataatcaaggccgggatcttt

SEQ ID NO: 887 - DNA, 1766 bp, Cannabis sativa
caatagacaatatacctattgcctaactaataatggcgaatggaaaatagcaaactaacgaagaaattccttcaacaggtgcgctaccttattgggaacgagattaaggaatgctcggtgaacagctggtttcagaacaaaaatctaaaaagatgaaaaaaaatgtatgattcttagaaacacaaaaagcacagaatagaaaagatcatacaatcaaaactttgaccacctaaattttccacacaaaaaaagactaaaggagtaagggggcctaaatagacagacatacctgatatttgatctctggtgtcaaattaaacgttaccttgtttgtctggaagaaatagtaaagaaaagaaaataatataagataagataaaagataataataagaccgaaaagaaccaagggacttatgaattttctttctacaaatctatgccgagaaacacatcaacactgtggaaagaaaatgactacaaaaatactttaaaaggagagattatacccgaccatcggccataggtttggtgtctaatatcatcgtacttttgaaaccaatccgttgttttaactttctgttgctatcgccatcaagcaatttctgaaatcagatttaagggagtgttaaaatatcacaatcctttgaataacttacttcagtaaagttagtagctgacctttcttgttgcccagaactcagattctgttaagataccaccgatcacgaattgcttatgaagcttctgcaattcgctgtgaaggaacaatcttagttctatgaacaaaaggttttaataatcaaatcagtgagtcattgagatcagtcctgttgtacttgtacattttaactttaattatttctttttaaaaagagatcttagatcttcaaaaagtaatatgtgtaacattcggttacctatcttctcgcaatagcttcatccgaagctccaaatctgctgtactgagttgttcatcagaaaatgtaactgcaactttctcagaagcaactttcggagcagaaacaacttttgcagcttctgcagcctttgcaaggcaattacctaaatacaaaatgcaatgaaatcgatattaaacagaacttcaaatagaagaaactatcgggctgaggaaggaataacattgtcatgaaaaatgtgcttgcaaatgagaattacccacaaattctcggcatacatgaagatcagcaaagctttcaaactcaaatatgtaactcccaccctgtaacaatacatcccaataagaaagggacaagagattagtttgaaagaaactcaaactagtcattgtggcaactgaacatattgcaatactataacaaaagaaacctgatcatgggggagattaagccaaggtggtttatttgaaccctctttagtgtgtttatgacctgaatattattacagaattaataaagaaacagcatttagagaattgagcatgaacctcaaaagacttcctgaaactgagtacctttaatgtgtacaaaatccacatttagctttacattagaagtaggatcatgaggactgaatgaaaactttctttcattctgcatcaaaacagtaacaattccaaagttacaaagaaaaatcatcatccataaacatacattgcagcaactcaaaatcaacagtttcccaacctataaaaaatactttttgaccattgatattagataccaccataccgaccttttactctataataggctatcagacatcagtttctacccgatattgaaa

SEQ ID NO: 888 - DNA, 1995 bp, Cannabis sativa
attaatcggattattttaagttgctcataccaaatgaacttataaaaattaagtcatttatgctaataatcctaattatgagcttattgggcgtggtataatattttgtgaatagttactagttagcgatttttcataataattgattaaatcaaaatgagtaatgtattatacttaattaccacaataatagtaagactaaggtgcccttttaacatttctatattattataagcagatctcaaatgtatgttcacagagaatttttgtgcttgatttactcccccaacacaaatggtagttttacttttacttgaccacaacaaaagtagagcgaagattggaaatcataaccgggcactctcccttctcgtcatactcagcaaactctccatctgacaagtctatctcatcaaattttgtaccctcaagctacacagcataacacaagtcgttgtcattgtcattgtcatcatcatcgtaagtaacaaagactgaaaacaaaaactggcttataacgaaaaaggcgaatccagaaagaaaaacttacagatacagccttccacccatcaacgaaaaggtagttcaaaggttcataacccctgcattcaaacatcatcaatgggctgaatttccctgcctcactatctccatggctcagtggtttaccgcgacccgggatcattgtgattgttccatccctcccgcaaaacttgcactgaaacacaaatattagtactaactttggtaaagtaatgccaattataagtggtgcagttccccactatcaaaccataaatgaaattaaaattgtgttgaaaaaaccaagacgaagaagagccatgccaccaaaacaaaggaaatgggaacaagagaattagactttgaaaacaattacttagcctccacaaactcaatctaataaaggccatgttttatcaaatgaactgcacgagcattatagttacaagcaagaactcggcaaatcacagaattttgtctttaagactatgctagcatcatagaaactcaatacttattcacacaactaagagtctaagacaaattcagccagttttgttgattgatcttaaaagatttatatccctataccttaaaggtcgacccaatcacaattcagtacagcagcataggttgaagaaaaaagagatacaatctttttttccaccctaaaaagatacagatagaatgttgataaaatacaactactgatttgttatacataaatgctgaagcatcatagaatgttggttgtgtgagtgtgtgtgtgtgtaaaagggaaaggggttctaatcccattgtgattatacaaataagctactaaattgcagtataaacgaaaacaaacctgtagaccagaatcaccagattcaatggcataaagttttacaccgagataaacaattcaatgggaaaccaaattgatctaacatgtttataaatgtattaccatcaaaccaatccctatataaagcaagcatgaaaaattggattacttgaaaggaaaggaaaggcatagaaattaccttctgagaaagatgaactgtgcccttgcctacagcgagaggaacagtctcactcaatgtcaaagaagtttctttctgtgtctcttctccacatcttccacatttcaactacaacaatcaaaaagacaaatattacccagattaaagattaaatttataacattataaacactaaattaaatttatggaaatagttaagatatgataatggattacaactacgattatacatgaatgatggaagtaagcagaatccctaatttgaacagaatagtagttcattatacgaggcaatggcataagaacagagaaattggagtgttggagagagagtgaccttgaagagataggagaaattggggtcatcgcagccaccttgaggctgaagatcggtgaggttctcgagctcagcggtgatctgaagcatatagttcaccatttttgggtt

SEQ ID NO: 889 - DNA, 1810 bp, Cannabis sativa
acatcaaatcacaagttaactaaaaataattaatacatttaccttttaatttttattttcttctagatttaatattaaatgcatgtttattcaaatggccgaattattataacagagtattattgtgttaatgctaattactgtacacatatttaatatttttttttcatacacctacgtacaattaataatcttttcaaaaataaaaaataaaaagaaatacgtcataattaataattaattccttaaacatttttttcttaattaataattacaaaaattcagtcatcagaatatattttaagataatgtgaacaaactaatcagtcttcaaagtatatgtaccttaattaaattgcaaatcacaggttcacaagcaattaaattaattaattaatatactgactcatatttaattaaacagagagagagaaatcacaagagtactaataataattcttgagaaaaataaatataaatttataattaagaaaaataataataaaaaaaacctggatatttgtaagtgaaagtatcccaaatacttggtcctctaccatcttctttggcagccccttcatactgtaattaaccaacaaaaaataacataataaattaattatggataattatatttaataattataattaattaaaacattttatatatttatgtaataaatgtatacctgataagaagatgaagctgttccaaagatgaaaccaggtggaaaacttgttctattgagatgcatagaagcatattgagttggtattactattttaccgatattttcagaaaccgataaacgaattaaaagagcaagaagaagaagaaaccctaaactgagttgaagagagtttttgtagtgattaaaatatgccattgtttgatatattttgaacttgtatttgggaaactcagtgtgtctttatatatagctacacatcatgacctttaattagtacgataattaattaagttattaaatttaaaagacattattaattaatatattatttgtagatgtatagatatagctagagtcaagtttgaaaagcaatatatattaattaaatggataaattaagacgacatgtacataataattacgttattaattaactttgaaagcatctttcttatatataaataagtattgttaatttggtgttttaagatattttaatattctattttatgtaattaattagtgattttttatattattaatttaattaaaaatatatggggacctacataataagtttgtatttgattagagataatgaaatagaatagaatgaaaaaaaaaaattattttggttgcatattaaagtattagaatattattttaatagaatggtcttttttattattttggtagaatgattattctattttaaaatagaaagaaagaccattgtaatgcataataagaagatatttaataattttttttattaactttttatgcattttaaattttattttattccatttttatttttatatatttatgtttttatttctctcaaccaaacgccactataatatacatttttctttttaattatgtgtttaaagaaattgatactatatatagggagttaatatatggtgtggcataaaaaaaaatcaaaatattgttttccatgtgtgtataaaaatatagatatatttgtaacaaattaaattgtttgaatttttatttaggactgtttatctctaaaatatcttaatacaattttttaaaaaaaaaaaattggtataatgatttttaagttcaattagactttgaagcattat

SEQ ID NO: 890 - DNA, 1806 bp, Cannabis sativa
  modified_base (714)..(720): a, c, t, g, unknown or other
  modified_base (913)..(917): a, c, t, g, unknown or other
aaaaaaaaaaaaaaaggtttttcatttttaattttcattcaaatttgttaattagtttcttttatttgaaaagcaactgtaaataagtaaggtgttacacccaagctcatggaacaagctataacttttaatcaagaagataccaagactgtccacttttcacatcatgacgcgttgtatagaaaagaagatttcgaatagggcgccggtggccatatcctcataaataatgggagttcggttaatgtacttttcaagtccacatttctagccattgtcctcgctgaccaagatttagagccttgccactctcacttgttcatatattttttttttttgttaaatctcacttgttcatattcaatggaaattctctcttccccaaggtaaatgtgtgacatcctatcacattatatcctgatacacatcaaagtattttcaaataatgtatgcttgtaatagtcgattgacctacgacatacaatgtgatattcggacgttgggccttaattgactttggagcaatcacttccatttgacactagtgcatgatattcactacaattttgagagggataaggactctaatgggagatctaataagtgaagccaggcattgttatagtgtatatataatgagtaatggtattaaatgcaaccaaacaaaggaatggaataaaaattgtttccttttcattccattccattccattnnnnnnnctccaaccaaacaccacctaaatgttaagttattattcatgtttcattttcttattagtaaatttattttatttttttaaaaaattaaaatttaatgacttggaccaactataaattgtcacgtgttaatttacttaacagtcagtacctacagaagtttcagaattataacttaggtattattaccgctaannnnnaaacttaggtatttatttacaattcagaattaaacttagatatttatacggtaaattactacactaaaattacttttaaaaaatatttaatgtatatattagttaatgatcataaataaatataatattattataagaatattaaaaaataaatgaaatgaaaagtcttaacttccctaaaataaaagagatacatgtctctaataaagtgattgaacttgtttttagtaaagtaaattattatgaaatttgtttatcaaaattttgaagcatattctgaatacgtatgtcgttttatatatataaaaaatataattataattatttaaataaggaaaacaaaatttggagtgaaattttatttttatattacactcaatcttgcattatttcttttcaaaaaaaaaaaaaatcttgcattattttttgtaaacaatcatgcattattgttacgtgactataattaatttatgatgacagacagaaagtagttggtatagatatggatgtcggttaattgacttatataatttatagtaacgatcttcacgtgttaatctagaatttagccataaaagaagtgtagtgatgtatattttattattttagaattttaaaaattattatttagttttatttttttttttataattatgtaagttataattatttaagatattttataaaattataataaatttaaattaatttacaatatataaaaaatagtactcaaaaaatttataactttattttcttaatgttaaacttgtccaaattttcaaactttaattttagaatatgttaatacataaatacaaccaatacaactatataaaaatggtgcattggtacacccatttataatggtgcgccataaaatttttgt

SEQ ID NO: 891 - DNA, 2908 bp, Cannabis sativa
  modified_base (970)..(974): a, c, t, g, unknown or other
tttttttttttttttgataacaaactttgatatattgtcgagaatttgaggtgaagcacacactgacacagaccaccaccataccatacctggactcttcctgtgcaaaatcaattcaagataatgactggattacttctgtacatacatattatatgtgttgtataataaaagttgacatagtcaagacatgttatctctttggtttagatatagaaattagaaagtatgcacttacccaaaaactgaaagataagataaatttggtaaatgaaaagggatagaattattacataattatttcagaatttgattagttgatatttaacttttaccatgtgatagagagtgcatcatggatagaatgagaacatctaggcatagctctcactatcgtttgactcattcccataaaaattataagaaacaatgatgtccaactccaaattccttttctcaattccacgaaagttgtgaaatatttggaattatatttatatgaaaagttccactcttgatattccctttataaaattaacaaaatttaattaggaattttaaattaatatgcatacatttagtctatattaaattttttaacacaaatttaccaaattataaaataagctcattttatatagttcagctcattttcatattcgggcttaaatttgtgttttacttttttatattttttttttacaattattaaattatatgtatatttcaaagctttaattatatttatataacttttgaataatatttttacagattatcttatacaaaaattattaattattataatttaaatatttatttataaatactcaaatttttatatcgtactctataaataaattaatatataatcttaattttttatattttaatagttttaattataaaattataatatttagtattatacttttttttattattttaacttatttataattgataaatnnnnntcttattattattaataaattataaagttttttaatatgtcatgtcatgctttttaggcttgttgtgtgtcgtcctttttgggctagtttattcgtgcttcttgtgtcgtgttgtgcttaagtacatatttttcgtgccatgtcatgccaatttgtagcatcgtgttgtgtcgtgcccaagcttgtattttttcgttcctagtcgtgctcgtgccttctgggcttgtgccgatttcgtgtcgtgtcaaaaaactcaacctgtatttacaacaattacctataatacccttctcccttctcttctcttctaacttcaccatccatactctaattctcatccataccgatggtggtctgatgggggtgcgatggtggcctaatgctacctatttctatttttttttttttttatgtttttatgtttttgtacgtaagaaaatggtagtataaggctaccattggaccaccatcagatcatattctacatttatggatattaagctccattcattaagctcgtcaggaagtcatcggactaaaattagactaccatcagactatatcctacatttataagtgtcatcgagctactatcggatcatatcctagatttataggtggcatcaggccactatcggaccatatcctacatttataggtggcatcgagctaccatcggaccttcgtcttcaaccttcactcatttaacaacaggaagacatcaggttataaccattgagcttgggaaaaaattagttttctgtccaaaactcagatccagtcgttttcgaccctaaatttaacatcaagtcacaaataacaaatattaatcatacaatttattcctaatcaacaaacctataaataaaattatacatttcaaccctagttagattacatataatacaatttgaaaaaaaaaaaaaaagattacatataatacaataaaataaaatgaaaaacttacattcatggggctttgttcgtcgttcggagatcttgggttggtagtcgtcagtgggttggtaacttggcaagtatcccataattggattcctactaaaatcaatttgacacgtcatggtctcttatttgatgggttatgttctttgtgtggattggaagaagaaactaatcatcatttcctacctttattcatagatttactaatccccttgctaaagagatgattgaattagttatgacaattatgtggagaatttggtacaaaaggattaaaatggtccataacaatattgatttatctcatatgcttattattgattattggactcgtgactaccttaacaataggtagcgtttggtagcgactacctctccattacagccgacagggttgtctcttctagtaggcctgagttgcggcctccttcgcttccgatggttcccaaatggaccccccgtggttgtctcaaaattaatattgatgatattatttgttctatgagcaattgcagtggcttgggcatggtatagagataagttaggcgttgttcgtgtatcatcgagttgatatttgaatgattgtttcgtgcttgaggtagcagaagctttgattttttgaaaggctttgtctcaattttttattttttttttgtatgaaaatatcattattgagtttgaattatttgaatattgtgcttaaaattaaaaacaatgcatctatcattacttctttgaatctagtgttggatgatattcttggtctttgtaataagctcaaatgtgctagctttgttcattgtaatagattttgtaattatgttttggccaaacttgctatgacaacaaacaatagtataatttggtaggtagagaatcctatttggtggcctcgcctccacttttttagagtacttattgctcttggtgtttagtagttgagctatgtcttcttcaaaaaaaaaaaaaaa

SEQ ID NO: 892 - DNA, 7371 bp, Cannabis sativa
aatcgaaagaattactcgatagtttctctcagtcatatatcagccaagaaagatttgacgtgaagagttagttaaacaaacacattccagaacaccaacaaaaatgataaacagaagactaagcactcgaacgagcatccaaccaacccaaaggaccgaaccccacattgatgcaccccttacttccaacttatgtgacaatggcactccttccttgccaagaaaattcacaaattccaggcggaccataggtaaaagctcagattggtcgttgaattctcccaaggaagatcaaccagaatccccatcacccatttgcagcagttgcactagtccactaagctctaaaacatcttcttctaagctcaatacattcttctctcgactctccactgagtcagcaactccaagaaaccaggttctttttcaagaatctcctatgatctcagagtttgaatttgtgttactggataagctttgttattactcgtcatattagtagacaattcaacacctaataatactttctctggttacttggccaagatctttcaagattgcccaacctttttcgcttggacactgttttctttctttttaaatatgaaaaaaaaaaacatttgttaccacgattggagtatatccaacttgattgttttcgttttatttttatgcatatggtaatcgaaaatgctgtaaatttaacaaccctcagagctattacgttgattcggatagtgggaagaatggccgtttcaacgacccaaatcctcaagacaagtatccactaggtctctttcccttttccacttttaaatcatcccaaaaaaagagtatattaataccaacataattgaaatagcatccgagtctaattccttgacaatccaacacatttgtttcagcaattgaagagaattcagtagctgaggagattagtagtcaagcttgcagtttagggaacttcggagtgtccaatggtgaaagcccggattatttacagcataacttgatgactcggccgaagccttacagtacgttcttagatgaagtcaagaagcaggagcttgaggctgaggtagaagcatggaaaaaaactaaagaaaccgagcttattgacaagtgagaactgagaacacattgtgtttcattcatgtataaaaaggggtttatcctcctctattataaaaaggggattcaactttcttatctagcaatgcctggcaggttggccagaaaagaagctgctataaacgaatgggaacacaagaagactagcaagattgtggaagaaatgaagaaatttgaggtatgaagctcttgtgaaggttctgagttaatgatgtacatttttctttcatgtaaaagtattgctcatgagatcattataggaaataaagaagggaaaaaaatgggttagcttatcagtaatcggaaagattaaagacatgttgggaataaagatataaaacactctacacaagccttcatagaacccatttcaaaaaaaaaaaaaaaaagtaaaagaagaagagcgtgaatatcttatattgtatcagtaattacccacttttttcaacctttactgctaaaggtattcgcttattttatataaaagatacaaaagagtctaagcttatgtaactatactttttgctcatcttcattgtcttcttatttcgcagagcaagctggagaagaagcgtgctaaagcattacagaaattccaaaagaaaatgaacatagcaaaggctgaggcaaataaaatgacaacaaaggcaaggaaagaaaccattgagaaaatatcagacatttcaaagatctctgacacagcattagccacgaagaatttaaaatgtgtcaagctacggttctcttagtccaaaaaaaaaacaattataacttttagtaattagataaatgagatgtttggcattaaattccaatgtgcatcaacgattctattcagcaattattaatcataagaatccgtagtatctccaagctttttgacgttatgctagtccttgtaagagagttagtggtcatgttggtcatatatttttttagacatttcagacatgtatcggtgggttcacttaattttgaccgattaatatttttcatatttccctgtaaaaaaggaaaaaacaaccaagccgaagaaacaattaaagaaacatggctctttctcaagtttgttttagaagtaaaaattgcattgaacttgaagaatgatatacaactgtgcagggatatttaactgtctaaatgatataattcaaatgcaatgattaatgaccgcactacaaaacagaaagaatatttacatgccattagcagttttgagctactctgcaactaaagcagtgaatactagcaaataaaaacgcatgccgtgcgccgtaaatatccacatggaaaagttacaagttagtgtgcgttctcagatacccaattggacaccatactctcatccacaggtttcgggcccccacaagatcttgacactgattcaaaaagcttttcaatttctggtgcgcacctaatgaaacctcggttccaaaagttgtaccttggattctggaaggagaaaggagggaaaaaaaacacaatcaacacaaggacttgcacaaaacaaaattctgcaaccatggaagaagagactcaccttaataagctcaataaatgtaataagaagaccccatggatgaggcctgttaacaatcaaacgttccaacaagactcttgtaatttgctcctggataatttcctgtaaatagcacactttgataagcaattgaatactactaataagttagctgcaaaattaaatgagcaataatgacattaaaatgttcacacctgattggattcggcaaacaagtaaagaaggataaaagaaaagtaatgtgtatgagtgtttggatagcggagttggttagccaccgcattaaggaatagatagcgtccctcagtatctaggtccactattagagcctggaatatatctaaggcagcacccaccaagaatacagcaagtggaacattttggctactttgggaatgagaagttctagcctgaagctgctggatggcctgacaggaacccaaaaagcaggtatggtgaacattcattgtttaataagcagaagacaaattaaatagatctttgtaatctcttgtttttggcaactgaacagtatcttatttacatattgaactagaaaccacgcacaatgaaatgagcatattttcaattttacaaggcaactgaaaatgtgtgaaatttattcccgtgatgcattctgatgtgacaataagggagaaattggcatagaaacaagtacctgcatgccaacataaagcacaagggagtttatcaagggtacattataattggtgccagccgcagcaacttcactgggtggaagaagcagcttctgtttcagatcagtcaaaaatgaggagccttgccttgtctgttgagaaaaattaaataggcattacattgggtaaaagttcaggcaaatggcagataagacataaaaggagagacacatggagagtaccatcttttttaactcaaattaaataaacaaataacaaaaatgaaaaatggaggaaaaaattgcaataaagagaggtacccatggcataaactacggtaggaataatttctctcaccagaataatgtaaaaaatagaatgcaaaacaaaataccttgagatactcatccacatcattcttcatttgttttgcctttagagctgcatcaacctccgaaagaatgcgaggagattggctgatttctgcaagcaaatcaatctgcagacataatagaaaagaaatactcttcttaagaatctgcatcagtagataaaagaaaattgtaaaagtacataaaaccaccactactaccaccaccttcaagttaggagtagatggatctggcagcctcatattgcggggaaatgcacttagaataatatttctcatttgaatgcagcttggaggaataacatcacagaaggtaaaatgataatcacacaaaaactcggggaaatcatgaagcagcactaacaacaccctaagtgtgcctttatacagaaaatgaacctgtacaacagattaaatttaaattatattaacaaaggtagccatatgacaaagcataattaaaatggtatatcaagacagaccggaactccaagctcagcatttctcaagaatggttccataaattggaacaagtctaccagcaatcgttgaatatagggccaacccttctgaccattccccgtcagcatttttggcatgaaactcctgtggctcaccaactcgagccatgcaaagctgataaagcatttcaattagaccagagaatacttctttctttcttttttccccttttaatgtagtacgaaagaccacaatatgaaaacaaaatagggaccttcaagaacaagttttatacataaaaacatactatcccagattcccagccccggactaaattggagaacaggactcattcacagattaaacttacaaagaatactgaaataaaatgcgaccaagtcctcctaaataccaaaatttgatgatcatgctacattctagatatattaatctatattacccaacaacatttaaacaagaatcatgaaataacctgaatgcaggaactttgagaggctgcaaagcatgaaatgcatttgcaaatgctgtcaaaatctgcagcagaaaaaagaaggttaaaatataaaaaacaaaatgtaatcatttgtagtgcaagtgatatctgatgagagaaccatatagacctgaaagtttgcgccatctacaagggggtctatggagccaagatcctgaagccaattgataaacaatctaaaatatggtcttggattaaaagataatttcttctcttcagcatctttttgaatgaatctgacagtaactgctagaatctgccaaacactatacatgtcaaacaaccaaaacataataaattagtcaatactctgaacttaataatcaatttttctcaccttagacaagagaaatggtttattggttccctgctgcaagaggaaattatttatttagaattcagatcttattgcaaaagaattgaaaaaacactggaaatgtgcttgctgagtgggatgcctactaaccttgagaattgaaaagacgatttttgcataaatatcaattgcaagaaatgacaaactctgcccttgaagaggtgcttgcaatgtgcctgaattaatcacctcagaagataggcaatgcgcaacagaaagttcctaaaacagaaaaaagatgaggccatggctcttgtcaaatcataactagcctttccaaagaaagagatctcactgtgaggaggcggaaaaatctctctgtcacgtcatcccctttcagcagtccattttgatgcagctgtaaaatgtaatgtgcacacgctgcatcattagcaccaggaagttcacaaatcctgtaccactctgcaaacagcctcgaaacctaacaaaaagaaaagcattagagatgagtttcatgagcataaatgccgtacaactcttttcatattaatttccatgggtatcgagttactctgctctaccaagtcagaaaaacaaatcctaaatagctccctccccaccccctaacactaccagaaagagataatgataacatcagaagtatatatctaatatatttataacaataataataaaaagaaaaaacaattaaaaaatcatcttcccataaaagagagaaaagggagtcagctaagtagaatttttctatggtttgcatattgcatattcccatacaacactatcaacttcaaccaccattccgagtgtaaaagtacatagaagaatattttatcctcattctagtgctattatccatctaagaaaataaaaaatctagttatcatcaaaggtgaatgttacttaatcaataacataaaattataaggaatatacttggaaactaaatgtcatgatacctgctcacggaaaccagcaggatctggttcaacagactctacactactcaagtcttccttaaccatagagagaccaggagcctgttaacaaaatacaaagttaaataaaagaattgttgaaataggttacacacaaaagaaaatatttgaccaagatgtctttactgactttcttgtctctagattgtcgagccttgtcatccttcccaacattaacaccagaagaaacagccacatttgctgaaggattcttgaccatctcaaccaactgttgcaatgactcgggagacccaggctttgaagcaagctgtgtttcagaatgataagtaaatgagtttatacatcaatatgcaaggacattcactcatgcaagactaaacaagtacaaacctttgctaatgcatctacaagattatgaagttccgaaattactgtagattcttctactgccaatatttgaagaagcgaaatagcaaactccgttgcagcctctgcatgtttaatgcacttagtaatatttttaaatgcaagaaataaaaggaaatcaaaacaaaatcttctacatactattccttcctccatcaataagttttgccatatgcacattatactctgcaaggtttaacaattcactacggataaggccaacagtaatatctttgttaaactttcgctcctcgtctgaataaatcacctgcgcaaagttgaaaagtatttgatcaatacaaccagaatgtcacactttataacaacagaaatggataccagctcattaaactaaagaactaggcaaactccagtcctttcaccagcccagaaagctgaagacttcgcaaaaatgattaaaatgaaatagatccataaaacttcttgccaacataatatcttctgagagagtctacgtggtaaacccacaatataaaacatgattcaatgttgaatgagcatacccagctagtgagctccttgacaactagcttgcacacatcccgaatagcagtaaggatcgtgagaagagaaccaacatgaacatggtttgatgcattttcatataaacccttgaaaacctgtaccaaaatttgaaacaatctcaagatattgacatgttggggccaaacaaatgacatatcatcatcacttgggaatgagttagctaatttcgttaatcacttgtatagtttttaaagtagaaagaaagaaaaaaaattgcaataagtactacgaaccttttgagcaacagctaaggcagcttcatcacggcttacacatctaagtatgatctctggaacttcagtaacaattccctgtaaacatgtcccccaaaaaaaaggatttaaat

SEQ ID NO: 893 - DNA, 3579 bp, Cannabis sativa
tctctctctcttcttccgaacctaaagcaaaccccaaatttcgttcctggcatctacgccttctaccaatcgcctcaaccatgctccggcaacgcttggtctccgccctccgaacccgaggcggcgccacaaccggtcctagccgctggaccagtcctggccacgaagagcgacccaagggataccttttcaatcggcctccaccaccaccgggtcagcctcgtaaatgggaggactgggaattgccctgctacgtcaccagcttcctcaccattgttattctcggagtaggtctcaatgccaagcctgatcttacaatcgagacttgggctcaccagaaagccctcgaacgccttgagatggagcaggtgggtcttggcgcttctgggtcttctgaatcagactgaaatttgatccgggtatggtgtttttggatcgcccttttctgggtttgatgttatttctctgggttcaatgggattttcgggtttgggttttttggggctgagaaaagtggctgttgatatttttagttcaataaggtttttttcgaatgtttttaattacgaatcttctgaaagcttaactgctgcaatgtttactttctttctgttgattattggacctttagacttgtttaagtctcaaatagctcataaatattccttttcgaatcaaatttgtttctatacttatttagatttctagcatagagatgttattggagtggcttttaagctttgattagtccatttattatcttgttttcttttagaattttgcaatggtgcagaagatttttcgtatctcaaggagtgttattaggtgctattctttttttctttcaggaaagtacttttactcaacataagtgtttgtgttactacggatactgtctcaagttttcttgtttgttcccatgaattatattgcaacataacattataagcctgatacaccttctaatatggggtatatgatactcagtgggagaattatataatgtgctatgagtttatccaatagatagtgttagtgtgattgttgataattattccatagatttcacaagagagtataagtgtaaatcatttcgccaagaggaatcaatgaagaacatatgacttttctattctctctcttctcttcccttctcttctttctctatactctctattctctatgtttcttccaattcttcttctgtcttcttatatggagtaagccaacgctaaagttccgaaaatcttgatacaaagtcttaccaattggtgctttcattgaccttcttcctatggctgattcttaacatggctggatctgaagtgcttcatgcactacaagttttgcaatctcaaatggatagctacttcacaacttgacattctgaaatggatagccatttcactactttccagtgtctgcttgatagccatatcaaggtgttgaacttgaagacaccagcaatggtagagaaaccaatcaatggggttctcactatagtggtgtccttagtttccaatgttgatatcgatttaagcatggggaaacaatttgtccattcttcacttcttgtgaaccgatgtagctgttgtgcttgtgcatttttgacgcaggatttgatgggttggtggttcgattcaagtcttgaggggcatgtgaaacatgtgccacacacatgacactcatcccttgaagtcattaacaacgtgaacccacgacacggtacccaatcacgcttgaagagttctttagttagtcatctccacatatcgagggtggagatggacaacttcctcacgatcccgaagtttacgggagcaaatcaaccactactcggaggggaaccaccaccaatcttgtcaaggatcacatccattggtgtgatttagagttgatgtataggcattgcttttgcaatgatagtaggcttccatgttaatttctctcgaaatccgaacacactaaggggcccatttcaacgcctggtcctatatttggggtccacctttcaagcgcgggtgttctcattgttcaacatagcaagagctccaagccttgagttttcagatcccctgttcgcttactggttggtcttcggaaccatctccaacggtggtgggcgaactagttgtggctgcagttctggtagtttccaagggtgtcaacactctgccagcgacatctgttgtggtacttgctgcctgtgtctctgtgaatgagggttggtcaatcatcattttttgaactggttttccgatatcggtcagccagcaatgggaattgttttctggagcttccataaagggctgataagactccaaatgctcatcatagtgagagattattttttttcctcaagggcattatgtcaatgactttgacactgtgacactacaagtattttattcatttcaatgacttttgttgcccttgttgatgcttcagtgattaaggtatttgctcttagggtacaagatgaagtgtggcccacttatgtcacagttgtaggttttatctctgcttattaaaagttgtctgatcttgaagtgggtgggagagtatgtgcatctgttacaaagacaggaacactactcaatgtttttttttggtaaatgtgcttgatgatatgccccttcaatttggcaccgttgctattaattttactactttggatagcaactagagatggcccaaaaattacctgccagtatgctgcacaaaacattggtgttgtggtcgttattggttggtgaatttactcacagtgatcatgtaaaatcttgggtactcttcattgggacacctgagagatttcatatcttagcatcctatgcctttttgttttgtccaccatatggtcacttcttgcaaaatgggttgatagatagcgaccaacatggccctggattgcgttgtgtggttggcttggaacagtcccatggataactacactatgtactgccataataggagtgttatatggacatgctaggaaagcacttcattgcttggagaatatacaactgaaggatgagatcatgtatgatggggttgtccttagcgtgcttgcaacttttactctttcaactctgcctgcacaaggatgatcatcctgcttttagtgaatcttattcaactttgtgcaacattaaagcaagtgaggcttaggcattaattatttgtatcatatcatcatgtgaagttatgaaaaatgaaatattagtgtcatggatttcattgtttgtgggtattattagcaatgattttatggaatcagtttggagaatattccatgcttcttgatcttgttgtgttgttgaccgtgtggtgcggtgcgggtacttcttggaagttggttcgatgacgaccattcttactccgttaatatgaacatggcagagtcaatttcaccattctcctggctagctgcagtttctgctggtgtgttttcttctaagagctgttgtgtttgccaccataatgtgatgagtttgtttatcccataggcaatagatatcatcattgttgtgattgttggtaattattccatacattctagatttttttttttttttt

SEQ ID NO: 894 - DNA, 2866 bp, Cannabis sativa
tttttttttcgagcttatctgattcaactttgtccggagaattgtgttttggcatatcaatttgctacaaataaatggaggtaagaaaaacaacagtgaatttattgagaacatgtaaccctcccttgctcgctgtaaacctctttgagaagacaaaatttagtatgagaaagtacccagctgcttttatatactttttcttagaaatcaatacaaaatttgggaggaaactgccatggagtttgtaagaaggaaaacatcaaataccactttcatcgattgcagttcaaatataaaagagaaaaactacaatcactaagcaggttcccataagagctaagatcattgaaatttattagttaaggttttcaaactgtttaattccagtgtttcaaagaatacatgattgttttcatacaaatatatactgtataaatcacaaaacccacaaagagactgtcgtaggaagtatcgtatcatttcttatgccagcacaacaatctgcagaagatttgtccattagtatcatctcctttcctctcccatctcttgaactttacactactctttatggtcaaggtgactcaagttccaaaaactattgcagcaaaatcatctaacatcaagtcacacaacattcttaacaaagagaaattgacaaccgccggggcatctcatggtttccaaggtgctggaggtggtggtggtgttggaaacattgggggaatagcagagaaaatagtgttcttatcaatcccgccccccttttcgcctgacaatgcaacaagtgcagcaactagacctgcattgcctgcaagagtcggttctgtgtaattgtaattggaacgcacatcacggaaaccatcatgcttatcaggccctgcaaccatagctccattaattacattagggtttgcctttttagagtccctccatttccagcctcctttgcagttatacttgaccttattctttgggatagaagcacctctgtggtgtacacgtttcgggaaatgattaccaaaaccaacaacataactcattttccgaggatttttaccgaggacgtaatcgatctaccaaaacagcaaagtgaaaagagttagttactatttttggaaaacacagcttatagtagaaagtagagttggtaggaaaaattaagcctacacacctgggtcttggcaaagtcacgtaaaacatcagtagaatagaaattaggtccacagtaccatccaggtgtatctgcagcatcaagataatcactgaacagggtagctagaaaagctgcattgactacatactgaaggggctgaggtcttccatgattcagctgtatcaaacctcctggaagaaaagaaaaacaaaaaagggcgaaaatattagacaaaagacccatacacaagtcaatgaaataatgaaccacattcggcccttaaaagtcatcatccataaatccattaatgaaccatgaacgcagtacctcttgttctgttaaagctattgaagattggcaggtatgagcacatgattatgctagtctgattgtggaatgtcctcagaatctcttcatatggatacccagggctcaaaaataatctcagacgactcaaaagcacctaaatcaaagtaagaggatcattcagccactgaacatcttttgaaacaatgattccaaaaacaagtagatgatatgcagccattaatatagacaactggagatgcaacttatttcataaagaatagatatgtaacaaaaaattctccattaacatacctgagcaccggtaagcttgttgtcccagctcaacacaccgtaatcaggacctccccagaaggcaccagcatgtttggcaagaccaggagctgtagcaagctgaagatatgagttatttccagtggcatagtataaccaagctccaccccataagaactcatcccagtaaccagtggaattatagaatgtagcagcctctgcactacccgcactgtatcttcccctctgttcccttgaaaacctgaagagcgtcttagcaccgtgaacaagtttctgcgagtatgccttgttgtctttgaaaacaatagaagcagatgctaaagcagcagccatttcagcagcaagatctgagcaactgctacagtcaaccacaggtcgatcataatcaatatcttcaggacgtgtccagcaataatggtcgttgggggtggtacttcctccagaggtatccccagaaccaacctgcaaaaattaaaatggaaagatgaaaatacatcagcggcatactccacagatgatccaaggaagaagctctaaaatagtggctgaatacaacttaacaaaaatagataagtaccaaatatcgacaaaatgccctttacaaacagccaattcatttacaattacatgacaagtaaaaaagtaaactaaataaaacaagatcagaaccatttacagccaatcaaattaattgtgaacagtacctgtgcagcaagcctgtcaatttgatcagcggtatgattgaatgtcttcagaaagtaatcagttccccacttgatcacatctttaacgtggttgagctctccagcagcttcatactttccgctatactcaatgacactccaactcaacatggtcatggaaaaagccattgggaagttgaacttgatcgcatctccagcatcataatatccacccgacaaatccttcattatcgaatccccctcttttccatcgtgcgtgcaagagttacccctccacgacacattgttatgtttaggaagcttaccagctacaattgttaaagggatcaaacaaaatcattagtaagacaacctaaacatacaaaagtaaaagtcaaatggaatt

SEQ ID NO: 895 - DNA, 3904 bp, Cannabis sativa
gatgattagtgctgagaatcctattgaccagattcccttgtttaaaggacttgatgctgaagctgcaagtacatttgaaacaaacaattagatagatgatcatgcaaaggcgtgaatgaggccaagtaaaaacttctgtacttggatctatgaaaattttaagtatgcactaagactatcaaaaatagggaaaaaagaagcaaagaaaattgcaaagcagacgaaaatcagataggcaacaaggtctaggtggaaaaaatctctttcaaactcttttatccgatgtctataaactattaacaaaaaccagatctctatgttttaaatgagcatgtaaaaatagcagggaggtacaataatggagacaccaacatcacaatactaagaatcggaaatagtcgatcacaattcgcaagcatatgaaagtgacatgcaaatgagcatctacacttgcatgtaaatctcagatcttattttttagacatattctaattcatcatctttcctggagaattgtcgtgaattcgcagataaatggagggtatttacatctctcttctttctttaattttattttttattatttcttgcataaacttaacataatatgatgataactcgtaaccagaagatttagcacccctaaccttttcccttaattacctccaccagtcattagtcaatttctaaaatcaggaagaaaaaccttttatgttacttacatgaaggagatggagcaattgatgaagacaccaagccttctgtgcgccccttgctttcacctggacttggagcacggtgcacgtcaggtacagctgaagcgtctggagataactgagatttgggacccataggtcgtgagtgaggactaggagcataagccggaggagtaattgagttagtaggtgaggttggtgatgagctaggagaaactctagaaccatggtatggacaaggttgaggagaatgcaaagcatctgatggtgttggagaagaagcttcacagttaacacatggttggggatcaaggacagaaggtgagggtgctggagaataagttggagccgggattggggaaattgatgaatgtgcatgatcagttggtcctggagctggagaaggacttggaggaattgaagaaattgtacctttaagataactagacaaactgatgcttttaactttaccaaagacagagttatcaaggccaagatttcttgcaggagatccttgaagtgtttcagccaactgttttaatctctgaggcaggaggttcccgaaatcagacatgacagatgcctgaataattacaggagcagctgctgtcgaaccaattttgtttgttatttgcacaaatacattctgcgtaatagaaagaaagcgtggattagtgcatcctcgtgagagaaatatttaatttaactagcattttagttttataaccatgtttagtgctccataaatttgttaaatcaggatccacatttccattatgaacattgtacccacttctcaatggtatccaaacaaaatttacctttaagtgaatacaaataatattctagttttttattttgagaaaaaaaaatagtattacaaattctttaaattactactttacgtgtcactgtttctgagacatttcctttttttgttctagaattattgtaattgtgataatggtatagaatgctataacttttgtataagggatttctcgaaaagttaagggttagtaatactcttttaaaatcgaaggattcagttttcaagttcagcataggaaagcaaacttggtatttactaaaagaagtgtcataataggtatataaagtcagttaagtaagcaacatacctcatagggtcttagtcgcaaaccgaacttcaactgattttttaactcaacaatattttccaatatctcagaaatggaattattgagtgtaaaattaaacagaatctgaggtatctgccaaattgacgcagatcgcatgggaattacagtgactcctccttgaaacttaagaatctcaaatgcagatggttgcccaaaaattgatgttgttagcgtaaggttgatttgtttcataaacacctcaatcaaagaagatcgcagcacacttaaggacactggacttatttgagcatttatcggatcaggcaaagcaccaaacaccacggcagtccagttgggcacacctgattggtgcattgataaaatagcgacctggtggagcaatgaaagcagctttagtttgttttttcgggttgtaaagaaagaatattactattaactatacataacgcctacaattttcaaaatcaaacctttgtatctgggacacctatttctgcattgatatcatattctaattgtccaacatgaggaacaagctctgaaacaggcttctccaatataaaatacgccttggcagaggctggaagtagaggggaaataattagtatcgaactgtaaggaaagctgtagaaattgtattttttatgatgcaacaaagacacaagcttgaagtctaatataatagccaaaagttactgtatcacttgaaaaatgctcttaaaacttagtattcttattattttattgttacaaattctatctttgtcaacatataactgtattaactccattattgcatttagtacaagtagttccacaattgaaattaagtcaagataagatatgtcaaggcttctccaatatagaccacccacccctctcaaaaaacaataaaataaatagataacaaacttcactacaaacaccatgcagtccactcatagaagaatttcagtgataatgttttcaattattgctgttctatctagtccttgacaggaattgaacatcaacaaccaaaaatattaatgggtccaagtgtatacatctcaattaagatacgcagtaatccttgactacccaaggaacatctaaaaagctcagatgcaaaccatatacagaatcaaaatctgaagcagaaaatgactaaattccaggatctgattccagcttccatgtttgaaaccacgaaattggagactacaaagggaattaatatatatgtgaaaataaagtacatatccaaatattatacacaatttataataacaggttggaaaagtcgaaagaatatatccatgtacaataaaaaatactaacagaatacaacatgaacaaattctccatatctattctaaactttacttttatattatttttgaaactagactcctcgcttgaccctaaaatatttggggaccagaaaattatagaaatttctacatagacaataataataaaaaacctcatcgttaattattggaatacatgcacaaatgttggcaaaatctgtgtgtttccacaatgtagacaattgaataatttttttatatataatatgtataggatataacaaggagcctctcatagaacaaaaataaaacatccagtctacaaatatgatgaaacacaaagcctatctaagaaggccattacatatgatcactataagactgtagtaaatgcactatcatgaaatctggattcaagattaatataaatacatatttttctaaagcagccagccctcaattaatatttaaaacttttccatcatcaaaatgaataaaaagatgcccttttaaaattgcaacaggaactcagcaggcagttgaatcaaatatcaggtaattgttcatccttaacatcaatattaattattttctcaactttgttcatacagcttaccaaaacaatcactggcacaaacagcctaaccacacccacaacaatagctatacccccaaaatgattaattcaaaaaattcaggtaaataactagagcatatcgttgcagatcatttccattttatttatttatttatt

SEQ ID NO: 896 - DNA, 1310 bp, Cannabis sativa
agagagagagagagagagagagagagaaaatgtgggtcgtgggtaatcgtaggcgaggaagaggaaaaaacagagagaggaggaaaattgaatgtgaggggtattttggttttgggtagaattttagaatagtagaattattttgtataaatttaaataaatttaaaaatggtataaaatttaatatgaagtattttattatggatgaatagtgaaattttcctaaaaatatgaaaagtttaaaataaataaaattgacaaattaaataattttttacaaaatatcaacacaattaacacattccttaatagtcgtgtgaataaattatactatatattttaaagaaatatttttctactaaaaacataaacgaaccaattaatattgctctatcaaatagattcgacctattattcttaatccacaaaaattgtgttattttcaagttggattattgtgttgaagtcacccctagaggcaactaggatcgaagtggatctgccaatgcaggttgcatgtttggattgcttcaacttataatccctttaaaatgatttttaaatttataaaatatatttaagttaatgaaatacaacaaaacataatattttataaagtaaaactagagcataacaaaaacctagaataatttcaaaactaccatttgtgatcaaattttcctatatagaataataaattgacaaataacctttcacaactattttatgaataatttagtgagaattagagagaaatgatagttaaacggctaacatcatgcatcaatctctaaataaagatcattaacatacaatcatgcacttatttgaacccacaaatgatgtacataatcaatttgaagttgaaaataaatttgtttgtttctaatttgacaacagagtttgaataaaaccatataattcaatagtatgctcgtgtgacagataacaagaaatagcatatctatattcgaaatttatctcactatgaagagtactattgaatattttgcatattttttacatatagttttaacaaatatctatgataggtatgaatttccatcgatattaagaaaaacaaatccgatatttctttaaaaagaaaaagaaaagtgtttgccaagtctcccataattccattgtggaatgagttgcaaaatttaacaacgttttacttgttagctgacaaagtgttgatacaggtcaatagcaatcaacaaggtaatacataaactaatccagcaacaaagaaaagagagcaaaaataaaatggtcaaaaggaagatgtatacatatatcacaaataa

SEQ ID NO: 897 - DNA, 1527 bp, Cannabis sativa
atatattatcgtaataattttaaaagaattatgtatatacatgagtaaagagtatatacataatagaagggttattgatgtggtgtattaaataagacaaacgttaatagttggatcaaatttaagttaatttctaccaaatttattagagcacgatattgagctaaatatatttttgacacaaattttacaacattcatcatcagaaattgttggtgtaaactattatattaattagattgcacatatccatacaaaatttatataataattattaaattaaaatgtaatatcgagcacctttttttagatattatacatttctaaaatataagtaatatttttagtccatttcaaaataaaagtaacatttttaagtctgcagtatcatgacaaagtataggattgatattgtcaagtgaaatgcttggatattaacaaaaaggaaacaatttggtcttgtaggaaatatttatggctggttcagaaacgacaagtagcacaatcgagtgggccctgactgaattactattgaacccacaagccatggctaaggccaaagtcgagctcaatcaagtgattgggccaaataggaaggtcgaagagagcgacattgaaaaccttccatacatccaagcaatcatcaaagaaacacttcgaatgcatccaccaatcccatttctggtcccacgaagagcagtaaacgacaccgttttcatgggccactttgtacccaaaaatacacaggtcttcgtcaacgcttgggcaattggaagagacccagatgtgtggaatgacccttcggttttcaagccagagagattcttggactctaaaattgactacagaggacaacactatgagctgatcccatttggagctggacggcgtatgtgtgccggggtcccactggctcatcgaatccttcacttggttttgggatcattgctacaccattttgagtggagacttgatgagagtaatggtgttacttgtgaatctatagatatgaatgacaggttaggaattacaactcgaaagtttgagccattgatagcaataccaaccaagtcttgctcatgatggtgatcattaatatcaataaataaaaaaattttaatccaactatagtcacagctagctacattattgataaagtaatataagtattactttgaatatttatgtcagtcttttctttaatgatcttgttgaggcttaaatctcatcgcgaaccaacataacaaattcagcaaaacaatattgtaatgatagtacctaaattaataatgaacaaagaattgaaaaatatattaatggacaaagttaaagagaacaggatacacagattagatcacaattcaagggactacctaaattacaattcaactcagctcacatgagagaagttactttagaaataaacaatctctttaacatccctctaagaactcactctaagaatcataaactaatattaatatatggtgatcctaacttattctctttctatctctgtatctcgaa

SEQ ID NO: 898 - DNA, 2045 bp, Cannabis sativa
caaattctatcgctgcctcctcgatcgatcactcaaaggaatttcaaccgtcatgcaggcatggctggtgaagttataacagctgaaaaagctgatgttgccaaaatcacgacaaagggatttttcaatttaaaggtctggtgcgatcttgccaaacccctgtgcccggggttcctctttccatgtgaaggccgtagaatctaacttcctttcaggtatgatcatctgccattcatgtgtttgtggctgtatacgtcaggaagctcgtgtttgtgtgtaacctatccgaatagttgaagatgagtcgagtaatcaaagacaagggtatggtacttggcttaaggtggacgataagaaagactcgctagacatttttgggaaaggtattttcggctctatctcgaacaacagatctgttgctcaaggccttttgaacaatagagcttcgaattccttgaccgagacaattagagcgtataatggaaaggtaaggattattttgtagtgagtttcagacttacccaacgatgtccaataaagataatggaaaaggcaaagatgcaatgtttgtggacaatattgatgttttaaaactagtggatgattctcaggtgggggagacaactcaagatggcaaggctggaacttttaacattcaagaacggctaattaacaacaaaagaaatggctcttagagggaagagttggatggggacatgaatgctgtattggaaacccagggttttactaatcatttattacaaaggacaacccaagaagttgtcaaaagggttcccaggtactatatgacgtgcctattaattatggaagtaatataattacaccaagtaagggggaggggatgacaaaaagaagaagggagtacttcatcaggggcggttaacccaaatccagaaactgagaagagtgggagtagtgaatcgaggagatttttgactttgactaatttgacccttgatactacatcgaaagtggcgaacccagattttttgggtcgtcgaacgccatgaatggcctattttggaatgtccaaagacttgggaacccttggacattaaaaactctcaaatcccatgtcaaggaatctcatcccaggatgattttcttgtcaaaaactcggttatcgagctttgacatggagtttattcgggttcagcttgcttacgatggttattcttctatggatgcaaaaggaaagagtggcgggttggctctcctttggtccgactcttttaaggttcaagttaagtctaatacggtgtcacatatagatgctttgttagaaaatgatttggtttcatgtggcaattcattggtttctctgggagcccagatctgggaggtcgaatggatagttggaaattgctcaaacggttacaaccaatgtttgatggtgcttgggtatgtggtggagactttaacgaaatcactagaagttctgaaaaaaaaaacaggtgtaaatgctaaatcagattacttaatgcacaatttttggatggcaattttggagtgttccttatgtgaaattcctatggtgggtggcaaatttagttggtgtaacgggagagtagccaacttgttgtttgagaagttggatagaggcttttgcaacccattttggcatggaaaatttcagataaatatggtaaaccttttgaactggtggaactctgatcatagaccattaccttttaaggcccaaatcaggaactctaaacagataggtaatagtccttggggctctcggtttcactatgaacatgcttgggcagataataaagaatgtcaagagattataaaggaagtgtggagaaacaaagattcgactaggcctttaaataatctgaaattccttctaaatggctacgaggaaaatctccaaatttgaaataaacaacaaaagcatgatctcaacatgagaaccaaagagctcaaggacaagattgggtggttagccaaatctacttgtcaggcggattggcttactatgcaaaaattggagcatgatctgaattgcgttgaag

SEQ ID NO: 899 - DNA, 3831 bp, Cannabis sativa
ataataaaatatttattaatcatgaagaaaaattaagagtttcgggttttgttcgattatccactgacacacatgcaatggaaaataataattctatggtggaacagccgaaagtgataaatgttttggatgtggagaaaaaagaaaaacgtgatgaaattcaatatgtaaatatataatattagaaactggcaatttcactgtaaataaagataatattatttgttcaggtacaaagctataatatattatggaggaagatcaagtttggcctactataaaccaaataatttcattcaatgtgttaacaacccgacgctttcgagcatctataagctcattccgtgcatacgtgtctcgtccaccaagaatattcatgatcatactttttaacctcaagatatgcttaatatatgtttgtattgttaaattcaagtcgcaataatgtgttctctcacaacaaaaaaaaatgcattaatgagcatgagtttatttgaacttcagcataactaactcatatgcttttattttaattatttactatacattttgaaattgtttatagatacatacatgaaaataaaaaacattttaaattaacatttgtttctttggtttcatagtgaaaatcatttcatccacaatggagaggaacttaatgaaggtgtgggtcgatttatcaatttgttattatacttgtgaacacatggtggtgtaattatgtaactttactacttcctattattgctcttatattagaagatataaaactattattggcaaaagaaaaaaatagcacattaattgaaagaatataatattataattattaatgtggtccgccatagtgaacagtagtagataatatgtggaacaataatatataattaagcatatattaattagctttctcttgtttaatgggcggtgatgtcacatattatctcacctttgatatgaagagatttcaagaatcttttgcatcttaaggcccataaaggatttgcataccctaacaaacatatctcccactttctctttcccttgacccctcaacctctaacccttgcaaacagtgggggcttaaaaaaataaaaaattggaatttatccttacaattattattgtttctgtgttctgtctgcgaaaatgtctcctttacatcgaagcaatgagctgtgcttccagatttcaccaaatccccaaaataagaatgaaatcttcacagaagatcagattcttggccatgcttcactggaagataatgctttccacgttgataattataaggatatcaatgtcactactacaagccgccgaagccctaaatctttgcctaatgatcataatagtaataatactattgtgaatcagagtagtagtactgaatgtaagagcaataagatgatgaagcatagagacattgaaagacaaagaaggcaagaaatgtctacccttcatgcttctctaagatccctacttccacttgaattaatcaaggtgaaacaatttatctactgtttaatttcatatacaaagaacaaaaaccattattgttattcttttttgtttttcaagatctttcctttcatatttttcttggtttatcaaaataggtacccccaaatattatgtgtttagggttataattataatatataaactggtgagatggatttcagggaaagcgttcaatttccgatcacataaacgagggtgcaaggtatataaaacaactccagttgaagatcaaagaacttgatgcaaagagagatcacttaaagaagtactattacttgtccgattcgagtagtactgagaggactaaccaccctgggcgacctgggagctcaagaaatagctctactcctcaggatcacttcttgacagtccaaccttgtggtgaatgtggagttgaaatagttatcagtgcttgtggatttcccctttcgaaggttttgcaattggttcttgaagaagggtttggcttggtcagttgtatttcaaccgaagttaatggcagaatgtttcacactatcaaatccgaggtaccaaccattagggtttctattgttatcttttggctctccaatataaaaatgttgctcaatttaaagctatatatatttatacttcatttaagaaactgtaatgcgtttgtttgtctgtttgtgtctccacagaacagtaacatagaatcagaatgcatgatcaatatttcagcgcttgaaaagaaattaaacgaagtgatcactgctgatgtccctccataatggtgatgatgcatgtatatgagtactttatatatatcttgaccatctaattataattaacataattaatttgtagtttgtttttgaaggtttgacacctaataaaatctaacattttggtctatatatcaatatagtactgatcctgagatagaatgactactaagacaacgttttttttgacatttttcatgatatgaaactgagtttttggtttttaccgttgactgtgatattacgaaaagaggaagtgcatagatattagatagtgcaaacaaattatatactatttcacatgtgctttcttgtcaaatatttgtacactatgtttagaaatattatgttcgattgaaaagtaaaaaggaaaggagactaattaataatgttaagttcggacaacttctataatgaaagggtcttgtatactatagttgatattttggtcggttgatacatatatagttgttggaaaatgctggttaaatagtttctgacacattacagaaggttgtcatgtttagatcatcacgaaaacgagatatttgatttgctatctaatttcattctgttaatatatatttgtaatttgttgcttctatactacatacatgcatatcccaattcctatgttatgagaacatggcgcatgtattaccttttttttattaacttggaaaactgacaatagtactgctacaggtggtgtacttgattgctttttatatataataagctgctcttctgcacagctgtttaatttgtccaatctacattagatataatttttctttattttttttaattaaaatctttattgatgtgtgcatgtaacatgctaatctttatatgatgcattgccaaggagaaggtgtagttgactacataatataatgtatcaaatgtttaaaaaaaatcaaatgcgtaaaaaactatattagattgatatatttatgatggatttaatacaagaaaaattataatttttttaatatccaatcctgttttataacatatataaacatttatccatatgttataaatatataatatgcacattttatttttttggtaagtattttactatatattttactatatgcacatttatcatatactatatatttttctctgtttggatctttcatatacataattaaaaattagaatttcagaagtcagatcgttttttctagtcaaaattcaaatatcgtttatttgttgaagtaaaatcttacaaaatttaacaaaatatgacaatattttaggcgaaacaaactagatttttttattttctttttcctaggaattataacttatataaaatcatttacttctatattgtaaaatctaagatccaatgtaggccattagtcgatatgtttcttgatgatatgaacatatatatatatgttttatgtatatatatatatatttatctaaaatttgtaatataatcttgtggtatgatcacaaatgtatatgctcgatttattctagtgggcctgtgtagtactgtgttgcagaaagaaacttcttagcgagagagagagagagagag

SEQ ID NO: 900 - DNA, 1068 bp, Cannabis sativa
accattatttcatgccacatgggagaactatgattgcatgttgcagcagtttcctaagtttcaccttgaggacaaggtgaaattttgggtagcaagcaatgatgaacatcgaattcaattctcctatgcatggacgaattgaggtaaatgtggggttggtcaaagtaataatttggaaaacttttggtaatattattactaatttacacaatgttatgatttattttgtttttacttttaatttatcttcttatttgttatgagaaaattatcatgaggtttaaaggggatgaaaccaaaagggttggcacatatcagatattttatgtaaaatcaagtcttcgctctgaagagaaaccaagtctctagtgagaaactccataaagtttctcccatttcatatgaacgaacttcttatttcttatatttgttacttgatattattgagatacacaactatagtgcatcacaaaggcataaattgggagcaaaaacaagcatcatgtcgactaacactcctagtcctaggagctttagttttggaccatcttcttgatgttttcaatgttgcaactttccaagtaacacccatcatcccactaattctataaacacccaatttatatttgataaaagcgggttggtgaaatttgaaaatattaaatattgatctcaaactttaaaaatagaaaccaaattaatgatccttgttattaagtgttaggcaatatattgctcttaagttaactaaaagttaacccagctaaaaaatttcagaaaaaaaaaaaaaaagatcaacctagttagaaagagcaatacctatttttgaagaattaaaagtatatttattgaaggcaaaatacataaattggattggtcctctctttccacactatgacccctataattttatcttttaaaatttttttcaattgcagaagtctcttggattataaaaattattacaaatttgttgaatcaccactaacgtcatgtaaatctagtcaagtccaatagtgcggccaaacaaaatatgaatgtataaatagtattctaatatatatatat

SEQ ID NO: 901 - DNA, 880 bp, Cannabis sativa
taaaatgaaattcagagagagagagagaaagacatagagttaatttcttttactaaaagaaagaactaaccctaacaacttgtttgcatgtatttgtttctttctatccaattgtacgtgggtaaacttctttatgatgtatatagctttcttattaattgtcttatacgtggacattcctctctatctctagataaaagtaacatattagaaataattttgtttgttttatatgtactaccccaggtgatctgattgtttatcccaatctaatttatgaaataatatattattatcgtatatcaaatttgagctagtagtgtccaaatcgttacaagtgaaaaataataatataataacatcattagcgcacaaacaatttttttatacatatattttatatacgcatatgcaaaatcaataattaactaagattatgttatattgtcaccttcaatggcctgtatcataagaaaaaaatggctttttaatgaattacactttgttgccacaatcaatggactcaagtggggcaaagacccccaatagatacaatgtgctaccccaccaattacattaattataatttaaaattaacagttcacacacgatcaaacaagactcattcattaataaatttatatatatatatatattatttttgctcgctctttcacattgttctttagtctttacctaaatacattatacatacatacatataatatatatatatatgcatataatatcatcccctccatgattacaagatgttatactaatggaatgggatcaatttacagagagaataaataggtctatatataaaattataaatatattcaaatttatgttccctgaataataataataataataa

SEQ ID NO: 902 - DNA, 997 bp, Cannabis sativa
agcaaatatagtaatacatatacacatatattactatacataagccaataatagcaaataaaatgagagtaatacataaaggagcaaagtatttgacctttataaccgcattttcgaagaagggctgtcacaatctgccgcgtggaatcatcagcctcaaccaaaagaactctaagcaccattctgggaagatagctctcccacctaactacctccttggatccgtctttttcttcttcttcttcattctgctctcgtttctcaacttcaacttccgccgccataagctcttcaatactctcagctacttcacccattttcaaacaccctgtaaacacaacccaaacccaaaattccagaaacccagttgagattaaaaaagaaaccacgagaaaatgcaaataaaaatactattaaaagaaaaatcaggtctactctacaactttaataaacttaaaaaaaactctacctcatcctcttcatataaaacccgggaaaaaaaaaaagaaaaaaaaaagtatctgaaaccaaattcgaaaacaaaactcaaaaagcagatttattctctattttagttaataaaaaaaaaaacaaagaaaattacaaaatgttaagctctgtatcacagccgcgaaacaaagttttgagaaagaaaaatatctggagaagacagaggtgtgggtgtgggccgtgattgggcaatggtttcttacagtacacgtggccaaatatgagccaccgtatttgattttttaagttttgtcacatggtgtggtggtgatgatcgaccaaggtggtgaaggggcccacttggtactacatatttcttaaaataaaggtacgtgtaatttttattaatttttatttgattctttgttttgatatttctcttgaggaactgccacgtacaccttgtgccaccacgaatttggatttcatggttgggagcatcacacgtggcagcttctttgagaagtttcttttctttttcactctt

SEQ ID NO: 903 - DNA, 2762 bp, Cannabis sativa
  modified_base (1297)..(1299): a, c, t, g, unknown or other
atatatatattgaattagatgacctacaccatcttcaaaatgaaaactttgagtaggcagtaaggtatatattgaatttgcattatttttcagtaggagaagataaaaactcctcttctatcttgggacaatgtgcttggaaagcaagcatgccaatgcatgcccaccttttttctttctttctttttcaattttaattttttttattttttctttggtggtgaaacgcgttggtaccataattttgttgctgtttacaccagcaaaaacatctaggcaaaaccttatcatgaatccacaaaagtttctcatttcaaacaaaatattaagtgaacatttactaccaatgtctatttcaaggcagacaaaataagaccccttgtaaccaaaaccagcaatttttatttatccatttcttattggaataatgaaattttcattccaaacactcatcatcatcatcatttttcattctctatgtaacatgatatctattgccaattgcctctcactctcaccaaacctatggtggccactctatctttatatgatgattatttggtaccacaatgtacaaaacaaaaaaaaaagttgattttagtttagtaatataaatcccaattgtatggtcaagttaattactacctaattaatgggttactgattttttttttttaaagggttggggaagctaccaagacataaatgaaattaaatgcttattcttacaatgaacacaacaatcaaacttgagtggaatcccagcaaaatcaaatatgcagctataaatttaattagttgtctgcccccactaccattttgttttctggtctcaacttttttttttggggtaataaattcttgcaagctggctccctgatcaaaaagcatggcatttgcagcctttaccaaactctaagtaatctaagtttggtatataaattatgccatgaaatgagttacctttattaactttaaatacaggagataaaaattaaaataatatacatatatatactttaggaataagataaaatcaactctaaacttgggttgggattaaattgcaattaaatagtgtacattgttttcaaagtaaattgtggggtttagaatgatggaatctattctttgagacccaaaccattttttttacatgggtgatggacatggttccactaagggaacttaacaatcaatcttaaattaatggatgtagtttttaatatatatatgatgagcatggcatggcagccctgtggaccaatattctaaaatggttttttttttaaaaaannnaaaaataataattaattaattaaattaaattttgatttcaatagctgcagagaggtagttgagagttttagtggggctttgtgaaaagaagagagaaaacataaagaatagtgtggtatgagtaaaggggtgggggtgtctatggaagtggcaagcaccattgcccagaaccctaaaaagagaacaaaaggcctttaggggcccatacccttgtgttgtcaaaatttaagtgccataaacctcaagaaagtgtactacttaggcttaatccaatgttgaggattattactaggtaggtagggtatcttcttttaacttttaaatattttaattcatatttagtaagaaaatacacttaaagaactacaactactcactagtactctcctaccatttaagctctttatacttaaatactctcttcaaaaacaaaaccaaaccattgtccttggagttggagttggagttggtataaagtttcttaattatccattaccacacaaagttttcatgtgattttaaagaaattgacaaaacataatagattatggagctttggcaactctttgcaattggcttttcttatcatgtgatcaaagtacatgtaaaagttttagattttaaccaatgaagaagatcaaatctttcttcactctcaaaatttcaagattagttttctatacctacaaactaacaacaattttgtcggcaaatgagtctttaatatgacttgtttgaccattgacatcacacacacacacacataaaatggggcccttttcaaatttaaaatcaatataatgagtacagttccaactatctatatatatgtttttttttcaactcgtacaataaatgtggtgcccaatattgaccactccttttggattaaaagttaaaccttctttcaccttggtcattgtccatagcactagccaaaggttatggtttgtcttagtgaagaaggtaaaatcaatggcatatatataagctaatcaaaatttagttcaatttatatctctatatatatatatatatcaagtctctatcatatatttaataaattaacttacttggtctagtacaaatagaggttgttattttgtccttttttttcaacacttgaatcttctattttctttctctcttggtggtgacaaaaggtggagatatggccttaagcactataaagcacaccaatataatttgtgggttctttgaaagacaaatatttcaaaagtctatttttgaaaaagagaagaaaaaaaatgttttggtctagcaaatgatcattgcatataaattaacaataggattatacaagaaaattgtcaaaagaattttccacattggaaattaatcatcatgaccatttatatgtttcctcaatgtcaattcatgatctacctatactccacttcatagtggtattggcatcactacatcaattttcttaaattatt

SEQ ID NO: 904 - DNA, 1820 bp, Cannabis sativa
actgttttattgtgttcttgagttcaaaattatcaggtcatatcatttggtatcaaagattcattcttggggattgccggtgattgagaatggaatcaagagtagatggatcggattcagcattaaaggttgttcaaagtcaactcaacaaccatggagttgaactaaaacatcatggagttgcgctgaagtcgatggaggcggtactggacagattgggaactgcccgaaacagaattgatgataaactcgccaacctcaaggagaaagggtcagatattttggtttcggtcattgtcttcaaggagaagggtctatggtgattggtcgaggtggttttaatagaagaaacatgggctttgtagagcggcgaacaaagtggcaaactcagtttcgagtcccgaaaatcgaattattggtgtacgcagaggatggccacgatgaaagggcttacaaggttgaatggcactacaatttgcaaatattgacacagacaaaaaaattaaaagttgcaattttgtctcgaaggagcagctctgagttggttccaccaggataatcagagatcccattcaatcatggaatgaaatgatatccttgttgtgtcgttgattccattcccaatccacgcacgaaggatcaatgtacgatcatggttgtgttcatcattgagtgaatgtcgtgcaagaatatcatcgaagatttgaggttgaagatattgctaatttcattcaatcgaggctctcggttgcaaataggcagcaaattttttcctcctcaaacatgctaagggacaacagagagttccaaaggcttgctgaacaaacatctgtggcttcaaagagtttgttcccgttacttttgacgtcggagaagaaggacacgctagtgacgtcgtctgaggtcttgttggagacaatgctgatgaataatcgtctgctagagatgttgctggagaaggagaattgggagggcttcattccagggctcttggtgttcttctactagtggaatcgccgcccgcggtgccaaagaggacagtcgctggaaacgacagcagaaaaagagcaaaagctgaggaggaatcgatgccaaaggaggagttgacaccagtggagaaagagttgttgatggtgctgtaggagaagaaacagtcgctggagtggattccattgtcgacgccaagttcgatactggtgctagagaagccgcacttaccaacgaccatggaagtcgtttatgggagcggtcgcgtgaagtcgacgattggggcaaagggatcactaatacacgatcatcaaatcttgcctttaagccctactacaaatgacccactctatttcgttgggctccaaattcatcccacctcaaaaatgatataaggtccactttattaagtgttggacaagatccagcccataactctcctttgatctgattcataaagtgacccaagtaattactcaaatgagagaaaagattaataatccacactgtgattcaaggtataaagtcacattaacacacattactaaggcccataacagcaaaagtcttaattttattaatcaaatttatgggtcagccctttgagaccaaagtaagggccaacatgcttttcaagcttatcaattgcaatatcagattccctcttcatcacttggtcacaaggaggggtttccttcttcgatagcttttctcaccagcaacgtccaccatggatgcaatgaccaaggatcgagagtcttcttcctagtgccacaagcaaaggtggcagccaccatggtactcatcaacgaggagcagcaactccgattcgt

SEQ ID NO: 905 - DNA, 1735 bp, Cannabis sativa
gaacaaaaagaaacgaaaagggtgtattaacaaagaaaatagttaagtacaattcagaaacaaagaatcaaatggtttaccaaataagctcttaaattttccaggaacaagatgataagtaaaaccaagcttagtaaaagtaaagttgatgttcaaatcctaccctcaggacaaccaaatttctgacttcaaagactgaggtcgtaacgacagtgtttccacctccgtcaatttgaatttgagagttccacatgagtaacatcttgacagcaactctaaatgcaccaaaaacctatgtttatataaaagagatgtttagatcaaggcaaaaagttacacaaaactcattagtattgaagagtaaaatcttaacatataacagaacttcattttattacttaattacttggaattatatgaaaatacggccttagtttctctttgagatccaatcaaattctgttacacttattaagtcttcttaaaagaaaatagtcatagtaaataaacattaaaattgagttgctataatttcctggtcctcaactgtatggttatgcatggaggaaggctagtttttttattttagataaaacaaacaactgatgtttctttttcaacagttttgggcaaatttattcagtttaaagtaggcaaaagtctcattttcgtgatttatttagctacttcgatatcttctttttttcttttttgtgggatttatgcctttttgattagatcaatgagactcaaaagctattgaaaattaggatttcttcgaaactcttcctttcagttttcctcttatattcatataaatggactctacagaaacacaggaaggacaacagcaacttgccttgatggtggaatcactcatcaaaagttcttctgcaacaagctcaaattctgaaattgggaatttcgacaatccaaaaatgatactgcctccgcgatataacccaatttggcctctcaccttcataatcaaagagtaaatacgcaaaccataaattatgttcatagattaagaatgcatatcataaagtacatttgagtatgaggtatatactattgagtagcaaagtacaaaggagactaattcaaaaaaaaaaaaaaaagaataataatataaacaactttcacccatcttccacccactctaactcaaaagccataaaagaagagagaaaataaaaatctaaattataaaaaggaggactgggaaaaacttgaagtagacaaatcaaaataaataccaaaaaaaatagcaacaataataatatataagcttcatctttcattcactctctgcacttacgagaatataaacacacgcagaactaatctcattcaagctccctaaagactagagcaaatgaaacaagagatgattccaaagccaattatgcatgcatcccagaaatactatgtgacccgtttgtttgttcgttttacaacacaaacacgaaatttaatcatgtcataaaataaactaatgaatttttctaaatttggcaacctgaactctggtccatagcagtggaaccaacactttagcattattctccacaaaaacatgtgaccataatggtctggttggaaaatcgagcagaggggtttcagtttctgttgtgatattgtcattaccaactctgaggctaagtaaatcagcattaaagtaggttccagctgctccagcattccctgggcaaccaatactcaaaccacctgg

SEQ ID NO: 906 - DNA, 4409 bp, Cannabis sativa
aggaaattatttgactttgtttctacacggtaagcggataattcgttggtcggggaaggtacatttggaatgtcctcccggagctactacaaccaaaattgggttcaattttgaatcttttgaggtcatagaaattgttattcttgttagctttatcaatacaggttctctttgtcagtttctagctcgttttttttttctttgtttatttgttcttattattatgccccttattactgttatgtaccaaacatttgtgagaaattgtatgcaaacttactatctccaatgcctaaatcaaaattaaattggaattcttttttgtttctttggctaccaaatctactcttttctttcttttttttttctctttataattgattcaattcaatgtacaattaaaatacaaatattctagcgtttaatttattattggctaataaggatacttaaaattgagtattgctattagttagaaagttgatgtcagtatttaattgcactaactgtaatagcaatagaatacttaattatggtgctaatttatcattagacataaatttgaatgcgacaaacacttattttccattaaatgtgatgttaagcaattggcgtatgaatttgttaatctaaatctttgatttctatacaaaacagttgttaataacaaactagaatggacagtgcgtgtgaatgaataactatgctaaattaagatgtcactttcatttatttgaaactcttaattattatatcattttaaaggggtaatgatatttgcgcacacaaataatacaaaattaatattatattcatgtatgtagcaagtaatttcatgcaatcatttttatataagatagattctactattaaaaatgatttgggtagatgtgtaatttatgtgtgcacaatttttttttaaaaaaaaaatttaaggaaaatgtagacttgttgtgggtcatcgatttttttttttaatgtttttgattaaataataataaaaaatttaataaaaaaatataaagagctctatctattctttgttataaaagtcgttgtttttatggttgtaactcactttttaaggcatcctccctattttagctaaaaatatatatttaggaaacatggttagaaatgttttaagatttttattttcttcaataatattcctaatgataagaataatcatttatcacccatattttgttttcttctctgttcactaatgactagtatacctacaataaaaaacagaaaatgactatttaactcttgacatctaaaataatatagtatttatttttaatggattagtcttaatacccataagaataaagtggtaatttttccggactaaaatagacacataataaaactcgtgacaaactaggttgtaagattgatgacaaccaagtaaacaaagagtcaaaatttgttggaaaatttaagcaaaaataacaaataaaaaaattgttggaaaagctaataatctatttcaaaaatgtatttagtcattaatgctaaaccatacatctttgaaattgtttcatctaacaaacctcacaaaatcaatccctttgaatgtgaaggaacgtgtgcaagtataatacatcaattttttttggtagcaaattctaaagaaccaaaaaagaaaaagaaaaaaagaccatattactttatcattacattctttcttatgtgtttgttttaagcaaaatagttaaacaatgatatgtaaatgagttgccattatacactatattataaatcagtctgtatcagcagtaaaatcaggttccggaggcttctgtagcttgaccaattcccgagcagtctttgcgtttcgattcctatgaactcctcgaagagcgttcgcagcgaatctcgaagctaaaatggtcgcgccaagactatatgtgccagcattggcaatggccctggctcctgcttcttcttcctcctctttccgtcgaatcagctccatggcttttctcttggagtatctacgccaagccgcttggatgaagcaagcagcccatgtcctccattgttgtgagtagaaacggaaggtgtgttgaacctgcctactatggaggcgtcgaaactgactagctacgaattttagctcctcggccatgagagcaaaagcctcgacttctgtcaatgctttcactgtccgagttgaagatgggagattaacaccggattttggatccagtgcccaggttagaagctcctcgccacagaaatcgccttcttttagtaaactgcggttgaaaaaaccactcctaccgccatctgtagttacactctcgagccgtcctcgtataatgaaaagcatttcatcaactggatctccttcccgaacaatgtaagtactctcagtgaataaagtcggttgcaatcgctcacaaatggcgtcaagaagtctctcatccatgttctcaaagagaggaacctataaataataataacacattaccataataagaggttagatgatataaagcacaaggcaaaagtagtacgaaatacttcgaaaaatcgtacccttctcactaaggcgagacagaggtgtcgcttgatatctctcctaagatccttaggtagactttgaacaaggctttcctcatcaacccctcgcgtttccaaccatttgtattgatcgtaacgcctaactcgctccctgagttcttgaggaagcaagcgatgatgcatccattgttctgaatcacgccttttcaccctcatttcctcgagccttatggtaagggattgcagatatgtctgtcatgataaaaacatccagaatgtcagcatccgttgatgaagtttgctttggctttactaaatttatcaaagtggtaaaagggacaatgttattataactgaaataagaaaataaataatgtaaggcaaagttcgtgttcaggttgtgtcgggtattataagaattgacgaggacgaacatggctaaatcacggggccacaaccttgaaaaatacatacaaaactgagttgcaggagtttccatctaaatgaagtgttaaaactaccaacaatgaaaaaggctccgtcgttactcgtacagttcccgaacaacaaaataactaattagctctaaaatacctgcatgttgccaataagaagcgcaaagaggatgagcccgaaaatagctagtgcaatggaaaatatcacctctccagggtatgtgctggtctgaagtccctgaccaagagtactataatcataggaaaaacaaagtcatcgaaaatttagcaaaggatcgaatctaattaatgataatgcgtaaaacagtacgtatgatgcacttttccaactttatagagactaactctctctctttacaaggtctaatacgttcaatgtaatttattcctttttttcgtattagtataactatgaaaacacaagtatagccacataaacatgctaaacaaaccaccattagagaaggattacctcaaattctgtagtccccaccataaacagtaacagtatttagagataaacttcttggatgaaacaataccagatgataaagcattttcatatattccgaaatcgaaactgtctcccttcgttgagcaataattattcatggtatcattttgattctttccaccgaaccaatcttcataacctgacaagttttgattgccgcaatataagaaatttgtattacagttactctgcgtcttgcagctcctctgccagcacgtgtcattgcgttctaaagctagaaaataccaaaacgccccaactatctgcaagatttgttcaaaacattccatcaaatgggattggataaaaatgacatgaataaattaagatcactccaaaaactgtaattttttataatttatttctctttcaactcctctccttattggaaataggtttcggtgatgtattttcaatgataggataaagaagccattgagagttctctaagaggaaaaaccccaaagtatggaaaagctaagctttcattcttgcacttagcatttacattgcggttgacacgaatgcaacaactatatatatcatagttataccgacttgtttcgtatcaattcttttacaataaaaataaaagaataatatgaaaattcagagcgaaacaaatgctacaaaactaaataggtactcacatgactggcgagcatgtacaatagcagatagtatgcagcacctgcccaagcagtttcagcaaatacaccggctgttctcttcagttccgaagttaacggtaacactcgaagcaatcttggaacatactggagtaacacaatgaaaaacaatgcttgtttcgtgggaagaacatctgcaccgtccgtgtgctgaagatatctcaaaaccacaatctgcagagagtaaaaaca

SEQ ID NO: 907 - DNA, 1323 bp, Cannabis sativa
tccctgataaccaaaccccgaagggcattaactgcccgagcttgacccaagccccggcagttccatgaaaggagcttcatgaggatttggggggcatgataaggcccgcctcctcggccgtctgaaaatcctcattccttattacactataatgagtcaccctccctttctgcacattcgcatctgaaataagggaagtcgtatccgagaactccaccactacctcaccagtaacttgatcagacttatgcaagagagaattaacagttgacacccccaccgagacttcgacaagcccatcatcttgttccaaggccagtaagctctccgacttgcccggagttttcttggtcttcctttggcgtttgatctcttggaatttaaggctctcatcactctgcctccccgaaacctccacgcctttgtctcccgtctcatcaaggttggggcaaccattctccctccgattcttcgaaaccacaatcgagcttccttccgcaaatgcatccacaacacccgctggctcaatcaccgcgtcaatagaggacgttttggagttatcacctaagaaggagaggccttcctcacgaagcgaagtcttcttacgttttgttccagcatgctcgattaatttttccacattaaccccaaaaaccggggctttaggaataccacggggacccgtcatcttgagagggccaagcttagtattattacgggaaagcttgggcccattcaaccgcctgcgcttatccactttcatcctatcctgagccaaaggatccacaatctgggccttaaaatccatcgcctgggccttagaggacggcccattaccaaataacccaactaagttatcttccaaggaggccgaaagggccgaaggcctaacaccagtcgaaggcccactttcatgttgaatgctaaaggaattgtcacccccatgaataaccttcgacgggactacaggggggtcgtcggagcccaccgcgggagtatcctcactttccatttgaatacgctcttggagatcctccgctttcagaagatccaacccattctccaagcgagagcctgctttaagccacgggccaaacagaggcacactcctaccatcatccaagatcatcatgcgttttttagccgaacaaacatcctctgcgtgaccaataatgccacatttaaagcagaacagggggagccattcatatttcaagtaacaccaaaccttctttccctcttcatcttcaagacccacccccgcgaggagaggcttagccaaatccaaactaacccgaaacctcagaaagttacttcgtataa

SEQ ID NO: 908 - DNA, 1611 bp, Cannabis sativa
ggggcaaaaatcctaattaaccttcttataatatctttaaaatatatttactaaattaaaaactttaccttttttaatttttttaataaattttattttaaattactatgtacacataaataataaaaataaaaatataaaatataaaacaattaataaaatatatttagtccataaatactaaagagtattcctaatagaaaagctaaaacaggtttgctaaaatttgaaagaattgtataaatgatgaattttagcttgacttttgtaatgccatgaaggatatcaaaccaacattggataagacaaatgcaacccttctttacgcttttccttgtcacgtacgtagaagaatgagtagaatatatgaatatagtttttttctatttatttagtcattatttcattaaaggttttaaatttgaaaaggccataagtgaccgttagattttgtccttactagtttcttttttatgtgataatagataggataaacaaacttggatcagctgtatatttagaacacacacaaagttatgggtcctatacctatctctcacattgccaaccaatcatatgcattgatctcaatttgcacacatatttttattaattaatacttaatacccatacattattttcagttttgtgatttttaagacataatatataatgtatatgattgtggacagtattttcatatataatttgaaagtcaagttcatagaccaatattttagtaatatacacatttgcacggcataatgtagggattattttgtttgttatcttatggttccaattacttaatcataatgtggcgtttgcttggaatctctcgttaagtctttctgtttatgttattagacactttttctaagatatatatagctactttttttcattaactttaatttttgttattattacaagtttatcatctaaattttcagcatggatcattaatttatgttgttcatgaattattatataagctctcttaatagggaaataagtggtacaaaaataaacttataggtcactatttatttatagggttttggtcactataatttgaagtccaacactcacatcactctctatgattgttatcaacccataaataagtattttatgggttacagaccttgggaataaagcaggacttaaaattcattaagtgccaaaacgttttgcaatgttttttaaaaattgcacacttctccagcacacacataaataaagttttggaactctttttcgacttatcttaactttcatgttttcttattcattttatatgattcaaataagattagtaacctcttacatctatataatgataactttaatactcatattaatttgtatatattatacttaattacaaagttatgataaaagagttacaaatttgttaccaactcctacttttatgttatttaaacatattaaactatataatatgtaatttaatcaccatacatcaatatatattaacacacattaatatataagaatattagcagctaaaatacttgagctataaattttttaacacttaaccataaaaattgaaattttgatgacaaaacttactgaacccccatt

SEQ ID NO: 909 - DNA, 741 bp, Cannabis sativa
ttcgcaggccatctaacaccccgaagtgatgtttacagctacggagttgttcttctcgagcttttaacaggaaggaaatcgctagacaagttgcgtccagctcgggaacaaaacttaacagattgggctattcctttgcttaaagagaagaaaaaagtgcttaacatcatagacccgaggctagaagattacccgacgaaaggagttcacaaggcagccatgttggcttaccattgcttgaacaaaaacccgaaagcgaggcccctaatgagagatgttgtagactcattggagcctctacagaacactaatgaaatttatgatgacaaaggtaccataactgtcataactgctcctcaagtttatgaagttaaagtgaaagaagatacaaaagtgtagtaatttgtttattacatgactatactcatcattttgtttcttaataagtttcttctttcacttttgtaatttttgaagtagatataaaggttttcttgtgtgtatcttaagagaattttttgggggttttttgagtaaaaaaaaaaaacagggctttttgtgaaaattacaggttgtaaagatcattataagagcatatgttttcctttgtagattatgatgaaaagtgttattttcaaactaggcacatactaatttgagaattttctttttagctatgaaatgttcattgaaatattcaaaggttacaatgagagcattgctacatattattgagaggca

SEQ ID NO: 910 - DNA, 3453 bp, Cannabis sativa
aaaaaaacaaaacaaacaaataaaaggttgttccgtaagcttactttactgagtatagatttgcagcaatgttatcagctgctttgtcccgtatccatgtcttgccaccattggtggttctcaatagtaccccacttcccccagctgcccaagcttcctcctgttaattttatataaataataatcattccttgaatattccaggacaggacataattattatgtttcataagtcaaagtcatcatcccagccccaggtgagtttgtgattaaaattctatacctgtgaacggtagccaacatccaaaatgccaaaaccacggctttgcacaggtacttcttcaaactcctccgataactgcacagttgagtattttctttttcagcaatggaaaaaaggagcctatattttcctctttaagtattcatcttgaaatctatgaaccttgaaaaatagatatctttgcttttgttttacttacccctgtacctttgctgagaaatagtcctcctccacgaacaagaagccaaagaccaccatcagctctccaacccatgttttggattcttcttgcaattgatctgttatgtggctgccagtatggctgaaaatagtaatgcaataaggttacaaatcacggccttggacttatgcaaccaaatataattactagaagatgatgcttcagttgatttccaaatcacccaagttcactaaattataagcttgatgttcataatgtaaaagagtgtttactgtatgtattaatagataattaaagaacgtgacagtatagtatgaaggagtatcatcaagaagaaaaatctcacctgcccaggttcccaagtcaagtaaaagttaccacggcttgatacagcaacgtactttccctctggtgagcggttaacagtgttaaaagttcctgtgtaataacttgccccactaatgccactagaaactgttctgcaagtgaaataaggcgaaaatgagtatcttgtcttctgtagcaaacaatctttagctgaagtctaagtggaattttgactctgagactgagatagcttttctaattaaacggttcaattatttcctttaagttaaccaacccaattgacagcttatggaaccacctagagagaggaacatattagcacaaacacacctatttaaagtagcagaaactgtttcctgaacggcagccttccaattatagcccttattcgatgtaacatatattgcaccttgatcagtcaccatctctgcactcttttcaccagttgcctttatgtacacctggaatgaacaaaacccattaccaactttgcaaaagtatacgatttttgtttttcgcttaaaaaacaacaatcaaacacttgaaccactagctccattcagttggaaatacaacctaacccatgtcatatatccatacaatcataaaggcaagaatttcaatcatgcaggattaccatatctccaggtaactgggcgctaagtggtattctttcccaagtgtctccagcatcagaagtatgcaacagtattgcaggcttcccaacaatccatccctctttccctttaaagctaatagcattaaacctataattgaaatcttcatcttcagctgaggcaattgagcgtggagcccaagtgtttcccccatctttcgtctccaaaagtgtttgcctagtccccaaaagaaaacctaagtaccatcataacaaacaagaacaattaaacttaagcatttcaactcgaccagttctagctatctagtagaagcatatacagcttgaattgatccaaatttcttaaaggaaactaattgagctatacatgttgtagatgaatctgaacaccacttagactcaacaagttggttaacaatataatttaattcagtgaaataaaaacgatcatgaagcaacagtatagcccagaaacgataatgcagaacagaaaacgtgaagaacacaaaacaattatgctggttcacatcaaattgatgctactctagttcacctcatcatctcaagcaatccactatgaaataattaacaatacaattgtggtgatgtgatcaagttactttccacctaagcagccaactcatcactcggataaaaagacagttaagttagttgtcctaactgtcattctccctcaatatcagtttttaccaaagcctatataaaggcttgtgataactaatgtaaagactactcccaaaacagaaaacagagagaaagagagagagagagagagagagcattagagggtcgagtgtgtgtttttgagctccaagaactaagtttgttgattgtaaagttcttggacgaactttgtactgtttgattgagattgaataaagattatcaaagcctgtgtggctatgaaactgtgactaaatcggggttgcacagcctttgggggaaccacttaaaaatctggtgttcattttttcagtttattagtttttgaatctctggtttgagttgtttatgttaattgctgtgttttttgaatcttgatgtttggtgatggtttttcaccacaacaatcaatcaatcacttcccaaaccgaagtccgtttttacaaacctcccaacccaaaatctttctcaaacaaatgagttaaattctgtctctctaacccacaatcacattttgtctctcttattcaaccccaactctctaaactcaattagctacttaaaacccatagctaacaaagaaatgagttaattagttataactaaacaactaatcataactaactaatcagatttggagaattaatcttccacgatacatattcctgtacatttcggaaattaaagttttcctgtactttcccagaagccaaacaacaataagaaacaaagtaaaagtttagggagaaggagaactgaccgtggttgggttcatcgggcacaaaagagatatcgagaagaacaacgccagggtcaatgggaaggaaaactctttcccattcggaaagcgattcttcagacttagccggttgtacagatcccagaaatggcaccgccaaagacagagaaacggcagctgtttcggcaatgaattgtctacgacagagggaagaagaagaagaagaagaggaagctttaggaggaatgaagcgagaaggagattgagaagaagaagatggaaaatggggtggagaaagggagaagagggaagttaaggaaggtttggaagagtgagtgagttggagagtagccattgaaggttaggttagatacttgttctacttcaatggtggtgttgtatatttgtttctgtgtcttatctttcttctttttctcttatccaaacataactgttctcttatgttatgttactcctaacgacttcgcgggtgattttgaagattccctttaagattcttttatatattttgtagttaatttatttaaattaattatata

SEQ ID NO: 911 - DNA, 4013 bp, Cannabis sativa
tgatggagacagtggttcactttgtttaactgaaagaggggatattagctgtgtacgtcgacatcctaattttcgtttgtttgcttgtatgaatcctgcaactgatgctgggaagagggatcttccattctctttacggagcagatttactgaatattttgttgatgacgtctcagatgatgaagatctcactctctttgtcaataaatttttgggtgacagcgtatcaaatccagaattggtgaaaaatattgtgtctttttataaggaagcaaaagtagacgctgaagaaagactgcaggatggagctaatcaaaagccacaatatagtttaaggtcattgtaccgtgctctagaatatacaaggaaggccaaaaaaacttttgggtttcagaaagctttgtacgatggattttgtatgtttttccagactttgttggatagacctagtgccatgctgatggataagaagatattgtctaaattgatggcaggaaaaaagattccacatgtaccttttgatgattatttggtatctaaagttgataaagctgatagctttacagagaattatatcttaactaagagtgtcagggaaaatctaagtattgtggcccgtgctattttggtaaaaagatatcctgtactcctgcagggacccacatctagtgggaaaactagccttgttcggtatcttgcagctataactggtcacgagtttgttcgaattaataatcatgaacacactgatttgcaggagtatctaggtacttatataactgatgctggggggaaacttgtatttcatgaaggtgtattggttagggctgtaagaaatggttgttggattgttctggatgagctaaacttggctccatctgatgtgcttgaggcattgaatcgattgttagatgacaacagagaactttttgtgcctgaattgcaagaaactattagagcacatccagattttatgctttttgctactcagaatccacctactgtctatggtggccgaaaaatgctttcccgagcatttaggaatcgttttgtggagatccatgtggatgaaattccagaaaatgagttaagcaccataataacaggaaggtgtaagattccagaaagttatgctaagaaaatggttgatgtcatgaaggagttgcaattgaataggcagagaagcaaggtgtttgctggaaaacatggttacataactccacgtgacttgtttcgctgggctgatcgttttagaataggtcagggttgttcttatgatgatctggcaagagatggctattatcttttggcagagaggctacgtgaagaaggagagaaatctgttatccgtgaagttttggagaaacatctacgtgttaaactagttgaaatcgacttgtataaggtactctattggttgttattatctcccttggctttcattgcagctatcattgccctaatcacactgccaaaaagtcaaaaagtaaagaaaggagcttaagatttcttgcctttgtaatttcgtctgctgaataataataagttttgaattatagaataactctttagtttctcctctccatgactgagaattctttttgacctttcatttaatagtagaacttgagttacattgagtgcgacactggaatgctgttgactttttgttgagtttgttttgagtgtgtatcttttttcttattctatgttgaagtttgttatggagttaataacaaaataaaacttgctgtttttgtatattttcactaaagactgataataaatgcattggagtaagatgttggatcacaaataacttgtataaaatttccaattcaggttcctggtgtttctaatggagttggagtcgtgaacaatgttcaatggtatgggtttaataattattgcttcagaaataatcttttattctggttgctatttgtttttctaatttgttcttcaccattctgatcctattcaatccagtgttagttggagtaaaagtatggagagactgtactttcttgtggagcgttgctacaaaatgaaggagcctgtacttctcattggcgaaactgggggagggaagactactgtctgtcaattgctgagtaatcgtttgggattaaaattgcatatattgaactgccatcagtatacagaaacctctgattttcttggggttggttttgttgtattttcaatttttttttctttctgttattatctgttatttggaattttaatttatacactttttcaggggttttaccctattcgagagagatcaaaattgatgtctgaatataagaagatagttgaagaattggtcatacctgatgcttttagctgttgcgaccaagttcctgtatgttattttttccttcttcccattctcttgaacaatttcttctttcattatatattactcaaatgatttattcttttgtctcttttttgcaatagattatttcttcagacataagtgaggcctctgcaactttgtccctgctgcaagcgacgatagaaaagtacaaacaaggttcaatttcatgtcccagtgtcactgatcaacatatgatggagactctggaagtaatgttgatggaactctctgagctgcatcagaagtggcaaacaattttcatgtggcaagatgggcctcttgttcatgcaatgaaagggggtgatctatttctagtagatgagatttgtttggctgatgatagtgtacttgaaagattaaatagtgtcttggagccagaaagaacattggtgagttttttttatattctatatctggtatatgttacaaaactggaatttatttattcaaacaattaaagggacttatcaaattagtggcacacactcagttactctcttatgcattttttagttttgtgtaacaattttgtatttgctgacatgtaatactttcatatgtttgtgaactgttagcattctctctgaatttttatcattttactgctatttgcagtctttggcagaaaaagggggatcagatctggagaagattgttgctgatgataaattcttactacttgcaactatgaatcctggtggtgattttggcaagaaggaactgtctccagctcttcgtaatcgttttactgagatatgggttccacctgtttatgacataaatgagcttagaactattgctttgcaaaggtatgcgatactaggttatttttctgagatgttgaggttgcttgttgcttttttattttttcaaatgaatattattttttgtttttaatatcggtttgatcttgtagggtgttaccgaatttctcatgcattgtggatcccatgttgatcttttgggaagtatgttttcttctgaatcttcatttatgcttctttgtttttgaatttcacagaagttttatcgaccagctaattagactttgttgatttatgtctacattggttttgcttatttattcttattattactatttttttagtcttagatgaagtgataatctgtgttttttttcccttctaagttttctcatgaacatgatatgtgcaaaatcatcacttgtactgtgcatttatacacaagttttaattgtagagatctcattttctttttcttaaattgatttgtgatttttatcaatattgcacatatttgtttgacaagtaattttggtctaaaagcttatgcaagtagaatgtagttaatataatatatttctttttgctttcaactgtttagagaagtaattttttgatgacgtctatttctccaaggtgccataattttactgctattttctgttttcttatatttgtcttacttgtattaatgaatgtcataaaaagtcaattgaagaccatctttgggagagtattaaattatcagtggctgttttgatcttttgaaccaagtatttcattgtgaattttttgattttcttagaagctagatcttgttgtgggtgtaatcttggatgataatattttcagtttattat

SEQ ID NO: 912 - DNA, 1799 bp, Cannabis sativa
caaattttgctaagataacatattttttttctattcttttttggtttataaggacatgtttataatctatgagccaagaaaatcatatcacttcatttggcttcaaatctaaataactgaatttaaccacataaaatctcaaaatatgtctgttaaaccaaaagagctaagtaattataagtttccctttatttatgtatgtgtgaatctgtatgtatagtgacaaagcatcctacctaaatggtcaagttcaacctagacgttaaggaaaggtgtggttagaagtaatgaatacagaggaataggaatagaattaattttaatagtaataaaaaaatgattctttctttctttcaatattgatcggaattgtctttcctgaaatagtcattctaccaaaatgaatagtagaaaagtcattcagttggaaagacattttcattaaaaccaaataaaggaaaagaacaaaaatgaactcatctccaatccattacccccaaccaaacacatcctaagttcacatcactactactaccatgtcaagatagagcaaagtattcaaggtgagagagacaactaaattaatagtgaagttctaccaagaagtcacctgtaaactgattgtgcacatcacacaagttgcgccattcaagttactggaaaataatttaatcacaacatgtgattatataacatactctcacaagctgtcatttaccattcagaaacttctccaaacaatttatagttcagctaaactcagaacaactactacaacagatgaaattaaaggtattcttactcagggtaatatctttcaatatcaactataagattcaatcgtacacacgtggcaatatattatgcacaaacatgaccttgcatgacattcacatgactacaagcatccactttcagcaagcgcagagcagagtctttgaccagtatgttatacttcatattcatttgactaagctagtcaaacttcaacaatcaatactctacacaggcatctaaaatttgcagcatattaggaagagcatacctgcacttaactaagctagccaaatgacacaatttcaataaggaatactaatattccgtaaaggagaattatcttaaaatgttcattttaggagcactctccataaggaaagaacaaccatgcattcaatgcgtagtcctaaagtagcatcaaaagcgtgtccattctataaagattttgctccaaacataacctttagcaatcttaaaactcaaaatcagtgaaaagacatcttggagagaaaaacaatttgtaaacaatgagtacgtacttgtgaactctgctggaagctgcctggagaccaaggatgtaagccactctacaacttctcttctggctcgccacttggtgctggcattgacggaccctttggacccataagcctctacaaactcgtccgagacaacatacatcatgtgccttatactcctctcagtccctataacagcgagaatcaaatcccctgactccgccttcatgtaataatgaacaacacgattaccacgctcatggcatagaatgtgctcttcccacgccacgaaactgtgaccgttctcaggcatagtgatgttaacgaaacccagataattcgaggtcttcctttatatcatatcagcagcaaatttccaatccaagcgatagactattttgatactttgagctaactcagatgacaatgaaaccctaaaaacactctcattaatgttcaaacccatttagggaaaaaaagccccaagtatttaggacacgcttc

SEQ ID NO: 913 - DNA, 2173 bp, Cannabis sativa
gggacctcaagggcatcacgaaccatactaggaaaaaaccaagactcaagagcctcccgattccactcaccacttcccgggatgagtaaggagctaactcgcacccctttttcacagattcttggattgaaggaagctacatatctctcccacccatagccaggcagccacggagaatgccatatatccaccaaatcaccgttaccaatagcaaaacaggactcatcccggatgaaatctctagtggccataatacttctggctccatacgaccataggttagagttgggggcgctccaaaaggagcaggatcttctgaaatacttgtccttgaaaaattgacaccataaggtgttactctcaacagccagattccacccaagcttagctacaagagcaaaattaaggtcctcaaacttcttaaaaccaaggccaccccaccgtttagggacacagatcgaatcccagtttgtcaaagctaagaatctattggagtcatcagatcccttccaccaaaaacggcgaaccaatttatccaaggcaacacagatggacttagggatcaagaaagttgacatggtgtaaatgggaacgctcatatccacagattggatcaaggtagagcggcctgctaaagaaaggagtctagatttccacccttcaatgcgccgcgccatcttatcaactaggaatccaaaatttctaactttgctccccgacagcagaatcggattcccgagaaacttatcctcacggttaagatctcgataccccatcagacccttgatttcacctctaatccccatattaacattatctgagaaaacaacggccgacttgtgggaattcacacactgacccgaattcctacaatacatttccaagcatcgcttgacttccaaaacgttctccttattggcttcgcaaaaaatgaaggtatcatcagcatacataaggtgggaaataggcaaaccattcctcgcatgagagaaccccttaattaaaccaagccgttcagagttaagcaggagccgggaaaggacttcactaccgatgataaaaaggtagggggagagaggatccccctgtctcagccccctttcaggatagaattgcttaagaggtccaccatttaagagaaccgagaaggccaccgaagacacacacttggcaatcaaccgcctaaaatcgactccaaacccaaaggaatccaaagacttgtcaaggaatccccattccatccgatcatacgcctttgacatgtctagctttagaccaacgaatcccctacggcctttcatcttcttaaaagaatccatgatctcatgagcaatgataccattctccgcaatccaccgtcccgggacaaaagcagattgggaaggagagataataccaggcaagagcttcttaatacgattggccaggagtttcgaaataatcttgtaggagaaattacacaaactaattggcctataatcatcaaaacactgggcattacctctttttgggatgagaacgatgaaggtttgattaagcgatttaacaaactcccccgtctggaaaaattgggtgaccgatccaatgacatcatcgcgcacaatatcccaatgagctctgtagaaccgacccggcatcccatccggaccaggagccttcaattgtcccatggaccaaaccaccgccctaatctcctcagccgaaggaatcctcatgagctcaacattatcctctggagacaccacccgcggaatatgctcaaagaccgcattctccaaaccagaattactagatgagaacacatccataaacttggttcgaaaatactgacccacattagcccgacctgtcacccaatccgacccattatcagagacagctccaacaaagttacgttttcggcgaatgaccgtggaagcatgaaagaacctggtattccgatccccatcctttaaccacaactcccgggatttttgtctccagatctcctgatcccgcttatgaatttcttccatttcaagaagaatatcagcttctattttcaaagtatccgaagacgggggtcgaccctgaacctaaatcaacaacttttccaacagagcaagcttgtccttacaaaacccgaacacttccttgttctacttcgcgagcttcctcctagattccgcaaggc

SEQ ID NO: 914 - DNA, 2767 bp, Cannabis sativa
attattattatccttggaatatttattgttgacttgatcaacattgtaaacatagaatttggcaacaaaccaaaacaagatgagattaataaaagccaagaaagccaagaatccatagtaataatccaaatgagagacatttaagttatccaaaatccaccctttttggtcattatttcttttagtgaaattagaaaccattgtaagaacaatactactaagaaaatttccaactcctttgcttgttgtaaagaaagaagctcccaaacttttcatgccctccggtgcttgatcatagaaaaattcttgctttgaaacttctaagaaagcatcggccaatcccatcaaaccgaattgaggaagaagaataaaaaccgaaagaggaactatctctttctttccaaccacaccatgctctcttgcaacacttagtctcttcctttcggctaagcaagctgtgattgtgatcacaacatggagaacaagccctacaccaaatctttgaagcatggttatccctctagggtttttcgtgtatcttcgggcgattgggacaaagcaacggtcgtagaggacaatgcttgtgagcatgaagattgttgtgaagaccgcgagacatgctggtgggatgttgaagccatgatgccctatttttctgtctagggttgtgccttgtttgatgaaaagtgtgtgtatttgagatgatattatgcttggtatgaaggtgattagtaaaagaggaagtagtttcactattttcttagtttcttctacttgagttattggacataatgtccatggcctctttgtagtcattatttcactatccacagcagctttgtccaagcacctatacaaagtaaatatatttaagataataatgttgatgtatgctatatcaattgatgattgtatgctcatatactaaattaagtatttaatgttacatacaatgattataatgtgtgttgttatgtaacaataatattacaatttcaaatattaagatataaagccacttatacctaagcaaaattatgtcttataaagtgtttaacatgatttgatacaacatatagtaattaaacaatgattagtgtatgttactatgtataaagtagtcttaatttgtactcaaggcgattttgagtttggttgggcctagaacttttttgacctttattagaagaaaatgtgatatttaaatattttttttttggattcttaagttggatcaaccctacgcgcagatctaacttgtcttacatcaacggatcattttatgacaaatcaagtaatgttgggaacaatcaatatggtaaatgctagctagctagttataacaaagtggtagtaaatataaaattaccttaatgaagaagtgtgatcaattttagtgataccctttttagtgtactcttccaagctcaactcataaaggtcatttgggtcatttggcaaaggcaacttccatttactaaaagaagctaaaataaccttagccatcctggtaaaaggactccctaaaggcaacttgtgcctataaaatggcacaccaactaagaagaccaaaatggagatcccaagccccacagttggaagaccataaccaatggaccatcccacattgtcttgaatgtaaaccacaccagtttctgatatgagaaacccaataaaagtgctgaaaacccaccaattgaagaaagagagtttttgtgccttttcttttggttcaaactcatcaaattgtccagcaccaagggttgatatattaggctttgttccaccatttcctattgcaattatatatagtgccaaataaaacatacccactttcatagatgagtcttctgatgatcttaaagctcttaatgaaaccactagtgttagcaagatcattccctatatgtatatacacacacatttcaagttagaaaacagagtaaaaaaaagagaaaggtaacaagttgcttttaaggtaattaaatgagtaattagttacctttttcacatgtaattttggtaaactattcaaaacccaaaatttgattagatgagaagattaattaccaagagataaattgttgagccaatgagaaaagtccagaattgacctaagtaagcatcagcaacataagcacctaatattggggtcatccatacagttccactccaattagtgacattatttgatgcttttacagtcccttgatgaagctctcttgttaagtaaatcactagatttgctgcaattccttggtatgccaatctctcaaaaatttcatacactacataataaaaaaaaattacatatatcaaaatcccacatttaaatttatgttctatagcatatatatatatacatataataacagttattaagttaattaattaacttacctataatgaaggaacaagccttccattttccagtttttgaccttaaaacaggtctgcctttgagatcaactgccccatcttgtgcatacttttcttcaaccaaaaccatagtaataattttcttctttgaaagtttaaactaaaactatggttagatggttatattatatatatatatattatataatatatagctctgtaatgaaaaagttctcttaacaacatttggatatggcatcttcacattatctcatgctatgaattttctataatattctttcaacaacatttgatattaaattgtggttataatattatatattatattgtttttttaagtgatgtttggacatttgtgatcccctct

SEQ ID NO: 915 - DNA, 3494 bp, Cannabis sativa
tgagatttccttgcaaatctacaaacgaagtatgctttctaatttttgagataacgttattcttagaccttattttggtgactcagagatttgtggtaatgttctctttttcttttgcaaaggcattaggtgaaaggatgccaacccaccacttcacattacttgatggggagatgattattgatactctgccagattcaaataagcaggaaagaagatatcttatttatgatatgatagcgattaatcaagtgtctgtgatagaggttagatttgcattttctttcttttaccaataaaattatattattcctttgtgataccgtcttttttctttcattatttccctttaaacaagtaaatgaaaatattattcatagaataatcattattgtatcaagatttacaaggagtgtcttttctggtttatgtaattattgtttttaagaacatgaaaaaggctttgttggccttttatattttttctttataatttcacctctaatacattatgaaatgatgcagcgacctttctatgaaagatggaaaatgcttgaaaaagaaatcattgatcctcgtaatcatgaacgccaaagtatatatcagagtaggaatccttcatatagatatgacctggaaccattcagggtaagattgataatccattttttgtaatttatttcctttttttgtcttctagttttactatatgctgaaattaattgcgaatgtttgcaggttagaagaaaggatttttggttgctgtccactgttacaaagcttttacaggatttcattcctaggctatctcatgatgccgatggtcttatatttcaggtagtttaggatctgaaaaagctaacaaatttaacagttatgcagtcttaaattcctacatgccagctctaacatacggtgccatttttttcagagatttgatgtttcttttgttcgatcaatggttttctttgaccaagagttgtatgcattaaaagaaatccttacaagttaatttttttattctgagattttaattgcttgttagtgtgtgattcggtgattgttgagctcctgtttcgtctttatgtctgatatattatctatggggttccattataccctgcatcagcatggtttatttatgtaaaggtttaatattgttgttgggaatgacaactgttacttcttatctttcagggttgggatgatccatatattccccgtactcatgaaggtctgttgaagtggaaatatcctgaaatgaactcagttgactttctttttgaggtttggttgtcagctccactgtgttttgtttgattttatctattactatgggtgtcttctctcttttttcttcttgctatgatatcgtttttagtctctgttgtggtgttaaccattttaacatggataggttgatggtgaaggccgacagttactttttctttacgagcgtgggaagaagaaactgatggatggaaacaaagttgcatataaaggtatcatttcctatgtttatctctttgctttcatacttgacaattattctttaacttgatgtacaaattatgtttttccttaagactggtacacaacagtgctgtagacttgtctcacatactgtttccaagttctgtttatctcatataaatgaagcatctcgtgaagaattcttaaactggttttttaagtcaattttcaattatcaaaatgttagaattgtattggagaaaggaaaaatttgcaaacatagaagatgataggacaccgtcttagattacagctaaaggtgccaaagaaaaacactaaaatacataatacatccttagttattctactgctgtgaatgtaagcaccattctagagtttctaccttcttcctgacttcggtcctatccttccgagaaatgctatagagcacccttgggcgcccgaaactctaccactattgttttaaataaacatcgggtcccacatatctatatttaaactaattgaatttgaattatgtgtaacttgttacttaattgcaccaatgactatatgccatgtcctctagggtgttgggcaccagcagccttgacagcaatgcgcttttcttccacctgatagtaagatatcttaatactaatgtggtacccactgaactccatattcaaccagggacatagaccatatcttggtagagaatgggcaacatagaaatcgatgatcctagtcgtgtttattttgcccaaagagagaatgataaaaacttttatctttgaaggaactactaactatttttgtccttgttttagagggagggagcaattattattaggtgaattttcattttcaatttcttgggtaggattctgatattaaattctggataccattggctatttggatagagtaactaactgtgtctagtctagctacaatcacttcaaaatatcttggatttatgatagtttgcatgcattctagtatgtcagcttttgacattctccatgaacttttatggcacatgcaccgtagtggtacattgattgacttgctgcggtgtttgatctcttgttttctggttacttgcattgtgttttgtcatgaaaatccatgtttctgattgtcaaacttctccacccaaaaaaatcagagggtgcagacccggcttcttactctggaaagattatagagtgttcttgggattctgaagcacaagtgtggaactgtatgcgagttagggtcgacaaaaatacgccaaatgatttcaatacttacaaaaaggttattctcacctctcttactctctcttttgtttttgtctatcttgctaaaatccgcattacttaaatctactcatcttgcctgttttaatgggggcaatgctgctgtgcaggttatgcggagtataagggacaacataacaactgaagtattgttgagcgagataaatgagatcattcgcctgcctatgtatgcagataggattcgaaatgatagtaaagctcaccagcactcaaattcagcaaggaggaggtaaagagagagagtgagcgcgagacgaaccgaattcttttcagataagaaagtgttgtattttggtgttgagttgggttttgtctccggcattgtcaatagatgactctcaagagttaatttatcgtgtaattagctacacctagctattattttgtaggggagtgtgttggctggtgaattgtacgatccagctggtacctttggttagtcctcacaatcaagagctttctcttttatttgtatgactcttctgttctctggtagctaatcttagaaatcaagctgtttagaattaggccctcgattgtatattaattattattatatattagctgttatttgtaagttggtttaaagtagggcatttttttttcttattatcattgcacatcaagttttccctagtttgtcttctaaatttaatgtgaatatatgacttgaaaatactgtgaacaacttactat

SEQ ID NO: 916 - DNA, 2956 bp, Cannabis sativa
ctaggaaagatgatcatctaatgcaagcatattctttaacctgatttcgacaaacacaaaaatgtcccaaaaaatcaaggaacaaatgtctacgaaatgggggcaatgattcttgaataaaatataacactggagtggagagctgctttccttcaaatcgagcagcttcaaccaaagtaagaagcaaggagattactgaaaccaatcacctcataagttcgaaatcataaccgatgctgctgctcaaaaggcgaccaagatattagttgtatatcaagccgtaagcttcctcataactagactagcacaagtttgtcaatgtaattacagaaagaagcaggtttactagaataaacaaggcaacagcacaactccattctatttcatctgttaaattaagttagaataacagatggagggtacaaagccaaagacaactcgtcccagttgcaagcacattcttcccttgagataagtatgccacgctcacagtatccacagattgcagctactcaacctgcaagtatataaatctggctaacaaatcaaaattacccataagcagtgcaattgggtctaattaatccccaaataaatcatcatcatcatcatggcttgtgttagcaccaagtttaacacttgatgatttttctgcagcatctttagttggagaagctggtctaccactggaactaacagatgaatatgcccaagaagaaccaacttttccagcaaaggattctccataaagatcatcataaatcccactttttggagcagtttttaccttatttaaaacctcctgtagtttacctgtcacgcctctttgggaattatcttcttttgcaaagttttgctccttccctttgggtataagggttatctgtacaagggattcatattttccaacaagacttccctcttttacacctattggaccaggttctgtttctacatcagcaccatctgaaaccccaacaacttcaacaagttctcccccaacctgatctctaaaaacaactctggcctttttaattctcttagcagctctctctaagttctggctgccatctgttccacctgctgagctaccagtcacactggatttaggcaacgtgtcagccttgctaataccatagcgatttagaagtgtattataggctaaaacagcttcttcatcagacggatcaggagggggtggtaggttaatctctgtcgatagtggaggacgagggaaaagagcagcattattctttctcaaaatataaattctagttgatgcagcaaatcttagagactgccccacctcaagctcaacaggattatctttagtcagcctctcatttgccacaaaagtaccatgtgcagaccccaaatcgattacatatatgctgcagaagagatgaaagcttgtaaatgtctacatgactcaaaaagagaacaaaagttcttgccaaaccaatgttttttaattgatttttttaaaaacaaataaacattaaaataggcaaatgaaaataagtagtaatgcttttatgactaaagtcataataaccatgccattatgaagctctagagatcagattaccctataagttcttaggttgccaaaatgcacgtccctgtcacatataaataacatggtaacatacggaaaaagaaaaagaaaaacaaacgtgaggacttagtaaaatccctctcgcagcaattggtttgacatataataatcaatgtcagcataatgtttttgacaagcccatcgccatacagaaagcttgtgagaaaaaaaaataccctaacctaccattcttgtgcggaatcacgttaaggaataaaatcataacaaataaaaaatcaagcttgagcaaagaacaaaaaaccaaccttccattcttgtgaggaatcacagcagcatgctggcgtgaaactgattgatgatcaagcacaaaatcacaggcaggggattgcctcccaaaaatatgcctccgcctatcaagatttatgcgatcaagaacttcgccatccttcataacctcaagaaaatagacaccagcccgtggttcaatagcccaatcaggtggctgccaggttgactggcctcctccaacttgggtcacaggctggctctgtcctaccaatggtgctgcctcctgccctgatcctagtttttgagaaacatgggattgcttttggtgttgagcagtctgatgttgcaaattcaaaaccggttttgtttgaggcctggaattggatttcgaaccagcactgacagatacagcaaagggttccaaggactgagctttcttgaacctatcaagtcccgttcttccgtacatcctttaaacgatacggtctaatgctaagctaatgccattgagtaacgtctccaagttccgcccgtaaaaccttcttcctataaaaaccaaccgtagttcaataaatttatataaaaataaaaaagaaacacgacttggactggtgggcaaaattgagagaaagaaaattactcgagagtaaaacctaacagggtttataagctttaaaagaaataataaaaaattaactaagagcatcgtcgtcccagagtgtccttccttcgattatcaaatccaaacaagtttttgcttcaattgttaagaacgagacttggttgacggtacgattaagaagaatgaacgttaatcagttaaatttgaggatcagcggaaccaaaagagggggtttaggagtttggaatttgaaatcgcataaggttagagaaaatgaaaagggttatgcttaccagaaaagaaggtcggcgacggagaaagccacaaactcctcacttgtcgcctatcgactttgccttcatgtcctctattctattgatattcctatttgttcacctctctcttcagttctccgccatttcaacacattagggttacttcaaccttggaaaaaaaaaaaaaaaaaa

SEQ ID NO: 917 - DNA, 880 bp, Cannabis sativa
aacattatttttcatacgaccaaatattaattaggtcattaatcttttttctttctttgaggatggaaatatggaatatactatactatagcttatcttatctatatagtaaatatttgttttttttttttcaattaattaaacgtggcaagcatgccgtgaatgtaataacttaattggctatatatatgtagtatgcgttgcatgacaaggtcgttaaatatgtaatttcataatatttggagttgtatatgtacacattgaacaaaccaaattttgccgaaccaattagcggaaaatgggtgtgtaacatgattggaagatgagaaaaaatcatatgaatttgcctaacacaaccaaaaaagaaagagagagtggtattctaacaaattaaatcatgaatgaagaaataaccaagcaaagttccaaaaagcttttaaacaccttaaagactttcgtatgttataaaaagaatcttttaatatcatagtcaaccaataattattatgagtcaaagttgtgaccaacatatatagctgtatggacgttgtatatatgtacatatcttcgatgggactaaagaacaaagtaaagctaccagttttcctaccaattataataaaatagtattttaagcacaatataatgaataatcagtatatacttagaattacaaatgtattaattaaaaactaaaaagtcaaggaaataatgaaattctaattccaaaaaatatataatattggccttattaaccaggaattaatatctaattaaattaaaggagcctatagtttaacctttcacctctttttcatgtctcccattttatatgactccctctttttctggtaggtgggactacgtacggagtactgta

SEQ ID NO: 918 - DNA, 4327 bp, Cannabis sativa
aagtagtatatatatttgctactgacattggcatgtgttgatacttggattccaatctagtgtccatagttgtaaattacaggtaggaggggctcttcaacttcaaatgttctctcctctttctgtttttttgctaataaattgtccacgtctattttagttggatattactatagagttttgatttggtggtcatttttagtacgtgtaattatgttaatttttttttgttgttgaacgaattaggacaatttattgatgagagggactttaaaagaatgtgcatcaaatgggtgaattactgtctggtaatatatataaatgggctgtataataactctgttacttaataaattcacagaatgagtttgcatgggaagctaccactgtattcatactctatttttgctgcttttcatgtgatttcaatttggtgactccagtcaaatataaaagtattttttgaatgttaatctctatacagagacaaggtggggctatcaaacaaaagctttgtattttgacctttttaagcacatttcgaaaacaaacaaacaaactacatatctacgtacgtactacgataaacagagttaatgtgaactgtagtctgtttctattgaaattttaacaacacatttcggcatttaacactagcacatgtcaatctaccactgtggttgcttgtcctatgtggctctcataatttaagttccattgtcaagaggttatgatgcatcaacatcatcatcatcacgcacgaaatcttactatttactttagagaaaactagaggcttgagcatggatgaatagtcgtgaaatttgtcatttgtgaatagaaccagtataataaaatggtcaatggtcatgcacccactttttcattagttttgctctcagttttcaaactattacaaagaagaagaaattaatacaaaataaatgtttaattaagaaaatggtccatggtagaaagtagtggttgattgtctctcactttaggcagttcgtagcccataaaaattaaaaatacacagctacttctatgctgaagaatgtgcttggtttgtaggacagagtgcccttaattacaggagctgaccacttgttgctcttttgagtttgacaaacttcttaatacggcatccaatactttaacctttacaagcaaatacacacattatgtttccagaaaaaatggtgaaacaattataataatagaattttaaaaagtagataaatatttatctaaaaatattgtgaacttttcccgataacaatgggctctgatctcaagaattttgaatcttcaatttttctttttaattaactctgactatgactttcccatctccatttacaagtttgtttataccaatgtcaaactcatcgaatctcaacctatgagcaaagccgatttcaggtacatggcttacttatcctgtttattgaactgtttcaacagtctgagttatcatttatctgaaactcttgttgtagattagattattagtttttttttttttttttatatgatggatttaaatgattaaaaatcactggattagattatcggaaactcttgttattttgcagtggctttctttgttcactttcttaaaatataataataataaaaagaaaatatgccaaaacaaagtgttgtatcgaagttaggaacatggagaggaattcacaggtcactcgtagtactgggcacacttagtcttttcatttcggtcgccactttctccaaagtctactctttcagatcatcaatcctcgtagctaatacgttctgcaatcaagaacacagtcaaagccaatccatgacccaaatccaagtgggagaagcacttgataaagttatcaagatgatccataaagagattcaagagtttgaaaatacaccaactacagattctttaataaaacgacatacatttttggctgatatactgggtcttatcgagtcagtcaaagaatcaatgcctgatattcaactcaaccctcccatcaatcaaacccatcatttgttgggatccaagcaactatcttataagccagagaatcattttttgatcgaagagattcgcaagtacgtgaagatgaaacccaacaggctagggaagcagaatttcatgggagctaatggaacttttacaagcattggtcatgcttgtttcgccatgagaaaggatctggaagagtatatggattatgacattggtgatatctgcaacgatgactggaaactagcccagaagctcatggttcatggatgtgatccgctacctcgaaggagatgcttctccagagcaccgcagctatacgacaagccttttcccatagaagagtcgttgtggaaactcccaaacaacagaaatgtccgatggagtcagtaccgatgcaagaatttcacctgcctagcagctaattccactcgaaaggggttcttcaagtgcgcagattgcttcaatctctcaaatcacgagatgcccagatgggttaaactagagaatccgaatgaagacagtgcagattttcttgcacaccaagtgctcgacctaaagtctggggagattagaattggcttggatttcagcgttgggactggaacttttgcagccaggatgagagaatttaacgtgactatagttacagctacaatcaattttggggcacccttcagtgagatgatagctcttcggggactggtcccactctacttaacgataaatcaacggctgcccttctttgacaacactcttgatttgatccataccacaagatttctagatggttggattgattttgtgctgctggactttgttttgtatgattgggacagagtgcttaggcccggtggtctcttgtggattgatagcttcttttgtttgaaggatgatttggatgattatttggagtcgtttaagatgttaagatacaagaagcataaatgggttgtggtaccaaaacttgatagagatgatcgagaggttttcttttctgctgtacttgaaaaaccgcccagaccatttcggtaattgcttacacattctttttattatatatttgtaagtattatgcagtaacacgtcgataccttcttgactgttttaataagaactataacatattctgtttgaagatattaataatagggtcatttgtgaacacgaaattctgagtagatttgctctggagtctggtgttcatttattatatccaatgtgatttaaaagtagataaactgaagaagaagtcgaagtcgaagatagacaaaaaagcaataaatacttttgtaaaattaaagatacataccatagaagagagtattgtccatgtcacaaattttcaataagaatactacagacaacaatttttgtttcaaaatttatgcaaactagtacgaggaatgaagatagcatagcacagcattctctttgttgagaacattcatatttattattgagcttatgataatgctcttctgtagtgggcttcccaaacaaaatagaaaacaaactactattatggctggtgttataagatgaggaatttgtgaatggttttgagatgtgggcctcagattattatgagtcagctacactggaaaagtaatggggatgtagttttcattcttgcaagtcatgtcaactcgattgtgacttttttttggtaaatactcgattgtgacttaattgtaacaatcccttatttctctactgggccagcccacaataaaaaaggtgacccactaaagattccatacgctatcttcacccaaacatataagaaaaaaaagaaaaagattccatatgcagaaaaagctaattctttttgtggaacaattgggggattgtggaagggacctgatttttcttcttctttttaatttttattttttaataacatggtcagattcaaggactgtaaatggagtaccacaccttacaggatatcataataaagatattatatgatatctcctcagttaatcaccttaatacacaacgagctgcccatcactacgtacggaaacaaattgattataataaaaaagcatagttgatttataaatagtattatatttaagatactaatagaaactagttagccttttcttggcatgctctttttatttaatagaaaatgagcactaaactaattggcgattaagaaagctcttcctttctcctttacaaaattatgactttttgtccataaactcatgagtggacaccatttattcataataccattctcctttcaattttttttggcaaacttttttaatttgttctatgttttttttttttttt

SEQ ID NO: 919 - DNA, 1799 bp, Cannabis sativa
  modified_base (197)..(204): a, c, t, g, unknown or other
tctaagtctctaagctccctaaagttcttaagctttacgtctgaaaccctagctctacctctctctctcctctacatgcccaaggcttctctcttacttaagatttgccaacttgattctcatattataatcttaagagagtcgatcccttgagattcgagtggtattatctctggtattaatacaactaaaagggnnnnnnnncattacccgctaactaaaggggccgaacctcattaaaaatattgtctcttttactttcctatttttattgtgtacacgtggtatcaccaataataaatacgactccactgtcggttgaccaaatctgagatcaactaaattaatttgtgatgtttattttaggaaatagctgatagtatatttattctctaggattattctataaaacttggaacttgtgttttagtgatgggagaattaaaagtattgaatatgatttacacaaacaattataattagttactaaaatgatgatgatgtaatttgtagggaactttagcagatggtcaagaaattgcagtaaaaaggctttcaaaatgttctagtcaaggggtgaatgagttcaagaatgaagttatattaattgcaaaactccaacacagaaatcttgtgaagcttcttggttgttgcattcaaggagaagaaaaattgttaatatatgaatacatgccaaacaaaagcttggacttcttcatatttggtttggatttttaaaactctaaactatgttaattagtataaatgtttgtcaatttattacctttttttagaacatcttatcaataagtaataaggattaacattgctagatgaaataagaagagaattattggagtggcacaagcgctttgaaattatatgtggaattgctaggggaattctctatcttcaccaagattctagattgagaataatccatagagacttgaagttgagcaatgtgttgcttgatagtgatttggtacccaaaatttcagactttggcatggctaaaacatttggaggaaatcaaactgaagggaatacaaacagagtgatgggaacatagtaagatttcttcgcataaatttttaaccatatattctataagatcaactataagtttttctcatattttcttatgataataacccgtacttgcagtggttacatggcaccagaatatgctagtgatgggcttttttctataaaatcggatgtctttagttttgggataatggtgttagaaattataagtggaacaaaaaataggggattcttccataaggacaatacccttaatctttcaggacatgtaagtataataaaaatgaaaataaagatattatcacatactttactcaaatcataaattagtggcataaaattgatgtttgatgtgtttttcaggcgtggacattatgggaggagggaaatcctttagaactagtagataaatctgtggcggagacatgtactcaatcagaagtgctacggtgcatgcatattgctcttttatgtgtccaacaacgacctgaggataggccaaccatgtcaactgtggcagtaatgttgggaagtcataatgcattgcctatacctaaacaccctggctttttcatggaaatatctaagactaatcatgaagattcttcttcaatgcataacaaagaatccacttcaacaaatgaggttacaattactctattggaagctcgataagagtttatgccaatatattagcatgtttagctagcactaacactagtttttattattatcacaaacaaactcta

SEQ ID NO: 920 - DNA, 2172 bp, Cannabis sativa
gtaaaataatttccaacaacaaaccattcataatacaactctcagaagaaacaggatacctcaatgccaagcctgtttccacactaatagaaccaaataccagagttagcaaagaccatggagatcctctccctgaccccaccatctatcgaagtcttataggtaaactcacatatctcacaatttctagacccgacatcaaccttgcagtaaacaaactgagccaatacctataatgtccacaacaaccacatcttaatgttgcatatagaattttccaatacttaaaaggatcaccagccttaggacttttcttctatgccacaactcccacacctctacaacgttttgcctttactgatgcaaactggggttcatgtcctgacactagacgctccattttagattattgtatttttcttggcaactcactcatatcctagaaatcaaaaaagcaacaaactgtatctcgttcatttgttgaagctgaatacaaagcacttgccaatgtcacttgtgaaatacaatggctcacaaaaataatcaaggacttcaacatccatgtaacaaaaccagcaaccattttttgtgacaacaaattagccattcacatatctgaaaatctagtcttccatgagcgcacaaaatatgtcgaaatctactgtcatatcgttagggacaaaattacaactaggttactcaaactgaaccatgttacatcaaagactaacctagaaggcattttcaccataccacttctcctctctcaattcagcacaattatatccaagatgggtgttaaaaatctttacactccaccttgaaggggcctattaaagttagttaaagttggctataagaaagttagttatttccattatttcagtttgtactctaatggtatatataccagcttcaccacttgtaatcatttgattcgattcaatacattttcttcagcagtagaaacttttctctttactctgttttcactaatatattcagcctttgtaaaggcaaaaccactattgtaataattgtaggtaccttagacaaagagattacatgaaatttaatatagccaccttatgctccaaaatacaaaaacttaaagaaatcatgtaagttagtacgtgattatcagaattgatattttttgaaccatgtaattcactttattgttttgaatgttaacatctgagtgactcaaaaggaatgtatcatggtttcctcataatctatatcactcttcgagttgcagaagaacttaaattcaaacacattcaaatccatatttttttccctttcgcatcaaatcgaatggaatcataaatttgaattggagtttttatattattttacatatataaatgaacatgaaggaaacttacaagataataacgaagattgaacaacaaagaaacgcccctgaagaattccatcaaactctacggtttattattattattatttacaaaaaagaatagatgactcttaagatctaaattaagcaatagatgatattgggagccatctcaatttgctacgtgttttttaaaagccatctaaagtttcatgttttgctactttagatgactcctacgatgagccatcataagcttggtatgactttttatagaaaaaattatagctctactaacagtagtttagaaacaatgactcactatataggagccattgtatacataggctccacattaaagtcatattttcttgtaatgatttatcattaatattttttttagcactctttgttctcttttgagttctttttttttttggttttgttgttcacattaaactagccgtccccaatgcttctttttttttttgttttttttttttaaataataattgaagaaaattatatttttgtctgtcatgcaacttcgtagagttgaaacaaattaaaaaataataacttaaaccatacaaataacaacttaatcaataaaataaattaatacaataatgtgaaggtcaaaataatgaccaaaatatataaaagaaacaaaattgagatagaatagagtaattaagaattgtgtcccatttaattcatttattataaagtcatgatgaataactcattataataaggaatgaatgattgattgttgtcgggatttatgcagagtcatcagtagtgca

SEQ ID NO: 921 - DNA, 2851 bp, Cannabis sativa
ttatagtttagggagaaaaaattctattcattcttaaattacaattatgttagaacatttgttccatcaaagataaaattagaaaactctggttttatcatgtagattaattcttactttagtattaaaaagaaaattaaaatcatatatgtctagtaacgtactaacaaataacattatatgcaattattgaaaacagagaaccaaactatcctaaatcaaaaaaagaaaaaggaaaaaagaaaccctaagaaaattaaaataagactttgctactaccccccttaaaagagaataagacaattttgcaaacaggtccctaactttgttctaacttctattacttacacagaaatagcattattattgctatttttgccacttttcttgtttaccaatctaaaaacccttttgattgtcgtaacaagcttctcaacaaaggccttcttcttctgattcttcccattactttccagctcaaacgacgtcgttttcttcaccaacttcaactgatgcccgccgatgccggtagctccaaccttcaaaaaactcgtcaccagttgataataaatcagcttcatcgtcccaacgaactttttcgatacgtagatctcttccgaaacgacgtcgttttcatcaccatccctatagtacccgattctcacacgcccattcgcgtaagctctacacgcgcccagaaaaaccttggctctctctcgataatgcgcggcgacgaattcctcgaaatgcttcggcggatttcgaatcgaatgaatcgttgttttgcagcataaaaggaaaacatctctgttgtaatccctcgaatacttctcccacctagcttgaccgaacaatccagttcctggttcgttgaaatacggtctctcgttcagtaccagagcttgaatcgaaaccagaacctgtaaaaccgtcgattccgccggattccaccgctccgtcgtcttccctgaccaagtgttaagcaaactcaagcagaccgtaccgttcgcgtacaaattgggattaagcctcaaaccgtaagaacgatagtgtaccttgggaggtcgagcaggataatcagaaggaaaagcgagatcgaaaaagtagagtccatcgtgatacggtgtaccagcggcgccgacgatcacagctctgagtagatcgattctgttctcgtaaaccctcacatagatagaatcgggaagattcctctctaagattctccactctttcataatctttttatgtacctgactcactgtagccgaagcacagtcgttcatggatgagctatcatcatcgtgattatcttctccggtggccaccacggcggcaccgccaccaccagccgaaacgacgtcgttcttctttgccttattttttcgctttgcgtagtaatgatcagagtcgttcgaaacgacgtcgaatcgtttaaacggtaaaatatcgttctccaactcagtgccattttgtgccataatcactttactactaagaactgatcttcttatttttttttttccacagagaaaaaaagaaacagagcttcgttgctttataaataatgaatgacgtcagcaagagtgggtcccaaatagtaaaatcaattgatatgattagtctacgtggatttgaatcaacggtgataaaaaaagggttatatacgatttcaacgtattgttttaccttagcgatgagtacgtactaatttgttacctttttttttatttagagagtaaataaataattttgttgagatatttaggtgttgttgttaggttgttcacaggaaaaagtaaaagtcatttcaagtaaatgattaatgagaatttccccacaagaaaaatattaattaattttaattaatgagagagaataatgattgagatttattagtgataaaatggtcaagtctagatatgtacacaatgggaaaaagtttatctttatagaagttttttctttttggccctttgcgtgagctctacgtagactttccaaattctaattatatgactatataagtcataatctatgcctatggtgtctaatttattctgaaaatgaaaatataatattttgcatttcctatgaataattccatttttaaagtaaggctacgatcgcttgtaattttgtttttatccagttcttattatctattgtaatagttgaaatttcttactaataaagtttctatttctataaaaaaaaaaaaaaaaaaaaaaattccaaagttcaattgttcagaaaaatatatataattttgctacacttaccatttctaataattttttatgtcaatattttccttaattttgtctcaatatgtgataagtgacagcctcgatttatataatatgtatagaacatatatgtatttaaggaagaaaaccgagctctaattctggaaacagctattttgaaaagcaaaaacaaaatatgacttaaaaaaaaaaagatggattcaaatgaggtacaagccaatttcgttaatgtgtgtatttttatgggatgactattctaactatactacaaatctacaatgtccaaatcttataacatttttaacatattatgtgctaaatattgaactaatccttataatgtaatctcccactcccattttgggttgtcaaaaatattcaaaatgaactttggttatatagaaacttatgggttccagcaaagaacttttgttatatatatagctagaaatggctagagtctatagttaaaagcaggcgtgtctattggagcttttatgagcaagcatcttctttaggcgttcactagttaaagtagcaaaagaaatatcatgtttaacacaccctttcaccaaataatgcat

SEQ ID NO: 922 - DNA, 9037 bp, Cannabis sativa
atctcatggttgttctaacttttctttgcccttacccgcaccacagagcacctgtgagtcacatagactcaacaagaaaagtaataaagaaggatacattaaataattaattatacattttattatcataacatgattaaaccataacatttaacagtaggtaatataaccatccatatacatagaaatagataattgcactacctaatcaagtgggcccatgccataacctggcaccaatatatcacatcgcctaatcagatgagcctgtacctatgcccggtactcatatgtcactgacgcccgtacctatctcatctcttaatcaaaccctagaccaggacctcgacccggactcagatcctgaccctcactcagactcgaacccagaacctagacctgtacctgaacccgaaacctcgccccagaccctagaccctagaccctaactcctgaccttaaacccagaccccagacccaaacctgaaacccaaaacccaaaacctggacctgaaccttaaaccctaaactcatacctagattcgtactcagagcccaaagaccggaccaagccctagacctcatacccgaactcggaccccagaccttaaactcagtcaggtttagatttgggtccaagtctgaggtatgggtcagggtccgagtttgagttggggttcgagcttcgtgtccgtgttcgaggtccaggtctaacgtccgtgtccgtgtttggggtccaaggtttgggtttggggttcaggttcgggttcgagtccagattcgagattcggatcgaggtccgagtctgagtttggggtctgtgtctggggtcaaggtccaggtttggggtctaggtctggggtcaaggtccaagtttggggtctaggtctaaagtctaaggtctgggtctaaattcgtgtccttggtccagatttaagtcctaagtccgggtccgagtcttggcccgaggcttgatccaaggtgggatgggttcatgttgtggtatggtgtagaatattaaatgttgagttatttattaataatttatatatatatataactaccatcaaattctttattcatttatgaggttgtgacttgtattgtacggataattaagatcacaagccttgaataaaataatcagcaatatattaaagttatagaatatttaatcaatgattgctagtatagttcactgatccctgttattcagtgtaagtaatcttgattcggatcgctgatgtaaatagacatcttggtgaatgtcttgtatataatataaaatatatatatatatatgatatgaatgatatgtaattaagttgtctttatcaaactagtcgtttttaataaatacctaatttataccacaatgatgatcaattagtagatcgacctaaatcttgagaaatcatgaactcttgttcatgttattaatttctttgattcactcgctaaagtttttcagagaagatgtttcttacaacttctattttggaaagctaataatgtggatggttgggaacttgatctataatgtggaattctgacttttctaacggatcgaatattagttccctttaaatgttaattctggaactcaaagttgtgcataatttatattggatctaaattatattttcactagtgaattaatgatactaaaagataaaaagttaattagaagggtaaaactataatttaaccaaaattaactatgaactgatacatgaagggctaatcactggtattgattatattaatgatcactatagttaaatttagtaaatataattctataattactaagaattcaattctatttttttaatgaattaataatagaattagtaaataggattatttggttgatgatattcaataaataatctaatttattagagcttagtattatagattcatagtccttggattgccagtatataacatttgtcaagggtatggatgacacaaaataattatattgaaaaaaatctatagaaaaatagtaattctttatttttttaataaataaattatttttaaatttattactgaaataaattgggaagacaaagatttatcacgacaagataccatcttgtaataaccttacaaggtggcacctagcactgtgttcctgcacagttataggcgtctatgacaaatggtgggcccactgggtttgtttttgaattaattaattacttaattcaaaagataaacatttatattgcaatgaaagtttgttaattatttttaaaaaagataaatatttatttaaatttaaatttaaaaaatagttatagataattatttatgactaaggtattcccttaaagtgattgagatattcccttaattggttattacttattagatatttagtttaaattagatatttaaatttaaaaataatatctataacagaatcatttattgatttttattcaaatatttaaatattattatttaatatttaaataaataaatatcttattttattaaacttttaatattattttatttgttataattaatatgctaataattgactgagcaacaaggagatgtggctttcgaggagcaatcatgaattgactaagcttgttcataacataggagagatcaagcttggtggtagggatgtacacggagtgggaaattggcggggagtgctccccccgtccccattcccattaagaatttaatctccatcaccgtttattggcagggaattcgttaataagggcgggggcggggacgaggaggggaatcccttaaaaaaataaagtttataataacatttttaatatacaaaaatattaaactacattaaaattaaaatattacacattaattattattcaataaactaattattatctaaaacacaacttaaaattcataaacaagatagtaatatactaaaaaaatacaaacataaattataaactataaagtattactagaaatataagataaaatactaaacgggtccccgttagggcggggagtgtgatccccgtcctcgcccctttaacattcggggacaaaaagtaatcctcgttcccgccccgttcttcatttagacgaggaatcccccaccccattaggggcagatccccacaaagccctatccccgtggggaaaatgtgcatccctacttggtggttgtaagatagatcaattttcctatgatgcttctataagttatagggtcagggagtaaatctcctaagtccttgttgagtttgttgttagactccatggggtggaagccggtttggctaccgagaatcttgtgtcaattagtacttgtagtgcaaaaggtctttaggagattgaaattccattagtggatcaagctatttcaaggccttgacaaatttcagggggtaagatattttaatttgaacacagagttgaggtattttttgaaattgatagcagctttatcattgttggtggcaatgactatgtcatcaacatagaataaaacagtcaaaaacatgttgtcttggtttttgatgaacaatgaacagtcatagtatgactatttaaaactagattgcaagagtgtggagttgagtttggtaaaccattggtgagaggcttgtttcaagccgtacaagctctttttgagtctgtaaacaacattagggggaatgggcctttgttttgtacccttaaggcaaggtcatgtatatagtttcatgcaagtccctatggaggaatgcattattgatgtctaattggtggagtgaccaattttttttttttttgacagctagagctaggagtactttgagagtattaaatttagcctctggggcaaaagtgtcaaggtaattaataccttttttttgtgattatcctttagctactagacatgctttaaaataaacaattacaccataaacatcatatttatgtttgtaaattcatttattacctatagtgtgttggccatgggcaaaggaataacctcccaggtatgttgttgctccgaggttgtgagctcagtatccatggtattgagccattatttgtatttataagcttgcttataactggatggttcactgagatagactggaagtatggcagcacaaaactgattagataatctgtcataagacaagaaggaatgaatggaatgagtagtggaacaatcataatctttaatgtgaggaaattcgttgatgaccctgccagatttgaaaacttttgacacaactggtaggagtggtaatttctcaacaagagtggcagaggtgattggggagccatagatgtgggaatgccagctttgtgagtggtgttatttgtaagggtagttgcatgatcggtgttgcagaaatagcagcatcaactaggggtgttcgcgatgcaggtagtgcatattgtagcatttttttcaaaccaaaccgcatatgcgatttttataatgtctcaaactgcaaccgcatcgcgagatcttaaaatcgcaaaattacactacaaaaatacggtgtggtacgatgcagtttaagcggtttacactgtcataattatcaaatagtgtaatgaaaatttaaaaatcaatctaataaagttgtacaatacaaacaaaaaattattaaagttttaacatcataatatacatactaatcatcaagccattatattgaattatctttaaaaaataatgcaatatacacttatattacatatatttgttacagaataaaaattatattgtaaaaagtgataattttgtaatatatagtgcggtgcagtttgaaccgcgattattaaattcaaaactgcaaactgcactgcaccacacggtttgtcaaaacgaaagatttttttttgttttaatgtttaagagtgtataagccttcatcccaataggatagcctatggagatacaaggagaagctccaggagagaacttatgcctcgttggtaacaaggtgaaagcataagctaggcgaccaaataccctgagatgtgtatagtttggtgaagttttattgagtagttcaagaggtgttttgaactttaataagcgagatggggtgcagtgtatggggtaaactacagtatgtatgatataggactggtaaacaaggttgaaatgagattggaatagtaaggcccttgcaacattaagaatatgctagtgttttctttcaactaaaatatttttttctacacatctatgaactttaatgcctttggaagtataaaatagaggcaagtttaattcttttgcattgtcacaacggatgatctcaatggtagtgtggtattgcttggctacataattataaaattgagaaatgagctgagcaacattagatttattttttaaaaaataaatccatgtatgtctagagtgattattaataattgttaagaagtatgtgtatccgtcaatgctcataaagtgaaaaggtccccaaatatgagcaaacatatcatttgatgaggaaaataataaacgtttttgtttttgcaatggacatactggacaaaaacaagaatgatatttattattgggaaatgaaatttctttattcattgtttgtgtaatttgcgtagtaagttgtcctaggcgatcgtgccaaaggttattacaagcaatgtcaaaaaaataatgatgagtagattgagtacgaggcaacatgtagagattgtgaagccgtttagcaatcctaatctttgaatgtgcctaaagaaaacaagcattgttgttaaacaacagtaagtcaatcaaataatcaagaagtgcactaacataaaaaatgtttagctaaaattcaggaatgaaaagaacatccttaagagtaatgtgttcattaatttgaacagtcccagtgtcaatgacatgaatttggtctccatttggcaaggtaacattagggataaatgttttgttaaaaaagattgaagaaagtttggaatgttgcagacatgctatgtagcaccattgtccacaatccaaaaatgagtggatgcatgttaccagagaagttggagaccattggagtcatttcaacttgtgtagattgtttgggagactgactaagaagactgatcaactcgtgaacttgatttacattcatcgaggagagagggggagctggagaggaagtagatgcaacattgttaactcttggtttggaagagtcttgtagatgcaacattgttaactcctagtttggaagagtcttcaaattcttcttatcttcatctacagggagaaaaccatcaaggaaataaaatttatcgacccaatgacatgatttcttgcaattggaacatgtagggtgtggtttcttggctttaggagcaaacgacttaaaggtagatgtggcagcaatgacaagattgattctgagtcctctttggtattctgcttgagaaatcacagaggaaatagtaaatagaggaggaataggattattgagcagcatttgagcacgaacctggacatatgactcattaagacccattaggaaagcaatcttatattttcttcatggtgccataagtgcagccacatatgcaaggagagaaggattgaaactcacaaagttcatcccaaatggctttgagtcaagtgaaatacgaactgacattggaatcacgttgtttgagattggaaagagagatttggagctcaaatatcctggtgccactgctttaattgaagtgttcatgaagttcgttccacatatcaataaccttatctcgaaacatgatgcttttagcaatatcaggggaaacagattggagaatccaagacatgaccatattgttgcaagtaatccaaaaactcatattaggataagtgggaggaggtcgaggtaacgtactgtcgatgaatcgagttttgttttttggtacaatggagatagatgagtacccttctaagaaaggaagttttcttgaccactgagaggtgtaggaacgatgatataagctggttgatcacaattgttgagatggaaagggattttgtgatcaataggttgagattgttcgatcgaagcataatatggttcattaccatcaaatctaggtcgatgcaaattgtgagaaccaacgccatggccatcattatcaattgcagaagcttgcaaaagaggaacaaccattggagcgggacgttgcatgccgtgattctgatgtattggcaagaattatggcgaagctatgggcaaatcattggccagagttatgggtgaatcaacaattagaaagggatcttgtgaagaagatgaaccagaggactgagtgcgtgccatgaacagagtataagcgaaagatctagtttacgtctgataccataatagaggtgagaattgattcagtacttggtaaaatgcaatctgttgtatatgagaaaatggaaaaccctttatgtacacattcatccttacttagctagttgagttagttataactaactaactaacctaaactatctctgcaaatgactaactaactaaagcagtagcggtaatatgttttaataaattgactttgagatggaaccccgtgcatcttacaattttagcatggtatcagagctaaactatactctaatgagtattcgatcaaaatccaaaaatcggtctaaaaagaaagccaaaggagccgcttgtgatccgatgatagtgaaccaaaaagagccgtttgtgatctggggatagtgagccaaatagagtcgctgtgagccaaaaaagccacttgtggtcgagttgtgcaagattggtgaacaacaaaaatagctaccatattgaggagggatattagggagtcacacattgataatgtgtggaaactaaataccatacataagatgcataggctatttctcctctcattgccaattggttttgaaatagaaccttatgcatcttacaattctaacacatccttcgtgcgccaaccaccattaacgacatgtttacccaccaatgaccatatccttcaatttatttttcacttttaatgattgaaaattcaatccaagacttaaccccataaaaatattcactaaggacactaattttatggtttcgaacacatatttgcatgatttattggtttggtagcaatttcttcttcttcttcttttgaaaatttaatagaaaaatatgatttaaaactaatgtttaacaatagtctcataaaaatgtgattttatgccaaaaatattatttaacaatcgtttgtgataaaattttataaaagctttggtgaggtataactttttacttgtttgtccactttaggtttttttgtttttttttttgagtataaccttaaactaagagggtgtataacctaaacttcaaattatttaagtttcaaacttcgttatggtatcaaacaagcagatctagaaatttattgttttacacttagaatttaatgttatacatattataaatgtgtagatctccaaattaccatttaaaaaaaaaaattacaagaattgataactgagtgaaaagtaaattttataagttttatcaaatttcatcgcagatcatcgcaaatgtattattcttgcgtcaaaaattatgtttttatgacaccattacaaatgtatcatttttagcctaaaattaaattttcatgaaactatcattaaacgtcattttattttggctaaattcttcactaggggcatcacaaacacatagttttgctaaaaaatatgtagattttttaattaaagcaataaataaaaaaagtaatgctaaacctaaaaaatcatatattactgtgtttgaaacgtataaattagtgtttaagtgaatctccttggatgtttcaggtttttgatttgattttgaattattaaaatattaagaaaaaaagagaaatatagagcttcgatgagttgcttcaatggtgatgagaggttgcggcgtcaatggtgatggaaggttgcggcgtcaatagtggtggcatcgtggggaggtggtggtggaggcagtgccatcatggtagagagagagagagagag

SEQ ID NO: 923 - DNA, 2211 bp, Cannabis sativa
attttttattgataatatgagtagattattaatacattaacatgcatcttttaatagaatttaacaaactaacagtgacaaaaataaagtaaatgtaaatttatatatttaatctgcagaaaatagaaaatacaatgtatataggagttgtttaacttcataacttaaaaactgtttttagattttaaaaatagaaaacaatttctaaaaattaataaagatcgtttggccaaattttttaaaaataattattcaaaaactaaaaaacagaaaacattaaaatgtagttttcaattatcaaatcttgtacccgggccggacccaaatcttgacccaaattggacctggacccggacctcaacctggaccccgaccttgtacccgggccggacccaaatcttgacccaaatctcgaaattagacccgaacccggaccaggacacagacctcgaaccccgaaatcggacttagaccctggccaaggacctagctcaggtctggggtccggggtctggagttcgggtccgatttggggtctaggtccaggtccgggtccgggttcatgttttgggtctgtgtccgggttcgagttcaggccgagttctgggtttgggtcttggtcgagggtccgacccgaaattagatgggttcatgtcatggtatgatgtagaatatcaattttttttagtaaaaaaaaatttaaaaatagttttaaaaaacctaagccaaacattattaaatttttaagataataaaaaactgttttttgttttcatttctaacaatacaattctgaaaactaaaaactgaatcctataagtaattactatcagtgacggatctagttatagccctcactaataaaaatattgtctttttaatttgataaaatagtaaaaatatccccacaaaattagataaatttaataatagtaattataatataaatataaatatttttttatgataaatatattccacaaaataaaaattctagacccattattactttttctcttttaaagacgttctcagagagcacgcaagcattcaaataccgtttgtgtttcatttgttgtaatatatgctatcttgatttgtaacttacattactaatatgttgtttgtaccattatcagttattataatatgtaccgaattaaaatattaaaaataaattaattcaaaagccatgcacattttattctatacatatacactaatatcatacattttggtcggtactttgtcgtatgacatcaatcacgcaccaaaaaataaataaaaactgttaatagaattatattatagcactacaaggcttgatactctttactattctatatcacaataatagaccctttttcttgaactctcgttttggttgtgattttctgactatgttttaagtggacccaccatttctttttcctactacaaagtgcagcttgcccttttcctttccctacaattgtcatatttttattttatattatttttcccgtttgaaaacaataattttaaaaaaatttatggcattaaaattaataaaaataaattggacaaaatgataattacctctgtataatccagaaacactggcataaaatgccaaatctataattctgactattgaatctccacccttccttccttatcatactcacctctctctatatctcgttctctctatttcttatttattttgtttttcacaatattctcatttccttttttttcgtttttttcatttttctctctttcaatatcttcttcgccgttattccctcttcattatccaatctctaaaacccacctcagactcagagcagccctctcttcattcatggcttctcaataaattttataattgctctaaaaaaaacccatctctgtgtggctatctgtctcttattactcaactactctttccttatcgtctctgtactttcacagtgcattaaagaaaactttccttttcattcctccaattccgatagctgtttcttctacttggtaattatttgaaataactcctctgtttttgctcagcttcgtttcagattctaatgtcgttttttcattattatgtgagatttctttttaattgagtttggaaagtttgtccatttctttggtgggtattgaatgctttatccttaatactactcggtggcttgtgtttcaaacttgttctttaagatatatata

SEQ ID NO: 924 - DNA, 2436 bp, Cannabis sativa
aaaaaaaaaaacataacaaaaattgaatcttttctcatgatccaatcattataaactgatttgggttattattattaccttcgggacacaaaaggaacaacctcaaataagaccacaagcagcttggtaagtgctaatattgacaatataccaaaatatgaaaatattacttccacaattaatccttttgtataaatagcatatattttacatattattgcatattttattctacatatattctaaaaaaaattatatattcataactaataaaaaaaatattaattttttgatgtaatcaactttaaatgtaataataattataagtgagatacggtcataataattggtttgaaatttatatgatataattaaaaaatataattaaattatattagatttaattttattattattatttaatattatacaaattgccaaccctataatagtaggatatagtattttatcctaatgttgtattaaactagaaactaataatatagaatgaaagtatttcataataaaataacaaaagtatttcatctatttaaatacaaatgaacaaaataaaaatcaattaattttatgacaatttatgcaatacgtaaataaaaatttttttagtattaataataattatttttatttactattaaatagaaatgaataaaataaatttttttttttatatatatacgattaaaaatactaaccattcaaaataacttttaaaattaaaaatatagagtgatttatttatattagttagattgaaatttattagtgtgtttatagctctgataccactaaaataaaagttaaattataaaaatttaaaatttacatcttatatgttaaataaatcgattcgtggagttggacactacttacacaaagtcaaattaaagagtaatactcttaccatacacgtcttgtttacgttcgatctcaaaaaaagaataatgtttaaattttaatcatcaaaacttatctttttatgattcggtgtcctctttagtcacatatattacattcgcaattcaaagtctagagacgatagctgacatattgcttgtaattcaagtcggtacggtgttcagcaccgcctaatagtaatgttctaagattaatactgaaccttaatttataccctttctttgtttagctcttgagaaacttcaaaccaacaccaataataacatgcatatataaataggacaatctatatacacataaaaacttcatttatatcatatagttaaacaagaggggaagatgatgggagttcatgaggcctcgtaaccgagtcaagttttccacccctttcacttctgctattctcagcaaatttaacacttgcttggtgaaaacccttctctttctcactcaaactccattcagataaataataatcctcttcagtactcactttatcattattctttgaagaagaaggaccacagaacataccaccccattgtggaaaatagattaatgttattggaagagtacagcataaaatcataacacccattagagttatacctgtttcttttgagtattttgatcctttaaagaatatcatttgtgtcaaaactgcaccaacatttccaccccctcctgtcataccagatataacccccaatgacctgaaaaaacaaacaaacaaaacaaaacatataaagattgaatcttttctcatctaatcattataaactgatttgggttattaataattattaccttcgagacacaaaaggaacaaccccaaaagtaagaccacaagcagcttggacaaagaaagagaataatatcataacaacaacagaggaacccaaagagcttaactgtccaagaatcacacacaaaactccacccaatgtttgcatactccacagagcccaaagccttcctctcataccaaatcttctcgacattgcgtcggagataatccctccggccggtctagccacgatattcgccaaaccgaaactcgctgcaatcatccccgccgtgtgaagattcagattaaatctgtcaaaaaaatactcagctatgatattatctatggtaagctccacaccaaagcagtatccatacgttagtgctaaaatccaccctctatagtttgtgacaccaaaaaacaaaacgcttgagaatttgtctttgggtttttcccctgatttcttcaggctatggaagtttccatctggggtgtcttggccgaagaaaaagatagcgaaagctgtcatcatctgaaacaaagcagggatgaagaaagctattctccaagctgtgaactttactgctcccaagtctcgtataagggaaaatactaaaggcataatgagttgggttgcgccgccacccaagtttccccaaccggcggcgactccgttggctccgccgacaaccggagcagagaacatagag

SEQ ID NO: 925 - DNA, 5366 bp, Cannabis sativa
atatcatcaatgtttatacaaaattgaatctcttggaaagagtaaaaacacctggtttggtgtttcttcatctcattttctatagccatgaactagtaatcaaaatcttacttcaaagaaaaataaaagttagtactaaaaatggagattcgtgttcctcaaaatccaacagttataaacagtgttcctacacctgacatatatatacataaacatatttagggagggagagagagatggatcagttggttaattaatggagttccttttctaattgaactgaatccctcgtgtttgttctacacattttgtaggctttttctttttgctccaacaaaatgttaatataataataaataaatatacaaaaaaaaaatattaataataataataataagctcattaatttcaaggctgagcaattcccttcttgacgagcatatcgtatactttgtcaattctactagggtcaatcttgaaaagctgatgggcatcagattttttagtaatgttgccactgaaaatctcaactgacataacctcttgcatctttagatatataggtggagttaacctcgtctcactacatagccgtttctcctgccattcaaatatatttgtcaataaactacaactcaaatttgaagaacaaattcaatataatatatatatatatttgtgtgacgggggtacttacagcttcagatagcagatctgcaccattaaaacccatgacatccatgtctccaatagaggccatgaaaccacctccttgactgcttggaccaacatgagcaccttcctttgttctaccaccaacatcttcaacttcccttttcctcttttgttcaagatatctattggcctcaactgacgttcgacagccagctgcgcgtgcctcctgcatacatatataaacaacattaagaccctacacgatacaacacaacacagcaacaaataaaaataagtgacttaccttaagttcttgaattcttttaagagttcgatgctctgaaatgacagtccgaagtaattcctcatgttcttccttggaatggaaacgcatgaacacatcatatcgtcgacatattcccttctcttcaggcaataagtcattctcaaaattgttaggatacaacagatttctttctaatatgaaatcctttcgacgcttcctctcatctagcctgccaaaacagggaaagagaaactcaaattttttgaattgtatgtttgtatgaaaagtaaatatcatgcaaaaaattcatctgagttataatatttttgtgctaagcataaagtcccctccatctaactgtgttaacatttctcacgcctaagataaatagacaatttgtaatagcgtagcttgaacactctaattgacacattacacaagtttcagagaaaatgagattcaaatttttgcaacctacctctttgcatatatacgaagcactctcaacttaatttcacgctcttcctcagtatcagcatctttgaattccatgtccgccaataactgctcagcatcattatcatattcaggatcaaactccagtcttttggagttataaccactcatttcaaccaaagacccttcattccccaaaactggccttttccctttaaaacccctgtctgtatgaggatctgccagcaacataaaaaaacatagtataaatatcaattttatattggtccaaaagaaaggatcatggttatcatcttcacaatacaattccacaagcctgtgtcccgaccaaggtaacgatctcaaaatgttgtgtgaccaaccatttttttccctaaagaaacgagaaccttgttttaattaaggaagaacatacaaggaaaggtgtaaaccacacttggagaaaagacgatagggagaggtattataaagatactccattccctagctaaatctgaaaacatgcttacaagttactataatcatcaaaattcaaaacatgaactcattacttgtgtttaagatcatcagattttttattatccatttaatttagaaattttttgtgggagcgatttatagtataagcatgtgtgtgcatgggggtgttcgctttgcatatttatatttgtgctgagggagtaagaaagatactaaagtaaccaaacatttgtaaacaagtttagaagctttaaatctaaccttcaacttttacaatcggaccatctttaacatgggttgcattaggctttttgttagcagcacctacgtttgccccactagaacgaggcccagaatctgcatttcaatcgccattaacttcaagtctaatatctaatgcttatgcataaactgaaatccaagtaaataaagaattttccaaccagtatttaagctagatagtaaacggctagaggagccagctttgtgtgaatcttctagtctgatcaaaaaaaacaaaattcaaaatgataaaacatcaacttccagtctagtcacttaaagttcatatataataatttcattagagagagtgatagtgttacttgatccttgatggagaaaatggagattcttctttaatatcaagctctgaaatcatgggtaatcctgtgatttgggaaaaaattgatagaacacataagtcataaataatgtccaagaaaatttaatttaaataaaccatagtcgtgaataaactgccacttattgatcttccaagtcattccaacccgaacatctaacatatacattgtacagagaaactactgacactgactaaataagcagaatatccatgaacctttccttgctttaataagtaaagcctgttgattatgaccttaaatccccaccaccagatctatcatcatatttgcaaatctagtatgataaattctttttaacggtaaaattcataatgaaagaaaacaagaagaaaaagtgcaggaagagaaatttctcacctttcttctcttcactatgccccttagccatggcaagaagttcctttctgttttttccaacaacatgagacatgtccttggatagatacagtcacaaactcaattacttccatcaaaagttgctaataagaaaaataattcataatctaaaaagacgtatcataccggaagaggaaatagtggagagttcatgtatacatctgtatagtgattgatacattgctctttactctttgtccccacatgctcagcaatttcagtccaatttcccaagccatacatttcaattccctagtacatggaaatcaacttaattcaaaatgaatgaaggacacattactcacatgcgcattccattcataccacccctttttttttcaaaatactaaaagtcacaagggaacaaaaaaacaataaaagtacctctagaagcagtatctcatcatctgcattccagtcggggcagataagaggaaaagataaattatcctgttgaatgaaaaatcataaatacatctttcagtttccattgtgaaagaaaggccagaattgatataagggaatgtaaagaagctggtttctggatattctttccatatatggaagagaaacttgttcacataagaggttggagaatatataatagatgttctaaaggaaagtcagagtgaacagttaaccataagcctctcaaattcaaaaatcaataaaataaataaaaaaattccagctgtaaaatattgctgaacaggaaatttttgcctaagataccaccttgctgcttgagaaaatggtgcttctatgaatagcacaaaccataacgctagaagtcaacaaataatcaaaatgaaaaagattcacttaaaaggtattactgaccataaccctgtaagggtgattgcttttatgaggttgcacctcagctccaacagaaaaacactctatgcacagatcaaaatcagcacatgtgcaacacttgattcgaatcttccctgtaatatccttgttgcagtaattgcaatggtataaagctttcccttcactagttccttgacctgactccaaaaaagaaacattaaagtaagttgaaaggaaagtaaaagaaagaagggagaaggaagaaggaagaagtttccaagcgaaatgcagacaaccaacaaccatagtggccatgatgttgatgctcttcaagtgtaaaaccattacaatgacaaggatattttacaagtgtttctattctaacccaacagcacattaataacttgctttaatatgagggaaccgggaataagcaacaggattttcaaaatataaatgaaaagctcagcatattaagttattaacaaaaaagcacaatgcaattatacctttcaatactttattaactaggaaatacaagctagtgtaacggtacctgctgtggtagattctaaattttctccgctggatgcatttttctttctccttgatctggaggaccaaaagtggatattcagattaaacaaagcaagtatgccaataataaaatcaaattggccaaaccatccaaactagataatgacaaatgaatccatgacaggaaacattaggttataacagtaaaagagacaatatcaaacataatgtggtcagaatcatcttaaaccctaactaacagcattagcatatgcacagtacaaagaaatcaatgaaaacatactcacacaactagaaaaaaataacccagaactcttctgtgggaattcaatcaaaatcatgcggaataggaatgcaaagtacacttatctccactaaacacttttcttttatggcctgaaagccaaagatttggacttgaaatttcattatacactacatttctactcctttatgcaacttctcaagtcttcgataatttttcaaaactgaaaattcaactaaagacgaagtgtagaggttcgagaaaaacagcaaacaaataatcccaaaactcaaatttccacaacttcaaaatgggacctaaagataataacaattaaaaatattaaaatataatgataataataaaaagtaacgacctttgagtggggtcctcgtcaggagaatgaaaatttccacgagaacgacccattgttgattttctgaagttgagctcgctcgatagtcagtacccacgagcggagcccctgaataaacccgagaacagaagatattgtggtatattctaccaaagttggagtttgtcaaagtagagaggtacttgctgtgttttctattcaattctgtttcgaggaaggaattaaacccaaattcatgtctgggttaaacagtcatttgttctgggtttttatgggtctctctccaattttgacttaatttcaagattttcgctcccttttgaggattcggatatttcctcaactggtccagccttatttttctta

SEQ ID NO: 926 - DNA, 2909 bp, Cannabis sativa
cagaatgaaaaagaatgatgtgattttaacatagcattctccttctgtgttccagttctttcttgaaacagcatggtgatgaggaagcagtatttaaaagctttagggacatcaatgagctaattaaagacatgttagaaatcaagcaaagatatacaacagtcgagactgaattaaaggacatgcacgaccgatactctcaactaagtcttcaattcgcagaggttgaaggagagagacagaagctcatgatgactctgaagaatgtccgggcatccaagaaagtaccatatttaaatcgctcctcgacagccccacttggaggtccattgacatagcaactgtaacaattgcttaagttttcctcatttgcggagggagcatccagaatcgctctttcactcggctgagaagatttagtatttcaacaatgctttgctgcattatgtaattatgtagatcagaggtgaatgttcatgggcagctaaaggtagtgcagagcagagggtcaactttcaaatgaaaaagaaaaaggaaaggatgtgtaaataaaaacatcagttggttcatgtcactgatttttataggaccataagtacaagtccctataatgtacaactctaattttctcttcttccttttggaagaaggcttgggttttgggtcatcccggtggtgtaacttctactgtatagataccatttttcttaatagacattagtaattctatttaaatatcttcgaaaaggataggaagcgtttctccaatttttttctttctttctttctttcatttatttaatttcttaccctttttctgtgcgaagagtaagatgtgattaaataaccctttgctgctcattctcaaaggagaaaatgatatggtaattctatgtctaatcaaattattcattaaacaataacagatgcttcataattcacattgggtccaaacccataatatagaaatgatcacacagtactttatacatgtcactggaaattaaaagctatttttttgttcattagccagaaacagaaacagaaatcacaggtctgattatactaaactcaaaacaaaaaccaatgaactcacttctataatatatatattttcctttataattcttttcattccaagaaaaaaaaatgttttggtaactatgtttccaaattcaatccaatattatgcaaccagtcttttctcattcacatcaacactgaattaagatgtgttatgccagatgaaaccagaggagtcaaagaagcaccaactccgcttaacttctctgtttgtgattagagaactgtgattctgattagagtgtgatcagcaaccaatggagacacatgaagccatactaaagaccaactaaagaagctatgttattctggtcacctcgggtcccagctgctcgtggctacaatattgagcatccacaccggttcatgttcttctttggcaaatcattctgcactttgtctgtggaaaattaccaagtgctattattatataactgtcacataacccaattctgtttcattgtttcataagataatcccatgttcatacataaaaaaataattctttaatttccaatgtttgaaatgaaaagtcaagttagccatgccccatgttctaaatcaaaccataagctgtagttgagtcaggataaaataatggaaatgtagattgggtgaaaggtaaagatgagtactttagtgaagtaattaccagggttcttttctgaaagaggagggcgcacgacaacgtgcatggtaatgacacctcctggaagatcaactggtagtttggactcagcaagtgtcctgttattttccaatatcttccctgcattaattagcttcagatcatttattgtccttggactactttctttatctgttgaaacaaaagatagagctcctttagaaaatgtggattatttcaaactaagtatagaggtcttgtttagatcatcatgttgaagctatgctaggattagaatttagaaatttcagccaattttttttatcccctttgtttacttgtttctctagacattcttttgtcaagtagatgagaaactttgagatgtggtccatttgcaatgaataaggataccaacaatgaaaaaaagaaaaaattaacacagacaacattttcaagtttgcacttttcaagaaactcatagctaacaaaattaaatttccaacttctatacaactaaaattaaaattactcaaacagatcgtgtttaatctttgcttagtattatttttttagctgtatgataaattaataatgactaactgttaagacagacatcttgtgcaaacaatatagatcatgataacaacaatatgttttaacaacatttgtttaactcatcaaaatccaagtgggatttcaatttcagagcatcatatatctcaatgagttcttaccattttcagaaatcgcaacaaggtcaaaaaaaaaaaaaactcaaaacgcgagtatagtggaaaacaaaatgagaagctcaaggatttaaagctatcctaaaaccagtattatcaagattcatatacaagaaccaaggaatctgaacaagatatctaaagaagaagctgtattaaaagcagtacaaaggaacaagacatttaagcatataaattcaatgggtaaaaaccccaaaaaaagaaaagaaaagaaaagaaaaatctgacctttaggccactgtgcaagtattttttccttgagagatgccacagagacagatgggctatacttgcttggcccaatatcagtgccatcggagagcctgaatttcacttcaatcaaatcttgggcagccatcaatgaaccttccaccaaagaaaaacccacttcaaattctcataacagtctccaaagaaggtgacaa

SEQ ID NO: 927 - DNA, 4013 bp, Cannabis sativa
tctgctgatcattagctttttctcttatgcaggttttcttttgttagagatacctccacagtgaatgctctcccacttaacagtgaattatatcatacaatacttgattgaagactagtatttcagtttcatttcttatattttgggcacaagatgaagtcgcgggttatttcattctgccttcactttagttttgccttcctagatttacagttacccaacaatgtcttcttcttttttttttctttttagaagaatttcagtagttttagtcatttgttatattcttcttccttttggtttgtaatttagtgtttgatctcagttcagtgtgtaagttatatcattttggtttgtagggtgatctttggcaaaagagaatgtattgaattaattgatcttttgttactattgtcttttttttttaataaaaaagaaaaaagaaaaaaaaaaattctcctttaagagaaacatttcaggtgtggtgttagctgaattgcttgagaaacttatagaagtttgctatgttgtacaaattcctaccttattaggtggagcctcatgctttgatacacctaactaggctaatgagttgaaatgtgaccttgatgcacgttacacaagcattgaactttttaaagctttatttttggttaaatagtcataaatctaagctctttcatgcatccaaatctgacatctctccccttacataaaaaaaaaacaactctgacatctctccaataaatatttttttaaaacatttttgaagcaaaaaaatatactaattgctcgtaagatcttgtaagcccttcatttcataaagggtttgaactttgaagacttctaagagcatccaaatcttaaagcttttgtcactcttttcattttctttgagaccaaagtataaatctcaaggcttcctacttctctttggtctctttatattaagagcatccaaatctaaaagttcttgtcactgtattcattttcattgagaccaaagtataaatctgaaagcttactagaaatttcttgaaaattaacggaatgacataccatatatattcccaatatattatatataatttattgttatgccaaacaaaatcttagaatgttttgacttggaaaaaggagatgagtaaaaatgtattaccaaaccaccgatttttttttttttggacaacaccaatttcatatatatagaaaaaaagtagtagtaataatacatcatctaaaaatgtgcaccaaattataaacaatttcgaaatatatggtaagtaaacaatgagaaaattttgcaccaaatatattcaatcagccacacgtagtagtatatataaacatatggttcttaaagaggagattcaaacaaacagcaaacactatgtacttgcatcgaaatttaggccatatgtacatttatggtaacggttttctttcccatataaaccataataacccttttttgcagaattcataaagctgtacaaaaagctatgcaggtccaataaatagctaagactatttacagaggaatttccataaatgctcccaacctattccggacggaagctaatcagattagggagggcaacacactgaagaatcttgatttcagatgcagttaccttgcaagactccaaggttagtgatcttaaattcttcagaggttttaagtgctgcaaccccgcattggtgacgcgagaattcgatacgtttagagagactaatgtggttaaccctgcaattggtaagaaagatgagaaatttagcaaaattacaaagaaaaaaaagagtagatatctagatgatcacttgttccatctaacttagattacacatagaaaaggttgcagcagcagttatgttttaactggaaaacccgaaaggtaatacagctaaagcttgatcatgattcaaacaaaataacttaacttgttcaagtcgagactttctcattttgcaacgaaattatcactaaaagtaaaaaagaaaaggttgacattgaatggaagcataatcttgatatgggataaaagataccactgatgtcaagtggtagggtgagtatgtgtgggaggtttcaaaccccatatagtactaacaagggctaaaatcaaaaagtatactagagaaaacttttcttttatttttcttggtgccccttctcccaaaattcgatgcatattataatctcaatcaagacctttacttcaaatgattttaagagatgaagatacctgaaatcaattccaaggtcttatttgtcaagtgacagttttgtgacaaattaaggcgtctcagggagacgagatcttggatacttttaacacctgcgtcagttattcctccaccacatatttcaagggattgcagcttcttgaagcctgtttagcacgaaaacatattgggacaacaaaagttagcatatcataacaatatggttaagctaaaaaaaaaatcaattgaagccgttcactatcatcaaatttggagaacacctgcttatgtacttaatggaaccagagttgcacaatcactagcaatatgggtgtttttcctgtctactctttagatcattgaaaaagaatatgctaagctaattttatgaagttggatttattcttcgttagctgcttcctagaaacattaaatcaatagattctagaaacttagttagatccaagcaaaggacttgtaaattaacaagtgaacactgtactccttgatgttagattatagtttaaattcacagtctgcaagcaacttgaactgaaaagcttccaacatttggtgagtaactaatgtgcataaaaaattaaagtacgaatatattatgtaaatatataaagcgcatttaattcccatgcatgttatgccaatagaaaggattctcatgcatgttatgccaatagaaaggacctcgtctaattgacgcaaaaccagagacatgatcatatgcactgactagacaaaaagggatcattactgcaattcattaacatacatcgtaaatacttcattccagaatctgtgattcgagccccaaaaagatccaggtgtgtcaattcagtaagatctgcattcacaaagcacccaattaattgactgacattactagcatcagaggccctgcttactcaatattttgaattagaggataagaataaagaaaagcgtaaagtcaggagacttaaacttggcctaattttaatcaagtatagagaaaacaccagtcagagaaacagtgggtctagagactctaaacttacactaaaatacttacttgtaagattttcaagtccttcgtcagtaatttggcgtgcatccaagttaagagatttcagcgtagtcaatttagacaactttctcaaaccaccgtcagttactaatgtgaatgacagattcaaattctccagttttgtcaaacctaaagagcaagcaagaaattcataaatcaacggatgcctttcaaaccatatattccaaacacatggggtccaattatcatagcaacaaaataaatatcaactaaaataacaaactctctcaaacagagcttttgctcaacatgaactgtacaaatcagtactagcgtttcgagaaagaaatagagaaaattagaagcagaattcatcaactgttattccgagaacacagtcaaataagctcacagctgtctcttcacagttagtgactttttgcagttctcatgtcataatattattttgagtatttgtggtcaaacctattaattaatagcatgaataaatagaattctgacctgagagataacgaagcccattactcccaacctctgtatcagacaactccaaacctcgcaaaagtgtaaggcctgaagaaggaatcaagatacttatgtcgtatattgcaaaaacaagatatacaagtctaggtagattgtgaaaatcaggactaatggtaactcgtaaggaaacaggacagttaacactgtaatatccaagaaatgactacaaaattacatc

SEQ ID NO: 928 - DNA, 3548 bp, Cannabis sativa
ttgttgtattgcttctctttcctccgcccccatctattctctccacttctcctcttctcctcctcatcctcctcttctttcttccattcttttttataatataaataaataaattcaacgaataaaaataaaaacaattttggcttttctgtcttcttttcttttatttatgttttttattcaagcgcataatatagacccctaactaggatctgatccagtaatctcttcttcaacaaaaaccgctccaactgtcgccgccggaataggttcccgactcctcttccctcaggtatcttcttctttctgatcaaagcttcatacgagaacaacttatgtggttcgcgttcgcagcacctccgtccttccttgctctccgattggtcaaagcctcgatctactctcgattcatttggccaccgttgcttctatgcacctccgtttttccccggatctaatcgccggtctgaagactgagctcgccgtctgtcctaagtttccttctttgataacgaactttactttctgtttttagacatgagattagaagctgttgagtaggtttgagctacgaagaatttaacctgttatcttgtttttcggtacttggaagctttaggtttgtcgaactttagctcggacttgtggaagttgaagttctgtgattgaagagagaagagaaattacatataaattatatatttatatatttataatttggtatttgatttttacatatggctatggaggatcgaaggatgagtgtaggaatgtccgatgaggtactcggatgtgtgatgccttatatcgacgacccaaaggatcgcgatgccgtttcacttgtctgccgctcgtggtacgagcttgatgcgctcaccagaaagcacgttacgatcgctctttgctataccacaactcctgatcggcttagaagtagatttgagtttctcgagtctctgaaacttaaggggaagcctagggccgccatgtttaatctgataccggaggattggggaggtttcgtcactccgtgggttagagcaatttctgagtcttttcaatgcttaaggtctttacactttcgccgcatgatagtgaaggattcggaccttgaactactagctcgctctcgtggtcgtgagctcgaggcgcttaaaatcgacaagtgctctgggttctcaacggatggccttttgcatataggccgcttctgcaggtattcttctttaattacatggttttgattagaaaagtagaagaaatatctttgaataattcgattcagtttgtagattggtgctaattaaatttctttttaccaatttttctaaattagttttataatgctgcaagaaaaattcagttcataatattcaatagactaagtgaagctatatttttctttcgcttaaatggataggctgtattatatggctgagcttacttcctcttttatacctgtaatctttggaatttagggggcctttctatctgtgatggaatatgaagcatttattatgggatgcatatggttcacatattaccttgttttcacactgaaacagtctcatttatcatgaagttttttttttttttttttgaagaacatttatcatgaagttagtaattagccaaagtttgttatttgggttttgtaatttcgacatggtgagtctaagtatgtaagaaaaagattctttgttgttgtctgctttgggttgtgcagaagttatatgccattatcttaaatgcattgtagacgttatatgcagttttctttaatgcgtagtaaacgttatatgcaattttttttttatgtatgcataatagacagatatcttgatcgacttatatttgaagttcgccaaaactagacaaaacatttgcttggtatattgatttctttgaattttaaattacgggtttgcaaatttagtatgttcaccttaaatgtagtacatctggaatttgaaaccatactccaccttactgatattttgaatacttgttttatttcgggaaataaaaaaggccaggttgctcaaagtttgtgattttgtgaggaggaaaaaaaaaacacctatttttgtatcatggtggcttaaaaaactgaagagttgttttattgttattcatatcctttgcaacaacaggctatgctggacgagactagacaaacccctatttcctttgaggcgtagtaaacattatatgccatttctttattgtgtatcagacaacttgatcgatcgacttatagttatagtagtagttagccaaaactagacaaatcctttgcttgagatattgacttccttgcattttatatagtgtagtcttttaaggcgtgtcactttagtgtgtccaccttaaatatagtggatagggagttcaaaaatatactcaaccatgctgatattttgaattctggattatttcggggaataaaatggccaggctgctcaatgattagtaattttgttagaaaagaaagaaaatgaaccctatttttgtctcatggtggcttaaagttaagagtgttttatcggtgttaatatcctatgtgataccagactacgcaggttgaggatgctgggttgtgagtgctttgcataagtcactagctctatgtatgcatagatggaaagaattgctaaatgattggatatgaaacattaacaatttgtattgaaagatggctggtcactgtggaaacaatattgacttggaattctgctgtgtgggagaattagagtattatccattgtttattaatttactatggaaagttgttacagattaaattgtcaacaaagttttcaaggttaagaattactttcacctttgaccctataaaaagggtcaaaatacatttgatctagatggtttagtatctgatgccaaatgaaaagatgatttgttaatcttcacttttgctttgatactcatccagaaacttttttttttatcatctaagtgcaatgttgtgctatctttcttgttgaaataataataatcaaaaatggaagtttgtgctttcgtgatgtgtgttgagttatggtctgatgacttgaaggcttgattttaattcttaagtctcgcaataatttggatgttactgaaaagggaatattgatgcatctgcatcaattaagtgtaagaaccatgttattagcataagtgaatcagttgtcaatttctgttggaaagtttctaccccctacccaagttctctggcttaataaagttacattttttcactcccttcttcttctaagaatcgccaattaattatttgaactttcctgttcacatatgattgtctttctgtcttcctctccttttgagtcattcaaccaaatttcttcaatatagtgaagtgaaatggaaggtttatttaaatttaattttgcatcggggtgctaataagagcaagtaacacagtggaaggttagataatgttttgtcatacaaaacaatagacaatagctaatttatttgaagtttgattgattttgatcttgatgtttttcttttttttttttttt

SEQ ID NO: 929 - DNA, 3318 bp, Cannabis sativa
tttgatatatggtataatataaaattatatcgtaaaatagataaaaaaaacttgataatgtattttaaaaatggaatattaaaactgttgtgaatgctcctaatcctatgctcctttttcaaaaataataataataacttatgctttggaaggaaaaacaattaacgaaatgctgatgaaagtagttcataagcaaacatgtcaatgccaagtacaatgacaagttaaaaaaattaaaacttataatggaacccataccaaccctaccttttcatgtccatgttgtatttcaaaagaccaaataattctgtattaattctcagaacaacctcatcaaatttagcgatataggcaactaacaactcgtgttgaatttatttgactcgcatgaaacaaaggtagctattatgacaacatgctccacacataataacctttaatagtagagtcactaagaatcgacatgccaagttgatggaaaaaatctttcacctctcaattgggacctcttctatgaatgcagtgttcggttcagagaaattaaaattagaaaagattgatatgacgcccaaaaactagctcgtagtaatgaaattaatttaatacctttacaagctttcattagattatgagctgaacaaaagagcttgccccttagcatacaaaatgatatggtcccataatcgtgttgtaaaattacaattttatttattcaccttgtggcatatatgcatagcaacagacagaagctcctttacgaaaaaaagaagaaggtaatttcaaatatttacaattcatctcacctaacttggtctagcttgactatagaatcatttcatcttataatttccctttttcttctttttattttttattttttcattttttatctttaaaggttttccatttaaatttggaaaaggaaaacatagaatgccttactcatcatctctagcagcaaagttggggtttaaggacatttcaatttcttcaagggagcggcctttcgtttccactatgaaataacttgcaaatattgctgccaacaaggaaactccaccaaaagtagcatacacgggagcaacaccaaatttctccaccagatccagaaaaaatagacccaccaaaaaattacaaatctgaatcaaatgaataatataagttggatttgaaactcaaacttgaatcattagaagcatagtggtgaagtgaacaaagattacgataatagtattctcagagatttcctaataaaataatagccattatttgtaggtaaagttagaaaaccatttcttggcacttgacatgaaagttcaaatttttatttaataagaggaaaaataaggtgaaatagaattgttttgggcttacccaatgaacagaaaaactaaatcccataaccttcccacgtgttctgttgctgctaagctctggtatgatcagaccagtaattgggcctgctcctaatgcaaaggagaatatatacctacaaaaatatgttaatatgaaaacatcaatctcttgctcgtctactccagaaaattagagtaattggccaatacagcacagcaaaggcttcacatctttatgtcacagtatttgcgaactcccctgcactcaagggggaggaagctaatctccacaaagaaaattaaagtaaaacaacttacaaaagagttcccagtattgataaattgtgaccaagttgttcttcaactggaaaagtgattgcagtggccactaggaacatagaaacagcctgccaagaagcaaaagagagttccaactaaatcatttgcaaacaaatggaatataaattccctctcgctctctctgtgactaatgcaactcaccattcctccatagcttccaaccaagagcttctgtctcccttgcttatcaactaagtaagaaacaagcatggatcctgaggacaaacacaaacaaacaaaagtaaagaggtcttttcaggaatcatgatatatactacacaggcttcgaatctcaaacctgtaaaattggtaattccaaccagtaagcttgcagaagcgctacttgaaattccaacatcttgaaaggtcaatgatgaaaagtaaagaactccatttataccagaaaactgttgaagtacaaaaagagaagctccaataaccgcaactgcaagagcacatgaatattcaagagcaaacgtgagtatgaatgtcacatcaagttagcttgaagttaaataaattgagatgagatggataattcaattttcactgccatgagagattggatagcaaatatccagccttctaaggaatgaaagacaaacatagatgtgattttaaaacttcaaatatgaaaaccacctttacacaacctctagaatgtggctcttctaagagttccaaccaattgctgttcacatcatcatctttaataactgcttcaaaatcactaattgctctttccacttcagattctccccaaaggttctggataacaattttagcttcatcctttctcccaacctgcacagacaaatgcatatggcatttccataaataagaaacaaaaaaaagcaaataaataaaaatttatgacagtacaagtgcctaaagaagaaacctactttacatagccagcggggactatcaacagcaaactgcatgccaaatacaagaacaaaaccagggatacttgcaaagtaaagcagtgtcctccacctatgaaagaagatgaatcatctaccaagccatcttcagaaatgaacgcgccttgaaaactaaaagaaaatatttattccgaacaatcaatagaggaacaccacaattattcctacaatgcaataggagcacaatattacacttgaagcacctgtaccttctatttggatcttggaattgagaatgggaaagaaaatgatttccaaaggattctaatcttttcgtgtttggttttttttaaaaaaacataaatgaagtatcattttataatattcagaacaattataaaaaagggaagaataaaaaaggtttcttacaaactttttaggaaattaattttctgaatttctcccacaaatttttgcatttggtaaaatccaaaattcaaatgctttaagaagcaaagtctatacagaatacactagatatacactcaaatatatacacatcataacacatgacttcacaaaaccaagaagattcaaaaactgatttcctcgtacctcctttaagaagcttccaaaattatttatcaaattttctctcagacacagtagcacacatagctaaacatgcaattaaattataaatggagaaaagaaaa

SEQ ID NO: 930 - DNA, 2171 bp, Cannabis sativa
  modified_base (1614)..(1642): a, c, t, g, unknown or other
attggatattaaattatactaatatatattaatatgttatattttgtggaatttaacattttaaaaaaagtaactttttaacatttttatttattttatggctgagtcatatttcaaatcattgaatacataattatatgtttacttctctaccacgctgaagttgattctcattatcaaactatttttcatatataaattttgacattatacgctcaaattccattttatattattggatgattttgtggcatgaaattgagctaagtttcactcattcatataaaatcccaaaatatatatgtaaaaaataaaaaaaccaaagatggtgaagctaaagaggccgacaaagtagcgagcagaagacaagtgttttcttctccaataattaataatattacgtgggtgcacacgtaaatcatatctacatatctataattgttaaggaaaacaatggtttaattaatactaaatattccttcaaaaaaaaaaaaaattaatactaaatataataataattaaaaaatgtaaagcaatttttgtggtttcttccacacatggccttgatatcttctttccacataagaaagagggagagagagtactaataaataatataaacaaataaaatcaattattgaaatcattatatataattaaacaaaatttgcgcttttataatcatctttagacaaagagacagtttttctaaattgctaaagttggaaaagccaaatgataaaataaaataaattatactagtttttttttattatttatatataaaaatatatagaaaagaaagagtagcagatagatgcaaaatcagctttcacactctttagccttgaaaagagataattatttataataattaagttaatttttggaattgaaaaagggtttgaagagttcatgcaatgatgatgatgatgctgatggaaaaacaaattagagaggaggaaagtgatgaaagtgatgatgagaccataagacaaagtagtttccgggaaagtgccttctttcccgggaaagtcactctcatgtaattaaaaatatatataataattattataagaaaggtctaaaccaatatgagtgatatacatattttggagtattaattttaggagaactttctcatcattcaggtaccatctccaccaatcatgatagcgtgcttataacgtgtgtacatatataaatgtaactttcatgaaaccccatctcaccactcatcaccactaccctctccaccgtccgatttgagtatttatccttaggcctcaacctgagatgcgtttccattattgtgaaacaaagaatatcaatgtatatgtatttggaaattagttttgattcggtctcatttataaataaaccaattaatacttttgtttctttatttgaatgtgattttacacccaaatgattaaatcgtatacaattaaatttagacataattagaacaattatataatttttcattaatacggttcctgtatgtataatatactattttactttgctttttctttagatgggacttgatattgggaatttgtctttttttttggggggcttgattaggaatttaataataataataataannnnnnnnnnnnnnnnnnnnnnnnnnnnnataataataataataatagcaaatctccttgtatataattttaattaactacccatataaaaaaatttggtgtcaaaataccaaaatagtgaatttatatttgcactttactacttattaatatttatgtaaaaataattcaacttaaaaatttaataattaacatgattatttataaattattttaaacaaaatctaaaagttaaaaaattttgtcgtcaagatttttaagtaagtagttagctgtgtaataaataaatggttaatttgtggcctaaatattaaaatttaatttatatttaagttatatttttgaaatttaataattatttaggtgttattttttatttatatatttaaattatttaaaaaaaattaaatttaaatatttataccacaaataacctaatataaaattctacagtaatattttttacatacataaaattaactacaattttttttaatatagcgcccatgaccacaaaaaactaactacaattatatattcctataataataataataa

SEQ ID NO: 931 - DNA, 2224 bp, Cannabis sativa
aatcaaaaatgacaaatttaaatcttctatatatataatatataaagatagtgtactgtaattacttagctgtataaatagacatggatatgaatcaaaaaggacaaatttaaaggattaagttacacattaatatggataatagtatatatataggtgtataagctataaatatagaacaaattagggagcagcatgagtctatggagggctaaaaggacctttttgaaatatcccaaaaagagagagcctttattgtcattttgtcttttaacacatatgccctatacaaaagttgttagctggactagtagtagtagtagtagtgtctagtaggagctcccatatttttttttctttttttttttcctaaaacaaaacaggtggaacttacatttcgtcttaataaagttaaaaaaatattactcatggacctgcttaatcaattattaattaactaaagaagagaagagaatgtacacacacatcatataataataataatatatttatgttttatatatttaatatgactgactgaccaccatctattttctctctctcattctctctcttctgcaacttatatttcatctccacaagcttccaaacaaagagaattaatggaaagtgagatttgcaacgtttattcttctggttcatgtgtagaagtaatattagttatattattattattatgtgttggttgatgcatatatagaacaaaaatataaaccttatctgtaagaagccgttaatgggtgtctctgattttccatcttcttcttcttcctttaacactattattattaataatcccaaacaacattcctatggccccattattattcattacagccaatccttcctcctcatattattattattattataaaaaaccagttcaatatattcaaacctcactttcttccataatccatggctctagctgctaagatcatcaccaccaccaccactgagtttcattattattattattattattattgttattgttgttgttgtttctatcagctgattatcaacgaatattccagcccagtttctcggctgtgaccatggttcctgaaccaaacctctcaaaacaacatcacaatcttcttcttcttcaaaagagtagcgatattattattagtagtaacaataataattattatggtaattacgagaagtatagagatcaagagtgttttagtcttatgatgaaccgagccaacaacgaaggatatgataactactgtactagtacaactgatcaatcttgcttaggatctgatctagtaccagtggccgccgccgccacaaccacaaccacaaccaccacaacaactgatccaaattcatcaatggcagaagatgaatccagaacaaacagccttaataataacattaacaaccaagaagaagccggttccacctcaaaacaacaacaacaacaacatcaagatcaagagacagccatgatcaaagtcgaccaagaccacgccagctggctccaattgagcataggcggtacttgcagcagcggcggcgctgagccaacacccagaagaagaggttccgggtccgggtcagagccgggtgggttaatgatagagctggatctgttacccggtggtagtagtactactaggagacaagaggaggcagccaacagatcaagtaatattagtaatgttcctttgtttcaattagggcctcataataataatcatcaagtctcaaattttggtactactaataattatagtactacatcgttaatgtattttcaaaacccaggaactactaccactactagtagtagttctaactttcctgttcctcatcctcatcaaattcctattcaacatcatctttcttcacaatatcaatatcatcaacagcaagaggccatcaattgggggtttaggcctaacttaattcatcatcatcataatcagtatccctcatcatcatcctcctcctctcagttgcataatactaatacccataacaatagtaatattttgatgattccacaactggggtcttcttatttcggtcgccagtttcatctccaaccaccgccggtactcgataccgccgctgcccccgaacccagcttagatttcagagttgttaaccctcccaagaggccccactctggcatttggtttatgctccaagcatcacaaaatcagtaagtgtatagttaattagt

SEQ ID NO: 932 - DNA, 1949 bp, Cannabis sativa
actggggtggtgcggcaggggcaccaggagcttgttgtgcggcaagtagactagcttccggaatagtataatctctactcttgtcactgtaagcctataatcacataaatagagaggaaaatatggtatgagtagggaataacctttcattcttagaagatattgtggtaagacaaaaaaacaagtgtaaaagggaattcaaagtgtcaagaatcatacattcaggaacaaatctttttccatccaacggatccactttggatgtctttacattatatttattttccccattaacgcaacccaaaagcacatattttatacctttacattgagatcagtatgacgagagtatgatagatgaagcttacaatagccaccatcatatatgcaatgtccttctaaagcttctctggcaactgctgcggtactgatatctgaaaattacagctcaaaatcaatcaaatctaataaattttgcaagtaatcatcaaatggttacgaaaaatgggaaggggttgcagacagagataatgaaaaatgaacttgcaaaaaattaccagggtactggaccaatgcctgtgtttgaccattcttttcgaatattgcaattttctggactgtaccaaatgcagaaaacacctagccaaataaacatgataaatttatgaaatatatcaatctagaaacataattgtaagtactcaaaagaaacataactgagaaaagtcctcactgtgttgataacatcaacagtaacagcatactgcatgttctctattgaagcaagaagcacattactctctggctctttcttttttccgtcaggaccaacagcaggctggagatgatgatgaattagtcgtattgaaaccatcttcgaatgaattgagaaggggacaaacataccaagaagtagagaaagatactaacaagaagaatatacctgagaaataccctcaatagcagtaggattcacaggaaggtacggattcgtataatccctgtagaacatacaaaaaagttcacatatgtcataaaatatttccatataacatgtatttttgaaaaactttagaaacgtgtggttgtattaatataactcctgattaacacatctaaagaccatctcactataataactccatgaaggcaatagcgtgctcaattagaaaaaagaaacagaactacttatcagcttcaaaattcaaactcctgagacgtggcaaaagataggaagggcaataccaaattgtcaactgtagacattagtgagctaaaaaggaacttactaaccattacaaagatattttcaatgactgagaaaataaattgcagctaaagtggtggttgatatattgagtcctattcctaagtttcgaaatgcatacaatacaaaagatttattagatgaattgtcacatcgaaatatttaatgaggccctagtcattctcagacaacagtagcgttcaatcagaaagcaaagaggcttttagtttcaaaactcattagggataagaatggaaaagtctctaggcagtattcaaattttgcattagactacacatttttgcattagaaatagactacacattctcttgaaaattctaggtagtatcacctaacaacaaatgctgcaatccaaagcggaagaaactaaggcaggggggaaaagaacgtataagtgtgtgcataagtttacagctcaatcttactgtctattgtgaacttaaaaatataaaatcacccgtcaaaaaaggagatatatgagcaacaagaccgcacaaactatggtcaagaaaagaatgacattaaagtttctagaatataatgccaagctgatagagaaccatctagaaaagaagtaacaattccatttgtggcatttctacaacaacaaataagatgctcttacaacgacattaatgctttaaatttaaactacaattag

SEQ ID NO: 933 - DNA, 8807 bp, Cannabis sativa
acataaatgatgactaattgacaatgatgaagacaataagagggaggaagaagaagaagaaggaaatgagggtgtaatagttataccggagaaaagtgaggaagaggatgggatgggagtcacagttggggctccactgttcttctttccagtcttttaatatctcaaattgcgatgggatgttggcacggaattttgagcttcttcagttttcagtattctattaaaaagagcattttttattaggaaaaaaaagacattctatttattttattttttgtcttaaaaaaacatatgattagaaaagttattgagattatagctcttttgtaatgtggctgttaggtttttgaggttgcctgattggcttgtttgtttgagacttgaacattgtaagcaattatttccgttgattaatgaatattcactttctaatataaaatgagcattaattaaatattaagttttgcaaattgcagttgtacaatattgttgccttactaaacaaaagtgtcgtcacgtattattatttatacatttcatccgagtttagttttacataagactgaaaatatgggtcacgacacaaaataaataggattgagtgagatttttagtaattatgttgtgttcatgtttgagtatttgtctttgacacgtttaacaatcgtgcaatgttcgtgtttaccatattgtgctgtgtagtcatgtgaataaatttaataatcatgtcgtgtcataatcgtgttgacacgatatataacacgaattaatttccatagtttttttaaaaaacatttcaagtttatcttgatatcgtgtaataattgtgttatcgtgtcgtattcatatcgtgtccatatttgagtttttcaatacgtttaataaatgtatcgcattcgcagttagcttaattatgtcgtatcataaatatgtcaacacgaacataacacaccacgaattgctagccttagttttacaatagaaattactcgtttttagtttatttttttaaattattgatttattacagcagcagccaagcatgtagcagaactccatgagagaaaaagaaacaacatttttgttacatttctgaaactgttataaattcactgttcacctatacaatagcacaatctcaacattatttggttgcacaaataatcaccaaaattttatatctacacttgaatacaaaatgctctcctaattatactatcatctcaagttcttaattgtgactgtgaacacctgttgagctacccttcttgggagcacaaacaatgctcgattgctcttcaactttctcgattggaagcttcagcagcggaacctttgatagagtcctacatgatccaaccattatcaactttttctctgtaaaagaatgcagaagtatatgattaaaatgctggcgtacataaaagtaaaacaaaagaagaacactttgtattttgcagttatagaatggaacttacttaccttggctcttataagagcaacgttaatcctatgccagtctccaagaagtgaggaacactacagtttcttggattttcactagaccttacaaacctcacaattatgcaatcctcatctctccctgcaaatatacaaatatctcttcattacctttgtctgatctgactggagatagtatacaagacacgaatcaatatgactttggtacctaaagatgggcatcaaaatcttaagaaaaatgatttctcaaattccactttagaaatagataagacatttaagttaactgattagtgatagagtgccaataaaacaaataagaaaagcaaaactataaaccagtactaaataaataaatcaagattaacaaacctgtagtggatatttgaagaggttcaccacccaattcaataatttggggatggcttcaattaatgttctatttgtatccttaacatgattcatagctgatctcactcaaattactgtaggcatctccttcgtatgttgagcctaaagaagcaaaatctgatggagcagtgtaccaattaatgctgcagatgaattttcattgcagcttagcctctcatccaggacaattcgccttgggcaattgaaactaccttcaacctaagagtatatcattagttacagaacaggaaaaaaaaacaataactcagactattcctacattatactaaattaatatatcttacaattaaagattaaggaaggaatcgtaaaagtagagaagtagaattaactaaaatatataataaacacacaaagcttttatttcaattcaagcataccagcctgtaagacgaagcaaaagagaggagaagccttggagttttgccttccccccaagtgggaaattggaacgaaatcagaaaattaatcaaggaagagagattttgaatattgggtattccttattaattagaatataggaaaatagaaagaaaaggtgatccatatgtttcggttagtctcagagaagagggacaaatcgcaattgggcttttattgggtgtaacgtaagctttgattggtttgttgggtgtacggaggcaccgagttttcgtagacttcactcacaaacttaagtgggttttgaattaggttttggttctggcactgatagtggtgtatatatatatgaagaagctctccaaatggttcacagcccaagtcttcaagatcaaacattcaaagcaaaaacattcctcggtacttactaatattcttcacttgctctttgtctttacatttcccattttgtattttttctagttaaaagtatgtttctgatttgaatttttgtttgtgggattagatatccgaagaacccatggagaatctaaggaaaaacgaagataattcagaggaaaaggtatgctttttttttttactattctttcacccaaaatagaagtttcctttttcaaattccattttaattttatatttgttttcttgcttggcttggcatctagtgtttaaaatgttgagaatgagatattccctggtctattattaggcttaagaatgtacacactgcacagcatactgacaatttagtacccttgcttgaaactgaagaagtatatgtttagaattattagtgacctaataatgtagaatcgtagataatgcaaaaccccattccaagtgaaacattataactatgaccaaaaaaattaaagggtacatggcaattgatgtatcgagagtaagtttaagaactagttagcattgtgttaattttcatttggtgtgttgcattcagattgtagaccaaattatgaccagtgccagtagcagccgtgctacaaatataatccggaaccacgacttctctcaagggctgcattcttggcatgctaacagctgcagtgccattgttgcttcttttgattcagaagaagtggctgaaaaatcagctggcaagtatgctgtcgttgtgaatcgtactgaatgctggcaagggttggagcaagatatcactggtgaaatttctccaggctccatgtattcggtttctgcttgtgttggagtttctggctctcttcagggacctgctgatgtcatggcaactttgaagctagaatatcaagattcaaagactagctattgttttattgggaggtaatggatgctactttatttatttatcaggttgtcaagtcttttcttgttatttttcaaagaaaaaggttgaagattttgtgtgaatgattgtcacaacacagaacttgtgtgtcaaaagacacttgggaaaccttggaaggctctttctcattgtcaacaatgcctcgaagggttataatctatttggaaggcccttctgctggagttgatctgcttatcaaatctgtagttgttacctgtacaaccccacaaaaatcagaggtaattgattataagtttcaagtttttcttctgcactagagttgtgtttctttgtaatgaatttgttaatttcatttggggtattaagctttcacttgatgatagggtgaaagcagtggatgtaccactgctggagatggtaatatcattcttaacccaacatttgaggatggcttgaacaattggtctgcaagaggctgcaagattgctctacatgattctatggcagacgggaaaatcgtcccactatctggaaaggttttcgcttcagctactgagcggactcagagttggaatggaattcagcaggacatcagtggaagagtccagcgaaagcttgcttatgaagttactgctgttgctcgtatatatggtaacaatgtcaaaagttcagatttgcgggccactttatgggttcaaacacctaatcaacgtgatcaatatattggaatagccaagttagtattttatgtactcttctcatttctcatcctttattcattagtattatcactatcatgattcatgatatgatgaattcctcattgaaaatcctggttatttcagtgtgcaggcaacagacaaggattggacacagttgaaaggaaagttcctactaaatggttctccatcaaaagtggtggtttatttagaaggtcccccttcaggaactgacattcttctcaatagtttagttgtgaagcatgcagagagaacccctccttcacctttgccagtaattgaggttggtttaataattcaattttcctcttgtgtcacatttgcagagttgtatcttcaacattttcaatcatgtcataaccataagaagtaccaatttggatttttgccttttgtaatcaggacccaaattttggagttaatataattgacaacagcagtctactgaatggtaccaatgggtggtttagccttggtaactgcagcttaaatgttgaatctggttctcctcatataattcctccaatggctagagattcccttggagttcatgaacctttaagtggtcgtttaatccatgtgaagaacagaacccagacatggatgggaccagctcagatgatcactgacaaagtcaaactattcttgacataccaagtgtctgcttgggttcggattggctctggtgctactggtccacaaaatattaacgttgcccttggcgttgacaacaattgggtcaatgggggacaagtcgaaatcaacgacgacagatggcacgaaattagtggctcgtttagaattgagaagcaggctgccaagattatggtttatgtacaaggcccttcttctggggttgactttatgcttgctggacttcagatttttgccgttgacagagaagcaaggtttaagcatttgagaaggcagactgatttggtaattacttctatcagtgtcaaccttttacttcataataacttcttcaaatagattaagtttaagtcgttatatcagaatacatatttagtaaactatttttaaataacatgttctccaaaacagaatttttttttttaactatctttgcaatgtgatagattgagctatttgattcataggcaacacaacataacataatgtgttttgttatgtttagctatttttacacatattgagtctgttcggaaattgtattatatgtcttttatatagtactctactttacctgtacaatacaatctaataatacgttctactaaaataagtcatacataataagcttgtggaatttgatagataggattagatatgacctttctataatatatcttatctccattggctacttgtgcagattcgcaagcgtgatgtgatcctcaaattctctggagccgagtcaggaaacttgcatggagcatttgtcaaagtcaagcaaacccagaacagcttcccgttcggatcgtgcatcagccgatcaaacatagacaacgaagacttcacaagcttcttcgtgaaaaacttcaactgggcggtgttcgggaacgagctcaaatggtactggacagagccacagcaaggtagcctcaactacaaggatgcagatgacatgttggccttttgtgaggccaacaaaatcgagccacgaggccattgcatcttctgggaagttgaggccacggttcaacaatggctacgctcactcaacaagaatgatttattaacagctgtccagaacagactcagcagcctcttaacacggtacaagagtaaattcagacactacgatgtgaacaacgaaatgctccacggctcattttaccaagaccatttaggcaaagaaataaggtccaacatgttcaagacagccaaccaattagacccctctgctcagttattcgtcaacgattaccacgtggaagatggttgtgacacgagatcctctccggagaagtacatccaacatatcctggacctgcaagagcaaggtgcacctgtgggtggtattggtatccaaggccacattgatagcccaattgggcccattgtgagttctgctttggacagtcttgggattcttgggcttccaatttggttcaccgaacttgatgtgtcttctgtgaatgagtacataagagctgatgatcttgaagtgatgcttcgagaggcgtatgcacacccggctgtggagggagtcatgctttggggtttttgggagttgtttatgagtagggaaaattctcacttggtgggagctgaaggggagatcaatgaggctggtaagaggtaccttgagttgaagaaagagtggttgtcacgtgctcatggtcatgtgagtgaggaaggtgagtttggatttagagggtttaatggtacttatgcattggaagttgttgttgggtctaagaaggttgtcaagacttttgtggttgataatggtaagactgactcccctttcgttgtgtccattgatttaaaggtttgaatgattgtttcaaaatttatcggtgggtgggcgtgtcaaataattcttatcactgtaaaaagcatatatataaatatatatatatatatatatatataattgtgaaaacgaaaagtgtgtggggagggtgaagtttttatggatttgtgtaatggaaaagaaaaggaaacagaaagcatatatatgatgtgatgattattgattgtaattttatgaaggaataaagataatgttttgtgtttaatactgttgtgataataataataataataataataataattgttaaaaaaatgggtaatttaattaaaactataaacatttttttttttgaatgaattaaaactataaacataggtcttcggtattaattttcgatccttttatctttgatttttttttaaaaaaactgaaaatatatcccaattttcaatgagcgccaagctaaagccgataaaacaaacctttaaaacttttatattcaaattttttaattttctaaagaaaaaaatcgaagataaagactgtagttgtagtagtgtatgttattgtgtgttgtgtttgtgtccatatgtttttggcacgatacgatgaagtaaacatgtatacgatatgttttttaaacgtgttgaaacctcaaataggaacaagacaattaattagcaggtcacacgacatgacacgataatataattatgatatgattatcaaaattaatttttttttttttttaaatgaaccctaaggaaattaatttgtcttattgtgtcaacacgattatgacacgatacgattattaaatgtgttatccacacacttatttttgtcatttttgagttgtctcatcgtaaccatattattagcctaattagtttatctatttaatatatatctagtttgttgctttaaaagggtttttcttttttttttttttttttttgcgaggaaaagggtttttattatttattttagtatttttgtaaattgtcacggaaagaagttatgtggatgtgatgatagcatatgagtagtttttcactgagtttacattatgaatagctgtgttacatgtaatgtaaggaaaaaaaacacaaaatatatcattactaaaatgtcaatattattgttacgtacataaggcttctacgattaaagttaaagataaacatcatcaacagaaatgaaattttcattataaacctatccaacaaataaaagaaaaaaaatataacaaagtggcaaatacatgcattaagcgagaattcatcaagatcataatatagctatataaacaacaaatagctagccaacttgaaaattataataatagtaataataatcccaaattaataataagaagacggacaacacaaaattaacaatagttatgtcatgccaatacgagtgtaaatgagtcgggtcggatctcatccagttatgatccgacctaatccagatcatgtaaggatctgtctagtcctgccccgttagatcagatactcggatcagatcagatccgacccgacttattcggatctgatctaatccgacccaactcttttcttttttttaagaattttaatattaacttataattttatatccattttaattttgtattagtattatttaatacaatactatatttggtattaacatgtattaatagcttgtgtaaagataatatattttcaataaactctacccaacatcaactacaggtcgggtctaggtccaagtttgggtccgagtcagggtcctgggtctgggtccggggctcgatccgagtctgggttcgagtccaagtttgggtcaaatccgaatttgggtccgggtcaaggtcctgggttcaggtccgggtctcggtctaggtctaggttcaggtctcgggtcaaggaccgggtcccggtcctgggtcccggcttcgggtccggatttcgaattcgagtctcgggtccag

SEQ ID NO: 934 - DNA, 4676 bp, Cannabis sativa
tacagtttgagttgctccggtagtatattcaatagtgtctatgtggattaccatatgaattttaattgcagtttaagttactccattagttgttattaagatttctgtgtaaaattttataaaaatatatataaaaaattattttaaagtgtaaaaataaaaaataaaaaaaaaacctttttaatttatttgtttcgtaaaaacagggtgttgttttataaaatgctaaacataacactattatcacttattaatcactcgattattattgatgcaataacacttgtaattgaatgatattgcggttgtgtctaataagcacaagaatattccaaaggtatcactatgaagctaccttaacttttttttgaaaaaggtatctaattcagcatatcaaaagaatcttcctctttctcacttgcaaaaaaaaccttttaataaaaaaacatatttcttgattgatttacatgggactccataaccattcttggtctcccaaaacattataagcaaaagcaagtgcaaggcaagttcttctctaactacctatcctcatatttaatatcttctaattttgcatattatattactattaggttattatttatcactggattgtttcttgcatggagaatcaacaagcaaccatatattatttttgcatgaagttgtttccattgtttgatgcttattgtggttagaaaggcctgagatagtagatacttgtatgcatgtgattttcttggttattttgtgtgattgccttaactttagacatgtattgatttgatgtattagatacaaaagtacatgtgttagagctattaaagaagaaagaaagcaaaaatgagataaagggaataagatctccataagggattccctagtgaaccttgtattgataatataacatactggttcactttcacatctcttcaaacatataaatgtatatatatatttatatatatatttccctaacaggtgacaccaaacccctgtaacaagaaagaaaaattggttgttttaacttcatgaaaaggtgggttctatgtatagtattactgaaatcaaatggtataatggggcaagtgaaaagaatttttaccagtagaaaacaggagttgtgtgaccgtagatttattaagtatgagaagctccgaccctgaccggtttcaagtttctgagagtcctctttgaaaactcaaataccatcacaaagaggccaactatgtacaataggaaaaggtgtaacttttctaacatgttacaagtagaagaggcattgcttccttcctccatatttgttctcatacttcttcttctggtctccatccatcctgataaaatcaatttttttagcaaaaatatagtatataaagattggtaggggacttgagaaggggaataagttaggatcttatgttggtcttattgtaaatattgttaaagtcaaagatcactaggcactagctccgtttaaatattgctcattaaggtgggtattcatgatccgagaaaatcagaggatgtcaattagttcatgatataataaaggaactcgtataaagaattgttataattggaaatgcttaccgcgtctcttttggggcaaatttgtccactcgtgcggtttcatctgcatttttgaagctttgatcaagtctagaagagcttgattaacctgaaatgaaattaaaagtattcaggtttcacttcacagttagcaatgagtagagcagagtgtgaattctgatgacaattcaccagttactgaaaaacgaacatctagagaagtgcttacctcttcggtcctctcatggctcaccaaatggcctccgtgaagatctaccattctagctacaggatacagtttctcagccagtctccttgcatgatatatttgagcaatgacatcatgcctacatttccaaaacaaaaacatgaaaatttgaatttaatatagcaaagtagtaaattatgaaaatcttcaatctgagaactctttatatgaacatgaatttttttaatttaatgtaggggcataggcttttgttgggatcttatattttactaaggaaaattttcgttagcaaaaagtgtagagaaaaattgtcggataatattttcctaaaattttacaaaattatactacatcaaaatttattttttctagaacaagcattctcaaaatttgtatttgaatccaaacatgagaaaataaaatccaaaggatctcatattttccgctcctaaaatccaagatacaaacaaaaggttacttgtttgtaatttatgttatacacaacagaatactggccataggggcattcatgcatccctttagaaatcccatttccaaaatactcagtgcaatcatagtaattgtaaagagcatgtcaaacgaaatccggaaatgatgatctatagatacatagacgttggtagaaacttccaaaacatcattatttaaatgtatttgaattccaatgtcatgttccacgaactatatagcctttatagactagaaagtgtttgacatccattgctgcattgcacaagagaagtattggatataggatgaaaataatgcacttataactatagagtttgatcatgcaccttccatgaatgactgaaactaaaaacccagcagaccgaatcaactcaatctctgttcttgtcactttatgagtccagcatgcattgacttgaccctcaaaaccataattagactgcatcccagttgccgatatacctttcacatattcctgcagaagacatgttatcatattaaacgaaatttcaggtgaatttattggattctgcttttcagtatagaaactttacagcagattgcaagagatataaaaaagtttttcttacttggtataatattgctcttcttgtggtagaaccaacatattcctcaagatactcctgcacattgttattagtgtaaaggtgagccttgtttatgctactttgaattgtctgctcttctctataacaaacagtgacatagattcaagagaaacatttaccgttgagtagtgagtatccaagtcaacagcagccctctgctcaggagtctttgcccttaagaaacggactgcaatagataacgatcgcctgtcaatctgcgagaagatcagttaaatttaataatctactcaaaacaagctcaactggaaagaataaataatctgtgtacaggtaatgaaaatcaagtttaaaaaaagcaaagttctgtacaacataaacatataagtaaaaaatatagtgtattagctatgcagagtctatcttccactagtaaacaataacaatccacaatctctctctccaaataaaagaaaaaataatccaataagagatacatttcaaaggacatataacttgaacaaccatgcaaatcctcaaaaaaattgaattttggcttattaggtcgtgactcgtgtctacttgttaaatcatgtaactggttttctaagaatcccagctgtctgtcagagttggttttatttttttgatacctttggaaaacattcaaatcctccacctgtaacatttagcaaagccaatgaaagaaccctttcaggcaccattgctgctagttttgtagatatcatagctcctgtaatcaaacaaaaatttaaataagacagcagattggactcaaaatgtaacatatgtatacacacgtaatgcatacgtacattatatacacatatataacgtgtaaactgtagagtaatttagcataagtacaaatgttaaaagtggactcacccattgaatgaccaaaaacatggacctttgtccaacccaaatgatccaacaaagcaatggcatcctttgccataatttttgttctgcaacagaaaaatcatggaccaccaacttcagttacttttagctacaggtcataattccataaactaacaagtaggtttgaattgttataacagtcatttcccttgttttttccacactcaagaaaagacaatttagtgagcaggaaaccaactcttctatttcaaaaagttaaaaatttccctaaagggttcagataaagcaagctaattgtaatttacagcaaaccaatcaaaattgaatttttataaagtacattagaaaaacaataaaaaaaaaactaagagaaaagatgaacacaaatacccaaacataaattgaataaaactaatcaaaatttggaagaattgaaactcacgtgtattcagactttttagttggcacagagctccgacccattccacgattatcaaaagcacaaacttcgattccatcaccgccgaaactagcctcattgtccgaacaatcaccaaccggcgattcatcgtcgtcgttgggcgtctcggttcccgtcaatcctctaatttgaggtccccaggattcatgagtacccgccaatcctgaccattgattaaatcaacaacccagaaaaattagacgacaaattaattcagatacgagaataattcaacgaagaatcgataattgagtttgaataatcgaacctataatgagcagaaccttagtgggtccgtgaccgtaggttctgtaaaaaatcttgactccattgttgagctgcgtgtgtgggtcagttttctgcgacgtaacctcgcaataaggcatcgtcttcttcgatgaga

SEQ ID NO: 935 - DNA, 3768 bp, Cannabis sativa
cctcaaatcccactcgaggtgaagatctttggctttactagtctagcaaaacgcccagacatattggaatcttttaaatgttatttcagccgaaaaaaaaaagtttagatttgaaagaaaagaaattatctaccagaaaatctattcttttctttttctttttctttttgcctatttcttttctttgaaatggccagaaatactattttgaatttttgcacctagtattgcacaacggtacctcccttcttccacgagtctagtatatgattcaaccccataaaatcagtgtccaaaatacaccgaagacctctcaaactttgtttacaggcaaaaactggatcaaagtttcagccatatgaatttatattgcgaaaaatgaatgaatacagtatatgtttatgttctaggggatgatgaatgacacatttcttctatcaggtggaaacaataggcaatggatatggataaaaaaaaaaaaaaaaaagattttcttgttttagtaatctacaagtttgttcaagccactttgatgaagttcgagtactataccgtgacagtgaacagataaagtttcagtacaaaagccagagccaactgcaacaggaagatccctgctacaatcaagaaccaccttcgacctgctgcctcgatgtgagctcgaaggttattcgccacaaaggttgctgacataaacccagctacacctgttatcacccatctgaaaatttccaagggcacaacagagagacactgcaaccatacccaaaaaagaaaaacccacagaattagagctaggtgatggaaaatgcaaccatgggatggactctcacctagcacctaaaaagaatgtatttcttatgactagtgaaccacaacattagtagcacctcagatatcaatatgacctatattagcagatagaactgggcaagtgcacgggtgcagagaaacattcttaggaaacctttttctttggttttttaaacagaaaatcaaacaaaccttccaggaatatatggttttaaaattagatatatggaacaccgaactcatacccaaagaatacaatacacattgcaagcaagatgcatagcttgtttttgaagtggctaaaaagataaaattaagagacttaccagagctggaatgaagacaaatagggaatatccatagagacaaaacagctgaacaagacctgatggtgctgagaaatatttaaggattaaatataatccgagaggaacaagagtgacatagccgtagaacaaaccggcagaccaggtcataagattgatgtcatagtcccattctttcttttgcagtttgtgcgccacatatgtcacaaaagtaccaatagaagcagctacaaagataagggtagtgcatatccagaatggtccatacctgcacataacaaatttgttatactatgacctcagcctctaacaaattaacaaggtgaacaaagaaaacttacaaatctgggtttccatctgttttctcggtaaaacctcctgtaaatgggaagagtgtgtattttatcctatctagaacatcagaagtgtcgacatcaaagtatggcttgtaagtcgctacagaaaatgtccgaaaccaaccaccctgctggggttcatcagagctcgatacaggttttgagaatgaatctgtgacaacaggaaatatataacataatatcagccactactatgatgataaacaaaaaaatatgtcaatccctaaggaagttaacagcgatgaactctgaaacaaaaaattcccaaacaattatggatctacatggtctactattttaacatctcccaagcatattaataagaaactggtaattttcacactatcccagacctcttagtcacaacacacaactcaagtggcatctaagtacaacaaaagaaaaaaaaacaccatgatgtttaaaagtctacgcttcgataaacaaatttttttgaagccatcgcttatatgatttaaaagcaccgtatcaaaaatctaccctgtgttcttttagctctcatatcaatacaaaaactaggctttacaagttactggtaatgaataaactcctcaagtcctttacggccgagaacaataaaataaaaggcaaacaattacccacaaaatttatagtgattaaccctcaacaagaaatctaagtccacttttttatcttgaccaaatggggatttaaatccaacacacaatcacacacgcaaccacttgagctagctgcaagtagcttaaaatttaagtccacttgttgatttagattttccctatgacatggaagaagaacagtacaagcagtgacacaggacaaattatttgttagctcagaggtgctatttgttaatcgtttttggtttgtgaattacatgttaattctgaaaaaaaaaaaggaatcaaacaatgtattttaggaatcatttgttacgaaactgaaaatgtctactatttcaaaagtaaaaaattaatttgttaacatttcaaatttttgtcattactacttgggtactccatctcaaaactaattggtgattagtgaaatgaccacttgactcgaatttcaactatcttcttgagataaccagatcccaagtttaattaccaattggtgataagtagagtaacctatgtaccaacatattatccatgtgcgactctaacaaaatagatgttctaactatatctagataaaactgtcctcaataatatttatcctccaaaaactgatgggattactacaaaccaatttaattgattgttagatagagtcagaaaacagataagcataaaccctattttcagtggaaaaacaagaacatctttggtttctagttgtggttcatacaaggaaattcaggaatgaaactttagaccccaggtccaaaaagccaatatacaaactggattatgaatatatagcaaaacaacagatcgggacaggatcacaacaaccccagcccacattagcaatttaattaacaagatcgaaaactcataccatctgcatcactaggaggtcgagaagtagctgatatcttcccttgtgcttcagacggaggaaatgtctgaaggcttgaatctgcagtagttatatatcatcatatcattattctcaacaactcaagaaaaagaaaagaatcaaagagtgcttagatttgcatcagcactgagaattacagaaacgtaaaatctagttctaccaccaaaaaacaggaagaaaaacattatcaactattcagtatatacgtagatagacccaaaccaaaccaaattggattaataatcgaatattcccaaaattcaccaaaacataagaatctcagtaattgtcttctatgttgctacattttccaggcaaccaaacaaagactatttgactagttgcttatcagaaaacacttaaaagctatattagctgaataattttgggattaaacacattaattgcaaatacaatacaagaggagatccatagattaaatgctttgttgattaccttggaatttgacggtaacgtggcctggatctgtcacagcctacaaaaaatacaaccaaaattatagaaagccatagatccaaaatcacatgttatacagacaattatatatacataaaaaaaaatacatacaggaacagatccagaaactttctgattatcaagactggtatagttgcctgacatcatcttcctcagctagactcgcagtttatcttctttactgctctctctctctctctctc

SEQ ID NO: 936 - DNA, 2016 bp, Cannabis sativa
tagtcctcttacacattaattgttaagtccacatattaagtattaactggatagttgcacaatagcacattcggaactggtagatatggtaaattaagtcttcgtaggaggattgtttgactggagagaattaagttgattttttgagtcataccatttcgggtatctacttattcaattttataggttccatggtatccaaacccaacacctcattgaaggaaatatgtaattatgtatggtgggtgtacttgacatactcttcattggtcttttgtatataattttaaagtcaacagaaggtgaactgagtaattattttttgctaatagatgtgtgatgaggatagtgaattatgtgaagtcagcagaaaagaaatgttagtaggcaattttgtgttattaattttgagataactacgttgggatcctttttatatgttatgtaaaatattcccatttatcttggataacttcataggtatcaccagtttttagctatttcaaatattctaagttggtaatttctgaaaaatcagactaaataaaattatggtagggaactccaatctctagctaaatcgacaaattaaattcttttgaactctttcacattgtataactaacagcctacccaatttgtaagtttctcccatatatttcgtgatcctcaaaatttttctaagtcttctgttgctcttaaatcagatttgcccaccagatagccattatagctacacttcataacctttttgttttatcttatcttcttgagataaatgaatctaatactccgaacagtgttgctcaatcaccctctgtatcttgaattctttaagccacctgtttctgaacaactgaaaacaaaatactatgtttcttcatttttcttacagtgcacaccacacaggagacattgattgctatcagtgttgatttgtagcattacaagaagtgctatatatataattcaagttaatgtccatggaattagtttctgtcttcatcatttaccttctgtttcttcatgtcaacaatttgtttctcataaataatttggtttcatgccaacagatatcccctggagatattcaatgggtagatgaggaggtctctcatcgcgggggctatggtggacctggtcatgggatcaatagaccaataggaggtcgtgatactgttccaggtgctggaagaggtagaggtgctacaaaaggtcaaacaagaaaagactttttgccatcacaaaatggcattggaaagaaaatgccagatgagatcaaaatactcaacacggatagtttaattaaggaagtaagttcagtaggctggttacttttaattgaatcataggtttgttgaatccttgctcagagcatccatctgtgattgaattttgataggtggagagggtctttggttcaaatcatccggatccacttgaagttgagaaagcaaagaaagttctgaaggtcggtacttgcaaaagtatttgtaatggtgtttccttaggtctatgtttattaatcatgtaccagcactgttaatgtaggaccatgaacgagctcttattgatgcaattggaaagattacggatatctccgatggtgaaagtggtatagtataatctgtcttcatgaattcttcatcgcatacttagctgtaactgactaacaatagaataatgtcatcagagaagcagactctttaagcagtttggcataaaattaatgttttacctttctcacctcacatccttctaccatgatagctgttttgaaagtcggcttcattctattttttattttgtaacaagtttagtatcccctacttgattcatttttctgtttgctgtgaaacagatgaaggtggacaccagttcttgcatggacaatccacggactgacaatcatgtattttggttagttggaaggaacaaaaaaggggaaataaaaaaaaatagttggttgatttaagatgaagttgtgcaataagagatggccagcttgataatgat

SEQ ID NO: 937 - DNA, 2825 bp, Cannabis sativa
tgtttctctatagccattggaaattagactttaattatagtctccatataaataaataaaatcataaaagtagagaagagatacttgggtatgtttgccattggatttgaccaagtgtcattcttttaagatttatattgatatcaataacatcctttaaaatcttaaattattaaccatttcttggtcaaaaaaggtcaaacaccggtcaaagataagataagctaagcacattctgcttctgactacatcttcaacatggttttcttttaataaatattttattttatacatggtaggttccttctacaccaagagaggtgctcccaaacaaaatgatgaaaggaccatatgcaattgtactagctagcctgcattaattttttctcctttctataaaatgaatactctaaattttatatgaaaaaaaggaggtagaaagtaaattgaaaaaataaagcaagcactattaaacaaagagaaacaaaagatcaatcaaaacagtccaaaagctttatggttttagtataaagcaaagatattagtagaaaactaatataagtttcaagattccccttctaatgcaatcaacacatcaaatgaaaaaacatctgtatagctcaaactcttcaactatttcattgaaaagtaactaatcagattttgcaaagggaaaaagacagatggattctttttataactattaacgaagttgtcatttggcatattaacttagtttctttttttctattttcaacattaaatttcttctttacacatcataattgatgtgttcattttttgaagcgagaccctacagaacattcaagcatactcacaacactatgagaaaaattattaacaccgaacccaacaaaagcttcgaaaatggggtaacataaattgactaagtttcatactttggtgtattaaattaaaataatacctagttctagtcatcatttaaaaaaactataacttataactactggtagaatggtttaaaataataccaagttctagacatcaatttttttattttttatttttttgctagacatcatttagaaaaactaaaatttattgctactagtagtacctaaaactaaccctacaatgtgtcattaataaccaaaaaccaatatttactttacacgttagatagaaagaaagagatgggccacaacacaactaagcattacaaggctagttacttttttctataaaccatcctcaaaagattaaaaagcactaattaaagctaagcacaaataccaactaataaaagtaacctcaaaaactacccatagttcaaactacttttactttctttttctttcacattttttatatctacacaataacattacaaaattatcccccacaacccaaacgagcttacacaagtagtataagtttgccacatatataaagggttaacatggtaattttctcctcttcaacattacaacattacatgactgaacagccgtttggattctcatcactgaataactcgaacgaatccggcggctgaggtgaatacgagtccgaatcgtagggcggagattccgtctcgattattgggccttggtgcatatacgtatgagaatagggataataggccgcactatagctactagtaggctgcgtagtactgtagctcagcccatgtaccggggctccacgctcatggtagtaataatgggactggtgctgagggtactgatactcctgatgacgtggtgggctgtaattggcagaaaccggaatcggacctgggccttggatatgagtagtaacatgataaggaatatgtgatccagtaagtgccggtgcagcattacttgcgtgttgttcaacctcactaattccaacgttattaccattttgccccttctttttcttctttttaccaccaccaccgctagtgccagcaacagcagcagcattaccattagcattgttactttcggccggagcctcatgttcaccaccgctctttttctccggcaccggcgaaggactacacgtatgtacggtcacagtttgtttgtgctgatcaggcttaaactctttgacctgtccacttgcaccggtttttcccggtgaactgccttcactaataacatgaacagtacatgcatctgtagttttggcagaagagtcttgtacgacttcaactttgacagtctgattttccttgtcgccgccctggttgttttcctcagagctttcttggtcatcttttgctactgttactacctctttgtttttacccttgccttgttttttccctttggagtcggcttttggatcaggccaaagctctgcatgtttccctgtttttaccaacttcttaatcagagtttgagagtctacgtttccagtcactgtgaccttttgctgctttaaatcaatatctgtcttataaacccctgtaaaacccataaaagaatcacaccctaggttttgagaaacataatagaaattgatatacgtacgagtcttaattaagctagatgatcatgaaataagaatatgtaaaaactcagctttgaaactctgaaagctaagttgatgctagaaatgagaactgaaaataatgaagtttagagatgttacataaattatataagaggtgaaagaactgaacacagaggattaaattgaaggaacaaaacatccttgcatgaaaagtaaaaaaattcttcagttacaacttaccatcgatgttttgtaagattttcttgactttctttttgcagccttcacaatggatggagactttcaacacccatgtctgaaaaaaaaaaaaaaaaaaa

SEQ ID NO: 938 - DNA, 1280 bp, Cannabis sativa
aaatgccacctgcaggtctcatttttcctagttgtacaaaagtaaaaaaaaattgctagagaagaacaacttaaattgtattgaaactgaattcctatggtacagtacactgtgtttgatcagctgaaacaaagactgttgaagggaaagctgggtagtaaaactggtaaagcatcgaccccagaagctctttctgccttttctgctttcatgttgggtgctgtctcaaagtgtgttgctaccatattgacatacccagctatcaggtgaatgaactactcaattaatcattatcaagaaaattgtgaactaaatggaattttctaaaaggattgaatcccaaattggaaatggataaaaagagaaagaaacttggtctttcttaatataacccgtcataatccaaggttatcatcttattacaaagaaaataattccatgatttcattatttttatagtttgcataaggatttaaagatttgttgttccatttactatatttttttggcaataatagcagaagatttacatatagtaaaattgctatacaatttgggacagatgcaaggtaatgattcaagctgccgattcggatgaatttgggaaaagtgaagctgacaagaaatcccaaaagacaatttcaggtgcactatttgccatttggaaaagagaaggccctttgggtttcttcaaaggattacaagctcagatagtaaagactgtgctaagctcagctttgcatttgatgataaaagaaaagataacgaggaccacatggattctactaattgcacttaaaaggtatgtatttgtcacccctgttagactaaaatctacttgaattcagtgaaagcccagccttcatcgcaaagagctccatcagagttgtccacatttggaggattcatgtggcaaacgaaataatcagttatggacgcggaaggttaaatgctagtatcgtaacaagggagtatagaacaagatttatttttccttgatattttaatgtccttatttggatactcttgttaaagtcacatctagtgcgttggggctttattagtctcgtagtaacaacattcagatgcctcccattaacttgatgtcatagacctttgttggattgttaattagtcttacccaacaaatagcaagtaataatggaaaaaatccaacaagcattaactttgtgcatttcctccttaagtagtaacttgttccatacatgtttggattatcttatgaaataaagtctatactaatctctaaacgaaaggga

SEQ ID NO: 939 - DNA, 3493 bp, Cannabis sativa
attgtaatattttgcataatattgattcaaaatgcatgtcaatatgaaaactgttttaattccagatgggtgcccttcaagattctgagaccaacagcccatcattgagaactttaccaggtcaacattttcctcttggtgtgtcagaagttgataatggaatcaattttgcaatattttctcagcatgctactgcagtcacactttgcttatcacttccacagaggtgactctgcttaatctctctcattcatgtttgaagccttattgttgagcattattactcttcttatattttttgtgtttagggaagaaccaaggaaattcattaatgctgatgtttgatatatattgtcttgctatgaagattaaataggagaagctacctgttgttgttacatcctttcctgtttattgagagaaatcttcttttgggagaattgcttgcaattcctattatattaagatttcaaagatttctttcccttgttttcctactataaaccttttgatgcttttctcagggaagcacatggaattgaggatggtgaaatggtggagctggcgttggatcctcaccagaatagaactggagatgtctggcacatatgtgtaaaggtattctcattgactttttttttaaggagtcctggctgtaataaaatagtgccgcacgcaaaaaaaaagcctatacagacgatcaataacaaacattaaagttttcacaggaaactttcccatacacatactagatttaagtgagagagtttaatcctgtttccattttgaactttttctcattgatctttcttcctcaaaaagtatcagtttctagctggaatttacctcaactttatcttctttgaactgttaactccatctagcactatgtgcaatgttgtctagatctatagtatttttcaattgcctttttcatttttgaagaaagctccactgccaaaaacctctttgttccattttttcacttcatttgatcatgaatttatacccttcccatctccctaattctatcttcttttcaccatctactaaagtctttgttaaagaatttcttttccccacatagtgtactgaaaagaccagtaaccccaatagctaggatttgaatctaaaatacatattagtttatgcataaatatgatcaagtctcttttagctttacttttggtatattcgatttttgtttttccttcttatataatgtatcacaagaataagaatgatcatctttacaggatttaccgaagagcaatgttcactatggttatcgcattgacggtccacaagattggcatcaaggccatcgttttgatagtagcattgtgctagtagatccttatgcaaagctagttgatggtcgcaaatactttggggatgtcaacgaaaagttctctaaatttcttggaacttatgattttgatagctcaccttttgactggggagacaactataagtttccagatattcctgaggtactttgtcaccttatttgctgttttgattttaaaaaataataaatattatggaagtttgataacctttctttttgtctgtctcactctcaccactttgtcctacaaatagaatttcaacatctttcatgcataccaagatgatagtgaatatatgctaacttgtcctattgtaatttgatcttttctcttctcttatatgttttgttgtttctcagaaagatcttgttgtctacgaaatgaatgttcgtgcatttacggctgacgaatccagcgggttggacccagacatacgcggaagctaccttggtgtgattgagaaggtaactattcattatattgaagttagtcactcattattctagtgaaccgattagaagaatgcacctaaagaaaaaaaaaatactgaaatggttttactagaatctgtagttttatttttttaagttacaaattcatcaaattgagaacttttatttaagtttgagatatcatcttgtgtgataattattttgtaattgtgattatcttattaatttttgtgtttaatttttctgacctttcccttgctttcttcaattaaagattccacatcttcaagagcttggtgtcaatgcggtagagctgctgccagtttttgaatttgatgagctagagcttcaaaggcgaccaaaccctagagatcacatggtaaataaagattatttgtaaatggataaattaatacgtatcatttgttacggatatcttcaaacatttgtgtgttgattctgctaattttttagtttcttttgtatttcttgatctttcaatttggatgtctgcaaactctttttctttgattggtaaaaacaatattaattaatcaaggtgcacaatgaggtaacagtagatcatattttattgtgtttactcaaacacaaaatggttacatgtgtgcaaattagtttgtgtcggttgtgaatttgtggttcacagctgattataaatatattggttagaaactttttactagatttattttgaatttagaaggaaattgatttgtacattaatgtcgtgcagagatatagacaggatagtattggcatgctcaattttcttttgttgcttatactcatttcatgctttttcttctttttaattttaccttaatctcattttttatttctctcggtggtcttcttgtctaattagctgtactttttgaacccatttgtgttttggatttttttatttttagataaatacatggggctactcaacattaaacttctttgctcctatgagccgctatgctagttctggtggtggtccacttaaagcttctcaagaattcaaacaaatggttaaagctctgcatgatgctggaatagaggtaaccatgtttctgactttatgcacaattcttcccgggtgtgtttggtacaatgtattgtattatatagtattataggcattctattataagatatatatatatatatatataatataaaatctaaaaatatgatctataacacaatttaatatcttactatacaatataatataatgcaatataatactatgttatacaatttaatggaattgtacagtattactatataataccaaaacaaagtactaagacataaaacttggtgcacatgtttttggttttcctctggaataagtgcgaattgaggatcactaataaaaaaaaataaaataaaaaacatttgacctttgtttctttttcaataaataaaaaaaatacggtgtattaaacggatcctcattgtatttgttttatttctctctcagactctcagatgtttgtgtttgtaatgtgtgtttcaacaggttattttagatgttgtctacaatcataccaatgaggctgatgatgccaattcttatactacctcatttcgaggcatagataataaggtaatttcataagtgtgctctagaataattgtggagaatcttgtttcctgtctcataaataaaaggtg

SEQ ID NO: 940 - DNA, 4863 bp, Cannabis sativa
tatggagtatggactaccaattcattctatttatgataaatgtacccttaagtcttacctcaagtttatataaatgtaaattaaaaaaaaaaaaaagacaaaaagagaagaaaaagaagacaagatcagcttgtattaaaatcaaataaatggttggattggatctaaactcgacaggatcatgtggcttattgcttaccatggccctgatcctatcctctaaaactgtccaaattcctaaatttccattgtaataagacattgtttttaatggttatatattaagattactttaggtccacctaatatattgtctcttcataatgttgcatgcttcctaaatcatggtttggttagttagagcattgaaggacactctctaccaattgtgtattcattaatggtaaatgtatattcatgatcacctcctcacatctaccatcttaaacaaaaaaaaaagttttatatagccttttaatctctcttgtcaaatttacttatatttaaattagtttggacggagtgttaggcactttaacaaatacattcaaaattaggttgagtcataaattagaagtgactagttagttatttattcactattattattccactactacatgattaagattttgaattcaaagggggaagcatgtttgatctaaattgttcattatcatggaccattgttgaatagactggattgtattatttttacttttatatatatttatatatatatattgcatatgatgttaaagaatattattaaagtctccaacatcaaagtatttaatatcatatcttaagataattacagcttaatgttgatgtagtcttgtgtaactatctatacaaaatatttggggaagatgttattataattaattaacgggaaaagtactcaaataattaatagtatattttgttcttgttaatcacctatgtaaaaacagttaaaatataaaagtaatcatgatattagaaatttaattaacgtatttaagaagttaatttacaattttttttttactaatttaagagtatttttgggtcatttttttttataaaatattttataactcaagtctttatagaaagtttgtttggaatctatcaaaaataataataaaagaaaagtctttgtaaaaattgaaaataaaaattaatttttccatttttttttaaatagaacattgttattaactaatagtgaaattaatactaaactatatgaatgaattgcgattggtgtgtgactgagatgggaggcagtagaaatctgatccagattccaggttgacgagtggaggactcttagacacggcggtgatgcaatgaggtgtccatacccccacgtcaggtgaatttagcattctctggtcggattcctattgggcccacgaccacacctaatcacaagacatttgtgggccaaaattaattttctacacagcccagtcattcttcactaggcccacttaccgtccttgttgtcgggagccaatttattattttatttgttttgtgattttttttatatatataatatattagttttcccacaaattttttctctctacgtttctaatttttttttctttacagaactggaaacttttcttgtaggaggaaggaatattactcttttgaagtaatatactcgaaccgaacttcaagttgaagttgattaatagtagggacggaggcagaaagggggccaaagtgcaaagaaataatttaaggagggtcatttaacaaatttgtataaaaaacaataaaaaaaaagatattataagataaccgagttgtatttgtatctcacaaaattataagtgcatccctaatcttaaaaaataattttaaaaaatcactgttaatatatattttttttgttaattttttttcaatcaccatattattttattattttatgttaacttcagtacttataataattttattttaggtcattttttatttataattttataattaatttttaatttttatttttatttttttctaagaaaattttatataatttttgttttttttgttataacatttaaaatataatttatttttatttgataggtatatttttaagaatgccttttttttaaaagaaaaaactattataaatcaaagacatatattttatataaaataaaaattataaaaatagtgtatctataatttttgggttacaaataaaaaattattataaattaaggatatatattttatataaaataaaattattaaaatagtgtatctataagttttggggtgtaaataaatttttcttttaaaatttaggtttcaaatttacacaatacaataataataataataatttataattaactattttatttttagtcacaaattttagtgtgactaaaattaatttttttttggtagtgttctcatgtttcataactttttttctttcaaatgcttagataataacaaaataattaaatatgtcaaaaagacagacatatgtatacataggtatatatttcaaatttaaaaaaacagaatttttttttttttgagaaaaggtctgttaaaaaaaaaaaactcaattatacaaaagatagtacatcaactcagatgttactttttctaatcaatactaaatgcaatttaaaactgaaattctgttatttattatggtcaagttttaattatttaaattaaataattaaccagtagtattatgaatgattcaaataaaaacagaaaatattagaacagaaactctttaagattaataaacaaattaacacatagaatataaaatgaacataaaataaataattacaaacgcaaatttttacgtggtatcaagaatactcatattagaagattattcaatgattagaaaactaaaaattaacttaatacaaataaattcactcttatatttgtcgcatcagttataatctaatattttaatcaaacttctgaaatattattacaccttaggtcatggatgaaaaaaggaaacaaattgacattaaattacaaaaattatcaagaagaaaaatcggagaataattcaaattaacagctttaaaatccgttgaaactacaaattcatataaatctggatagtttgaaacaaagttttcattaataaagtttctcatttaattatgcaagtcgacacacagttagaccttatacaattacataaatcaattaagataagtattaaatattaccatatatattcatatataaataaatatcaagatattattatatgcatatatctatatatataagtaaacttatgtttatgccattattatactacacattcttctgacctaaaccttttatgaccaacaatatttcatttattttgaaataccacttcaaatttaattttatcattttttttttcaaaaaacaccttcaagtgttgtttttaaaaaaacatcaaataacacagcaaaataaattactttattgttcaaaaccttgattatttattaccttttattagaattatttaggacttttatctcttgaattatcatttatgtattattgtgccctataaatttttcagctcattataaaatctttaaactattcacagtattataaattagtcattttgtcaaaatttgtcatatagctaagcaaacaaaatgataacacggatacttaaaaaattaccatatcagcgtcacatatataatttaacataaaaaaattatacacctttaaaaaattattaaactaaaaatcaattaataattaaaaaaattagataaaattaaattaaaaaaactaattattttcttttaaattaattagcgtggaattaacgggacaatgatataacaattggctaaagactcatgtcattattttatttaccattaccacgtatatgttagagaagttgacaaaaatatctaatttataatacctgaataatttaaaagctatttttaacacactgaaaattcggggacagattaatacataaataacaacaattctaaatagtgttttcttttaattattgtttttgcataaagtcaatattgtcttgaagcattatgattcgaatatgaccgtacttggttattttattttttttatatatatataaaaaggaaattatccttatataaattaatcagtaaaagccaaaaaagaaaaaaggatagaaatgttggccaaaaatgctatactgaaaattatgatctgatggttattatgaccaatgatttaaagaaatagcatagaaaaactcacttctcatgtttggtatgaagttatattattattgtgaacttgacccattcatttatgttaggctgtccatcattgttgttacggtgttatatcaactcacacttacacacatctctctctctctctctctctctcatcaacattcaactatggccgtttgatccaatatctctctcatcattattaaatttaattatttatttatttattagttattcctaatttcgtgcaataccaatattatatagcaaaacaaactatttatgttgtgacttaatgatgattaaagaactactttttactggaaaacttattagacaacgcatgcaaaccgtaaataaaggtttaatcataagatgggttaatttaattaaatatgaaaatataaatatagatcatctttattatataataaatatatagttttttttatataaattaccggtgtttgtactcttttggttgcacatggttagccaaccaatagcagctccatatattttcaaagaaatttaacaatttaaataacaagaagaagataaatatataattttgcttttatttatttatatatat

SEQ ID NO: 941 - DNA, 3653 bp, Cannabis sativa
tctgaagcaaacataaatgagccagagactccaacatttgctacaccagcattggagaacatagctgacaccccaacatttgctacacctctggagaacatagctgaaggaagagtactaaaagtgacagaaaatgacttgaagatcataaattatgagctagaaaagtttcttgaagctgaaagtaaagaagaagtgtttgatgaatcctcggctaggatgagcagtgttagcaccatcacactcggtggaaagcaattagagggagttgaagatgaagattattggaaaacaatggtgtgtccactccaaggatatctatttgggtcttcaattgaactaccggaaacaagagaagaattaaagaaagaaaaagcatcactggcggagctatttcatagaacaaagataactgagaattgcactgagaaatatgttagtgaggaaataccagataagcataaacataagtctgctacacatttcatgaagaagatgattaaaaagcttcacctttcttcaaaaatctccctccattctgcttgtggtgacttaccagattctatttcggcaaagaaagaaattggcaatgcaactgattcagtttcaagcaaaaagaaacttcacaaggttggccctcacacctcactagctagatagatctctcaaccacattaacagcatatcaaatgactcctctcctcacaaaaacactaccaaaagaacagctacaacaacttaatcttgatgttatagttaaaaaagttttcgtatgtccctctgtctacacaaactaccatccatctatatctatatctatacatatacaagaacagggtggtctttacatttgattgtaaggattttcatttttgatacctaggactccactccaatgttgatttatagttgtttgtaccacaaagactaccaacactatatattattcttttcagcataaataacatatgaaaatggttggatcacaaactaaaattttaagtcatattatgttaggatccacattgaccaagtataggattcgttagtagtatataactacttgaacactctcctctcttaggctagtttttgggagcgagttctacttggttgtatcaagtggtatcaaaaccacgcaccctcaagtgggactgacaacatcgtgaacgtcagctccaaaagggggtggattatcaggatcccacattgtcatgttctttgatgatcttgatatccaactagaatgcttaaactaaccaaatcagtataggcatatgaactaacttttccttgaacagtactgattatatttttcgtgttagttcgaattttcagtttgttagcatgtggcatgcaggttatgcgtatgttccacaggaaaattcatcctgaaaactctgtagatgctagagaattcatcaggtccaaatgtaatcctaagatcactcccaatgaaggtggctatactcatggaaatctggtacaaaagggtggagacaacagaggatatcgtcgaggggccccatcgatgagggaaacccaatccagaatgaacaaactgaactcgtcccaacaaagcagtctgagttgcaacaacgttaggggaaagggagagcactggatcaacatagatgacgactgtaagtaaaccttcggactttacttggtagaaatgaacttaggttgtgtttggttgttggaaattaatttttataaaaatttctatgcaattttctatgaaaatttctatgaaaatttttttaagagtcatttccttaaagttattggaaattaaaaattttctataaatcaaaaccattggttcataaaagttcccaaaagatatattatatataaaatcttcttcatatttatttttcttaaattcttctttcttattcaaatgatccaaatgtcctattctaagttcatatcaagatcaaaagcataaaaaatttctattagtatttatttactttataaggtaccctcttgaactgtgtgcttaaaaactacagaaatcttccaacatagcattcaaatagtgtccagaaatcatcaacacaatcttaaagatttattattgactatgagtaaaccaaatctatataaattgttatacattttctttcaacatccaataataacacattcagtttataatgctcttccaacaatatatattttatataatatatataaacatattacagaagatatacccagccataataattaaatcattagatgttataattctagcccatctctcttgttgggattgcagatttggtgttggagctccagcaatagaagctgtaagaaagtggttctcttctcagccatcatccttaatagttacagcttgtcagtgtggtgtttaatcttgttatgttcttatatctaaggaattttagtgatgatggattaagctgaatcttaagcaccagtatatcaccttgtattcctagtgtgatggaaaactaaatcttaaacatgacgtattagtcttgtattcccagtgtgatggtaaattgtgactaagttcaagttttctaatcaataaacatgatattgattatctgctattgttacttgaatgcttgagattcaacctttgtgttagaaggaattcttctaccaagaaaaaaaaaaaagagataaaaactgctaataagatacatcccagattttatctaagaaagtttgtccctattgcctatgttgttactcaagtgccttacagcttttattgaacagaaaagtttcaataattcaagcatttatcaaaaaacaataaattggttactgggtatagctacattgagaaatattaacacattcaggttcatgaagctacacttcattaacatgaaattgatgcgaaacaacacaatgggccttttatgcactacatagttttaatagtgattcaagtagatagctgtaagcctcaaatatatattaagagtagtagcatctggatcaaacctcacagcaaagtgggttgatgaggaagagggtcttgatattaaataggtagctgctcttcccttagattcccgcccatttccatcacccacgatcgatcaactagaccagctaactctctgaaaatcacagtagaagttgcataagtagaactgtgtaaaacagaatacatagacccaggcaaaacatgagaaggagatgattatagttgtgatgtagcctcctataccaattgattaagaaggtaaacttaaacccaatttaaatctagaaaatattttgtaagcatttcaaatagaaataattacactacaactaattcattctgatgataactgaaaattagttctgtacattttgtgaattatagaaattcattccaataaatgaaaatttgacaacactcatgaatttttattttttttgatctgtaatgatgaatcataaaaaagaaaaagaaaaagaaagatagagatagtaagagcagacttgaggtcatggctgacaacaagtatggttaattctttcttcagatgctttaaaagtttgacaacatctgcacgtgctttccaatctgatcaataaaacagcactgaaaaagtttagaaacaataaatcaatttggacagggaaagaaaaatggaaaatatgtaagagaa

SEQ ID NO: 942 - DNA, 5200 bp, Cannabis sativa
aggtacggggtagaagcacatggcctgcctactccatacctaacgtgggaaatgtaatagcgagaaaggttggagtgtatattgattttgatcgggcagcgagagacacaatcgcgaaaagaggctttcttaaatttttggtagatttgcgaattgaccaaaagttggtagcaggtttttatttaaatatatccagagataggaaggaatggatacaatttaagtatcataagctccctgccatttgttttaactgtggtatgttagcccatctcaatttcaagtgtgaaaatcctactgagtatgcctttcctccggttggcaaagcggtgcctctttatggggcatggattaaggtgggagtccctattcggaactgtttcgatacgtcccttcctcaacttcggagaagacgaccgaagttcctgcaaaagaggaaaggaccggcgagcccattgactgataagggcaagaatgtaatttcggaaggtgacaatgactcatccttagtggcagagcaaggtactaagctgcaggtgaacgttaggaagcagaccaacagcaaaggggacggtggctcagcagggaaagtccagaagcaaaagaaggtggctgaaaaacaatgcttggatggttgctcctatttgagaaaagaaagtacgttgcatgggggaatgaagggacccaggcctcgggcccaccccatgaatagaataaacaatgcaaaaagagatgaaggtattatcatgagttttatggctgatatagggcccacaagagatcaaatggtagaaataccacatgaagaggtgtgcaagtctagaaagcctcattgttttcctgagcccatcgttgtggagtggcccaataacaaaggcctggtggaagtggtaaatgaggtggtggacccaaataaaactttggaagaatcggcccaacaagtaatttcttgcaatgaaattacccttgcttcaaatggacctagcttatcgggtcagaagaagaggaaggcaacagactgggtaattccaattgtgaagagctcaacacacgaaggttcagagtcgacgctcccatgcttggaagttgcgaactactcggctgggagtaaagtaggtgagagcagtagctctacttcgaagttcagacctggaaaacgcaagtgtggaagcctggggaggagaaaatcaacaggaagagggcataatcaggtgaatactccaatatcatttaatttaaaagatgaatcaaagcataaggagggtggtagagcgatggaggataaccaattggtggaagttgcgattgaggagattcagaactttaaaatgggcgaggaggcggcccttatcaagccccccacttcgccatgaagatcctgtcgtggaattgtcggggtgtgctcagggccccggcagcccaagcgctctttgcttggaatcaaaaacacagatctgagtgtgttttcctcatggaaaccaaatgtaatgaggaaggaataaagaagataagtaatttgatgggattagtgaactatagtgttgttccggcggtaggcattgcaagaggatatgctttgctgtggaatgatgagattaaaatctcagtaaggaaggtggataatagtgtgtttattgctaatgtgtgggatcctgggaaaagaattgggtggattcttatggctgtctatggtacaccctatgagaatgagagaagggctttctgggagaagttatctctagaggtgtcgaattttgataagccttggctgatggtgggtgaccttaacgccttgctggatccggaagagaaaattggtggtcgaaagattactgataaagacacgagatacctacgagaatttttgagaaactcgggaggagttgaccttgggtttaagggatgtaactttacatggcagaataatcgctttagtggggatcttacccgtgaaaggcttgatagggctatagcgtctcatgattgggtgatggattaccagtatgcggaggttgtaaatcaccccatttctgtatcggatcatggttatatagttgtggagactggcaatgatagaaggaaaaaatatagacccttcaggtactttgatgcatggagtagagatcccacatgtcaagaagtggttcaggaggcatggcgttgcagaccgggtgcaagagaagactctgtaactcaaaggtgtaaaaggactcatagagccctccaatgttggaagattaagacttttggtaattgcgacaaagaaatcaaggtgttggaaggtaaattggcttggatacaaaatcaaagcatctctccaaatctagcttatgaagaagaacagttgagaaacagagttcgtgaattatgggtaaggaaagaaagcatgtggaagcagcgatcgaaggagaactggcttaacttgggagatcggaatacgaagtttttccatgcctccactgttattcgacagcgtagaaacaaaattcaagaaattaggaacaaggaagggaattgggtgtatgaggagaaggaagtggcaggggtgtttctcagttttttcgaagaattatacgcttcttgtaacccacattttgacgaatgcttggaagaacttctccagccagtcattacacgagaggaaaatggtgaattagggaaagttcctctggttgaagagatcgagaatgctgtagcaaatctccaccctcttaagtctcctggacccgatggtttcccggggtgtttttatcgaaagcattggaaagttgtgggggaagcggtgattcaaatggttcaattattcttttcacaaggagtattagatccatccttaaacttcacccatatttgtttaatccccaaagttctgaagccggagtcggtagataagtttcggccaatcagtttgtgcaacttcgggtataaaataatcgcaaagatcatggccacgagattgaggtcagtcatggataaattagtgtctccggtgcagtccgctttcattccaggaagatggattgcagaatcatccattcttactcaagagttagtacaaaccattagaagaaaaaaggggaagggtggtttgatggcgattaaactcgatatgctcaaggcatatgatcgtctagaatggagttttctagctaaagttctacaggcaaacggttttgatgagcacaactgcagattgataatgaaatgtgtgacaacggtatcatactcggttttgattaatgggtttccgcaaaggaaaatttacccaaagagggggctgagacaaggggaccccctctccccctttttgttcctcctctgccatgatgtacttgcaaaactgctcaataaggcgcaaatggagggacagttgcaaggtatcaagatagcccgatcagcacctcagataagccatttaatgtttgcagacgacacaattctttttgctcgagcaaatgaaggtaatgctaaggccataatgaggtgcttagacatgtatgaagcatggtcgggacaattgtgtagtaaggccaaatcaagtattttattctctccaaacttggaggctccgaggagaaaggctattcttgatttgttgaaagtccagcagtgtaatgggactgaaactcacttggggaacccgtttgtcttcaagcgaaggaaaagagaggattaccatagactcaaagagaatctcatgaagagattggaagggtggaaactcaaacttttgtcatttgctggaagagctactctcattcaatccgtagctttgagtctgcctatatacaccatgagcacttgtaaggtgcctctctctacttgtagggagttagatgccttgatcagaaaatattggtggacgggggatgtctcaaaagggagatttactgcaacggtgagctgggacaatatatgtaggccgaaacgtcttggcggtttaggctttcggcgacttgaggatacaaaccaagcgctgctcgctaaattggcgtggatggtggctagcaatagtggcaagccttgggtgcaatgctttaaggagaaatactgtagaagccaatccttctggagtgttgagccccgtggaagtgactcccctgtgtggaggggaattctgcaatcaagaggcatacttcgctctgctgtaactaccattccagggaggggagacacgattgacatctggtcacaaccgtgggtaccatggctgagcttcacagaattcagagagctccttgaaggaattaggggacgattcccttccttgaaaacggtggctgatatatccgtgaatggaaacgagtggaaccatgaaatgcttattgatatgttcggccctcatgtgggggaattgattgggaaactcaatagacttcctattcattgtaatgatatgctcatttggaagaatgctcaggatgggatgttcacgacaaaaagagcatatgcggaagcaatggagttagtaggaggccaaatgaacaagcagtgggctacaatttgggatggtaatttgcatcctagggtctccatgattctttggagagtgttcagtggagctattcctgttaagggaaagttaaactttctcacggacaaaggatgtagtttgtgtgatagtgaaatggaatccatcaagcatttattctgggattgccctttcgctagagctttatggttttcaggtcctttcccagtggggagcagggattcggggcaacaaggattgagtgatattgtgtgtgaaagtggagtgcagctcaagggagaagaccgagtgaactttttcacgtttgttgggtgcttgtttgatacaatttggtactctaggaattcagccatcttcaagagtaacaaagttgatataatgcaggcaagattcaaaatgttgcaaagaatggatgaccttctctctgctcaacggagtgcgcagggggcagaccatgggcggacgatcccaacagccggagtttggttaaattcctagtgatactcagggcctattgatcacagatgcctcttggaaagaggggaaagctggaattgcagtggggtgccaggacaggcaatcggggaaatggttgtggtctgctaagaggatagaagcagcctcagcaatggaggcagaagcctctgcaattttctgggctttacaattgagtagggaatgtggcttccgttctatagccattgcttc

SEQ ID NO: 943 - DNA, 2559 bp, Cannabis sativa
  modified_base (1896)..(1899): a, c, t, g, unknown or other
aatggtgattgaatcaccacaatatacctataattacatatttaaatttgaacaatataataaaattgttatttataatttctgtacagaataattttaattataaggcaccagataattttataaaaaatataagatactagataattttattatttctttttattgaatttttaaattaatcacaactatttaataacaatttaatgactaaaaataaatgtaacagtcatgactacaaatttgatataatcatttaaaccttctatatatatttttaataaaaaatgcaattcattaaaataaatctactgttacagaaaaattaaaaaatcgtggataaacatctgttcatacactctcttatactagtcaccgtgtgtgggtaacaccattcgcaaaacgcaaaataacactgcaagaaccaccaacaacaataactaataaaaaattatatatatatataaatatattgtatatatttatatatatatatatactggaatatgaccataatatacattgatatttttgggctgctaatatcatcataaggtaattgttgtacccctaaaattagttgaatattaattttaacaaagtgtgactcgaaattattggaaaaaaaaaaaaaacaacaacaacaacaaacaattgtaagtgttttgtaaatgtgggcaaactttgattttattagtttgtcattggaattgtatgatggtgattgttttagtcattagaaaacaaataattattgcgtgatattgagtagcactactatattagaaaactaatttttttggtgtgatttttccatggtgtgtgtgtgtgaaaatgtattgaaaagtttcaacttgtcagaacaaaatgaagaaagcatttgagtaagtactaattaacactaacattaacatcaccaataccaaatggaccaaaccgtgttgaattaattaagttgatcatccacttcttcttactaccctcgtggcaaataagtagttcagtgcggttgttgttcaaccattaatgttattaatacatgttccactacctcacccacacgataattctatttatatacacattgtgacgtgatgtgagagctctatttaatagatgtggttgcggactctcaatttaaactgagggggacgtaattgtaagatatatttgaattcatgatttttattctatatgtaatttagtttaaccattacacaaagactaatattatatttataaaaattatcttttattacaaatatatgtcgtaattaactaaaatgtatttataaaggtgttcatccaatttaatttatacttttttgctcatagtgcatccgattcgcactaagtacagatttcattttttgaatccaattcaatccgcacaatagctcaaattcaatctaatccaatccgcaaaaatacagattggatcggttattttggatttgttactttttaatattaaattactaatatctatgaaaaaaaaatattttttatcacataactagcaacaaaataaaataaattatagttattttatgtcttcaataacacattaaaataaataaaatagcaaataacaaattcaaaagaataaaaaaaattgaatatataaagaaatattttattttattttaaattgtatgtacaaaaaaattatatataagaatagaatatacatttgatctattaaaatttgaaatataattgtagtatatgtattagacttttaaattactattttctttatattaaaatattgtttgtatatataattttttaatttttttataaatatgtgtagattggattagatcggttacttttacatgtcaatcaacattcaatctgcacaagtgtgaattttgaattttccaatccaannnnatccgcacaagtgcggatatccgcgctttacaaattggattggattggattggatcgtgcaaattgaattgaatcagctattttatgaacaccattatgtttatataattttttttttttttcaagggaggtgattatcctgtctcgcttctatatgggtccgctcctgactacgcctatatatgagatttaagataaaattaaattttaggacccttatataaatatattaattattatcaaaataataattttagtacttttggtgtagtgtggtaaaaaattttgaaactcgtaaaagctttaaggtccaatacgcgatacaaaaataattaaatatttaaatatttacaaataataaaaaaatataatatatattatattaaatgtgactgtataataaaagtgttgttctctttttagaatattacaatttaaatttaaacttactatacatatctttgttatcttttatcttatattaaatgtgttttataacctcttaaaaaaaaatgttttataacataaaggtttttttaatattgcaattaaaatttaaatccattacatatatttaaaatatatatatatacatatttctatttctattatcacttttttacccaaaaaaaaatgtttttattattatttaaaaaaaaa

SEQ ID NO: 944 - DNA, 1276 bp, Cannabis sativa
tactagttgttatcctctctgtttcaaacttggactaatgtggtttttgtaattgataggtgaaagtgtacatgggagatggatggcatttggatttcaaacaaacacactttgacacctattcacctccagatttttacaccagagtaagtcccttccttgcttttttctttcttaagtcaatgctactaatcttgcttaataaataaaagtgatcatttatactttttaaacatacaggttggtatagcaggagttgcggctgacgaaataatgaagaaaacaaagaagaaagaagacaattggacgcctgtttgggaagaagagtttacatttccattgacagttcctgaattggctttgcttcgaattgaagtgaaagaatacgacatgtccgaaaaggatgattttgctggccaaacttgtcttcccatttctgagttgaaacaaggcattcgtgcaattcctctctcggaccataaaggtgagaagtacaactctgttaggctgctcatgcggtttcagttcgtctaatcagaatttgtgttatatgatatcaaactaaatattcaaatattttactgtttagctttttctatataatccaatcaaggtttttcttaatgtgattcttctgtataaatgcttttatctatatgatatgattttgagagcattgtcaatttgtcatatgtcaatgaagaaaggtttttgaacaaatgaagaattgtgagtgtgggaacttcacaaatttgtgtaagaaaaaataaaaaatgtggaacttttgtcacgatttcatgaaatattcaattcacttgaaaacattgtagtagagtagaagagagggaataaacaggggagtttatcaaatatttatgtggttggatggtgacttgacttgttatacttatcgcaacttggctttcctttatggagctatttttttttttttgaggagtaatattaattgttgctggttaccatttaatgttttttctttcatattgggtaagtttttcttttcagtgtttttccttcaaaaaaaaagtgtttgttttctagcaagaaattgcacgctgtgttttttgatcgtttatcgtacaaagccaagcatttcagagtctcagacactggtggattgagcattttgctactaaattcaaatctaattttggctgttgtcaaaaggaaagatctaattttgtcttactatctagaatggtgtgaacgttttagaccaatagacattttattttttttgaaagggaccaccaat

SEQ ID NO: 945 - DNA, 2406 bp, Cannabis sativa
acaacacacaatttcaaaatattcaatattagtttaaataacgtaaactgagtatcttaagatagagctagattactaatgttgttaaattagatcttataagctttataagttactctaatcaccatcaccaccggtagaaaagcaattacgttttcacttctaggtttgtttatttttctaaattttgattatttttatcccggaagcccaaaattcaattacaactgtatataaatgctaaactattaaaatacaaaagttcaattcagcgggtttcaaaacctcatggcttgaccaggttttgaacaatatagcaaaaacatggtttggatatatttttctaggcattagagaaaaacaggttttgatgtttttgaataccattatcgatttgctttgaattttcaacagtattttatactgattcactagccaaacatatggaatgcaatgttcatccaagcatgttggttagaaccaagaaaatcgttatgttgaattcctttttggaatttcagaataattaatctttttcccaggatctttttatctcacagcgtacttgtttttgaaatcttgcagaacaatcttcttagattgcatagacatcccgcttccttcaaggctaaaataggaagccaatcagccccactttttgctgagaataaagtagatcccagtgaaaaattgagacagctgcggccatcattcacacgaaagttccactcgtatgtcctacccacaccaattgatgcaaaaagtgcggtttctactggatcagctaatcctgtgaagcacactacaataacaaatctaagcgagcgaaaacagaatttgtggcattcaacccccttggaaccaaaaatgtatgaaaaggatttgcaggctgagagcatttatgtaccaaaagttataaaattacagtctgtactgaaagaaagcaacaacaatattgcacaacatcagctacctcctccgttgttagatggccatatattttcccgccatgatcaaggttctgcttctgattccaaaaaaattaaaaggcaagccttttctggtccgttaacaagtaaacagtggtccttgaatcatccccagttatattctggacctctcctacgaaatccagtgcttcaaccttcttcgtcaccacctaaagcctctgcaggtgcttcccctacctttatgtcgtcacctaaaattagtgagcttcatgaattacccaggcctcccgctagttcctccttccagtcatcaaaatcaatgggtttggttggtcattctgcccctcttgtgtctagagctcaagtacattcttccacaaaaatggtgactaaatctcctctgccaaaaccccctcaaaccgtttctcgtagtttatccattccctcaaatgattctagggttgtggatttacaagtgtccaaaccaatggatgttcctcaaaactctccgatcacagaagatcttgtttctccacctttatcaccacttgccttatctaacaactagcaattatcagtttccagatcttcatcaatctggccaaatcagaggtaatttgactcagtttcactgttttgatttctgcataatgttgctcaaacataaacgtcagatattgtttagtggttgaaatattttatgcctcaacaccttcatgaaaagcattgggacatgttgggtttaactaggattgatggtagtccaagaaaatatcgtttggagtctgctacaaatttttttggttaatatcttgtgatgagtattgtcattcaaaaaataattggaaaaaaatagggataatttagtgtttcttttaagggtgctatatgatggaaagttagtgtagggtgtctttcttggaatctcattaggttacatactcagtactcttataatcaatagttgtgaatcaataagtgagtcttgaggtgaaccataaatgcatttaatcatatattacattatttctctattttgtattgcttttctttttccccctttaagtggtaatggtgttaaattggctacaggtgagaccattattttgtggccatgattttggttctaacttaggcaacggagagttttgggtgggaaggatcgtttctcgttaattagtttgtacaggtgctgctactgctgctgaatatgtaaatatctttttgtcttcataatttattaattaattatccgacatgatggactcattacataatttacttccatcattgaggagttttgtattcacaacactacgagctatctataatctataaacaataatcattttatattttaaaaaaactaatttttcttgatgttactattattttatttatttatttttccctgaatgttgtttaactatttgaatagcttcttttcaaaatatat

SEQ ID NO: 946 - DNA, 6065 bp, Cannabis sativa
  modified_base (1076)..(1089): a, c, t, g, unknown or other
gcggttttttcagttttcagttttatcggttttcggttctaagggtgttcagtaggtctttttgaacagtttttttggtattctggattttaagctcacccctaggaaggacgagcaacctccttgggatcatccctaatcctgatgggtcgttcaattggcacttgatcaccttaaggagccttcttcttcttcttctttggagcctcttacttagttgtaacctccttggtcacttatttgggctcttaaacctcattagacgggtagagcccatacttgatgaaattactctcagtggccaaaagagaaatgatccgagccgacttcgggagttaaagaattttttgggctcttgacctaagacctagagtaaaagtaggacgacggaaaaaaaaaataatgtgttggaaggagatgtgattggtacccatgtccttgacaaagtagtaatctttgataaacccatcaatcttagtcacttccttgttcgtggtgctagtcagccatttgcactcattttgggaaaagtagaagtacccagacttgttctgcttggggctagattttaagttgaacaaccagttagtatcgtgagtggacggctggccccatccttgggtagcatacaacacgaacagtgcgaccaagtactttatgcctttgggagtgaattgggtcagacatatgtggtaatagttggccatctctttaaagtatggatacaaaggtagcatttcaccttgttttgcatgtggccctgaccatgcacaaaatccacatccaggatttgtagcaagttacccaagactaggtaggaatgcctccaccttcccgaggaggccttcttcaaagagattggtcaatctcttggatgttaacacggatggtggtgagacccacagagcaccattcataccttagtgtttagaggccaagcctctatgtattcctcctcaacataatcttaacctgccaccaagacatctcccacattggagacaggttctctgaccttattgtagttaccaaaaggaagttctagaacctcttccccttcttcttcttcttcttcnnnnnnnnnnnnnncttcttcttcttcttctccttcgaccatggagggactggcaggatgggcattaccctggtcgtcaatctcttggacctcaatgtccccttcaacaactacatcatcctccctcagaggcctagcttgttcaacctcagctgctgcaaacagtcgggcaagatgaggattagatatcaaggccttcctcataatttacttggttcgtgccatcattctatgtctgggcagtggtttcaatttagatgtgtgtcttgcaacagtaacaacaatattagctacaacagtgttactagtagacgaagctgctcaaccttatagaagtgtatcaacaacactaggatggaccctatacatccatgaagcaggaagataatgcctccaaccttttttcagctcacagataaaacgatcgtacccctctccatgtatttggtcattgatagtgttacaccacggacttcgaggactctgtatgattgctgatgaccttccaatcttcaaaagtggaatttgaaaggctatcactagacgaagatgagttcccacctagctgagtatgattctcatagaggagttgaagaagatcctggtcggtatgatgatcacctccccagtactcaccagggttcatctaccagaggtgggagacaaagggtgagagtttgatgggggaaaaggagaaaaacatgtttgatatgtcgactcaccaatttaaatagaaaaagaaggaatttcatttcaaaatggaattctcaaacccaaaaattcaaagtcatgaagaatatctggaaatttttagaaaccaatgaatgggtgaatatgaataatctcaagccaaaaatgggacgagattaaagaattagatgacctaagcatatgttagtcgaaattaaaagttctaatgtcttctaccctatgatcaatcaagaatagttcaataatacataaattttgcatcaagaaattcaagaaataatgcatgaattcaacataaattgcataaagaaaagggaaagataacttactcattgtttgaagctttttgaacgtgctcggagggtttcagcaatggagattctagcaaggtttcttcaaaaattcaagaatgagaaaagaaatttttttttgctctggttttctgaaaactaaaatggctaaaagagactctctaaaggtttaaactccttttataggtaattgatgggggtaattaattgatttaaaatttaaattttttgggtttcccccttaaaaggaatattaacactcattacaacaatccaaacatcacgcatgttgtaccatataaccgttagtacgtgattcgatgtacaacgttcaagatgtattaaatatctcagacatttaaaagacgttcgatcaggtcacgttgtcggatcaaaggtgataattagacacgcgtcacccatccgatcagctttgtggccagatacggataagtccacgcgcgaccaagaagatcccgcggagacttgatgggcaaatgttatctaaatttttgtactttgacgtgacatccatctaggtgacacctgtaacatatttcataacatgggcggatgattctactcctggtaagccgaataggaaggattgattctcaaagtcacaaacagaagttttggcatccgagcagagtgtgcataaacatccgaccaactttcatcgagaaggtagtttgcatacaccgatcaggggatgcaagttagcaattttttagatatatctcgtatatctccaagcttgcaagccacgacacaatccctacattcatgggatagattcgtgtcagagaataaaggcaatcaacctatatttcctattatcctcattgtaattatgaaaataaactagtttcccattttattgattattgatttagggaaactaatttcatgtgattaatccctataaatagtggactcatctcactatttagagacgtgaaatttatttagagagagaaatctcaatctaagagtaaaataatcagagattattgtaagagttttcgagagagaataagtcattcttattcattttcttataagttaatataacaataatgggagtaggctattaccatctataaagggtcgaacctctataaaatctggtattttcttaactttatattatttactttatgttatttagttattctcaatcactttaatttaactcactattgttggctaaaagcgaggtcaataaaatagtttggagctattttttcataataagaattattacctgaattaattctacatgtatcttattatttattttaaattaatttgaaatgttatagagaaaaaatgataatttttattaataggtaaattagaaaatagaccattatttctttcataaaaaaaaaagaaaatagtccattattatttagaaaatcactccatatattattgggttgttttgttggttgtgatttttttttttgacgtggtgaacagagtcacacatgattaacaatgcatcaaattacaatcggcggtggaacctcctcgaaccaagatagctcattgtttaactgaaaggtatgttttgccaaattatgagctgcaaaaatctaatcgcgagctacatgagacaaaactaccctcagaaatatagacaataaagatataacatctttaaatagagtctcatcaaattgaaagaataccttcccattaataatagttgtcgccaaatttaaaaaaatattgcaacaccaaaccaaaaaacaaagatatattagaatgacaatcttcaaaataaaaaattaggttatgatttgaattgttatattgattatggtttaaattaggttgccatttatgttattggtgatttgtaaagtatatttaaaaaaaaaaaattaaaatgtataaataaaaaaaccaatattatttaatttatttttttcaaaaaaattaagaaagggaacaatggtagctacttttgggtttgggatataaaaaaggtctgtaaacccaacccagtgaagcaccagagattttgcagatcaattcgtctctgagtaacgccggagatggatcggcaagcacacgattacgccgccgcctctgccatggcctatgcccagcagcagcgtggggtaaatccacagcagcaacagcaagggtttggataccctcctcctcctcagcagcaacaacagcagcagttccctcctttcattcccccgcacccgtcgatgcagcaattcccttaccaagtccatccccaccttcatcatctccaacagcagcccccgtccgcttatccctccctcatgggccctccgcttgtgcctccgcctttccacgcttcttacgatgccggggcgggtgcaccgcctccaccattaccagctgctcctccttcggacccagagcttcataagcgaatcgataaattggctgagtatgctgcgaagaatgggcctgaatttgaagccatgatacgggaaaagcagcaagataatcctgattacggtttcctgtttggtggggatggccatggttactaccgttataagctttggctatgtacaagaggcgcaggtggtgggtcattcaatccgccgtttcctccttcgtctatacatatgatgcgtcctcctccgaatcccatgttgagtccgtctcatttgagtgcacctcctccaataatgggtggtccccaaatgcatcaaccaccgtatttctatgagcatcaacatcctcagccttttggctcttacggtagaccagactatgatcagtcttcgaagccttttaaagggctttcgggtccgctaccctccgatgttgcggtggagttaagtaatgtgcttattactcttaatggcaccaaagagtctatcaaaggtgccaagttttggttcatgcagaggtctatatttgcaccggctttggctgaggcacttagagacagagtattctctgtggacgattccgaaaggcaactccatataatttaccttgctaatgacattcttttcgaaaggtacactctttaaatcactcttcttctaatactattccgatgttattcaactgggcaaaacttataaatctgaatgctactatgtggttgttccttgaaactttgtttgtcattattatgttaatttgtctatgtctctttattccttttgctgatacagtcatctgtttttcatttttttgcacttaattgggtgaattctttgagattgaaaatagttttgctagttaatacgtacttgtttctcttgcattatactatataccatctcttcaaagtgtgctactacaagacactaaaaaattgttactagttgattcaagaatagatagtttgagctttggtgtgttgataggagcagagtagtatcaaggatattatggtcaagggaccaactaacaatgacaaaacggggctttactgctagtactcaagctcaactttctagagctagtacagtttgattcccttttttccccatttcagatgccccattattttcctcattcatttgcagttagcttgcttctaacctaaaatttatttttataacctctgaagagaaacctacatgattttctgatatttagtttttggggaagggggttagggttagtttagaagaactctctctctggaagtattttttagaccattggaaagtcttagcctaagttgtaagtagaaattcatatgcattataaagctatctgcaatgccgcactatatttctctaaggtatttgaatttgtgtagtgtgctacagttgtttcgcttagatgtgcaaacccgtcttaatcttttacttttattatccacgccacccatcaactgattaatacttgtttccgtcaaccctgctgtatgtattctttgatgtttagacttacagtaccaattcttctgttgatcaatgcagctgttttcaaattgatattcaatt

SEQ ID NO: 947 - DNA, 941 bp, Cannabis sativa
tcgtggttcgacggggatggggacgggtttgtggttgacacagacagggatgaggtctgtcagttcgtggttcgacatggatggcgacaggttcgtgggttcgtgtggagacttcgtaggtggatagtcggggggttggtcttcgtagtggcagtagagatcttagatctggttcaaagttgtagatatgaaatttgtgtgtatagaagtgcgtgtttgtttgttagatttaattttatttaaatttagtttgagttttggttttttatgtgtgtgatttgcatttgaaaaataaggtgaagtggtagttggttgttgcggtgatgatgagttgtggtggcaatggtggtggatagtggtggtgatggtgtatatgaaaatgaagaaatgagaaaaagttagaaaaaaagtggagaagaaagaaaaagaaaaaaaaagttgtttttttgtttacaatttttttattttaaataatttatttaattttattttatttttaaatatttatttgtatggactaataatattgtgccatgtatatacagtatatacttggactactaacttcgcagataacagataaaaatatatagaaatgactaattgctaacataatgaacgttttgagggaattttgtcgtcaaatttagattttaagtgttaattagtagcgaagtaaaaatattgagagttatgccgcaaattactcaataattcaataatgagttccatatctaaacattggtgacttgtgaggtgacttaaaaagtagtttttcgcacaactttcttatagtgcaatttctacatgtatattgtatttagtcgaagaagcgaagaagcatatgagacaggttgaagtttttaccttgcttcttataattgaccctcctttcagctgagagtgtttaatgtctattatttggctaattagcaattccc

SEQ ID NO: 948 - DNA, 2085 bp, Cannabis sativa
atttctcaaaagctattaatactgttcaattttgttcattatcgtatatggggaaattataatggtttattattagtgattagatacaaggaaaagccataaaggcataactaatctgctgacattggtgaaactgccattgagggtaaaccctcatcccacaaagctgaagcatataataaagggatcacttattttaaattatgtcctcaattttaataactattaaatttaattttattaatcatatttctcctactatttcttgtacaaaagaagcttttagttttagttttgattccagttaaagtctacgaaatttttaatcgacagaatttcaattttggtcaactagaacttttaaaggtcagaaggatatgtgcttcaggtatatttgggatttacataaaatcgtacttttgcaaagaaaattaaaaccgtatttttgaaaacgtatcaacaaaagttgatataaaacaacccattgatctagcccagcccataaaccgtaagtgaagtggagactttggtaatttcgatcagactttgtaatatattactggtttggtccattcgcatccaaaaccctagagtcgccccctccatttctaacacaggtttttctctcactcgttctctacttcttttccttttgttttttctgtcgttacaattttcgtcagtattaatattctgtatatttgtattttgttgctcgtagggtttcatatttattagtcagaaaggtttcagcttttaatggctcctaaaggtactaattccaccaatgctttcttttatactctgttctatgctcttttgatttcctttttctctttgaatgctaccatgtacgagtttaattgttaaattttttagcgttcattagtttccataacaaagttagtaaatgattaagtactgtttcattttctaggaatcctattagtttggtgtgtttttttttgaataacttgattccttttttaaggttgtgaaacatgctttgattgattagtaatagttagtgcgacctttttggtggtttggcgttctgggtctttggtttcttacttaaatatatttataaagatgagaatgggagaggtactaaatttacttgaagaaaatataggacttggagggctgtagagtctttggcaaggaaggaaacaaataacaatgtaaggaggggtatggcaagggtaatgctgcaaaggaattgaagtcgtcattttatttggtgtggggggtgttttatatttaccggttgttagcattagaagaatacttatttctgaccttcaatgaatattttagtttattattctgatggccagtcagttatttgataagtaactatatgaggaaacgtatagcaaatttcgatttttttataatggtgtctttgattttgtgcttagtgagtcatgttgatgtaggtttcatagataaatagtgatagtagtagaactaacgaatgttcgatatgtttatcattcgtagacttatctcacatgagccttgagatagttgaccagattatctggatccaattttcattataactagatgttggtatattgcaataaagtcctatcttcttggtactgtcgagaatatctccaactctttgcaatgctagtattgttggtactgatttttaatgtgtttgtgttctctttaacaacaagttatatagtagagagaaattcgtgaaagctttctgtcttcacattcctaacacatgtaattaattgtaaatgaactggtatgtgagtttgtacagccatgtgtctcagaaataattttcatctggcgagaatttgaattcttgttataacacatgctttgtttgaattcacgtgtctcagctgatgtctcgaagaaagctgatccaaaggctcaagccttgaaggctgcaaaagcagtgaaatcagggccgactattaagaagaaagctaagaagatccgaacttcagttaccttccatcgcccaagaacatttaagaaggaaaggaatcccaagtatcctcgtattagtgctccttcaaggaacaagcttgatcattatcagattctcaa

SEQ ID NO: 949 - DNA, 3693 bp, Cannabis sativa
tctctctctctctctcgtccaaaatagacgcgcgaccacgagcatcaataagtcttctctttctcgtccactctttctcgtaacttctttattatttttttattttgggatttatgtatttttgagatttttttatttcacagattgtcagagatcttgattattcggagatcttaaggccaaaccaaactccatcttagtttcgaggaggatgaaggcaatgatttttttgggaaaatccactatagcgacggtttaaaaccattgcctatactataggtaacagttttaaccgttgcctaaagtatagcaatgattttaaattgtggcatatagtcttgattatagttgacggttttaaatagtcaagaattcttttatactaatatttttttactgtcgcctattctacccagtaatcgtgatgctcgtataagtgacaattttatagaagcctattctactcagtactcgcgatgctcatataagtaacgattttatagaccgttaggaattctttacctcacggtgtaaaactttcaaaaaatttggattttttaatagtgattgtttgcataatattattatgtacctttattattttaacttgcatcagtttttctttccaaaaacaaaaaaacaaaaaacttattacaattatatctatatatatataagtaatgataaaaaaaaaaatgggaatttaaatgtaagaatttatacaatattggctaaaatgtaaaaagatctcataattattttttattttagaaaaaagtaaggagagctagtgtcccctttaagcattatgtaggtccgcaagtgtttatttatttttttttttacatatttaaaaatacatacattggtatatttatatatttatatgacaacttatatattttaaaaaatatatatacttatatagtataattttttagaaaaatattaaaattaaaataaaagaaaagaaaatatttgaaattaacacataaattaaattaaagaatgtagaaaataaaaaaaaaaatcaagaaaactacaattatttattatttattagtagggacttaatgttgtcaaataactaaaagtttaagaactgatttgacaaaaattaaaatttaaggaccacttatcaatatttatatatttaaggaccaatttacaaaaacaaatttaggaaccgagtttggggaccaatatgtaattattctttttctcatcctagttgtcaaaatttcgacaacgcaacctgtataactgggtccagaaacaagttgaattaacaaagtgtacatgaatttttatatacatatggatatattatatagtaaattgatgtaagagtagtatataaagctgtcccaaaattatccattctaagaaaattggcatacatacaacataactatgtcagaatatcaccattattttattttcgatatatttatatttatatatgataaatttccataactagaatgtttgttttcttgccctctggctactaggaagtgggtattaaaaataaaaaaaaaatggttgttgtttgttataaacggtagttaatgcctaagatatatagctagtttagctaggtatagaaagagagagtgagagatatgccccacttaattttacaaccctcatactcacactatttttctaactccaacgtaggtagttaggtggtgtatatatatgagtatacatacacacacatatatctctggaatcctagttcatcagtagagctagctagttccaattttaattattatgataaacttattgtacaacacttattgtatttttctgtcatcctcctcctttgatcaatccttattaaaactcatcacctttgttctttcagttgatttctggcctaattaccttgttcgctgtatttatagctactttcattgagaaaaattaaaccagaaagtttcaaatattccggaattcatattttacaatattaatatatattgattgatatcaggtgtgaggcaattaattcaacccgaaattgggttggttttgttgttttttattttacacaaaaataatgaactacttacaagaaattgaagggaaactagtccacgataagctaacagagggtggaggttgtggtggcggcggcggcggtggtggtggtgatacaacaacaaggatcagacgaatatgggttcggggacccataatagtcggggcgggtccttcgggtttggctgcggcggcttgtcttaaagaaaaaggtatcccaagcttgatccttgaaagggctaattgcatagcatcattatggcaactaaagacatacgacagactccgtcttcatcttcccaaacaattctgccagcttccactcatgccattcccatcaaatttcccaacttatccaaccaaacaacatttcttggattacttaaaagcttactccaaccgtttcgatttgaaacctattttcaacatgaaagtggagagtgctcgcttcgaccaccgaagcggtctttggcaagtcaaggcctctactaccaccgccgcggccacacctggggccgggctagataagaagagtactaataatcatgatgatgggcgtacagagatggtaatcactactacaactgagtatgtaagccaatggcttattgtggctactggggagaatgcggaggaatcggtgccggagatcgaaggaatagagagctttggtggcccaattgttcacacaagctcttacaagagcggtgagatttttagcggaaaaaatgttttggtgattggatgcggcaactcggggatggaggtttgcttggatctctgtaactataatgctcgtccttcgcttgtggtgagagactcggtgagctaatttttattactactcaaatatataaatataaaacacacacatatatacatacatattctactatgttatcatttatatgttactccaaactaaattgaaaaaccctaattcttttttatatatataaataggttcatttcatctctataaatttgaaaatattaaatgataatatatacaaaaatggaagctatgtatatatagtggggggagtttattagctttggtttttattcagcttaaaaagttcttattagttttagctcaacaacttctcttttttttttcttttgtttctttcagacgtggtgtaatttgcggctgctagataggtaaagttttaagctagagctagctaggtttattggtgcgtaatttctatgataataaataataataattttttttaattgagtgtaataagccaaattaggcggaagactatgatagatatagctagcacagctattacataaaataattatatatagtattgaatctagctataaataatataaaaattactatagtactctgactctcgttaaataaagatgtcattcttgtgattttgctttatcgaaattcgtttgcatgcgcaaacagcccaaaatcttataccacacagtatacatgcttttttattctctgcataaaatatatattttttctaaaaaaaattctgtaaaagaatcatatatagtcagtgttacagattctaaaacatcaaaacgtaacatgggtggcattcatatacatctagctaggccaacttcaacccccacacacactaaacaaaaaaaaaaaaa

SEQ ID NO: 950 - DNA, 1772 bp, Cannabis sativa
atatatcgtctctctcccttgtttgtatgcttcttttgatttttactatctttgacattttctgcaacgcgtttgatgctaattaggtttccacatgtggaacttgtggtggagatggcaagataatcactgattattgtcgaatatgtggtggtaacggtcgagtacaatctaaacgtacaatggatttggtgatcccagctggtgttagtgatggagccacaatgcaaatgcagggggaaggtaactttgatagtaaaaggtgtgcacactaagatgaagtattagtttcctagttgtaatcaactcaactttttatcatttgttcaatacaaatcagaatttttgggatgtttgtttgtatttttgcaggggcatagcaggtaacctctatatagtactccatgtaaattcaaaacaaggaattaaaagggaaggcctccatctgtactcaaagatcaatttgcattataccgaagccatactagggactactctaaaggtacttttatggtttttgaattctattttgatttaagagaagccaaaaatatcttttgtaagacttcttggattgctgatctattcacttctaattaagaatcaaataataatgtgactatgatttatttatttattgattcatttgcataaaacataaatcaagtattggctatattccacactgctgccaacaaataaaatttgaagttgtaaatggtgttaagcatgtatggttttagtcattctaccccgaaatcctgactatgatggaagcattcaatattagtaatattgtaacttttagaaaagaagcaactgcaattctagagttttaggcattcaaatctctagtagtaatttcagttgaccgtactctcatataatcttcattaatattttctttacttctggaatgcttgactttattcggcatattcttatggtactttttttaatttatattttctagcttctcatgcgtatggtttttgaataaaattgttgcatatttttttttgggggccaagtatttatttttattttgtataatatcaggttgaaactgttgagggaatgagagatcttcatattccttctgggactcaacctggagaaaccgtcaagttatcacgcttaggagttcccgatatcaatagaccttctgtacgaggagatcattactttgctgtaaatgttcagataccaaaacaaataaggttcaactcaataacttatgaactgttttactcatggtgtatcgtgatcgatatatgtgcattagcttctatatttttggcagtgactcggaacgtccactcctagaacaattggcttcctttcagaaatctagcaaaggcttttcttattcctctgaaagcaaaggttggttccacggtttctcgcaaacatatgtaaataatatgcccatattttgttgattggtgtataacaatataaactttatttgttatcacttttctagggacgactgaggagagattttcgaaggacaaagttagaggcaaagagggatcccgttcaaaacaggagacaaagcgtgtttcatctttgtgggagttgatcaaggggttcatggggtatgctctgtatatatattgtttgaataacaaatatcatgtctaaatttgacagcaaagtaggtgtcttatattccgaaatattggtagtcagtttgatatgtaaatggccatatctggaactgagcatttgagaaccgagtattatttctatataagcattgaatttat

SEQ ID NO: 951 - DNA, 934 bp, Cannabis sativa
taaagattcttctaatatgaaagctatagctatagttgttagatcatcatcaaaatcccactacatggatatataagaagggagcccaagatgtaatccttccaactcattctaacaccaattatagccttttttttaatatacatattttctttctattccaaaaagaatagaaaaaaaaggtaataactacacaaccatacaatgctttagctttactcctactcaaaccattcatatataatatattcttcatactaaaaacctttcacaataataatccctcatgatcattctattctatcacacttaattaataagcttatacaattttctcttctcttcttcttcttcttcttcttaagagaataatgagttcaataccatctcaagtttcaaccaaaatgaaagcttattatagatcaaagcttcctttacctataatcaccaccataatatgtatcattgcttttgttcttcttctcttcactgaaagacttaattttcttacttcaaactcaattctaagtgccaagacatgttcaagaagagttggtttaaaaaaatcaagtaagccctcaaataattctatagagatttttagttatttcatacaatttttttatgagctaatgttttggttttttcttttttttttattaggtgagaaaacagagagaaaaacagaggatttaatagatgataggtttgactttgaccctgaagaatgtaatgttgctaatggaaaatgggtgttcaatagttcaattgagcctttgtactcagatacaagctgtccatatcttgatagacaagtctcatgtgtcaaaaacggccggccggattccgattaccgccactgggaatggcagccggaagattgcaccttgccaaggtttcttgcactatattacaattttcttatactatcttt

SEQ ID NO: 952 - DNA, 2488 bp, Cannabis sativa
aaacaaagacttgagaaattttttgggggaaacaataatttgttaaaaatataagagtaagaagtctgaaggttgaagaaaaagacgagggctgaatcaaattaattagcacaaaaagtaattatgaaaattgattttattggtccactatgatccaattcatagattctattcaaaatgtcatcaagtacatgaaacagacaaaatcttctgttaattcagttatactctaccatggttttatatcttaaatttcgttatagtagtgttaaagttagatattattatatatgatatgatgacacagtatttgtcacttgactacaagtttaactctagcatgaccttgtgatatttggaattgttcagttaaaccaaaatgagccatcaaaagccaaacatgagtgagaagctccccacctcttctgagctgttgagcatgatgattccctctgcattggctagcagcataagcaagcatctccacccaaacttcactaatcatttcccacttcttatctttatctgagatgccttgcagctcccaggcaagcctgcaagcatcaaacagcacagatttgcttctgtctcctttcactttcacggctggaactgcagtgttgactttcagcaacatgttgcaggcttgggatttatctaacttggccttgtttctagcccaagagaaaaactgagtactactactactacttctactaatgtctgacaatgatgatgatgatgacttgtgttcttcaaagaatttggtaatctcagcttgagtatctcgaaatctgatcataccaatccccactggtaacatgaaagggcgcatcactagaagatacaccatgtactgtgatagccttttgctcaatttacacttagtgttatcaaagctttcagctgtatgatctttgtagtaacaaagatatgtagcaatgtgccatatcagaatgctttgatcaaaatccactttgatgctccaatcaagttcagtacagcaataattttctaagacacgccctcctcggcaggtaagcacggctctagcatctgttgccacaatgcttggtgctactagatgctcaaacttctctttgagatggtcaaaaattagtgttctcatctccctggacacttgcttgtattttgtataccgggatttttctagcagggaatcaaggcagagaagcttttggatttcataaccgatagttggtttgttaattttgaggtaaaagctcaaagcattgaactgtgctatggaatttgaccatctgtgattttcattaggcagctgcaaacaagtgacgaatcgacgaatggaggcgttggcatgcttagttaaccaatgatttgtccagtcagaagagatcaacaagattattgcatatacctctaaaagtagagcagcatatagcagtaaataagatattagcaaatcaacatgtgagtgtgattgtttatgttcagcaaaggaaaagaaaaccaacacaccaagggtgcaaaaaaaactgaggaaccggagacaacacccttgaaataaatatatgactttagctttggtgtatagcttgtcatacacaaatcccagttcaatctcaaccactttgaaagccttttccaatgaaattcctctgaacaaggattgactcttttccctatcatcaaaaccaaggatgagttcgacgaaaaggcgctggaaaacatgtaacaattcatgggcagtgagcaattctgctgcatcaggaatggcgtaattctcaaccaaagagacactcacgggggcttgagcctcaatcacctcatcagcagtcacatggaacccctcaaactgttttaaagtatattcctgcataaatttggaatagttggggccaggatcagcaggagttaacatagagtccctgaatttctcactacttgctgacctgagaacccaagttctctccccatacttaatgattcctacacagaacactagaattgacagaagagagagtggagaaccagtccaagccatgagaaaaatgtatagagtcacccctgtttgtactcctaatccaagtaaatgccttaaccataactcattatcttccaatgaataagctgtaatggtgtcaggaccacccaaatgaagcaaaagaaaaggtgcccagaaagcagttaactcagcatcagcatcaagagagccacctttgccaactgtttccacaacatcaccaagattgttggaaatgacaccaagagcaacagtggcaatccagtcagccatcaaataagcacaccataaaacaattcttacccaaatcttacttgagtatttcctgcgattcccaaagaagatgagaattatctgcaagctgaggctaacaagaaccataacacgcagttcccagtctttccatagttccctcaagctaccaggaaataactccatcacttttctaccctttacatacatcaagctgccaaaacctgtaac

SEQ ID NO: 953 - DNA, 3352 bp, Cannabis sativa
aaagaaaaaagaggtgatccaacagccagcagtcaaacaatctgtggaggatctcccttcaatccatgatgaaaaggtagagacaactgggaagaagagcttggccgaggaggttgatcgagaggattttctaacaaattctcagcaactatggaagcatttcatggaaggtaagtctttctttcatgattctaaactagcatattcccattcttaaagatgggttaaaaattgctcaagttgatattgatgaggttcaagaacatgcaacaaaatggaatactgttgtattttgtataattttaggagctaaccctccaatcaaggtttttgaagggtttattaaacattaatgggggaagctgggtattactcagatagtttgtatgaatggtggctataccattgttaaattcaatgatatagcaactcgagatttggtcttggaagaaggtgttctgtagttcgatcgtaaatcagttattgtgcggccatggacaacagatcttactgctttgaagctggtcaaatcggttccattatgaatattggggaaataaatgccttagtgccattgttagcacaattgaaaaacctattatggctgacaaagttataagggagagaacaatggtcaaatttgctagagttctggtagaaataaatataacagataaatctccgagtgtgatacactttcttaatgaacatggccaactcatagagcaaggagttgactatgaatggcttctagtgaaatacaaagcttgtcaaggttatggtcacattatggcagattataggaaaattaaacatcctacagctacttcgaacgagaagcaagctactaactcaactcaaattgaaggaagaaagaatcatcaagccaatggtagaggtagatgaagtatgcgtcaacaataaagatcctataaaggtcatcaaagtagggaagaatttgcctctggttgtaagagagaatatcgtatcaaccgtgaggaagaatagtgatatgttggcgtggatccattgtgatatgactagaattagtcctcatgtaatttgccatgccttgaacattgatccaaatgtagatctagtctatcagaagagaagtctgtttgatccaattcgagcaaaagcaataaaaacaaaagttgacaaactaaccaatatagagtttctctgagaagctctatacccaagtgttggtccccaagaatgatagaacctggagaatgtgcattgatatcacgaatctaaataaagtttgtccaaaaatttactttctacttcccctaatagatcaaatggttaatgtcacatctagatacgagcttctaagtttaatagatgcatattctggttaccaccaaatcaagatgcacatggaaaataaagaacatatcagcttccaaactaacaaaggcatctattgttatatggtcatgcctttacaactgaagaatgctggagcaacatacagggctggttttaagggtaggctcgtgcctagggctcccaccccaggagccccatattatttatttatttatttataaagataatgtaataattatatacttatttatactattataaaaattacatagcattggcgtaatggtgctgcgcctccttttaagttcttcagagttttggtgtgctaagttcgagtcctaacaactacctttttcttgtaaaataaatcattattgaaaactaaaaaaaaggagagctagttcgaactcctaaccacataatggaaaatataacccttccccactagactaactcaatctattattttatgtgtgtaccgaaatgtatatatttaattatttattctaattattattaatatataaaattttctaaaaaattaggttattaaaaactacaagacgagtcacatttatgtaattaatttaagggtcccataatttaactctccatgggcccccattttcctaagcacaaccctagccacgtgttagcatctggttaataaaatgttcaaggatatcttagggaagagcatggaagtttacaatgacaacatgttagtaaagtaaaaaacatccatggagcataacgaagatctagaagaagccttgtctattatctgaaagtatggaatgaagttgaatctaatgaaatgcacctttaaagttttcctagggaattcctagggttacttgtagttctgaggaatcgaagctaattcagagaagattcaagctcttctagacattatcaagtcaaccttacaaaagtgtaaagttgacttggggggaaaatgtttacaccaaaagtagccttggtgacatggacatcaatgtttgacatgtgggaagaaggaaatcattcctatagtgaaggaattcaagtcatagcagtcaacttgggaaagggtccatagccctacatttaggttgaatttaaggctccaaaatgggtatttggatccttccaggtagtttccaagtcaccatcctttagattctaagtcatgaagacacgaagaatccaagtctgagcacaaaagttaaaaacacacgaaacaacacctcaaaagtcaacctaggtgcctagggttttacccagcgcctaggctaacatcccaactaaggttttggtttatgggaccgtcttagtgcacatgggtcaaaatttgtactaggacatcaattagacatatcacaaacatatttgatgcattagaatcagattcatagaacttttatttttgagcacctggagcaccaagtgccccatgcaccagcgcccaggttgacatattgtcaaccttgggcacttccaagcatcaaaatgaagaactgacctaagcatattattcttcttcatcaacaatgaggaagcaagtacatttgaaggataaacaaaccgacttggaggctagaatgggggcccaacgcccatgttaacacttgatgctggcctaatgccaggatgacattttctcatcctaggccattttctcatcttttcttcataaaagatgaagatacatgtctttttgagaatcaaacataacagtttggtggcctaaaacttgactcaacgcgtaggttgacacctagtcctgggccttatgcctatgttgattttgtcaacctagactgtttctatacaatttcccaaaaaagtgtttggggaatttttttcatcaacagatataacaaagacacaagtaaaattgaggagaaaatgagaaccccaaagggcagaaaactgagcccatcgccaaggttaacatggtgttgggcccatcgcccaagttgagattcaacctggtgcgctagctccgatcactaaaatacaaattctt

SEQ ID NO: 954 - DNA, 1227 bp, Cannabis sativa
tatttaaaaatattttaacaattgtaacttgataaatcaacaatcaagttgagacataaaacgattgttaacttgataatggttgcagttttgtaatcgaacataataaaaaatttaaattgtcataataatgtaaaagtgttattgtgtgaattagatgatgcctatatagacttttgatatgaaatattttgatgaatgaaataactgatgttcttataaatagtttaatattcttacacgtcaaaatcaatagatgatcgaacatcgatcttgaaacgattacaataaaccttatactgcagaatagagacccttggatagattcaaagtatgcataactttgccatatatgttgtaaaaggctacaattgcatcatttggtgtaagttgaacagatatgaagccttgaccatcatagtaaaatctcattcccttgtgactatttgcactaaagtcacctttccatgcttttgaaccacctccacttgtcaagaactggatttggctgctgtaaaattttcgtaatgtattttcaaaaataaagtaaagacacgcgaatgctctaaaaattcgagtttttgttcattatattttacataatattatttttaattgacagagtgtgagtgagtgagtaaacaaattaattaccttgtgatgctacttatgtgttgtaaacaatgatcatgaccatttatgtacaaatccacttcatttgcctgaaatattataaagagttatagattttgttagagttgaaaaacttttggtagtattcatatggcaaaacacaaattatgaataaaattggatagtgttaaaagttttaaaaagatgacatttttaatcacatttttttattgtattttcacccattactcttttttaaaaagaaaatgctaatagtgttaattacctcaagaattggtaggagttgcttcactaattctttggtgtcaccatgatgccctgcacttctgatgccatgatgtccaatcacaattttccacttggcagctgaatttctcaatgctaaatctacatcctttattcccccaaaagccaaaccaatatttatattcatattagttaactaatataagcattcttagtttgttgacatttaatatagttagttagttaatatttgtctagagcctatttgaagacacgttgatagagtaatagtcttctttaagattggacaaatctttaaaatacact

SEQ ID NO: 955 - DNA, 2553 bp, Cannabis sativa
atttaattcaaagtcaatgaagtgtaaatatgtatatttttttgaaacacgtaataattagataaatttggccacaaaatacaagctaattcaaaagaaaaaattagttgtacgagtaaataaacattaatattattagcaatgagataatgtaatagaacaaaaaaaaaaaataacatcacacacgaaaaatatcatgaaacacaatactaaactcaaaaaaaatttattttttacaacccacacttccacactttgcacaagacaaaaaaaattcgagaatatttttacataacgataacgtatttgaagatgaagtttgagaccatagagtaagtaaagtagcacttcaacaacaagaaatttaaattatttttaagatagggcactcaaccagtctaaataatgtacatgttggtatgcaaaatgctctccgtactaaagtttaccgtacaccaaaaaccctactgaatattattattccttcttcattgatcctctgttgagtgatccaagaccttttgtgtcttaatctttttgatttgttctctgaatatggcctctggcaaaggaaaggaagtcatggaaatggtggaatgtatctcccgagatacagtctccctctatctccaacaagagggagaagcaggggaggttggccctgagttcatagaacggacggtggtgggacgggttctctccccacgaacagtgttcaaaggactgctccggtcggtcattgcccagaagtggagaattccaggatggagtatgtcagaagtggcaacgaatacttacactttccgattcaagaataagagcgaggcggagtttgtgttggaacgcagtccttgggcagtgtgtggaggccatctgctggtgaaaccactaccggagaacgggatatggtcatcgacgagtctacatctcatgccagtttgggtccgagtgtatgatgttccccccagattcttcactaaaaacaatgctactgctattgcaaataggatcggaagtgttataagcatcgatagaatgtggcgcaacgggttccctacagcggagtatattcgtcttcgagttatgctaaacctacaaaagccgctattagtgggtctgcatctccccatggatgagggagtaagcctctggtgttatttcaagtttgaaaatctccctcgcttttgctttaaatgtggctttgttggtcatgaagatatggtttgtaagcgtaaaaggagggtgatagaagatgatttcaaccatgttgttcctatgtatgggccttgggtcaaatttggtgctcgactgaagcattgttttgaaagagtatgggctgaagaggatgaaagagagatgaatgagcaacagccggtgctggtggagaatagggatcctgaagggaaccaggagcaagtgatgatgggtaatgaaatgccgtcattacagggagacaatgcagtgcctaatcttgaagcgtctcttccgacgtcgtctgtgccaagctctgtaaatgcagttgtctcggaggaggtggtagaacagacatcacagatggagccagagatgatttcgggggcggcggagaacctttttacggccactgatgggagtaacattgtaatggtgcaaagtccggccatgcaaaaggacagtacgtgtgaaggaggtggtgtgactgattgtacgaagattgatcgtggtgtaacggtccctgacaatctggggcccacagaatcacaggtgggacacctggccatggtatttaaaagtgtgttagatttaatcatgatcctttgatgagaaagggccaaaaacagaagttcaaaggaggcatgaggagggatttacaagggcttgaaaagcccattgggccttgtggcatcgggcctagtgtgggaaagaaaagaagagtggaccaattggaccaggagcccacatgctcaatatttccaactcttgagcccaacgggggaagggaatcatttaaaaaaaaactgcaccaatctaacccatgagagtatgataactggagaattatctgctactacttctactcttccatgtgaaccggaggatggaacgaatgagactgcccctgggattgaaggacaagaagagactccactgggagcgaaggaagatgaaagctttgttgccatcgataaggattttttacaggccgaggaggcaggccagaacatgccccccacgtcctcatgttaatcctttcctggaactgccgaggccttagcaaacctcaggcagttaagtcgctgcgatccttaattcgcagtgtgaacccggatgtggtatttctgatggaaactaaaacaagtgagtctgagatgacaaggatttggtggagattgggatttttcgatggggtggctagttcttcgattggagcttctggcggtgtggctttattttggaaagctgggtgggacatccagttgctcactctgacgattgacaagattgttgttagatttggggtggatagaaatttcaagccttgggttgcatgttttacttatgcaccccctaggc

SEQ ID NO: 956 - DNA, 2473 bp, Cannabis sativa
aatgtaaaagtagtaattaatgaagattaagataccacaaacacccttagttcccctctgtctcctctagtaactctcatatcatcatccatataagtaacttcaaattcaccactccctggactagaattagactgaccccttaatacatctggaatccttggtaactccaatggtggaagttgagacagattccctcttgcttttactgttgttttctcaaatgtaatttgtatctttgaagatcctgaaaagtatatataactcgtataatcatgaaaagaacaagatatgcatgcctctatctatcactatggttgatgaaatataccaacgtacctatgagttcaaatttatgtgctaatgtggcagtaacttcaataggtggcaaaggccaaggggcacctaattcaagctctactatgttatcaaagtccctgctaaagatatctatacgctgaaatacctataatatcacacacacacagattatatagagtcactcatatcatgtaaataaatcagtaaatcatatagtaatgacagttgttaaattgctaatccaacttttttttacatgtaccttcttaaactttcatttacgttagacttgtgttagtaaaattggacaaaaatacttgaatccaagaatcactagttcaacaacggcatgatttggtacatgccattgccaaggttcggggagcaaaagtgttaactagccatagatttattacctggccaagagttattgggagtaatcttccagtgggaggaccaggacgactcccaccaagagtcttagatgaaaaggcactgctgtatatgagtttccatcttccttgcaatttatcaatatctttagacaaatctactgttcctccagctgcttcaagctctcttgcagcctcttctgccttaccaagatcatcctcacttgctgcaagccctctatttactccactcacaccactctgtatatatacaaaattggaacgatcccatttcagaattctaatctaatttcaatttgggtgttaaagttgaaagctttccattccaatttccaaaaccaaatcacaaattggaatattataagctcagagtccaaaaaaaaaatctgaaatttgtaaaatgggtaaaagcaactgaccaataacttgagttttaagttgggtatgagctcatttttaggctctggtggaggtgggggcggtggtggaggctctaccactgcagagacaccatccccagctgatgatgacttcaaagaaagggttctcctgcgatgtccatgacccaagaaacgacttcgtatagggaagcgaggtgtggttggaacaagagaagagtgagacagagaagggtaaagagcgagagagtagtggggaagagaagatgctgcagccatggatggtgtgaggaagaatggagaagattttggatggatggtagtgtgtttgttgtgctgtggtcaatggtctcctccaactgaaatttaactaatggtttaatattttgataatgaagtagatagcaagaagccgtcttagctcagccggtagagcgcgtggcttttaaccacgtggtcgtgggttcgattcccacagacggcgttttaaccttttcttttagatatgaactgatgagtcatgaccgttatgttagttattttaattattgccttttgtaatttaacaacgtagttttaattaaattaagtttgatgttatgaaactactctactctctctagaggttaataattttgggtttaggtgcggcttggtattttattactgtaattcgatttttgttactgtgattagtcttgtctttgtgacttgatttgagtgtgttagtattgtctttatgatatagttttgagcgttttcgtcttgtcgctctgtggcatggttttgaggtttgatgttatgaaatttaccattccaacagttttgatgatacaatacaatattccacattaagtacttaattagtataggtagagatctagatagatggagataaaagagaagaaaaaggaaagttgtaagtatacattattacaataataaacatatataatgaattacccctaggtagcttattaatcatcatatatataattattattattattagtagtacgtagcaagctaggccttcttcactgctgcaactaccgatcttgccttgagatttagaaagatggccctgttatgtttataattaaataatacattaatgctaattaagaaatattaattaagtaattaattaattaattatggttatatattattattattaccagcaggaggcaacgaagctgtgaaagagaacacgaagttgcaaaggcgtgtactgataattcacccacccaactattggccaaaactgcaattaattaattcattcaatcaaattattacaaatattaatataaactctaaatcatttttataattaat

SEQ ID NO: 957 - DNA, 2147 bp, Cannabis sativa
agagatcactaagggaattcacacttctactcccattgattcttagattgacattgaggctttgagcaaatgactaacaccaaaagtaggaagagaagttgttgtctttgccaacgagctactggaccaagcagttgttagtgcaagtgagctgacctcgaataaatgggcatcctctagcagttgtaacccatttgctttggcccatgcaataaagcagcatgctataggagtaagttccacattttttccttctctttttcttcttagtccattacattggtgcattgtaggcttatgtttttgtgtttctagttgtccttgatggctaaaaggacctcaaaaaaggtggtgcaatggtcgttgatcttgagaaggcgcaagctaagaatcagtctctataattcaagaataaggcactacttgctgaagttgcggagaccaagtcctactgtctcgatgctataaaccatgtcaaggcagatgctaagtggattaagcactccacaatcatgtggtaggcgaagatcgatgccataaagaaagaggctagtgcaaatacaaggcactttatgggaagtacaaagttgagttagatgagaagactaagttgaggacttgacaagataaaagacacttggtgtgttaaacatgagttgcaagttatagtcacgcatggcgtccacatagtcaacaatgattgttgaacactatcctatagctatagaggaaaatttcccataaactagccaacatgattaaagcttttattgccttgggagccatgcaaggggccagagagactgctaaatagtcaatccatgatgctatccacctagcaactcgtgttgaaaggctttgtcttaaatttgttaatttgtcttacgcattgttgctacatggcttatggaagaaggaggcttccatccttaagatcatggaggcatattaggaagagggtctacagagtgttcttactgtcaaaaacaacacgtatctcgacaagtgcttttatgatgagaaaatttcaagtcagacagggagtcaactagccatacagaggcaggagacttaacagaggtggttgttttttgagtaactctctcctaagatcttcagggtcttcctcaagacaacccagcagacccttcgactctaacttagagtgcattccaagtcccaccccaggagcagcccattgttcaaccaaggaagtccttccaagccatttctaggagtagcacattgcccaaactgagaaatgaggctcatctcataacttttgcctattgtctttttattttaactttgtagaaacaattttagatatgccctaactacagggccatttgtaatgatcttagagataactgtcgtacttatgcgtgctttacttcaaggtttattacatgcttccttttcttgcctttgtttgctttctatgcgaactgatagattgatctttaagactttgccaatttttttgttccaacagtctaaacttgataatttaagatctctttaacttgatcaccatcttgttgaaccttttgaattatgcaacttcatacgtcttgtaggtgtcaacttttgttaaagttcttgtcgtggctttccttaagcttttggttaattaaccttacttgaaagaattgcaaattgtgctcccagatcattgcaggagttgcaaaatttgcctttcatctacgttttccccatttaactaccttaggtaagatatcacaacacactcatgttatttggattagtgagagaggggaatccaacgagaaacaacgtcctaggcatgttttttctaaggagatagggttagacttgtattactgtttcgatcgtctctcttcaatcaaaagtaccagggatgattcaacattcagacatattttccatgaatttgtaatgggaaagatgctagatcgcaaagaatttcttgtcgtgcttattttcttacttctcatggaaaacttatcaatatggccagcaggttgaagtgactgtaatagccttgagatgttctttttgagggatcatgatgaacgcacattggttgtgctaattacatggaccattctaaactcttcaacagacttcaagcgattcccccttccaagaaggagggttgaaga

SEQ ID NO: 958 - DNA, 2268 bp, Cannabis sativa
gagagagagagagagagagactgcctaagcttcatctctcactaaagaaacccgaaacccctacattcttagtaaactcgaaaacaaaacagaaacatcctctcagccctacaatctttcaaagccggagagtcgtatgattatgcaccaatttcaatctctcacaggaaaagctgcttttccattagcacttcttaagtgaacatgcagtttcagtacagaaaaaggattgtgtacagcactgtgagttcaatagcttaaaaaaatagtttcaacattatagaaagcaggtacataaacataagaattaaaaggatcctgaacaaagatgtgcttcaggtacataaacaacatcaaggatgaattaaaacagaagagcaactagcagatctttctttatgggattcactaactagcatctacagaaagtttttagccaggaagtttacagccatatactaagatgaaaagttacctggagctcaggtagtgttggagcaaaatttattagaaccagtttactagcttcaaatattccagttcgcaggccgtggctacaatatgaaaagaaaaccctcagccaaacaaattagaatcaagcagaagataacaggaacactctttattgttctcttttggagatagaagggtgaggcaagcgaaaccttgaaaattgaccaagaattgcaggaattgaacccctatataaccctcgcactccaatctgtggaagctttgaaataatttctggaaaagacagcgttgatgcttgcacacgagtctggaaatcaaaatacaatgtcaatgaagtttcgtataaaaaatcaaaactaagccaaagaacggacggagagaatttgcctttattgtatcaactgggtgtagtaaggagcaagaaagtgcacacgagagtcctcctgccaaagcagattttagtacacttccagcaggtatttgcataggcggagcaacagcaacaacagttgcagcttcaaaccagatattcctgtaatgtgaatcataaagttaccatacataaacaataaactcttgaaaaaaaaactaacagaaattcacatgcaaattaagccagtcattgttcacaagttttagataacttcaacattattcaatacctggacaatcacatcagtaatgatgcatcaattgcaatgaagaaaaatgaattttgaacaatctaaaatctatggaataaacgaaatactcagctgactcagaagtcatagaaatcaaagaatacagaattatatcatcatagaaatcaaagaatacagaattatatcaactttccacagattttgacatccaaataagcctggttgtgggtgcaattttgaaataattttctcaaataagtaattaagtagtatatacatcataccgaggatcatcttgtaatcgatcagaaggaagcagaagcataaaatttcgaaaatgcccataagaaatagattcctcagaatctgcatttagaaatcgcatcatagcaacagcattgtcttcattagctggaagtccagcatttttaagtgaagatagtatttcactcttttgcaatgtcccagatttgctcagacagagagaagtatatgcacgaagaatggttgattccttttgttccattaaggatagaaattgtttccagccaaatgattttgaaaatatatgactccttgtacggcgcatgaactcctgcgcatatctacgaggcaattttcttcttctcattgcaatttcaagatcttcaagagttacttggccgtcaccatctctatccagttcttcaaagaatctccttcctgtattcatgaagcacttaaataaatctgactttgtttcagattaacaacacaaaaccataatataccacactatggtataaaagataaagaaaatgaccgcttgatgctcatcctattcctatggtctccacattctttttgacatctctgtatgactaatccacagaatctcgcatatatgactaaaagaacaattagagccccttgagctgttcatactcgaaagcagacaatctcaaatggtctttacaaactgacagtaatttcgtgctcatttttcagtgagaatacagaacagttcttgcacattcaggtaatctagttatgtgcaatatatattttgacctgtacataggttatttcttttgaaggtgtaagcaatcatagaagttcaaatagaaacttcattcataaaattaagaaataagtcaaggttctgtaaaat

SEQ ID NO: 959 - DNA, 3556 bp, Cannabis sativa
atatatatatacaaatgtgcagtagtatagtccctgctttaacttctaaagacttgcccaaatagttttctatgtcagtcttttctacacacatttccctcttctcttattttgatcatgaatcagcctctctctctctatctttctctagtagcttcatgtgatcatcatatggtattttctacattatatatgaatatgttgtaattattcatgtgtctaattttttgataagacagataaataatttatataaatagtacctaacaaaacaacttgttgtgtatgaaaaaacaaacaacatgcttttacatttcattttgtaatttgaacatggtatttttctatgtattatggttcaaaccatttcaacatatatatcaaaacttattaggctgatttatttcttgcttgccctgtttagcaatgaataataattgtaagtcttataataaacattttatacatttataacttcaatgttacttttttcatttaatgaaaatacttttgttgactttcagaattcaaaatcagtactcacattcaaaattggaatataataaagttaagatgagtagtgaatgcataaaatgtgttcataatgccatacttttttttttttttaatttctctttatcctttttcatgttctctcctctacacaaatttagaaaaacaaagcaaattaccccacttgtactattgtttctttttaatccaatcaataatggttttctacctatgttctcatattattacatattgtttggtaaattaagatttttctttttctactaatttgccatcataaatatcaagattggtaatttattaaaaaggtcaatattttaataaattagataagaccagttaatatattggatttactagataagaattgtagagtaaattaacaaactaattaattagtggattttgatgatgggtattattattggacactagtagtatttagtacttctaaacatgtcgttttgtgattaataatcgatactttctaaaaattattatattaaactatataaaatttgatatttagttggaccaataacgatattaacatataaaagagtattaaacactactaatactttttaagaattttcttgatattatatattagctttggatttgaaattagtgaattttgggaagtggagaaaatgatgatgagatactcaagtgactaaaagatgaaattttcttatcatccttgaaaataagattttaagaaaagatataaaacattattattagagattatggtagcaaatgatgtcctataaataattagcgattttttaaatatataataagtgaaggtactacacatgtgcctcttttgcatttctctttgtaaaatctacctaggcttactatcataacatatttggtacattcataaaccattttgttttttcattgtggcataaaaatgtgtgtactttttagaagactttttgtatacttgggtagttggtactacacatacatatatataaatatagtttcatcaaaatcaagaagcacagaatttcatcattgtgaactttcagagcttatttgtaatgaatatataaagttattttttacttatagaaatggggttaaaaagaaaattttaacttcatttggcttgttatccctatcttattaaaatccagacaaaaactatatcctttgcatatgataaaataagagataacagctttaacaagtatatatagcctaggggtacccttctctctctctctctctctatacatatatatatatacatatatgtgtctgtttgtggtggtgtgagaaagagcaaagatataatgtttatgagaaaaaaccaaatacacaatatgaagaagttagaaggtttggccatacaagaggccaactctccttttacactttgttttatggaagatatcctttttcagcctaacatttatattcaactgctttccgcgttttacacataaatacatacaacaaaacatatatatatatacatgtattttataatgaaaaaacaaaatacaaaatacaaaataaatcattaaaataataaactctctaaagatcttcaaaccgcgttgactattattctcttattcacaaccaatacttatcccacctaatcacttctacctatatgtctatatttacagacaccaaaaatactacttggttaccaataatgaaaatataaaaataaaaattaaataaaatttaaaatatatgaaaaattaataaaaaattattaattttttttttatgagaatagtctttcgatttattttagaatgaaataattattttattaaaatagtagaaaagtaattttattagaatgatttctaatattttaatatgcaactaaataaaagaataaaataaagattgtttcctttctatttcattctatttcattatctccaaccaaatattaaaagtaactatataaagtgtaatagtattattagtgtaatttaatattaagtcacttcatagtgatacccagaccggttcttatagtgtgcaagttggggtattgtacagagtcaaaaaaaaaaaaggggtcaatatatttttttttaatgaactcaaattttaaaggggctaacaacttatcatgattggtcatttttatctcaattttcaaagtatattttcaattctattactgtttttaaacttaaaaaaaaatcaattactattatttattattttttttcaaacttttcatatttttttttgttattgtattagaattaacaacaattttaataaaataaaattgtacaatatatttaaaaatattatttataaattatactatttttataaaaattaaaacaaagcttctaaaatatgtaaaacgcgtggtgataccaatcaccttggtggtggtagaaatgctatatacacacaagtatatatacaattatgagtagagtagtattccaactggaaaacataatagaagagcttcaatagtgaattgggaataaacctttgattgttgcattcacattttccattaacacatatatatatattcatgtatatctaaaaagaatcatataatgaatcccttttttttaatggtgaaaaactgcctttttttcataagtagtctcagtgggccacattacaagagtgtaaacaaagtttattttagtgtgccattctatataaacactgttccatatatatataaaaaaaaaatgaccaaaatcatgtagtggaggagaatcttgttctagtcaattttacagagtttttttttatatataatatatattttttttatgtaaaaaaaataaaatgtgccacttgttttaactctttatcagtaaatctgaaacagaataatacacgttgagctaatcataactaaggcatatgaacacatacacacacatgttgtacaccaatgaatcacaaaaaagattaataatttttctaaacaaatgtcaaaaatctcctttataaaaatgaaattggtcagtataggaacttctttatattatta

SEQ ID NO: 960 - DNA, 1100 bp, Cannabis sativa
agagagagagagagagttaaaactgaatcgtattaaatgaggaattagttacaacaatatttgattagctacttatagtagctagattacaaagtaaactaacatattaggacaaataacaactacataactaacatcctaactcaccaatcaataccaagctatatcttgatatcatgtactaagattatttgatcttgcaattttactaattatttctttaatttaattaaaagtgatcacaagtttacctccagctgatacaggacctttgagttatcatcgccttgaagaacaattatctcttgtctaaaatatattcatctattttgctttcctcaaatttctgttttagacttgatgcttcttcttcaaggtataaattctcgatatgtttattcaagttaggtgttgagtgatggcagttgggttagaacaactggaagaaaatacagatgacatatatacataaagcccgttgttctatgtgatccatgagtgccatgtcaggtgcaaatggaatgccctacatggagtacatgtatgctggatttttccctcctgattgtatggattaagactatatggttttatgtattttggtggaacagtggcaccatgttgtggtgtgttttcttcctattttagttccttttatatatcttttgttataaaaaaaacttgttctattacactgtaccggactcagacttgctgggcaaggacagctcaagagcaacaagcccaaagatccagccaagcagcatcatctgtttagaaaacgtttgacctaagagaaaaatgagtaattctgaacaatctttaaaataaacatgggtggcttcagatagaagcttatgtaagccaagcatgtgaaataattatgttatgtgaatttccaataccaacttgggtatacagtgggagctgaaattctgtgggggtagttactgattcttgcataataaaaattagcttttgattaatgtaacttagttttggtcagtctgttgggattttagaaatgtggtagaaaggaatatgatagagccatggggggcctttttcttttctttaattgtaatatataatgtaatcag

SEQ ID NO: 961 - DNA, 3525 bp, Cannabis sativa
  modified_base (351)..(353): a, c, t, g, unknown or other
  modified_base (399)..(402): a, c, t, g, unknown or other
cctaagagaaattctatattaggaataaaatggttctcattctcatacaacttaagtcattctagtgttcattctttgtcagacaactagaaaacttgagaacctccttctatagaattcgaatctcccttctttttcttcataatttcgagcctcgtagtgaaagagtacatgcccacccatagtaagtcaagtactcaaacatagtgtgtaagattgtgaagaatccaacacctgaaggagaatcggggtcagatcttgataatactctacgacataaaggaacaagggttagagatctgagtggaaggagtcatattattcatctgcaatcaatgtaaggtttcttannnttatatgtgtttaaattctattattttagataattcatatttaggnnnntaaacaacatacatggtagtaaactagatcccggtaaaataatccccaacaccctagtcattgaagtacaaattgccaacatgatagtggctcagtcaatgatcgataacgtagcttcctcaaatatttttttcaagtcaacatataaaaagatgggacttcttctaaaagacttagttccttacgctcagctggtgtacgatttctccagacagaacattgctccacttggacatattcgtctcccactcaccgtagaaaagactctaacaaaaaacacgctgatggcctaatttctggtgattgatgtcccttctacatttaatgtcatgataggtcagctaactctatatgactttaaagttgtaacctcagtctaccatttatgtatcaagtttattgaccgggaatggtcttgggtgtctaaaaggagatcaaaagactgcacattaatgctactaccttgccttgaccaagggaaaaaaggaaaatacagccgacaaaggattaaaggtcgagaaaattttaagtaaaaagggtccacctaaggtggggatgaagacatggatcatctctttggggacctaagcacaagcatcgtcttgtataggaattagaagaagtagagatcgatcccactattacgactaagaaagtcaatatttgacaaggtttgttgctcaaaataaaatttactttgataagattttcaagagcaaaccttgacatttttgcctagtcgcatgaagacatggtcaggatatagccccatccgtaatttctcaccccctcaacattgatcttggtttcttttccgtatagcaaaaacgaagactattggacaaagaacacgcacctgtacttaatgatgaagtagatcaagcacgtagaccaagttccattatctggatagaagcacagatcaagtaaagattctcagagatattttccccaatatatctacataattatagtccatttagaatccctatctttttgggattgattttatacgattgagaaaattatgggatttgatttttaagtttccctaatttctcttctattaactcatgatagttgtaatgtacttgccctataagtagtgaggtcatatcactatttctggattcatttttttgcattctgaaagagcaattactttgaaaaaaattacttgtaagctttcttaagattatcaggaaactcacctagccggaccttatgatcttgataattctctaaaagtgatacaactaaaaggggagtaggatataaccactatcagaagtcaaacctctataaatcttgtgtgttcttactgctttattttattattttgatcactcattatcattgctttaaagactcagtattgttagctaaaagggaggtcaacagtatgtgttttccaaagattcatgggggggcttggttttaggcggcttcatgatttaatattgcactaattttaatgaagctcagtcttactcaaaaaggcagtcgtatggttgtttgtttagggatgagtattgatatccttaggaacccttggcttctagttcaagattattcatttgctgtttcggatcaccctagtgtggcaaatcgaaatgtctttagtcttataaaggttggagaaacatcttgggaagaataggttcttaaagagatcttcgtggagcgagatgttaaactcattttaagcatttatttattcccctcaatgtttgatgatatgtgacaatggataggtaaaagatatggtgtttattcggttaagagtgcttatcggcttattcaagagcttaaaggataatcgactcgattttttggaaagcgttgtgggaaatgagagttcctcctaacattaacgatttggtttgaagggtttgcttctagttgtcttcatactcaatgtccaattaggtgtgaaacatgtccctcttccctcgttgttgtgtccaaagtgcttacgagttgctgagtctatctcacattgtcttgtggggtgttctttcccttttgcatgctaaaagatggttggtattttggtagtggagattggggaaaattcttttggaggatggcttcatgacatgttttagaattggaattctgaggtaaagcatagagttgttatgctttgctgggcgttatggtctgtgcgcaatggtaaagcttggaatgataagaataagactgtgaaagaggtatttctttggctaaaggaaattttgatcgatggagatgtgctcaaggtaataaactattagttcatgtttgttctctttacaagacggcgcacttgattgcaccaattggtaatacgatcaaaatcaatgttgatgcagctatctttagcaatctgaataggcatgggtatggttgggtggcacgagactcttctggtcagcttattttggctcagatagcaagtgagatgggtgtggctgaccacgttcttgccgaggctattagggttaaagaggttttgagttggtcatatcgtaaagatatggtgttggagtcggacagtttgatcacgattcaagctgtccgaaatttgatggatttgccttctatttttaggttatgcatctccaagtcaaacaaattctttctagtttgaaaaatgtctttttaatttttatcaaacgctaatcttgttgctcacaatttggctagagtttcgtcgttaaatgctggttgcacttatttggctactataattctgagtagtttacgtgatgtactcttaatgatttgaaacaatgaaatttgcatacttctattcaatacaagtatatatgagaaatgctaaaagacactagtagtatctagcagctgtctatgtgtcaatatctttactggtccaattaattattgggtgttatataatctatatatataaaggagaagtatgaagcggtgacgtggcgctctaaaatctctctaattaatcttaattattctctccttaattctctcattttattaattttttattagtttcataaattaatatttattatataaatcatatttatatgtaatcatataaaaaaactaaagttgtcgtatattagggtgttttttaaaaaaaatgtatattagattttt

SEQ ID NO: 962 - DNA, 4695 bp, Cannabis sativa
acctcgccaatgctctcctccgactactaccttgcttgattccatcaatttcaatcagtagaagaagaattcgtagattcagatgaggactatcgtttcgcggttgatccattcaagatcatcatttcccaggctcaagtaagctctgtagtttctgaaaatctctttttttttggagctatttttaagttttgatgagtgtttggtgttgtgctgattgcgtgatcgtgtatgtttggttgccgagaaagtggtaattgagttagaaagaatgttgaaagtaagtaattagcaatgcatgcgaaatttagtgaagcgaagaaggaaatcaaatgtgggttgtatgtttttgctcatttgatcatgtatgtttggttgctgagaaagtggtaattaagtgggaaaagatgaaagaatcttagttagtttgttaatttatgtttgatagttttatgtgaaattttgtaaagtgaaaaaggaaatcaaatgtgggttgttgttctctcgtgttaaatttatgttttttggctcatttgactgtgttattttgaagttctaacaccctaaccacacaaaattaatacatgtatatgagttgagactctggctaaacctaaaaaatgttagaagatacacttacattagcttttatttaaatgagatattgctatctagatgtggaacctaaatcattgatgttttatctctctgaattagattttcaaactggggacttttggtgtatagccattatttcgttaataatgacattttctggtgtttcaaaaacatgtcatcatggttctcctgccctttttccaagactcttgttgttttattttgataaattgggtctgttaagcttgttgtagtgtatattttatgttaacctgagggagcatgttcactgactcactcttgtgtcaatggaatttttatatgcttcatagtacattggttgggtccaacagtgggagatatctctcaacagactctaataaggttgatgagccctttaaggtcgaggaagcagagactgtcaatgttcctcctcctcctacagagaaggtaatttattattattatttattgtgggcagtactcgaagttggttgctcatattttggtttggtttaatggattcctttgcttttatgcgttttcatttgtcatttcgcttcagttacttgtattgggtggaaatggattcgttggctcacatgtttgtaaagaagctctagatcgtggtttgtcggtgtcaagcctgagcaggtatgcttctttaccatgatcaattttatcctgtataactttttgggttttttgggagtagaatgtcaaaataagtagtcaattgtttagtttataaatatttgaaatagaatcatttggcttttttctatgaatattgaaatttatctaatgtagtcaatgatgtgcattctgtcgattttgggttgagatatgaccaagataatttagaacaacaaaatgaggtaatatgctaataatgtagatgaattaaatagcataatatgctgatatgctttaaaaaaatttatattatggatctactctcataatataaacttttctcttgacgaacaatgatagcttatcaggtcagataagattatacttctttccaataactggagtttcaagtgagcacacgggtatttaggatatgcatatcatattgtcatgtttttggatcaaactttagtcccttggtttcatcgtgtaacatctataaacttttcactttgtgcagctacaatatcttactactcctttcctttcctctttgtccagatctggaagatcctctatacaggagtcatgggctagcaatgtgtcttggcatcaaggtttggttcttatttgaaatgtttctatcaacaaacttttccgtttgacgttacgatggctctcaaccatgttgaaaattgtcaggaaaccttctatcgcctggttcatgggacgaagctttaagcggggtcactgctgtggtattgaatcttttttactcattgaaatgtgtttgaatgccctaagcaagggaatattagagcagatgatcttactatgtgcatgaacataacagtgaacctatattatactttcaaactattacattgttgctcatgctttcgcttggatgagattattactatatggattgttcatcatttttctactcattgtatgcataatttgaggatataccatgtagcaaaagaaaaatcgtgcttatcagatactcatgctgacattattactataattttctctgttaattaaagttttattttctagatctcctgcgttggtggttttggctccaattcatacatgtataagattaacgggacagcaaacatcaatgctattagagctgcttcggaaaaaggtataacacttgtctcaatgtttcaagtgtaatctgcactagtttggttaactctgaaaggatttctctaaactctaaacatgaagcagaaagtgtgtcgaaaaaggatgagaaataaaccggtacgatttcagtgctcggtcattctgaacctgggtggaatttggggttttagctgtagatattttagtattaatgggttagggtaaattggtccaactaaatactgggatgagttggtgatgcagagctaagtgttagattattctatgctatagtttctagtgttcattaacttaagatttaaccagcattaacaaatacagacttttgtcactttgaatttcctttcttctctgattctctctcaatgcatctacttctctcattttctatattagttggccttaagttttgaatttaattttcaaatctgggtctccttcctgcaggtgtaaaaagatttgtctacatctctgctgctgactttggctttattaattatttattgcaaggatattatgagggaaaggtaccatcttaatcatttgttttgaccagttctgtttcttcatgcatggtatataacaagatgagtttgctgttaacactttcactttcagttctgtttcacttttgttgttaacatatgtatgtatgtatgtatatacatgtatcttcttacctgttctctgtgattgtaatatgtactattgatttacagggttttttgtgttgagtgttgcatttagctaataatattcttaatgacctattcttgtcgattcgattataagagaactggaagtatttatttgtgtcgtattttattgtagaaagctgctgaagcggagctactagttaaatacccttatgggggtgagtttttcttaatcttcttctcagtataacttcaattatttcaacttatagctatgaattatttagattacaattgacaattatacagcagtttattatgacttgcatgcgtctgtttcaggagtggttttgaggcccggattcatttatggaactcgccaggttggaagcatgaaattacctttgggcgttatcggttcaccactagagatggtaaaatctcttattttttcttgtgttctatatgtggtgaacaatgtaaaccgaaaattagtggtatagaataactgttccttattggcatgtgtaggttttccaacgaacaagacctcttacccaactgccgctcgtggggccgctcttcactcctccggtaaacgtgacttcagtggcgaaggttgctgttagagccgctactgataccgtcttccctccgggaatcgttgacgtgaacggaatacaacgttatagccaaaagaagttttagttccttctcttggttttcgttttaagttgttttaaacacttaaaatgataatctttctttggttccctatacctgtgaaatgagattttgcatggggtcatcttgcctcattgatccaataataatttaactaaagaaatatatttattattattattattaattattattgaataaattactaagttatctccaaagattttgcattgtcaaaaagggaattgttatggaatagtaaaatattgggcagttataaattggagttgtaatcctactcaaaaaaaggtctctatcttcaatttgtaatgagtaagagtattcaaagtatgattctaaatattaatatgatataagatcttaaatatcatgttttttaagtgaaaaattattcattctgaaaagggaagtacaaaatgaaatgttttggttttaccctcaaaggatctttcccttttcaatttctcattttaacctttgtttagaattccgttttcgttattagacattctttaaagctgaacaagttgtaggtatggggtggtcaaaccaaaagttgcagaagttattgggcttaaagaggcaatggatttgagactcgaactcagaattactaatacatatgtacctttttatgtctatttgagttagcctcaagtggttaaacagaaacattaagttgaggccgctacaaaagatggttgtctacttgtcctcttattttggtgtgttggcagaggattgtaatttgttatgataaattctatttaatatatatatatatttttttttgttaagccatttcttaatgttaatgtagttgcttatagattagttcattttatttttgattgtatatttcaagagaatgatgttcttattgatgttcaatatgttttgagatctgagttaattt

SEQ ID NO: 963 - DNA, 4191 bp, Cannabis sativa
aaaaatgagcacaatgtaaatagagggagatatttacaatgatggtcatagttcaagaagaaaaattcctatttattttctaattagacgtgtgggaaagaaagactagaaaacacaaagagagaagcatgaaagtaaataactgaatagttttttatttttacattatttcataattgatgttattttcaatcccaaggcattttctttttgataaacaatggcagcaaaaactccaggaatctctccttcactctgtcaacaaagttaaaataggccattctccaagtcctcttcacaatcaaactacccaaaacaacccaaaatcccacaacgaaacccataacagtgcatatcacaaaacccattttttcaaacacatgaccaagcccaccatctttttcttcactatcttcttctggagtttgaggatgttggtcactctcatcacattttcttggcaaagggtcaccacaaaggcttggatttccttcatacatggatgcatcattaagggtctgaaactggttctttgttggaatattccctgacaagttattgtatgaaaggttcaaatggttcagaaatgttaatgaagacatgctctgtggtattgggcctgaaagattgttcattgaaagatctaaagtttcaagcttttcacaatctccaatcatggatggtatgtttcctgtcaaatgattcatggataggtttaaagtgcctaatagtattaatcttgttaactccataggtatttctcctgataagttattatcagagagatctaaactgttgaccaggtatagaatgaagtcatattctagcttttttccttttgctactatttgcaattttccttggtatgttatgtcattttctgtcagttcagacttcaatccattcaaatttccaatgcatttgggaatatggccagaaatgttgttgtgtgaaaagtccaatatatgaagagttgaaagggtacacagttgtgttgggatgattccagtgaaggagttggacctcaggcttaaaatcaacaaagacctcatatatttttctcctagccaagttggaatttctccaaaaaacttattctcacttagatcaagactaattaactcactgcaatttttcaaggaagatggaagttcacctgagaagttgttctttgacaataccaaaaatctgatattgttaaggaaacctattgaacttggtatggtaccagaaagactgttatttgacacatccactatgtacaagaatgataagtcattccagaaatcaggaattttaccagagagcttattatttgagatcaccaaggttgtcaatcctgttatcttactgatggacaagggaatggttcctgtgagagagtttatggagatgtctaaatctgagagaaaaggcatcacttcacctatatttggaggaattgggccagaaaaatgattatccctcaagtacaacatggtaatattggatgaccataagggtaggggaccctcataaaggtttgagctcaagtcaacagtggaaggattattaaatcttagtgtgtttgggaccctaccacttagttgattataagcaacatcaaatttgtctagttgcaaattgagttgccaaaaccaatttggaatgacccctgaaatcctagcattattgagtaccactgtggccaacttgttttgacttttaagccagggtggaaagttaggacccaattgacaagatctaatttcaatatatgtgagttgaaatggaggtatccaatttgagctgatgttgaagatcaaagtaacatttggggaatctttataaattgttagctcattcaagcttgaaagatttgccaaatgggcttcagttatgacaccttcaaaattgttgtcctttatctctaacacaaccagtgttgaaagttggcctagacttattggaatgtttccactcaattgattatttgacaggtaaatttccttcacacatgataagtttccaatggatgctggaattgaaccttgaaatgagttatgccatagtagaatggactttaaacttttgatgaatcctaaagattctggtagatagcctgtgagtgcattgaatcctaaatctaatgcctctaagctattgttggagcatctagacaaatcattgatgaaataacttatttccccaataaatttgtttccagaaagtttcaaagtttgcaaattacacaacttccccaagtttcttgacaattgaccttctaggctattctcatgcaagtgaagtgtatgtagtgaagttatattagtaattgcatcaggaagtactcctttgaaattgttggagtttaaatctagatagattaaactattgagactgaatagccaagttgggatttttgtgttgaagacattatttgacagatcaatgactgaaagagaagtgaaattgacaaaaggaagagttggaggcatgttagaaatgctacaactggacaagtgtaactcaagaagtgaagggatcatattaacagcttgaagccaatatgtattagccttttccaagttccagccatttagattaaggtactttagagaagaaagattagaaatccaatggagttcactttcatttgactgtaagtaaacattgttgagatcaagataactcaatctcgagagatttccaaggcttggtggaatggctcccccaaagtttgcaccagaaagattcagatactcaagtttcactagtgagccaaggaagtgtggaatttggacacctccaaaatcattcatgctcaaatctaagtaacttaaatctttcaaaataagaagagaagggttgatctcaccgcctattggatactcgactgcttctccatcaccctgcaaatccatgttgtttgaattcatgtagcgaagatcgagctggaccactcgtcttgttatattgttgcagcctacacctctccatttgcagcaatcttctccaacccatgatgagagttggtttgaaggatcttttaggccttgtttgaattcgaggagagctttcctctccattttcaagcaaccaacaacaccatgatcacgatcgccatcaagattggcaaggctaaaactcagctgaatggattcaagtgtgagaattgtaagcactagatggaatttaatagcaacagtaaaaatgttgtgttccattgtgagagagctttggtttttctatcaaattttatgttgttccattgtgtatgttaatcttctccatttataaccttataggattggaaaatgaatccctccatgacttgacatctccatctctaaatgcgtttttgaagtggtgacaattgagatggagacgcattatatgtgtgacttggccatatgtgtgttactcttctacaagatgttgatgttgaagtatttaaacattcactattattttaatttagtcaaaataaataaaatattcaatatgagtttcttttaaattttccactactgatttcttatgttcaaatatagtcaagtgtggttttcccaccaacctatttgtgttatttttctctatttatgagggaacatcttatttttctctaatatatgtcattttaactatccgcactaactttgccaatagaattagtcaaaataagagcactcactcacaatcgtgtaaattagcgagtaataccataacttaaacaaagtatataaacactaattgaactggattagacatcctagataactaatccaactaattctatttatataagattatttatctcatcaaggatgagataatcacgtacacgtaattttttttttttaattttgaatttgttaatatattttaaatttaataataatttatataaaaaaattattacaaatttatttataattttttttattaaacttattcatatttagtaaaaatatataattttaaattatcatacataaattttcaaaatttaaaataatattaattaaacttacattgattacttttctatttacattatttagattaggaggggaaaaaaacgctcaacaaaattttttaacaacccaacaaaattaagaaaatacgatttgaatgtagactaaaaaaattctatttgtttaaaaactaataataaatgccaatagtcaagggagactccaacctcaacct

SEQ ID NO: 964 - DNA, 1149 bp, Cannabis sativa
tgaatataattattaattaactgcaacattgagaaaaaagaagtatgtggtgccttatttactttttttttttgtctaagtctgttttctaattttgttacaggtattattgaaattatttacttatagtatatgctggtcagattctttatcgcaaatcctcttgcgtatattttattagaaagcctcaaaatctctgcatcaaatgtgctcattactggcaatgagtgatctgtaagttcttaataatgttatgttcatgattattaatatggatcacatgtattaatagtagctaaaaaaatgataccactgtatctagcacacaaatatatgattaatgatgataaacttttatttgaaatctcaatcaaattagaatataatgtgatcgcatagatatatatttaaaaatttattaatgcttttgtttaatactaataaattaatgttttatgtcgtattacagtacacaagcattcatggttgaatcaaaagcaccaaagaagatgaagatgacgaagaaaaagacctatggagtattattttgaaatgtgtagagctgtggagttaaaacttataagattatggaagttagatgttgtatttaaattattaaaacttagatactgtattattattgtaatgtaaattattaaaaattagatggtgtaatatgacaatttttataataaatttgatattcaatatcgtgtatatttgtgttatctctgaattctcttataatttctttaataaataatgaattttttcttaaataaataaataatctaccaataaataaataaataaatataaattaaaaaaaatttagtgaccatattagatttttatttttgaaaacattataaaatacaatagtctatagtgacacttattaaccgaatgttacttttaagaagtcatattatacagcattttttgtcaaagtgttgcaatagggtaacatataacaattaaatagtaatataagccaacactttttaaagtgttgctatagatatatatatttagcaacactctaggaggcaacatttatataagtgttgccttataatttttttaagttaaaaaaaagtgttactaaatgtgttatttgtagtagtggggtgagaacggtaaaattat

SEQ ID NO: 965 - DNA, 2234 bp, Cannabis sativa
tcaatattactcaaatggtcaaagcttcaacatatagcattacttctagggctgcctttggcaagaaaagtagtgatcatgatgagttcatattgattgtggaggaagctctcaaggtagctggaggctttagatttggagaggtctttccttctttgagttttcttgattggattactagagttaagtatgagagctttaaattaaggtcttcaaggataatggaagatattatcaaagagcatagaaaagagaatgaaaatattatgtcaagagagacaaatggaaagaaggaagacttggttgatgttcttctaaagtttcatgataagaagaatggtgatgatgttgggttcacattaacaattgacaatatcaaagctgtaatttgggtaagtgcctcaaatttaaattcattttctgtatcatcataatctaattaaacttcatgctatttttgtaaaggttctcaatacaatttttgatcatttttttttcttcataaagttattaattgtaccttttattttgtaaaataataaatttgactttagattttttaaaatggtacaaaaagtaccctagaaataatttttgatattttttttaatataaccaacgtgaagacaattttttgcacgaacagatacagaaaatataccaaattttagcataacaactctaaattgagttattatgaacttttattttgaaaaaacatcagttcagggtactaatttgtactattttgaaaaatacagagttcaatttttcatttaacgaaatagatagtctaatcaataatttttacaaaatataaagtcaaaaatagtatttactcgtaatatttatatatatatatatatataagttcatataagtttgtaaataatggtgaattcatttatcatgtcaggatatttttatagctggaagtgagacatcagctttaactgtagattgggctatggtagaaatgatgagaaatcaaagagtgatgaaaaaggctcaagatgaggttagagaagtctttggcagaaatgggtcaacagatgaatcctcaatcaatgagatgaaatacttaaaatcacttgttaaagaaactctaaggttacaccctccagctcctttattacttccaagagaaagtagagaaaagtgcaagatcaatggttatgagatacctaagaaaactagaatgatgataaatatttgggcaatcggaagagattctaaatattggattgaacctgagagttttataccagaaagatttgttggtagctctattgatttcaagggtagcaatttcgagtttattccatttggtgctggaaggagaatatgtccaggcatgtcatttggtatcaccaatgttgagctttcccttgctttgttactataccattttgattggaaactgcctaatggaatgaaacctaaagatttagacatgactgagttttctgccattactttaagaagaaaagctgatttgtatttgattcctactaattatgtatgatatttcacacaaaaaaatcacacatgatgaagatttgtatttgattaatgtaacttatgaatttgtagtcttttgtaataatttactgatcacatatatgtgttagattatgtttagctttctgttagtaatttttacattctttgtgtggcgtttcctcccaactaggggtacaattttttacataccaattaattaagtagtatttttacaaaattaatactaaaatatggaaatacattcatatatatatatatatatatttcattacaaatactcttatagttgattaaatatcaaacttatcaaaattaattattaagaaaataagccttattgcaagattattaaaaaaaagaccaattttaatagtaatccttgctcttgagagtacttttttttgtttcttgtaattttctattttctaaaagagatcatactttctttttcttgagataatgaacttgaggggttttatttttattttttatttattttatatgacatctagtttgtaaccaaatgattcataaacagtcttttattgttgtggaatggaggatacggagatcaaaagagtcgtggaagcttcgcgcgcggtttactcaaagtgagatgccatttaaatatttgggtatctcaagttgtgttagattattttcaacagcgaaatgtgatgtgttagtattagtaaacaaagagagaaaac

(The sequence listing continues in the following parts.)
